United States Patent Application Publication US 2002/0061569 A1 - sequence listing, part 2

SEQ ID NO: 4580 - DNA, 7104 bp, Staphylococcus aureus
atgaatttattcagacaacaaaaatttagtatcagaaaatttaatgtcggtattttttcagctttaattgccactgttacttttatatctactaacccgacaacagcgtctgcagcagagcaaaatcagcctgcacaaaatcaaccagcacaaccagctgatgccaatacacagcctaacgcaaatgctggtgctcaagctaatcctacagcacagccagctacacctgccaaccaaggacaaccagcagcacaaccagcaaaccaaggtggacaggctaatccagcaggaggagcagcacaaccaaatacacaaccagctggacaaggtaatcaagctgatccgaataacgctgcacaagcacaacctggaaatcaagcagcaccggcaaaccaagcaggtcaaggaaataaccaagcaacacctaataataatgcaacaccggcaaatcaaacacagccagcgaatgctccagcagcagcgcaaccagcagcaaacgcacaaactcaagatccaaatgctagcaatactggtgaaggcagtattaatacgacattaacgtttgatgatcctgccatatcaacagatgagaatagacaggatccaactgtaactgttacagataaagtaaacggttattcattaattaacaacggtaagattggtttcgttaactcagaattaagacgaagcgatatgtttgataagaataaccctcaaaactatcaagctaggggaaatgtagctgcattaggtcgtgtgaatgcaaatgattctacagatcatggtaactttaacggtatttcaaaaactgttaatgtaaaaccagattcagaattaattatcaactttactactatgcaaacgaatagtaagcaaggtgcaacaaatttagttattaaagatgctaagaaaaatactgaattagcaactgtaaatgtagctaagactggtactgcacacttatttaaagtaccaacagatgctgatcgtttagatttacaatttattcctgacaatacagcagttgctgatgcttcaagaattacaacaaataaagatggttataaatactattcattcattgataatgtaggtctattctcaggatcacatttatatgtcaaaaatagagatttagcaccgaaagcaacaaataataaagaatttacaattaatactgaaatcggtaacaatggtaactttggtgcttcattaaaagcagatcaatttaaatatgaagtaacattaccacaaggtgtaacttatgttaataattcattaactacaacattccctaatggtaatgaagacagtacagtattgaaaaatatgactgttaattatgatcaaaatgcaaataaagttacatttacaagccaaggtgtgacaacggcacgtggtacacacactaaagaagttttattcccagataaatctttaaaattatcatataaagttaatgttgcgaatatcgatacacctaaaaatattgattttaatgaaaaattaacatatcgtactgcttcagatattgtaattaataatgcgcaaccagaagttacactaactgcagatccattttcagtagcagttgaaatgaacaaagatgcgttgcaacaacaagtaaactcacaagttgataatagtcattacacaacagcatcaattgcagaatacaataaacttaaacaacaagcagacaatattttaaatgaagatgcgaatcatgttgaaactgcaaatcgtgcatctcaagcggctattgatggtttagtaactaaattacaagctgcattaattgataatcaagcagcaattgctgaattagatgctaaagctcaagaaaaggttacagcagcacaacaaagtaaaaaagttacgcaagatgaagttgcagcgcttgtgactaaaattaacaatgataaaaataatgcaatcgcagaaattaataaacaaacaacagcacaaggtgttacaactgaaaaagataacggtatcgcagtgttagatcaagatgtgattacaccaacagttaaacctcaagcgaaacaagatattatccaagcagttacaactcgtaaacaacaaattaaaaagtcaaatgcatcattacaagatgaaaaagatgtagcaaatgataaaattggtaaaattgaaacaaaggcaattaaagatattgatgcagcaacaacaaatgcacaagtagaagccattaaaacaaaagcgatcaatgatattaatcaaactgcacctgctacaacagctaaagcagcagctcttgaagaatttgacgaagttgttcaagcacaaattgatcaagcacctttaaatcctgatacaacaaatgaagaagtagcggaagctattgaacgtattaatgcagctaaagtttctggtgttaaagcaattgaagcgacaacgactgcacaagatttagaaagagttaaaaacgaagaaatctcaaaaattgaaaatattactgactctactcaaacaaaaatggatgcctataatgaagttaaacaagcagcaacagctagaaaaactcaaaatgctacagtttcaaatgcaactaatgaagaagtagcagaagctgatgcagcagtagaagcagctcaaaagcaaggtttacatgacatccaagttgttaaatcaaaacaggaagttgctgatacaaaatcaaaagtattagataaaatcaatgcaattcaaacacaagcaaaagttaaacctgcagctgatacggaagtagaaaacgcatataatacacgtaaacaagaaattcaaaatagcaatgcttcaactacagaagaaaaacaagctgcatatacagaattagatactaaaaagcaagaagcaagaacaaatcttgatgctgcaaatacaaacagtgatgtaacaacagctaaagacaatggtattgctgcaattaatcaagtacaagcggcaacaactaagaaatcggatgctaaagcggaaatcgctcaaaaagcaagtgaacgtaaaactgcaattgaagcaatgaatgattcgactactgaagaacaacaagctgcaaaagataaagttgatcaagcagtagttactgcaaacgctgatatagataatgctgcagcaaatactgatgtagataatgcaaaaactactaatgaagctacaatcgcagccattacacctgatgcaaatgttaaaccaacagcgaaacaagcaattgctgataaagtacaagcgcaagaaacagcaattgatgctaataacggtgcaacaacagaagaaaaagcagctgcgaaacaacaagttcaaactgaaaaaacaacagctgatacagcaattgatggtgcacatacaaatgcagaagttgaagcggctaaaaatgcagaaattgctaaaattgaagcaattcagccagcaacaacaactaaagataatgcgaaacaagcaattgctacgaaagcgaatgaacgtaaaacagcaatcgctcaaacgcaagacattactgctgaagaaattgcagcggcaaatgcgaatgtagataatgctgtgacacaagcaaataacaacattgaagctgctaatagtcaaaatgatgtagaccaagcgaaaacaactggtgaagctagtattgatcaagtaacaccaacagttaataaaaaagcaacagcagttacagacgcgaaaaataatattacagctgcaactgatgataatggtgtagatacagcgaaagatgcaggtaaaaattcgattcaaagtacacaaccagcaacagcggttaaatcaaatgctaaaaatgatgttgatcaagctgtgacaactcaaaatcaagcaattgataatacaactggtgctacaactgaagaaaaaaatgcagcaaaagatttagttttaaaagctaaagaaaaagcgtatcaagatatcttaaatgcacaaacaactaacgatgttacgcaaattaaagatcaagcagttgctgatgttcaaggtattactgcagatacaacaattaaagatgttgcgaaagatgaattagcaacaaaagcaagggaacaaaaagcacttattgcacaaactgcagatgcgactactgaagaaaaagaacaagcaaatcaacaagtagatgcagaattaacgcaaggtaatcaaaatattgaaaatgcacagtcaatcgatgatgtaaacactgcaaaagataatgcaattcaagcaattgacccaattcaagcatcaacagatgttaaaacgaatgcaagagcggaattgctaactgaaatgcaaaataaaataactgaaatacttaataataatgagactactaatgaagaaaaaggtaacgatattggaccagttagagctgcatatgaagaaggtttaaataatattaatgcagcaactactacaggtgatgtaactactgctaaagatacagcagtacaaaaagttcaacaacttcatgcaaatcctgttaagaagccagcaggtaaaactgctttagatcaagctgcagctgataagaaaacacaaatagaacaaacaccaaatgcgtcacaacaagaaattaacgatgcaaaacaagaagttgatactgaattaaatcaagcgaaaacaaatattgaccaatcttcaacagatgaatatgttgataatgcagttaaagaaggaaaagctaaaattaatgcagttaaaacatttagtgagtacaaaaaagatgctttagctaagattgaagctgcatataatgctaaagtaaccgaagcggataactctaacgcatcgacttcaagtgaaattgcagaagcgaaacaaaaacttgctgaattgaaacaaacggcggatcaaaatgtcaatcaagctacttctaaagatgacattgaagttcaaattcataatgacttagataatattaacgattacacaattccaacaggtaaaaaagaatcagctacaacagatttatatgcctatgcagatcagaagaaaaataatatttcagctgacactaatgcaacacaagatgaaaagcaacaagcaattaagcaagttgaccaaaatgttcaaactgcattagaaagcattaataatggtgtggataatggtgacgttgatgatgcattaacacaaggtaaagcagcaattgatgctattcaagtagatgctactgttaaacctaaagcgaaccaagtgattgatgctaaagcagaggaaacgaaagaatctattgatcaaagtgaccagttaactgctgaagaaaaaactgaagcattagcaatgattaaacaaattacagatcaagctaaacaaggtattactgatgcaacaacaactgctgaagttgaaaaagcgaaagctcaaggacttgaggcatttgataacattcaaattgactcaacagaaaaacaaaaagctatcgaagaattagaaactgcactagaccagattgaagcaggtgtaaatgtcgacgctgatgctacaactgaagaaaaagaagcgtttacgaatgctttagaagacattttatcaaaagcaactgaagatatttctgatcaaactacaaatgcagaaatcgctactgtcaaaaatagtgcgcttgaacaacttaaagcacaacgtattaatccagtagttaagaaaaatgctttggaagcaattagagaagtggttaacaagcaaatagaaataattaaaaatgcagatgcagatgcatcggcgaaagaaattgcacgtacagatttaggtagatattttgacagatttgctgataaattagataaaacacaaacaaatacagaagttgctgaattacaaaatgtaacgatacctgcaattgaagcgattgtgcctcagaatgatccaaatgctaatgatactaatagtggttcagataataatgatgcaacagcaaattcaaatgctaatgcaacaccagaaaatactggacaacctaatgtaactgagtcaacagataatgccaatgcagatacgtcttcaacaacgacaaataatcagaatgatgcggcaacaggtgaaacaacagcaacatcagcaaacagttcagcaactgatgatgcaaatgataaaccgcaagctaataacaattctagtgcagatacatcaacaaacagtccgacaatggataatgatgtaactagcaaaccagaagtagaatcaactaataacggcacaactgataaacctgcaacagaagcagataatgcaacgccagcagaaagcgcaacaaataacaatagtacaactacagcaacaaacgagaatgcaccaacagaatcaacagcaacggctccaacaactgcgagcacaggtgcagaatcatctgctgatagcaaagataatgcatctgtaaatgattcaaaacaaaatgctgaagtaaataatagtgctgaatctcaatcaactaatggcaaggttgcacaaccaaaatctgaaaataaagctaaggcagaaaaagatggtagagattcaacaaatcaaagtatggttgaatcaacaactgaaacattgccttcagcagacataacagaaccaaaagtatcttctaatacatcaaaagataaagaagaaagtacgacaagtcaaacagatgctgagcaacacaattctgatacaaacgttgcatctaacgaagcagataaatctgaaggcaacgttgatactgatgtatcgaataaaccatcaacatctaaaccgtcagaagcaaaagataaagcgacttcgactgaggatagtcaaaaagctgacatggcaacagcagatacaaaagataatcaagcatcaattggtgcaactgcagatgtaaacaataaagctacgcaaaacgacggtgccaatgcatctccagctacagtttcaaaaggaagcaatagtgctaatcaagatatgcttaatgtaactaagactaaagaaaacaaagcaaatgcaaaatcagcccaacaaggaaaagttaataagcctaaacaacaagctaaaactttaccagatactggtatgtcacataatgacgatttaccatatgctgaattagctctaggtgcaggtatggcattcttaattagaagattcactaagaaagaccaacaaactgaagaa

SEQ ID NO: 4581 - DNA, 1104 bp, Staphylococcus aureus
atgaaagcagttcactttggtgctggtaacataggtcgtggtttcattggttatattcttgcagacaacaatgttaaagtaacatttgcagatgtcaatgaagaaatcattaatgctttagctcatgatcatcaatacgatgttattttagctgatgagtctaaaacaacgacgcgcgtgaataatgttgatgcaattaattcaatgcaaccttctgaagcgttgaaacaagcaattctagaagctgatattattacaacagctgttggtgttaacatactacctattattgctaaatcttttgcgcctttcttaaaagaaaaaacaaaccatgttaatattgttgcttgtgagaatgctattatggcaactgatacattgaaaaaagcggtacttgatattactggccctcttggtcataatattcattttgctaactcagcagttgatagaattgtgccattacaaaagaatgaaaatatattagacgttatggttgagccattttacgaatgggttgttgaaaaagatgcatggtatggtccagaactaaatcatattaaatatgttgatgatttaacaccatatattgagcgtaaattattaactgtgaatacaggacatgcatatttagcgtatgctggtaaatttgcagataaagctaccgtattagacgctgtaaaagatagttcaattgaagctggcttacgccgtgttttagctgaaacaagtcaatatattactaatgaatttgattttactgaagcggaacaagctggttatgttgaaaaaataatagaccgtttcaacaattcttatttatctgatgaagtaacacgagtcggacgaggtacgttacgtaaaattggccctaaagatagaattataaaaccattaaaatatctttataataaagatttagaacgcactggtttattaaatacagctgcattgttattgaagtatgatgatacagcagaccaagaaactgttgagaaaaataattacattaaagaacacggtttaaaagcgttcttaagcgaatatgctaaagttgacgatggcttagccgatgaaataattgaagcttacaattcactttca

SEQ ID NO: 4582 - DNA, 432 bp, Staphylococcus aureus
atgagcgaattatttagtaatgacaatatctttttaaatgtaaatgttaacagccaaaatgaagcaattgaaaaagcaggtaaagccttagttgatagtggtgctgtaacagatgcttatattcaagcaatgaaagatcgtgagcaagtcgtatcaacatttatgggaaatggcttagcaattcctcatggcacagatgaagctaaaacaaatgtgattcactcaggtttaacattattacaaatccctgaaggcgttgactgggatggcgaagtagttaaagttgtcgtgggaatcgctggtaaagatggcgaacatttagacttgttatctaaaattgcaattacatttagcgaagaagaaaatgtggatcgtatcgttcaagcaaaatctgcagaagaaattaaacaagtattcgaggaggcagatgca

SEQ ID NO: 4583 - DNA, 1803 bp, Staphylococcus aureus
atgtgtggaattgttggttatattggctatgataatgccaaagaattattattaaaaggtttagaaaaattagaatacagaggttatgactctgcaggtatcgcagtagtaaatgatgataatacaactgtatttaaagaaaaaggtcgtattgcagaattacgtaaagttgctgatagtagcgattttgatggacctgttggaatcggtcacacacgttgggcaacacacggtgtaccgaatcatgaaaactctcatccacatcaatcatcaaatggccgttttactctagttcataacggtgttattgaaaactatgaagagttaaaaggtgaatacttacaaggtgtatcattcatttcagaaacagatacagaagttatcgttcaattagttgaatacttttcaaatcaaggactttcaactgaagaagcatttacaaaagttgtgtcattattacatggttcatatgcattaggtttattagatgctgaagacaaagacacaatctatgttgctaaaaataaatcaccattattattaggtgttggtgaaggtttcaatgttatcgcatcagacgcacttgcaatgttacaagtgacaagcgaatataaagaaatccatgaccatgaaatcgttattgttaaaaaagatgaagttattattaaagatgcagatggaaacgttgttgaacgtgattcatatattgctgaaattgatgcatcagatgctgaaaaaggtgtttatgcacactacatgttaaaagaaattcatgaacaaccagcagtaatgcgtcgtattattcaagaatatcaggatgcagaaggtaacttgaaaattgatcaagacatcatcaatgatgttaaagaagcagaccgcatttacgttattgcagcaggtacaagctaccatgcaggtttagtaggtaaagaatttttagaaaaatgggctggcgtaccaactgaagtacacgttgcatcagagtttgtctacaacatgccattattatctgaaaaaccattgttcgtttatatttctcaatcaggtgaaactgcagatagccgcgccgtattagttgagactaataaattaggtcataaatcattaacaatcactaatgttgcaggttcaactttatcacgtgaagcagaccacacattgttattacacgcgggtcctgaaatcgcagttgcatctacaaaagcatatactgcacaaattgcagtattatcaatcttgtctcaaatcgttgcaaaagagcacggtcgtgaagcagatattgatttattgagagaattagcaaaagtaacaacagcaattgaagcgattgttgacgatgcaccaatcatggaacaaattgctacagatttcttagaaacaacacgcaatgcattctttatcggacgtactattgactataacgtaagtttagaaggtgcgttaaaacttaaagaaatctcttacattcaagctgaaggttttgcaggtggcgaacttaaacacggtacaattgccttaatcgaagaaggtacaccagttgtaggtttagcaacacaagagaaagttaatttatcaattcgtggtaatgttaaagaggtagtagcacgtggagcacacccatgtattatttctatggagggtcttgaaaaagaaggcgacacttatgtcattcctcatgtacatgaattattaacgccattagtatcagttgttacattacaattaatttcatactatgcagcgttacacagagatttagatgttgataaaccacgtaaccttgctaaatcagttactgtggaa

SEQ ID NO: 4584 - DNA, 6258 bp, Staphylococcus aureus
ggtattgctggaactaataatggtattactgttacagctggtactttcaatcctgctgatacaattcaagttgttgcaacacaaggtagtggtgaaacaatcagtgatgagcaacgtagtgatgatttcacagttgtcgcaccacaaccgaaccatgcgaatactaagatatggcaaaatggtcatattgatatcacgcctaataatccatcagggcatttaattaatccaactcaagcaatggatattgcttatactgaaaaaatgggtaatggtgcagaacatagtaagacaattaatgttgttcgtggtcaaaataaccaatggacaatcgccaataaacctgactatgtaacgttagatgcacatacaggtaaagtgacgttcaatgccaatactgtcaagccgaattcagcaattaccattacaccgaaagcaggtacaggtcactcagcaagtagtaatccaagtacattaactgcaccggcaactcatactgtcaacacaactgaaattgtaaaagattatggttctaatgtaacagcagctgaaattaacaatgcagttcaagttgctaataaacgtactgcaacgattaaaaatggcacagcaatgcctactaatttagctggtggtagcacaacgacgattcctgtgacagtaacttacaatgatggcagtactgaagaagtacaagagtctattttcacaaaagcggataaacgtgagttaatcacagctaaaaatcatttagatgatccagtgagtacagatggtaaaaagccaggtacaattacgcagtacaataatgcaattcataatgcgcaacaacaaatcaatactgcgaaaacagaagcgcaacaagttattaataatgagcgtgcaacaccacaacaagtttctgacgctttaactaaagttcgtgctgcacaaactaagataaatgaagctaaagcattacttcaaaataaagaagataatagccaattagtaacatctaaaaataacttacaaagttctgtgaaccaagtaccatcaactactggtatgacgcaacaaagtattgataactataatgcgaagaaacgcgaagcagaaactgaaataactgcagctcaacgtgttattgacaatggtgatgcaactgcacaacaaatttcagatgaaaacactacagcacaacgcaatgatttaacaaatcaaatttcacaagctacaaacttagctgctgttgaatctgttaagcaaagtgcgaatagtttagatggtgcaatgggtaacttacaaacggctatcaacgataaatctggaacattagcgagccaaaacttcctagatgctgatgagcaaaaacgtaatgcttacaatcaagctgtatcaaatgccgaaacaattttaaataaacaaactggaccgaatacagcgaaaactgcagtcgaacaagcacttaataatgttaatagtgcgaaacatgcattaaatggtacgcaaaacttaaataatgcgaaacaagcagcgattacagcaatcaatggcgcatctgatttaaatcaaaaacaaaaagatgcattaaaagcacaagctaatggtgctcaacgcgtatctaatgcacaagatgtacaacgtaatgcgactgaactgaacacggcaatgggcacattaaaacatgccatcgcagataagacgaatacgttagcaagcagtaaatatgttaacgccgatagcactaaacaaaatgcttacacaactaaagttaccaatgctgaacatattattagcggtacgccaacggttgttacaacaccttcagaagtaacagctgcagctaatcaagtaaacagcgcgaaacaagaattaaatggtgacgaaagattacgtgttgcaaaacaaaacgccaatactgctattgatgcattaacgcaattaaatacacctcaaaaagctaaattaaaagaacaagtgggacaagccaatagattagaagacatacaaactgttcaaacaaatggacaagcattgaacaatgcaatgaaaggcttaagagatagtattgctaacgaaacaacagtcaaagcaagtcaaaactatacagacgcaagtccgaataaccaatcaacatataatagcgctgtgtcaaatgcgaaaggtatcattaatcaaactaacaatccgactatggatactagtgcgattacccaagctacaacacaagtgaataatgctaaaaatggtttaaacggtgctgaaaacttaagaaatgcacaaaatactgctaagcaaaacttaaatacgttatcacacttaacaaataaccaaaaatctgcaatctcatcacaaattgatcgtgcaggtcatgtgagtgaggtaacagctgctaaaaatgcagcaactgagttaaacacgcaaatgggcaacttggaacaagctatccatgatcaaaacacagttaaacaaggtgttaacttcactgatgcagataaagccaaacgtgatgcgtatacaaatgctgtaagcagagcagaaacaattctgaacaaaacgcaaggtgcaaatacgtctaaacaagatgttgaagcagctattcaaaatgttacaagtgctaaaaatgcattgaatggtgatcaaaacgttacaaatgcgaagaatacagctaaacatgcattaaataacttaacgtcaattaataatgctcaaaaacgtgacttaacaactaaaattgatcaagcaacaacagtagctggtgttgaagcggtatctaatacaggtacacaattgaatacagcgatggctaacttgcaaaatggtattaatgataaagcgaatactttagcgagcgaaaactatcatgatgctgattcagataagaaaactgcttatactcaagccgttacgaacgcagaaaatattttaaataaaaatagtggatcaaatttagacaaagctgccgttgaaaacgcgttgtcacaagtgacaaatgcgaaaggtgccctaaatggtaaccataatttagagcaagctaaatcaaatgcaaacactactataaacggacttcaacatttaacaactgcacaaaaagataaattgaaacaacaagtgcaacaagcacaaaatgttgcaggtgtagatactgttaaatcaagtgccaacacattaaatggtgctatgggtacgttaagaaatagcattcaagataacacagctacgaataatggccaaaactatcttgatgctacagaaagtaacaaaacaaactataacaatgctgttgatagtgctaatggtgtcattaatgcaacaagcaatccaaatatggatgctaatgcaattaaccaaatcgctacacaagtgacatcaacgaaaaatgcattagatggtacacataatttaacgcaagcgaaacaaacagcaacaaatgccatcgatggtgctactaacttaaataaagcacaaaaagatgcgttaaaagcacaagttacaagtgcgcaacgtgttgcaaatgtaacaagtatccaacaaactgcaaatgaacttaatacagctatgggtcaattacaacatggtattgatgatgaaaacgcaacaaaacaaactcaaaaatatcgtgacgctgaacaaagtaagaaaactgcttatgatcaagctgtagctgctgcgaaagcaattttaaataaacaaactggttcaaattcagataaagcagcagttgaccgtgcattacaacaagtaacaagtacgaaagatgcattgaatggtgatgcgaaactagcagaagcgaaagcggcagctaaacaaaacttaggtactttaaaccatattacaaatgcacaacgtactgcgttagaaggtcaaatcaatcaagcgacgactgttgatggcgttaatactgtgaaaacaaatgccaatacattagacggcgcaatgaatagcttgcaaggttcaatcaatgataaagatgcgacattaagaaatcaaaattatcttgatgcagatgaatcaaaacgtaacgcatatactcaagctgtcacagcagctgaaggcattttaaataaacaaactggtggtaacacatctaaagcagacgttgataatgcattaaatacagttacaagagcgaaagcggctttaaatggtgctgaaaacttaagaaatacgaaaacttcagcaacaaatacgattaatgggttaccaaacttaacacaattacaaaaagataacttgaagcatcaagttgaacaagcgcaaaatgtagcaggtgtaaatggtgttaaagataaaggtaatacgttaaatactgccatgggtgcattacgtacaagtatccaaaatgataatacgacgaaaacaagtcaaaattatcttgatgcatctgatagcaacaaaaataattacaacactgctgtaaataatgcaaatggtgtaattaatgttacgaataatccaaatatggatgctaatgcgattaatggcatggcaaatcaagtcaatacaacaaaagcagcgttaaatggtgcgcaaaacttagctcaagctaagacaactgcgaaaaacaacttgaataacttaacatcaattaacaatgcacaaaaagatgcgttaacgcgtagcattgatggtgcaacaacagtagctggtgtaaatcaagaaactgccaaagcaacagaattaaataacgcaatgcacagtttacaaaatggtatcaatgatgagacacaaacaaaacaaactcagaaatacctagatgcagggccaagtaagaaatcagcttatgatcaagctgtaaatgcagcaaaagcaattttaacaaaagctagtggtcaaaatgtagacaaagcagcagttgaacaagcattacaaaatgtgaacagtacgaagacggcgttgaacggtgatgcaaaattaaatgaagctaaagccgctgcgaaacaaacgttaggtacattaacacacattaataatgcacaacgtacagcgttagataatgaaattacacaagcaacaaatgttgaaggtgttaatacagttaaagccaaagcgcaacaattagatggtgctatgggtcaattagaaacatcaattcgtgataaagacacgacgttacaaagtcaaaattatcaagatgctgatgatgctaaacgaactgcttattctcaagcagtaaatgcagcagcaactattttaaataaaacagctggcggtaatacacctaaagcagatgttgaaagagcaatgcaagctgttacacaagcaaatactgcattaaacggtattcaaaacttagaacgtgcgaaacaagctgctaacacagcgatcacaaatgcttcggacttaaatacaaaacaaaaagaagcattaaaagcacaagtaacaagtgcaggacgtgtatctgcagcaaatggtgttgaacatactgcgactgaattaaatactgcgatgacagctttaaaacatgccattgctgataaagctgagacaaaagctagtggtaactatgtcaatgctgatgcgaataaacgtcaagcatatgatgaaaaagtgacagctgccgaaaatatcgttagtggcacaccaacaccaacgttaacaccatcagatgttacaaatgcagcaacgcaagtaacgaatgcgaagacgcagttaaacggtaatcataatttagaagtagcgaaacaaaatgcgaacacagcaattgatggtttaacttctttaaatggtccgcaaaaagcaaaacttaaagaacaagtgggtcaagcgacgacgttgccaaatgttcaaactgttcgtgataatgcacaaacattaaacactgcaatgaaaggtctacgagatagcattgcgaatgaagcaacgattaaagcagatcaaaactacacggatgcaagtcaaaacaaacaaactgactacaacaatgcagtcactgcagcaaaagcaatcattggtcaaacaactagtccaacaatgaatgcgcaagaaatcaatcaagcgaaagaccaagtgacagctaaacaacaagcgttaaacggtcaagaaaacttaagaactgcacaaacaaatgcgaagcaacatttaaatggcttaagtgacttaactaatgcacaaaaagatgcagcgaaacgtcaaatcgagggtgcaacgcatgttaatgaagtaacacaagcacaaaataatgcggacgtattaaatacagctatgacgaacttgaaaaatggtattcaagatcaaaatacgattaagcaaggtgttaacttcactgatgcagat

SEQ ID NO: 4585 - DNA, 1872 bp, Staphylococcus aureus
gctcaagaatatgatgtaatcgttataggtgcgggacatgcaggtgtagaagcaggtttagcatctgcaagacgtggtgctaaaacattaatgctaacaataaatttagataatattgcatttatgccatgtaacccatctgtaggaggaccagctaaaggtatcgttgttcgtgaaattgatgctttaggtggacaaatggcaaaaacaatcgataaaacacacattcaaatgagaatgttaaatactggtaaaggacctgctgtaagagcactaagagcgcaagcagataaagtactttatcaacaagaaatgaaacgcgtgattgaagatgaagaaaatttgcatataatgcaaggtatggtagacgaacttattatagaagataatgaagttaaaggtgtacgtacaaatattggtacagagtatttatctaaagcagtaattattacaacgggaacatttttacgtggtgaaatcattttaggtaatatgaagtattcaagtggaccaaatcaccaattaccatcaatcacattatcagacaatttaagagaacttggttttgatattgttcgttttaaaacaggtacaccaccgcgtgtaaattcaaaaacaattgactattcgaagactgaaatacaaccaggtgacgatgtaggtcgtgcattcagctttgaaacaacagaatatatattagatcaattgccatgttggctaacgtatactaatgctgaaacacacaaagttatcgatgataatttacatctatctgcaatgtattcagggatgattaaaggaaccgggccacgttattgcccttcaattgaagataaatttgttcgatttaatgataagccgcgacatcaacttttcttagagcctgaaggtcgtaatacaaatgaagtatatgtgcaaggattgtctacaagtcttcctgagcatgtgcaacgtcaaatgttagagacgataccaggtcttgaaaaagcagatatgatgcgtgctggctacgcaattgaatatgatgccattgtgccaacgcagttatggcctacacttgaaacgaaaatgattaaaaacctatacactgcaggtcaaattaatggtacatctggttatgaagaagcagcaggacaaggattgatggcaggtattaacgctgcaggtaaagtgttaaacacaggcgaaaagatattaagtcgttcagatgcatatattggtgtattaatcgatgatcttgtaactaaaggtactaatgaaccttatcgtttactaacatcacgtgcagaatatcgtttgttactacgtcatgataatgctgatttgagattgacggatatgggatatgaacttggtatgatttctgaagaacgatatgcacgttttaatgaaaaacgtcagcaaattgattcggaaattaagcgtttatcagatattcgtattaaaccaaacgaacatacgcaagcgattattgaacaacatggtggttctcgcttaaaagatggtattttagctatcgatttattacgcagacctgaaatgacttacgatataattttagaaattttagaagaaaaacatcaattgaatgcagatattgaagaacaagtagaaatacaaacaaaatatgaaggttatatcaataaatcactacaacaagttgagaaagttaagcgtatggaagaaaagaaaattccagaagacttagattatagtaagattgatagtttggcgactgaagcgcgagaaaaattatcagaagtaaaacctttaaatattgcacaagcttctagaatatcaggggtaaatccagcagacatatctatattattgatttacttagaacaaggtaaactccaaagggtgagtgac

SEQ ID NO: 4586 - DNA, 708 bp, Staphylococcus aureus
atgactgtagaatggttagcagaacaattaaaagaacataatattgaattaaatgagactcaaaaacatcagtttcaaacatattatcgtttacttgttgaatggaatgaaaagatgaatttgacaagtattacagatgaacacgatgtatatttgaaacatttttatgattccattgcacctagtttttattttgattttaatcagcctataagtatatgtgatgtaggcgctggagctggttttccaagtattccgttaaaaataatgtttccgcagttaaaagtgacgattgttgattcattaaataagcgtattcaatttttaaaccatttagcgtcagaattacaattacaggatgtcagctttatacacgatagagcagaaacatttggtaagggtgtctacagggagtcttatgatgttgttactgcaagagcagtagctagattatccgtgttgagtgaattgtgtttaccgctagttaaaaaaggtggacagtttgttgcattaaaatcttcaaaaggtgaagaagaattagaagaagcaaaatttgcaattagtgtgttaggtggtaacgttacagaaacacatacctttgaattgccagaagatgctggagagcgccagatgttcattattgataaaaaaagacagacgccgaaaaagtatccaagaaaaccagggacgcctaataagactccttta

SEQ ID NO: 4587 - DNA, 747 bp, Staphylococcus aureus
atgacgatattatcagtgcaacatgtttcaaaaacatatggtaaaaagcacacatttcaagcacttaaagatattaactttgacatacaaaaaggcgaattcgttgcgattatggggccttctggatcaggtaagacaaccttattaaatgtactaagttcaattgaccaaatttctagcggtagcgtgattgctaacggacaagagcttaataaacttaatcaaaaagcacttgccaaattccgtaaagaatcattaggtttcatcttccaagattacagtattctgccgacattaactgttaaagaaaacattatgttacctttatctgttcaaaaaatgtcgaaggcaacaatggaaaaaaattataaagcgatcacgacagcattaggtatttatgacctgggaaataaataccctagcgaattatctggtggtcaacaacaaagaactgcagcagcgagagcatttgttcataaacctcaaatcatatttgcagatgagccaacaggcgcactcgactcgaaaagtgcaaatgacctattacaacgtttggaagaaatgaataaatcgtttgatatcacaattgtcatggttacacatgatccagttgcagcaagttttgcagaacgtgtcatcatgctaaaagatggccaaattcatacacaactttatcaggaaggacgttctaaacaggccttttatgaagacattgtacatcttcaatcagtattaggtggtgtctca

SEQ ID NO: 4588 - DNA, 921 bp, Staphylococcus aureus
aactatcaagttcttttatattataaatatacgacgattgatgaccctgaacagtttgctcaggatcacttagccttttgtaaagcacaccatttaaaaggtagaattcttgtttctacagaaggtattaacggcacattatctggtacaaaagaagaaaccgaacaatatatggcacatatgcatgccgatgaacgattcaaagatatggtgtttaaaattgatgaagctgaaggacatgcttttaagaaaatgcatgtacgtcctcgaaaagagattgttgctttagatttagaagaagacgtcgatccaagacacacaactggccaatatttatcacctgtagaatttagaaaagctcttgaagatgatgacacagtcattattgatgcacgtaatgattatgaatttgatttaggtcatttccgaggtgcaattcgtccaaatatcacgcgctttagagatttgcctgactggattaaagagaataaagcgttatttgcagataaaaaagtggttacgtactgtactggtggcattcgatgtgaaaaattttctggatggcttttaaaagaaggtttcgaagatgtagcacaacttcacggcggtattgctacatatggtaaagaccctgaaacaaaaggtcaatattgggacggtaaaatgtatgtatttgatgatcgtatcagtgttgatatcaaccaagttgaaaaaacaattattggtaaggattggtttgatggcaaaccatgtgaacgttatattaattgcgctaacccagaatgtaataaacaaatattagtttctgaagaaaatgaagccaaatatttaggtgcatgctcttatgaatgtgctaaacatgagcgtaatcgttatgttcaagcaaataatattagtgataatgagtggcaacaacgttta

SEQ ID NO: 4589 - DNA, 1488 bp, Staphylococcus aureus
atggaacttttaaaacatttatctcagcgtcaatacattgatggtgagtgggttgaaagcgcgaataaaaatacaagagatattatcaatccatacaatcaagaagtgatatttacggtttctgaagggacagaagaggatgcagaacgtgcaatcttagctgcaagacgtgcgtttgagtctggtgaatggtcgcaagaaactgctgaaacaagaggtaaaaaagtacgtgccatcgcggacaagatcaaagaacatcgcgaagcgttagcacgattagaaacattagatactggaaaaacgttagaagaatcatatgcagatatggatgatattcataatgtgtttatgtattttgctggattagcagataaagacggtggcgaaatgattgattcaccaattccagatacagaaagcaaaattgttaaagaaccagtaggtgtagttacacaaattacaccttggaattatccgttattacaagcatcatggaaaattgcgccagcgcttgctacgggttgttcactagttatgaaaccaagtgaaattacaccattaacaacaatacgtgtttttgaattaatggaagaagttggtttccctaaaggaacaattaatcttattctaggtgcaggttctgaagttggtgacgtaatgtcaggtcataaagaggttgaccttgtatcatttacaggtggcattgagactggtaagcatattatgaaaaatgctgctaataatgttacgaatattgccttggaacttggcggtaaaaatccaaacattatctttgatgatgctgattttgaattggcggtagaccaagcgttaaatggtggatatttccatgcaggtcaagtttgttcagcaggatcaagaatattagtacaaaacagtattaaagacaaatttgagcaagcacttattgatcgcgtgaaaaaaatcaaattaggtaatggttttgatgctgatactgaaatgggaccagtgatttcaacagaacatcgtaataaaatcgaatcttatatggatgtagctaaagcagaaggcgcaacaattgctgttggtggtaaacgtccagatagagacgatttaaaagatggtctattcttcgagccaacagtcattacaaattgtgatacgtcaatgcgtattgtacaagaagaggttttcggacctgtcgttactgtagaaggctttgaaactgaacaagaagcgattcaattagcgaatgattctatatatggtttagcaggtgctgtattttctaaagatattggaaaagcacaacgcgttgctaacaagttgaaacttggaacggtgtggattaatgatttccatccatattttgcacaagcgccatggggtggatacaaacaatcaggtatcggtagagaattaggcaaagaaggcttagaagagtaccttgtttcaaaacacattttaacaaatacaaatccacaattagtgaattggtttagcaaa

SEQ ID NO: 4590 - DNA, 1674 bp, Staphylococcus aureus
aaatcatatgattatgtcatcattggaggaggcagtgcaggttctgtactaggtaatcgtctgagtgaagataaagataaagaagtcttagtattagaagcgggtcgcagtgattatttttgggatttatttatccaaatgcctgctgcgttaatgttcccttcaggcaataaattttacgattggatttattcaacagatgaagaaccacatatgggcggtcgtaaagtagcacatgcccgaggtaaagttttaggtggatcaagttcgattaatggcatgatttatcaacgtggtaatccaatggactatgaaggctgggcagaaccagaaggtatggaaacttgggattttgcgcactgtttaccgtattttaaaaaattagaaaaaacatacggtgcagcgccttatgataaatttagaggccatgatggaccaattaaattaaaacgagggccagcaacgaatcctttattccagtcattctttgatgcaggtgttgaagcaggctatcataaaacacctgatgtgaatggatttagacaagaaggttttggaccgttcgatagtcaagtacatcgtggtcgccgaatgtcagcttcaagagcatatttacatccagctatgaagcgtaaaaacttaaccgttgaaacacgtgcctttgttactgaaattcattatgaaggtagaagagcaactggtgttacgtataagaaaaatggcaaactacataccatcgatgctaatgaagtcatcttgtctggtggggcattcaatacgccacaattactacaattatctggtatcggtgattcagagttcctaaaatcaaaaggcattgagccacgtgttcatttacctggtgtgggtgaaaactttgaagatcacttagaggtatacattcaacataaatgtaaggaacctgtatcattacagccaagcttagatatcaagcgcatgccatttattggtttacaatggattttcacacgtacaggtgcagcagcatctaaccattttgaaggtggcggatttgtacgttcaaataacgaagttgattatcctaacttaatgttccattttttaccaatagctgtaagatatgatggtcaaaaggcagcggtcgcacatggttatcaagttcacgtaggaccaatgtattcaaactctcgtggtagcttgaaaatcaaatctaaagatccattcgaaaaaccaagtatccgctttaattatttatcaacagaagaagataaaaaagaatgggtagaagcaattcgtgtagcaagaaatatcttatctcaaaaagcaatggatccattcaatggtggagaaatttcaccaggaccagaagtgcaaacagacgaagaaattcttgattgggttcgtagagatggtgaaacagcattacacccatcttgtagtgctaaaatgggtcctgcttcagatccaatggcagtcgttgacccgttaacaatgaaagtccacggtatggaaaatttacgtgtagttgatgcatcagctatgccacgtacgacaaatggcaatatacatgcacctgttttaatgttagctgaaaaagcagcagacattatacgtggcagaaagcctttagagccacaatatattgattattataagcatggtgttcatgatgaaaatgaaggtgcaatcgaa

SEQ ID NO: 4591 - DNA, 348 bp, Staphylococcus aureus
caaaaaaataatgacactgcatattacgatgttctagaagcgataaatgatttatcaaatgattcattatgtgtgttaaatcatttatatattaacgaaggacaagaagaaacattcgagcaaaagtttttgcaacgtaataagcatttaaaaaacgttgatgggtttaaagcattaaggtttttaagacctagaacagctggtagacactatatcattattacgctgtgggaaaataggcaagcattttatcattggcaaaattcagctgagtacaagcatacacacaagcatcgtggcacttcgaaaggtgcagatgtaaaaataattaatcgtgaattatcatac

SEQ ID NO: 4592 - DNA, 885 bp, Staphylococcus aureus
atgaataaagagcaattagaaaaaatgaaaaatggaaaaggctttattgccgcattagaccaaagtggtggtagtacaccaaaagcacttaaagaatatggtgtaaacgaagatcaatatagcaatgaagacgaaatgttccaacttgttcacgatatgcgtacacgtgtggtaacttcaccttcattctcaccagataaaattttgggtgctattcttttcgaacaaacaatggatcgcgaagtagaaggcaaatacactgcagattacttagctgataaaggtgttgttccgttcttaaaagtagacaagggtcttgctgaagagcaaaatggtgttcaattaatgaaaccaatcgacaacttagacagcttattagatcgtgcaaacgagcgtcacatttttggtacaaaaatgcgttctaatattttagaattaaatgaacaaggtatcaaagacgttgttgaacaacaatttgaagtcgctaaacaaattattgctaaagggttagtgccaattatcgaaccagaagttaatattaacgcaaaagataaagctgaaattgaaaaagtattaaaagctgagcttaaaaaaggtttagacagcttaaatgctgatcaattagttatgttaaaattaacaattcctactgaagctaacttatacaaagacttagctgaacatccaaatgttgttcgtatcgttgtattatcaggtggttacagcagagaaaaagcgaacgaattacttaaaaataacgctgaacttatcgcaagcttctcacgtgcattagctagtgatttaagagctggacaatctaaagaagaattcgataaagcattaggtgacgctgtagaatcaatctacgacgcatctgtaaacaaa

SEQ ID NO: 4593 - DNA, 357 bp, Staphylococcus aureus
tattttgcatataaaacctttattactaccgctgatgaaattatagagaagtatggtatgagtcgtcagcatcatcgttttttgttttttatcaataaattacctggtattactattaaatcattactagaaatattagaaatttctaaacaaggatcacatgcaacacttcaaaaattaaaagagcaaggtctcattattgaaaaagttttagagactgatcgacgtgtcaaaaaattatattcgacggataaaggcgatcaactcattgctgaattgaacaaggcgcaagatgaattattgcaaaatatatatcaacaagtcggttcggattggtatgatgtgatggaagcattg

SEQ ID NO: 4594 - DNA, 222 bp, Staphylococcus aureus
atgaaaaatacattccttatttgtgatgaatgtcaggcagtcaatataagaacgttacaaaagaagttggaaaaattagatcccgatgctgaaatcgtgataggttgtcaatcttattgtggacctggacgccgaaaaacattcacttttgttaataaccgcccactggctgcgcttactgaagaagaattaatcgaaaaagtttctcaacaattaaagaaa

SEQ ID NO: 4595 - DNA, 960 bp, Staphylococcus aureus
cgtgcacatacgaatattgcacttataaaatattggggtaaaaaagatgaagcactaatcattccaatgaataatagcatatctgttacattagaaaaattttacactgaaacgaaagtcacttttaacgaccagttaacacaggatcaattttggttgaatggtgaaaaggttagtggcaaagaattagagaaaatttcaaaatatatggatattgtcagaaatagagctggcatcgattggtatgcagaaattgaaagcgacaattttgtaccaacagcagcagggttggcttcatcagcaagcgcatatgcagctttagcagcagcttgtaatcaagcgctagacttgcagctgtcagataaggatttatcgagattggcgcgaatcggttcgggttctgcgtcgcgtagtatttatggtggatttgcagaatgggaaaaagggtataatgatgagacgtcatatgccgttccacttgaatcgaatcattttgaagatgaccttgccatgatatttgttgtgattaatcaacattctaaaaaggtacctagtcgatatggtatgtcgttgacacgaaacacatcaaggttttatcaatattggttagatcatattgatgaagatttagctgaagcaaaagcagcgattcaagacaaagattttaaacgccttggtgaagtaattgaagaaaatggtttgcgtatgcatgccacgaatctaggatcaacaccgccgttcacatatcttgtgcaagaaagttatgatgtaatggcgctcgttcacgaatgccgagaagcggggtatccgtgctattttacgatggatgcgggtcctaatgtgaaaatacttgtagaaaagaaaaacaagcaacagattatagataaattattaacacagtttgataataaccaaattattgatagtgacattattgccacaggaattgaaataattgag

SEQ ID NO: 4596 - DNA, 783 bp, Staphylococcus aureus
tggcgatatatcgaccattcttctggattagagcctatgcaatctttcgcattcgatgatacattttgcgaaagtgtgggcaaagatatatcagataatgttgtgcgtacttggattcatcaacatactgttattcttggtattcatgattcaagattgccgtttttaaaagatggcattgattatttaacgaatgagattggttataatgccattgttagaaattctggcggcctaggtgtcgttctagatcaaggtgtattaaatatatcgctgatgttcaaaggacaaacagaaacaacgattgatgaagcgtttactgtgatgtatctcttaattagcaaaatgttcgaagatgagaatgttgatattgatacgatggaaattgaacattcttattgcccaggaaaatttgacttaagtatcgatggtaagaaatttgcaggcatatcgcaacgaagagttagaggcggtattgctgtacaaatttatctttgtgttgaagggtctggttcagaacgtgcattgatgatgcaaacattttatgaacatgctttaaaaggtgaagtgactaaatttaaatatcctgaaattgaaccatcttgtatggcctcattagagacattgcttaacaaaacgattactgttcaagatgtaatgtttttactattatatgcaatcaaagatcttggcggtgtattaaatatgacgccaattactcaagaagaatggcaaagatacgatacgtattttgataaaatgattgaaagaaacaagaaaatg

SEQ ID NO: 4597 - DNA, 981 bp, Staphylococcus aureus
atggctgatttattaaatgtattaaaagacaaactttctggtaaaaacgttaaaatcgtattacctgaaggagaggacgagcgtgttctaacagctgcaacacaattacaagcaacggattatgttacaccaatcgtgttaggtgatgagactaaggttcaatctttagcgcaaaaacttaatcttgatatttctaatattgaattaattaatcctgcgacaagtgaattgaaagctgaattagttcaatcatttgttgaacgacgtaaaggtaaagcgactgaagaacaagcacaagaattattaaacaatgtgaactacttcggtacaatgcttgtttatgctggtaaagcagatggtctagttagtggtgcagcacattcaacaggcgacactgtgcgtccagctttacaaatcatcaaaacgaaaccaggtgtatcaagaacatcaggtatcttctttatgattaaaggtgatgaacaatacatctttggtgattgtgcaatcaatccagaacttgattcacaaggacttgcagaaattgcagtagaaagtgcaaaatcagcattaagctttggcatggatccaaaagttgcaatgttaagcttttcaacaaaagggtctgctaaatcagacgacgtgacaaaagttcaagaagctgtcaaattagcacaacaaaaagctgaagaagaaaaattagaagcaatcattgatggcgaattccaatttgatgctgcgattgtaccaggtgttgctgagaaaaaagcgccaggtgctaaattacaaggtgatgcaaatgtctttgtattcccaagtttagaagctggtaatattggttacaaaattgcacaacgtttaggtggatatgatgcagttggtccagtattacaaggtttaaattctccagtaaatgacttatcacgtggctgctcaattgaagatgtatacaatctttcaattattacagcagcgcaagcctta

SEQ ID NO: 4598 - DNA, 861 bp, Staphylococcus aureus
ttatcgacacgagaaggtcgttggaaacactttggttccgtagatcctatcgaaggcacgaaacctactactaagaacgaaatgacagatttacaaagtacacataaagatttcttatttgaaatagaagaagttggtattaaaaacttagtgtaccctgtacttgttgaccagtatcaaacagctggcacatttagtttttcaacaagtttaacaaaagacgaaaaaggtattaatatgagccgtattattgaaagtgttgaaaagcactatgataatggtattgaacttgaatttaatacactttatcaggtgttacgcactttacaaacgaatatgaaacaaaatgcggcaggcgttgatgtttctgggaaatggttctttgatcgctatagtccaaccacaaatattaaagcagttggtaatgccgatgtcacttatggattagcaattgacggtgataaagttacacgtaaagaacttactattgaagcaactgtcacaacgctatgcccttgttcaaaagaaataagtgaatattcagcgcacaaccaacgtggtgttgtcactgttaaaacatatattaataaagatcaagacatagttgatgactataaaaacaaaattttagatgcaatggaagctaatgcaagttcaattctataccctattttaaaacgtcctgatgaaaaacgtgtgacagagcgtgcatatgaaaatccacgttttgtcgaagacttaattcgtttaattgccgcggacttagttgaatttgattggttagacggtttcgatatcgaatgtcgtaatgaagagtctatccatcaacatgatgctttcgctaaattaaagtatcgcaaa

SEQ ID NO: 4599 - DNA, 5004 bp, Staphylococcus aureus
aaaattatatataacagtgcagcatatgatttgctctcaatcgagacgctgagtgacttagttcgtaatatttatttgcaaattactgaagaaaatggaaataaacgaacaactgtagatgaacttaatttgatgacagaacgtgatattcaattatatgacgatatcaatttaagtttgcctgatttagatgatgcgcaaacagttgttaccttatttgagcaacaagttgaagcaacgccgaatcatgtcgctgtacaatttgacggagtgtttataacatatcaaacattgaatgcacgcgcgaatgatttagcacaccgtttgagaaaccagtacggtgttgaacctaatgatcgtgttgctgtcatagctgaaaaaagtattgagatgataatagcgatgataggtgtgttgaaagctggtggggcttacgtgccaattgatccgaactatccaagtgatcgtcaggagtacattttaaaagatgcaacgcctaaagttgtaataacgtaccaagctttatatgaaaatagtaaacaaaatattaatcacattgatttgaacaagatagcgtggaaaaatattgacaatctttctgaatgtaacacgttagaagatcatgcgtatgttatttacacgtcggggacaactggtaaccctaaagggacactaattccgcaccgaggtattgttcgcttggtccatcaaaatcattatgtaccattaaatgaagagacgacgattttgttatcaggaactatagcctttgatgctgcaacatttgaaatatatggtgcattgctcaatggtggaaaactgattgttgctaaaaaagaacaattattaaatccaatagcgttagaacaattgatcaatgaaaatgacgttaatactatgtggttaacctcctcattatttaatcagattgctagtgaacgaatagaagtattggtaccgttaaagtatttattaattggtggagaagtattgaatgctaagtgggtggatttgcttaatcaaagaccgaagcatcctcaaattattaatggttatggaccaactgaaaatacaacatttacaacgacgtataatatacctaacaaagttccaaatcgtattcctattggtaaaccgattcttggtactcatgtttatatcatgcaaggcgagcgtcgatgtggcgttggtattcctggagaattatgtacaagtggctttgggttagctgcaggttatttaaatcagccagaattgacagcagataaatttatcaaagattcaaatataaatcagctgatgtatagaagtggtgatatcgttcgtctgttacccgatggcaacatagattatttatatcgaaaggacaaacaagttaagattcgagggtttaggattgagttgtcagaggttgagcatgcgctcgagcgtatacaaggtattaataaagctgttgttattgttcaaaatcatgatcaagatcagtatatcgttgcttattatgaagcgatgcatacattatcacataataagattaaatcacaattacgtatgaccttaccggagtacatgataccagttaattttatgcatattgagcaaattcctattactattaatgggaaattagataagaaggcattgccgatcatggactatgtcgatacggatgcctatgtagcaccgagcacagataccgaacacttgctatgccaaatttttgcagatattttacatgtgaatcaagtaggtattcatgataatttctttgaattaggcggccattcattaaaagcaacgttagtggtgaatcggatagaggcatctactgggaaacgattacaaattggtgatttattacaaaagccaactgtatttgaactagcacaagcaattgctaaggttcaagaacaaaactatgaagtgattcctgaagctatagttaaagatgattatgtgttgagctctgcacaaaagcgtatgtatttattatggaaatcaaaccataaagatacggtgtataacgtaccttttttatggcggttatcatcagaacttaatgtagctcaattgcgacaagcagttcagcatttgatagcgcgacatgagattctacgaacacaatatattgttgtagatgatgaggttcgacaacgtattgtggcagatgttgtagctgactttgaagaagttaacacgcattttacggatgaacaagaaatcatgcgccaatttgtggcaccttttaatttggaaaagccaagtcaaattagagtgagatacattagaagtccattacatgcatacctgtttatagatacacatcatatcattaatgacggtatgagtaatatacaattaatgaatgatcttaacgcactttatcaacataaattattgttaccacttaaattgcaatataaagactatagtgagtggatgtcgcatcgtgatatgacgaaacatagacaatattggttatctcaattcaaagatgaagtacctatcttaagcttaccgacagactatgttagaccaaatattaaaacgacaaatggagcaatgatgtcatttacaatgaatcaacaaacgagacagctacttcaaaaatatgtagaaaagcatcaaattactgattttatgttctttatgagtgtggtcatgacgttgttaagcagatatgctcgaaaagatgatgttgttgtcggtagtgtaatgagtgcgcgtatgcataaaggcgcggagcaaatgctaggcatgtttgctaatacgttggtatatagagggcaaccgtcacctgataaaatgtggacacagtttttacaagaagttaaggaaatgagtttggaggcatacgagcatcaagaatacccattcgaatgcttagtaaatgacttagatcaatcacatgatgcctcacggaatccattatttgatgtcatgttagtactacaaaacaatgaaacgaatcatgctcattttgggcatagtaaattaacacacattcaacccaaatcggtgacggcgaaatttgatttatctttcatcattgaagaagatcgcgatgactatacaatcaatatcgagtataataccgatttatatcactcagaaacagttcgtcacatgggtaatcaatgtatgattatgattgattatattttgaagcatcaagatacactacaaatttgcgatataccaaatggcacggaggaacttctaaattgggtcaatacgcatgttaacgatcgaatgcttaatgtcccgggaaataaatctatcataagttactttaatgaagttgtctcacgacaaggtaatcatgttgcgctagtcatgaatgatttgacaatgacatatgaaacattacgcaactatgtggatgccattgcgcacatactcctatcaaatggtgtgggcaatggtcaacgggttgccttgtttacagaacgtagttttgaaatgattgcggcgatgttggcgacagttaaagtaggtgcatcttatatacctatcgatattgattttccgaaaaagcgacaaggcgcaattttggaggatgctaaagtaactgcagtcatgtcttacggcattgaaattgaaacgacattaccagtcattcaattggaaaatgctaaaggttttgttgaatcaaaggaaaatgaacaatatgatgatttacatggcgatcaacttgaaaacacagcgatgttagataatgagatgtatgctatttacacatctggtacgaccgggatgcctaaaggggttgccatacgacaacgaaatttgttgaatttagtgcatgcatggtcaactgaattgcaattaggcgacaatgaagtatttttgcaacatgcaaatattgtttttgatgcatcagttatggagatttattgttgtttgttaaatggtcatacgcttgtgattccagatagagaggaacgtgttaatccagcacagttacaacaactcattaataagcatcgtgtgacggtggcgtcgattccattacagatgtgtagtgttatggaagacttttatattgaaaaattgattacaggtggggcaactagtacggcatcctttgttaaatatattgagaagcattgcggcacgtatttcaatgcctatggaccatctgagtcaacagtcatcacatcgtattggtcacatcaatgtggtgatttgatacctgagacgattccaattggcaaacccttatctaacatccaagtgtatattatgtcagagggtttgttatgcggtattggtatgccaggcgagttgtgtattgcaggtgatagtttagcgataggatatattaaccgtccagaattaatggctgataaatggcaaaataatccatttggtaaaggaaagttgtatcatagtggtgatttagcacgttatacatctgatggtcaaattgaatttttaggaagaatagataaacaagtgaaagttaacgggtaccgtattgaacttgatgaaattgaaaatgcaatattagctattcgtggtatatctgattgtgttgtcacagtaagtcactttgatacgcatgatatattgaatgcttattatgtcggagagcaacaagtggagcaggatttgaagcaatatttaaatgatcatctgcctaagtatatgattcctaagactataacgcatatcgattgtatgccattaaccacgaatgacaaggtggatactacgcgtttgccaaatccatcacctatacaacagtctaataaagtgtatagcgaaccatctaatgaaattgagcagacatttgttgatgtattcggagaggtattgaaacaaaatgatgtcggtgttgacgatgatttctttgaacttggtggtaactcattagaggcgatgttagttgtctcggatttaaaacgatttggccatcatatttcaatgcagacattatatcaatataaaaccgtgcgacagattgttaattatatgcaccaaaatcaacaatcattagtt

SEQ ID NO: 4600 - DNA, 1173 bp, Staphylococcus aureus
atcattgaattaactgattattatagttctaataattatgcaccgcttaagcttgtaattactaaaggtaaaggtgtcaaagtttgggatactgatggcaaacaatatatagattgcatttcgggtttttcagttgcaaaccaaggccattgtcatccaacaattgttaaagcgatgacagaacaagcttcaaagttgtctatcatttcacgtgtcctttatagtgacaatctcgggaaatgggaagaaaaaatttgtcatcttgctaagaaagacaaagtactcccccttaactctggtactgaagctgttgaagcagccattaaaattgctagaaaatggggctctgaagttaaaggcatcaatgacggtcaagttgaaatcatcgctatgaataacaattttcacggtcgtacacttggctcattatcactatctaaccacgacgcatataaagcaggatttcaccccctacttcaaggcactacaacagtagattttggagacattgaacaattaacacaagctatttcaccgaatacagcagcaattattttggaaccaattcaaggtgaaggtggcgttaatatgccaccgaaaggatatattcaagctgtgcgtcaactatgtgataaacatcaaatattattgattgcagatgaaattcaagttggtcttggtagaactgggaaatggtttgctatggaatgggagcaagtcgttccagatatttatattttaggtaaggcattgggtggtggcttataccctgtatctgctgtgcttgcaaataatgatgtcatgcgtgttctaacaccaggtacacatggttcaacatttggtggtaaccctttagccattgcaatatcgacggcagcgcttgatgtacttaaagatgaacaactggttgaacaatcagaacgcttaggttcatttttattaaaagaattactacaacttaaacatccaagcattaaggaaattagaggtcgtggtttatttataggcatcgaacttaacacagatgccgcaccttttgtggatcaactgattcaacgtggaatcttatgcaaagacacgcatcgtactatcattcgattgtcaccacctctagttattgataaagaggaaatcaatcaaattgttgcagcttttcaagacgtttttaaaaat

SEQ ID NO: 4601 - DNA, 1308 bp, Staphylococcus aureus
atgaagaagaaactaacatttaaagaaaacatgtttataggttctatgttatttggtttattctttggtgccggcaatcttatcttcccaatacacttgggtcaagctgctggttctaacgtttttatcgctaacttaggatttttaattacagcaattggcttaccatttctaggtatcattgctattggcatttcaaagacatctggtttatttgaaattgcatcgcgtgttaataaaacatatgcttatattttcacgattgccttatatctagttatcggaccatttttcgccttacctagactggcaactacatcatttgaaattgcattttcgccatttttatcaccaaagcaaatcactttatatttatttatttttagcttcgtcttctttgtgattgcatggttttttgcgagaaagccatcaagaattttagaatatatcggtaaatttttaaatccggtattcttagtattattagcaattattttattatttgcttttatccatccattaggtggcatatctgatgcacctattagtaaacaatatcaatcaaacgccttatttaacggctttttagatggatacaataccttagatgcgctagcgtcattggcatttggtatcatcattgttgcaacgattaaaaagttaggtatcgaaaatccaactgatatcgctaaagaaacaattaagtctggtactatcagtatcattatgatggggatcatttataccctactagcaatcatgggtacattaagtattggtcatttcaaacttagtgaaaatggtggtattgccttagcgcaaattacgcaatactacttaggtaactacggtatcgtcttgttatcactcatcgttatggttgcttgtttaaaaacagctatcggtttaattacggcattttcagaaacatttgaacaccttttccctaaaatgaattacctagcgattgcaacagttgtgagctttatctcattcttattcgcgaatgttggcttaactaagattattatgtactcagtcccagtgttaatgttcttatatccattagcaattgccttgattgtactaacattatttagtagcaaattccatcattcaaaaattatttatcaatgtaccattttctttacaatgattgctgcattagtagatggattaaaagctagtccagagttcatttcaagcacatcattctcacaaactttgattaatttcagccaaaaatatttaccattatcagacattggtatgggctgggttgttctcagtttgattggtttcattatc

SEQ ID NO: 4602 - DNA, 540 bp, Staphylococcus aureus
attaattttaataaaaccgctttagtgttaatcgacctgcaacaaggtattcttaaaatggattatgccccatatacagctgaaaaagtcgttcaaaacgctaataaattaatagatgttttcagaaaaaacaatggttttatcgtattcgttcgtgttaaattctatgatggtaaagatgcattgaaaccaaattcgatggtatcattaccaccaaaagaaggcgacgactacagtcgtttccatcatttattagacaagagagatggcgattttgtcatagacaaacgacaatttagtgcatttgtaggaacggatttagacttacagttgagacgtcgaagaattgatacgattgttcttggcggtgtagcaacacatgttggtgtagatacgacagcacgagacgcctatcaattaaactacgatcagtattttgttactgacatgatgagcgctcaaaacgaaacgctacatcaattcccaatagataatttattccctataatggggcaaacagtaactacaagcgacatacta

SEQ ID NO: 4603 - DNA, 2037 bp, Staphylococcus aureus
aagaaacttttcggtcaattgcaacgtattggtaaggcactaatgttacctgttgcgattttaccagcagcgggtctgttattagctatcggtacagctatacaaggcgaagcattacaacactacttaccttttatacaaaatggtggcgttcaaaatgtcgctaaattaatgacagctgccggtagtattatttttgaaaacttacctatgattttcgcattaggtgtcgcaatcggattagctggcggtgatggcgtagcagctatcgcagcatttgtcggttacataatcatgaacaaaacaatgggtgactttttacaagttacacctaaaaatgttactgatccagcgagtggttacgctagcattttaggtattccaacattacaaacaggtgtgttcggcggtattattatcggggccctggcagcttggtgttataacaagttctataacattaacttaccatcttatttaggtttcttcgctggtaagcgcttcgtacctattatgatggctacaacatcatttattttagcattcccaatggcattaatctggccaacaatccaaacaggattaaatgcattcagcacaggattattagactcaaatactggtgttgccgtattcttatttggttttattaagcgtttattaattccattcggtctacatcacattttccacgcaccgttctggttcgagtttggttcatggaaaaatgcagctggtgaaattattcacggtgaccaacgtatctttatcgaacaaattcgtgaaggcgcacatttgacagctggtaaattcatgcaaggtgaattccctgttatgatgttcggtttacctgcagcagctttagcaatttatcactcagctaaacctgaaaacaagaaagtagtagccggtttaatgggttctgctgctttaacatcattcttaactggtattacagaacctttagaattctcattcttattcgtagcaccattattattctttattcacgcagtacttgatggtttatcattcttaacattgtacttattggatgttcacttaggttatacattctcaggtggtttcatcgactacgttttacttggcgtactacctaataagacacaatggtggttagttattcctgtaggtcttgtatacgcagtcatttactacttcgtattccgattcttaattgtaaaattaaaatacaaaacaccaggtcgtgaagataagcaatcacaagctgttactgcttcagcaactgaattaccatatgcagtattagaagctatgggtggcaaagcaaacattaagcatttagacgcttgtatcacacgtctacgtgttgaagttaacgacaaatctaaagttgatgttcctggtttgaaagatttaggcgcatctggtgtattagaagtcggcaataatatgcaagcaatttttggtccaaaatctgaccaaatcaagcatgaaatgcaacagattatgaatggtcaagtagtagaaaaccctactactatggaagacgataaagacgaaactgttgttgttgcagaagataaatctgcaacaagcgaattgagccatatagtgcatgcaccattaactggtgaagtaacaccattatcagaagtgcctgatcaagtgttcagcgaaaaaatgatgggtgacggtatcgctatcaaaccttcacaaggtgaagttcgtgcaccattcaacggtaaagtacaaatgattttcccaacaaaacatgcaattggtcttgtatcagatagtggtttagaactattaatccacatcggtttagacactgttaaattaaacggagaaggctttactttacatgttgaggaaggtcaagaagttaaacaaggtgatttattaatcaactttgatttagactacatccgcaatcatgcaaagagtgatattacgcctattatcgttacacaaggaaacattacaaaccttgattttaaacaaggtgaacatggcaacatttcatttggcgatcaattatttgaagctaaa

SEQ ID NO: 4604 - DNA, 999 bp, Staphylococcus aureus
atgattaaacaaggttaccaaatgatttttacatctgtacaaataccagaagaagatgacgagacaaaatatcattatttcacaaaactactcaatttattaaaacatgaacaagtgacttacctcatagatgctaatccatctatattaacaccatctttttatgagcatcttcgacaatatgatgcacaatttatgattcgtatcgatcatagtacatcaattgaggcaatcgaagcgataatggcacagggtttaaagtgctgtttgaatgcaagtattatttcccgggaattgttaacaagcttacatcaacaattgaatgattttacattactttcattttgtcataactattatccaagaccagatacgggattatctgttgacttggtcaataagaaaaatgaactcatttatcaatttaatccaaaggcacaaatatatggttttattgtagggagtggtttgcgaggtcctttgcataaaggcttgccaacaattgaagcaacgagacatagtcatcctgtcgttgcagctaaattattacaagaaactggtgtatctgaagtgttagttggagactcattgattgaaatgaggcaggcaaaacaacttatagatttttgcaagcataggcatttcacgttatgtattgaagaagtgtttgatacgacagtgacttaccttttcgatatgtgtcataaagtacgtccggataatccggaaaatgtcattcgttcggaaacgtcaagacaaatatgtccacattcgattcaaccacagtttacgacgcaacgacgcattggttcagtaaccgttgataatttgaataacggtcgttatcaaggtgaaatgcaaattgtgagacaaacgcttagtgcacatgacaatgtgaatgttgttgcacaaattattaaagaagacttaccactgttaagttgtatcgagccgaatgatacatttgattttcaaaaaactagggagtgtaagaagtga

SEQ ID NO: 4605 - DNA, 1319 bp, Staphylococcus aureus
atgaccaaagaacaacaacttgcagaacgaattattgctgcagtaggtggtatggataatatagatagtgtcatgaactgtatgacacgtgtgcgtattaaagtattagatgagaataaagtagatgaccaagaactaaggcacattgatggtgtcatgggtgttatacacgatgaacgcattcaggttgtggttggacctggtacagtcaataaagtggctaatcatatggctgagttaagtggtgttaaattaggagacacaataccacacaatcacaatgatagtgaaaaaatggactataaatcatatgcagctgataaagcaaaggcgaataaagaagcacataaagcaaaacaaaagaatggtaagttgaataaagtattgaaatcaattgccaatatctttataccgttgattcctgcatttattggagctggattaattggtggtattgcagcagtactgagtaacttaatggtggcaggctacatttcaggtgcttggattacgcaacttataacagtatttaatgtcattaaagacggtatgttagcatacttagctattttcactggtattaatgcggctaaagaatttggtgcgacaccaggacttggtggcgtgattggtggtacaacgttattaacgggtattgctggtaaaaatattttaatgaatgtcttcactggagaaccattgcaacctggacaaggtggaattattggcgttatttttgccgtttggattttaagtattgtcgaaaagagattgcataaaattgtgccaaatgcgattgatattattgtaacgccgactattgcattgttgattgtaggactattaactatctttatctttatgccattagcaggttttgtttcagacagtttagtttcagtagttaacggaattattagtattggtggcgtatttagtggatttatcattggtgcaagcttcctaccgttagttatgttaggacttcatcatatttttacgccaattcatatagaaatgattaaccaatctggtgctacttacttattgccaatagcagcgatggctggtgctggacaagtaggtgccgcattagcactttgggtaagatgtaaacgcaacacaacattacgtaatactttaaaaggtgcattgccagttggtttcctaggtattggagaaccattaatctatggtgtgactttgccattaggtcgacctttcttaactgcttgtattggcggtggtattggtggcgctgtaataggtggaattggacatattggtgccaaagcaataggcccaagtggtgtgtcact

SEQ ID NO: 4606 - DNA, 690 bp, Staphylococcus aureus
atgattggttttgttattaaaggtgaggcacatatttatgatgaacataatatgatgcaatgcaacagtggcgacattttcatcattaaccaccgcgacttgtatcgatttcaacttcaacaagatggcatcatatgttatatccaattccaaatgaaatatttagcagacaagtttgatgatgtgcattgtctatattttcacttaacagatgcgaccacaaccaaaaatatacatcaactgagaaatataatggcaagactggtttcaacacatattcgacataatgagttgtctaaattgactgagcaacaacttgtgattcagttgcttatgcatatgattcattatgtcccgcgtacatatcattcgaaccaaagtatcttaaatgatgataaagtgaatcaagtatgcgactatatcgagttacattttcatgaagacttaagcctttcggaattaagcgaatatgttgggtggtcagagagccatctgtctaaaaagtttgcagaatcgctaggtgtaggattccagcatttcttaaatacgacgcgaattgagcatgtgaaactcgatttgacatacacagatgaaacgattactgatattgcattgcaaaatggcttttcaagtgcagcgagctttgcgagaacatttaaacactttacgcatcaaacgcctaaacaatat

SEQ ID NO: 4607 - DNA, 1779 bp, Staphylococcus aureus
atgtattacagttatggaaattatgaagcatttgcgcgccctaaaaaacctgaaaatgtagaaaacaaatccgcttacttaatcggatctggtctagcttcacttgctgcagcttgttttttaataagggatggtcaaatggaaggttctaagattcatattttagaagagttacccaaagcgggcggtagtattgacggagaaaatattcctttaaaaggctatgttgtccgcggtggtcgtgaaatggagaaccactttgaatgtttgtgggacttattcagatctatcccttcattagaaatcgataacgcgtctgtattagatgagttctattggctaaacaaagaagaccctaactattctcgctgtcgtgttattgagaaacagggtcaacgtttagtcacagacggagacttcactttgactaaaacggcgattaaagaaattttagatttatgcttaacgaatgaagaagatttagatgatgtcaaaataacagatgtattttccgacgatttctttaattcaaacttttggatttactggaaaacgatgtttgcatttgaaccgtggcattctgctatggaaatgcgtcgctatctaatgcgattcgttcatcatattggtggtctcgcagacttttcagctttaaaattcactaaatataatcaatatgaatctttagtattacctatggttgaatatttaaaatcgcatggggttcaatttgaatacgatgtaaaagtaaaagatattaaagtagatgttacgacaagtcaaaaaattgcccgagaaatattaattgaccgtaatggcaaagcagagtcaattaaactgactataaacgatctcgtctttgtgacaaacggtagtattacagaaagctctacgtatggtgataatgatacaccagcgccaccaactgacgaattaggtggtagttggacactatggaaaaatttagcacgacaaagtcctgaatttggtaatcctgataagttttgccaaaatattcctcaaaaaagttggtttgtttcagcaacatcgacaacaaacaataaaaatattatcgatacaatagaaagaatttgtaaacgtgatccacttgcaggtaaaacggttactggcggtattattacaatcaatgattctgcatggcaaatcagttttacaatcaatcgtcagcaacagtttaaagaccaacctaaaaatgaaatatctacgtggatttatgccttatattcagatgtaaacggcgattatattaaaaagccaatcacagaatgtagtggtaatgaaatatgtcaagaatggctatatcacttaggtgtaccaactgacaaaattgaagacttagcaaaacatgcatctaatacgattcctgtttatatgccatatattacctcttatttcatgacgcgtgctatcggcgacagacctttagtcgtcccgcatcaatcacaaaatttagcatttattggtaactttgcagaaacagagcgagatactgtatttacaacagaatattcggttcgtactgccatggaagctgtttatcaattactaaatatagatcgtggtattccagaggtcatcaatagtacatttgatcttcgcgtcttattggatgccgtatacgaactgaatgaccatcaagatttgcgcgagattactaaagattcgaaaatgcaaaaactcgcattagcaggattccttaaaaagataaaaggtacgtacattgagtcattattaaaagaacacaaattgttataacta

SEQ ID NO: 4608 - DNA, 936 bp, Staphylococcus aureus
gtggacgcattaacagaagcattaacagcgcatgcgcacaatgattttgtacaaccgcttaagccgtatttaagacaggatcctgaaaatggacacatcgcagatcgaattattgcaatgccaagtcatatcggtggtgaacacgcaatttcaggtattaagtggataggtagtaagcacgacaatccatcgaaacgtaatatggagcgtgcaagtggtgttattattttgaatgatccagaaacgaattatccaattgcagttatggaagcaagtttgattagtagtatgcgtactgcagcagtttcagtgattgcagctaagcatttggctaaaaaaggatttaaagacttaacaatcattggttgcgggctaatcggagacaagcaattacaaagtatgttagagcaattcgatcatattgaacgcgtgtttgtttacgatcaattctctgaagcatgtgcacgctttgttgatagatggcaacaacagcgtccggaaattaattttattgcgacagaaaatgctaaagaagcagtatcaaatggtgaagtagtcattacatgtaccgtaacggatcaaccatacattgaatatgattggttacaaaggggtgcatttattagcaacatttctatcatggatgtgcataaagaagtctttattaaagctgacaaagtcgtagtagatgactggtcacaatgtaatcgagaaaagaaaactattaaccaattggtgttagaaggtaaattcagcaaagaagcacttcatgctgaactaggacaacttgtgacaggtgacataccaggacgtgaagacgatgatgaaatcatattacttaatccgatgggtatggctatcgaagatatttcaagtgcttactttatttatcaacaggcacaacaacaaaatattgggacaacattgaacctatat

SEQ ID NO: 4609 - DNA, 1311 bp, Staphylococcus aureus
ttaaaagatcgtccatttcatccattagctaaagaaaaaagaggattaagagaagcggattatcaagtgtatcaagctgaattaaatcaatcatttcctttaatggttgcagcagttaaaaagacacatatgattcatggcgatactgcaaatatcgatgaattagaatcattgacagcacctataaaagaacaagcgacagatatgttaaatgatcaagcgttatcaatagatgactatgtactatttccggtacatccttggcaatatcagcatattctgccgaacgtctttgcgaaagagattagtgaaaagttggttgtactattaccgttaaaatttggagattatctgtcatcttcaagtatgcgttcattaattgatattggcgcaccgtataaccatgtcaaagtaccatttgcaatgcagtcattaggcgcattaaggctaacgcctacgcgttacatgaaaaacggagaacaagcagaacaattattacgtcagcttatagaaaaagatgaagcactagctaagtatgtcatggtttgtgatgaaacagcttggtggtcatatatgggtcaagataatgatattttcaaagatcaattaggccatttaactgttcagctaagaaaatatcccgaagtgctagccaaaaatgatacgcaacagctagtgtcaatggcagcactcgcggcaaataatcgcaccttatatcaaatgatttgtggaaaagataatatttctaaaaatgatgtcatgacgttatttgaagatatcgcacaagtctttttaaaggtaacactatcatttatgcaatacggcgcattaccagagttgcatggtcaaaatatattgttgtcatttgaagatggacgtgtacaaaaatgcgtgttacgtgatcatgatactgtcagaatttataaaccatggctaacagcacatcatctttcattgccgaagtatgtcgttagagaagatacacctaatacgctaattaatgaagatttggaaacattctttgcttatttccaaacattagctgtatcggtaaacatatatgccattattgatgcaattcaagatttatttggtgtaagtgagcatgaacttatgtcgttgttaaaacaaattttaaaaaatgaagtggcaactatttcctgggttacaactgatcagctagctgtcagacacattttatttgataaacagacgtggccattcaaacaaattttattaccattgctatatcaacgtgatagtggtggaggtagtatgccttcaggtttaactaccgtaccaaatccaatg

SEQ ID NO: 4610 - DNA, 1689 bp, Staphylococcus aureus
caacatgcagcgtatgcggctatcgaacgcattttaaatgaatattttagagaagaaaatttatatcaagtaccacctcaaaatcatcaatggtctatacaattatctgagctcgaaacgttaacaggtcaattcgcttattggtctgcgatggggcatcatatgtatcattcagaagtatggcttattgatggtaaaagtaagaaattaacaacatataaagaagccattgcgcgtattttgcaacatatggctcaaagtgcagataatcaaacggcagtgcaacaacatatggcgcaaattatgtctgacatcgataatagcattcatcgcacggcgcgttatttgcaaagtaacacaatagactacgcagaggatcgctatatcgtttcagaacaatctttatacttaggtcatccatttcatccgactcctaagagtgcaagtgggttttcagaagcagatttagagaaatatgcacccgaatgtcatacatcattccaattgcattatttagctgtgcatcaagatgttctgctcacgcgctatgtagaaggtaaagaagatcaggttgagaaagtgttgtatcaattagcagatatagacatatcagagatacctaaagattttattttattaccaatacatccttatcaaatcaatgtgttgcaacagcatccacagtatttgcaatatagtgaacaaggtttaataaaagaccttggcgtttccggtgattcagtttacccgacgtcttcggttagaactgtattttcaaaagcattaaacatttatttaaaattaccgatacacgttaaaattactaattttatacgtacgaatgatcttgaacagattgaacggacaatcgatgctgcacaagttatcgcatcagtcaaagatgaggttgaaacaccccattttaaattgatgtttgaagaaggatatcgtgcattgttaccgaatccattagggcaaacagttgaacctgaaatggatttattaacaaatagtgccatgattgttcgtgaagggataccgaattaccatgctgataaagatattcatgtattggcgtcattatttgaaacgatgcctgattcaccgacctctaagttatcacaagtgattgagcaaagtggtttagcgccagaagcatggcttgaatgttatttggatcgtacattattgccgatattaaagctgtatagtaacacaggcattagtctagaagcacatgtacaaaattcattaattgaattaaaagatggcatacccgacgtatgctttgtcagagatcttgaaggcatttgtctatctagaacgattgctactgaaaaacaacttgtgccaaatgttgtggcagcatctagccctgttgtatatgcacatgatgaagcgtggcatcgtcttaaatattacgttgtagtaaatcacttaggacatttagtatcaactattggtaaagcgacaaagaatgaagttgtgttatggcaacttgtagcgcatcgtcttatgacttggaaaaaagaatacgcgaataacgcagtatttgttgactgtgtagaagatttatatcaaacgccgaccattgcggctaaagcgaatttgatgagtaaattgaatgattgtggtgcaaaccctatttatacacatataccaaatccaatctgtcataacaaggaggta

SEQ ID NO: 4611 - DNA, 711 bp, Staphylococcus aureus
ggcatttttaattctataccggacccattaatgatagaggttatcgcagcaagcgggtatgactttgttgtgattgatacagaacacgtggcgattaatgatgagacactagcgcatttaattcgtgcagctgaagcagcgcatattataccaattgtacgtgtcactgcagtgatagatagagatatcattaaagtgttggatatgggtgcgagaggtattattgtgccacacgttaaagatcgtgagacagttgagcatattgtgaaattaagtcgttattacccgcaaggattaagaagtttgaatggtggtcgcatggcaagatttggacgtacaccattacttgatgcaatggagatggctaatgagcatattatggtgattgccatgatagaagatgttgaaggggttatggccattgacgatatagcacaagtcgaaggtttagacatgatagtcgaaggtgccgcagatttatcccagtcacttggcataccatggcaaacgcgtgatgatcaagtaacatcacatgttcaacatatttttgaagttgtgaatgcacatggtaaacatttttgtgcattaccacgtgaagatgaagatattgcaaaatggcaggcacaaggtgtacaaacatttattttaggtgatgatcgtggaaaaatatatcgccatttaagtgcatctctagcgacgtctaaacagaag

SEQ ID NO: 4612 - DNA, 1113 bp, Staphylococcus aureus
attgaacaattaaaagcacaatcttatccagtttgtcattatatctatgacttagtcggactggaacatcatttgcaacatattacatcatcattgcctaataattgtcagatgtactatgcaatgaaagcaaatagtgaacgaacaatcctagatacaattagtcagtatgttgaaggattcgaagttgcatctcaaggtgaaatagcaaaaggtcttgcttttaaaccagcaaatcatattatttttggtggccctggtaagacagacgaggaactaagatatgcagtaagtgaaggtgttcagcgtattcatgttgaaagtatgcatgaattacaacggctaaatgccatcttagaagatgaagataagacacaacacattttattgcgtgttaatttagcaggaccatttcccaatgcaacgttgcatatggcaggacgcccaacacaatttggtatttctgaagacgaagttgatgatgtcattgaagctacgctagcaatgccaaatattcatttagatggatttcattttcattctatttctaacaatttagactcgaatttacatgtcgatgtagtgaaactttattttaaaaaagcaaaggcatggtctgaaaaacatcaatttcctctcaaacatatcaatcttggtggtggcataggtgttaactatgcagatttaactagccaatttgagtgggataattttgtagaaaattttaaaacacttatcgttgagcaagaaatggaagatgtgacattgaactttgaatgtgggcgctttattgtggcacacattggttactatgtgacagaagtgctagacattaagaaagtacatggtgcttggtatgccattttaagaggaggtacgcaacaatttagactgccggtatcttggcagcataaccatccttttgacatttatcgctataaagacaatccatattcatttgaaaaagtttcaatttcgagacaggacacaacgttagtcggtcaattatgtacaccgaaagatgtctttgctagagaagtacagatagacgcaatcagtacaggcgacgttattgttttcaaatatgcaggtgcatacggatggtctatttca

SEQ ID NO: 4613 - DNA, 1359 bp, Staphylococcus aureus
atgtcggaaaaagaaatttgggaaaaagtgcttgaaattgctcaagaaaaattatcagctgtaagttactcaactttcctaaaagatactgagctttacacgatcaaagatggtgaagctatcgtattatcgagtattccttttaatgcaaattggttaaatcaacaatatgctgaaattatccaagcaatcttatttgatgttgtaggctatgaagtaaaacctcactttattactactgaagaattagcaaattatagtaataatgaaactgctactccaaaagaaacaacaaaaccttctactgaaacaactgaggataatcatgtgcttggtagagagcaattcaatgcccataacacatttgacacttttgtaatcggacctggtaaccgctttccacatgcagcgagtttagctgtggccgaagcaccagccaaagcgtacaatccattatttatctatggaggtgttggtttaggaaaaacccatttaatgcatgccattggtcatcatgttttagataataatccagatgccaaagtgatttacacatcaagtgaaaaattcacaaatgaatttattaaatcaattcgtgataacgaaggtgaagctttcagagaaagatatcgtaatatcgacgtcttattaatcgatgatattcagttcatacaaaataaagtacaaacacaagaagaatttttctatacttttaatgaattgcatcagaataacaagcaaatagttatttcgagtgatcgaccaccaaaggaaattgcacaattagaagatcgattacgttcgcgctttgaatgggggctaattgttgatattacgccaccagattatgaaactcgaatggcaattttgcagaagaaaattgaagaagaaaaattagatattccaccagaagctttaaattatatagcaaatcaaattcaatctaatattcgtgaattagaaggtgcattaacgcgtttacttgcatattcacaattattaggaaaaccaattacaactgaattaactgctgaagctttaaaagatatcattcaagcaccaaaatctaaaaagattaccatccaagatattcaaaaaattgtaggccagtactataatgttagaattgaagatttcagtgcaaaaaaacgtacaaagtcaattgcatatccgcgtcaaatagctatgtacttgtctagagagcttacagatttctcattacctaaaattggtgaagaatttggtgggcgtgatcatacgaccgtcattcatgctcatgaaaaaatatctaaagatttaaaagaagatcctatttttaaacaagaagtagagaatcttgaaaaagaaataagaaatgta

SEQ ID NO: 4614 - DNA, 1128 bp, Staphylococcus aureus
atggaattcactattaaaagagattattttattacacaattaaatgacacattaaaagctatttcaccaagaacaacattacctatattaactggtattaaaatcgatgcaaaagaacatgaagttatattaactggttcagactctgaaatttcaatagaaatcactattcctaaaactgtagatggcgaagatattgtcaatatttcagaaacaggctcagtagtacttcctggacgattctttgttgatattataaaaaaattacctggtaaagatgttaaattatctacaaatgaacaattccagacattaattacatcaggtcattctgaatttaatttaagtggcttagatccagatcaatatcctttattacctcaagtttctagagatgacgcaattcaattgtcggtaaaagtgcttaaaaacgtaattgcacaaacgaattttgcagtgtccacctcagaaacacgcccagtactaactggtgtgaactggcttatacaagaaaatgaattaatatgcacagcgactgactcacaccgcttggctgtaagaaagttgcagttagaagatgtttctgaaaacaaaaatgtcatcattccaggtaaggctttagctgaattaaataaaattatgtctgacaatgaagaagacattgatatcttctttgcttcaaaccaagttttatttaaagttggaaatgtgaactttatttctcgattattagaaggacattatcctgatacaacacgtttattccctgaaaactatgaaattaaattaagtatagacaatggggagttttatcatgcgattgatcgtgcatctttattagcacgtgaaggtggtaataacgttattaaattaagtacaggtgatgacgttgttgaattatcttctacatcaccagaaattggtactgtaaaagaagaagttgatgcaaacgatgttgaaggtggtagcctgaaaatttcattcaactctaaatatatgatggatgctttaaaagcaatcgataatgatgaggttgaagttgaattcttcggtacaatgaaaccatttattctaaaaccaaaaggtgacgactcggtaacgcaattaattttaccaatcagaacttac

SEQ ID NO: 4615 - DNA, 1932 bp, Staphylococcus aureus
atggtgactgcattgtcagatgtaaacaacacggataattatggtgctgggcaaatacaagtattagaaggtttagaagcagtacgtaaaagaccaggtatgtatataggatcgacttcagagagaggtttgcaccatttagtgtgggaaattgtcgataatagtatcgatgaagcattagctggttatgcaaatcaaattgaagttgttattgaaaaagataactggattaaagtaacggataacggacgtggtatcccagttgatattcaagaaaaaatgggacgtccagctgtcgaagttattttaactgttttacatgctggtggtaaattcggcggtggcggatacaaagtatctggtggtttacatggtgttggttcatcagttgtaaacgcattgtcacaagacttagaagtatatgtacacagaaatgagactatatatcatcaagcatataaaaaaggtgtacctcaatttgacttaaaagaagttggcacaactgataagacaggtactgtcattcgttttaaagcagatggagaaatcttcacagagacaactgtatacaactatgaaacattacagcaacgtattagagagcttgctttcttaaacaaaggaattcaaatcacattaagagatgaacgtgatgaagaaaacgttagagaagactcctatcactatgagggcggtattaaatcttatgttgagttattgaacgaaaataaagaacctattcatgatgagccaatttatattcatcaatctaaagatgatattgaagtagaaattgcgattcaatataactcaggatatgccacaaatcttttaacttacgcaaataacattcatacgtacgaaggtggtacgcatgaagacggatttaaacgtgcattaacgcgtgtcttaaatagttatggtttaagtagcaagattatgaaagaagaaaaagatagactttctggtgaagatacacgtgaaggtatgacagcaattatatctatcaaacatggtgatcctcaattcgaaggtcaaacgaagacaaaattaggtaattctgaagtgcgtcaagttgtagataaattattctcagagcactttgaacgatttttatatgaaaatccacaagtcgcacgtacagtggttgaaaaaggtattatggcggcacgtgcacgtgttgctgcgaaaaaagcgcgtgaagttacacgtcgtaaatcagcgttagatgtagcaagtcttccaggtaaattagccgattgctctagtaaaagtcctgaagaatgtgagatattcttagtcgaaggggactctgctggggggtctacaaaatctggtcgtgactctagaacgcaggcgattttaccattacgaggtaagatattaaatgttgaaaaagcacgattagatagaattttgaataacaatgaaattcgtcaaatgatcacagcatttggtacaggaattggtggcgactttgatctagcgaaagcaagatatcacaaaatcgtcattatgactgatgccgatgtggatggagcgcatattagaacattgttattaacattcttctatcgatttatgagaccgttaattgaagcaggctatgtgtatattgcacagccaccgttgtataaactgacacaaggtaaacaaaagtattatgtatacaatgatagggaacttgataaacttaaatctgaattgaatccaacaccaaaatggtctattgcacgatacaaaggtcttggagaaatgaatgcagatcaattatgggaaacaacaatgaaccctgagcaccgtgctcttttacaagtaaaacttgaagatgcgattgaagcggaccaaacatttgaaatgttaatgggtgacgttgtagaaaaccgtagacaatttatagaagataatgcagtttatgcaaacttagacttc

SEQ ID NO: 4616 - DNA, 1473 bp, Staphylococcus aureus
ttagatggtgaaacactaacaattgaggatattaaatcatttttacaacaacaatcaaagattgaaattattgatgatgcgttagaacgtgtcaaaaaaagtagagcggtagttgaacgcattattgaaaatgaggaaacggtttacggtatcactacaggttttgggttatttagtgatgtacgtatagacccgacgcaatataatgaattacaagtgaatctgatacgctcacatgcctgtggactaggtgagccattttcaaaagaagtagcattagtcatgatgattttacgattgaatacattattaaaaggtcattcaggtgccactttagaattagtgagacaattacaattttttataaatgaacgtattataccgataatcccacagcaaggctctctcggtgcatcaggagatttagcgccattatcacatttagcattagcattaattggcgaagggaaagtattgtacagaggtgaagaaaaggatagtgacgatgtattaagagaattaaatagacaacctttgaaccttcaggctaaagaaggtttagcattgattaatggtacgcaagctatgacagctcaaggtgtcattagttatatagaagcagaagatttaggttaccaatctgaatggattgctgcattaacgcatcagtctcttaacggcattatagatgcatatcgacatgatgtgcacgctgttcgtaattttcaagaacagattaatgtggcagcgcgtatgcgtgattggttagaaggatcaacattaacgacgcgacaagcagaaatacgtgtacaagatgcatatacgttgcgttgtataccacaaatccatggcgcgagttttcaagtattcaattatgttaaacagcaattagaatttgaaatgaatgcggctaatgataatccacttatatttgagggagcaaatgaaacgtttgttatttcaggtggtaacttccatggacaaccaattgcttttgcattagatcatcttaaattaggtgtaagtgaattagcaaacgtatcggaacgtcgtctagagcgactagtaaatcctcaattaaatggtgatttaccagcatttcttagcccagagccaggattgcaaagtggcgcgatgattatgcaatatgctgctgcaagtctcgtttctgaaaataaaactttagcgcatccagcgagtgttgattctatcacttcatctgcgaaccaagaagatcacgtatctatgggaactacagctgctagacatggttatcaaattattgaaaatgcaagacgtgtgttggcaatcgaatgtgttattgcattacaagcagcagagttgaaaggtgtcgaaggattatcaccaaaaacacgtcgcaagtatgatgagtttcgaagtatcgtgccatccattacacatgaccgtcaatttcataaagatattgaagcggttgcacagtatttaaagcaa

SEQ ID NO: 4617 - DNA, 1905 bp, Staphylococcus aureus
ccatttgtcatcatgatcatcacagcaattgttttaatgggtgtatggtttatctttaatagtcttatagcactaattgcatctatcgttcttgtcgtgatgattattgttagcatcgttttattcagacaagctttaatgaaaatggatagttatgtagatggtttgagtgcgcaaatttcaacaacaaataataaagcaatcaaacatttaccaattggtatcattgttttagatgaaaatgatcacatcgaatgggttaaccaatttatgacagatcatatggaagcaaatgtcatttctgaatctgtaaatgaagtatttccaaacattttaaagcaattagatagagtgaaatccgttgaaatagaatataatcagtatcatttccaagtacgttattctgagaatgatcactgcctctatttctttgatataactgaacaagtacaaacaaatgaactatatgaaaattctaaaccaatcattgcgacattatttttagataactacgatgagattactcaaaatatgaatgatacgcagcgttcggaaatcaattcaatggtaacgcgtgttattagtcgatgggcaactgagtataatatattctttaaaaggtatagttccgatcaattcgtagcctatttaaatcaaaaaatattagctgacttagaagaatctaaatttgatatcttgagtcaactacgtgaaaaaagtgttggttatcgtgcccaattaacattaagtatcggtgttggtgaaggtactgaaaatttaatcgacttaggtgaattatcacaatcaggcctagacttagcattaggacgtggtggtgaccaagttgcaattaaaagtattaatggtaatgtgcgtttctatggcggtaagactgacccgatggagaaacgtactcgtgtaagagcacgtgtgatctcacatgcgttaaaagatattcttgcagagggtgacaaagtcattatcatgggacataaacgtcctgacttagatgcaattggtgcagcaatcggtgtgtctagatttgcaatgatgaataatttagaagcatacatcgtattaaatgagactgacattgatccaacattacgacgcgtgatgaacgaaattgataaaaagccagagttaagagagcgatttattacatcagatgatgcttgggatatgatgacatctaagacaaccgtagtgattgttgatacgcataaaccggaactggttttagatgaaaatgtcttaaataaagcaaatcgtaaagttgttatcgatcatcatagacgtggtgaaagcttcatctctaacccattgttggtatatatggaaccatatgcaagttcgacagctgaattggtaacagagttactggaatatcaaccaacagaacaacgtttaacacgtcttgaatcaacagtgatgtatgcaggtattattgtagatacaagaaactttacattacgaacaggatcaagaacattcgatgcagcgagttatctacgtgcacatggtgcagatacgattttaacgcaacatttcttaaaagatgatgtggatacttacattaatcgatctgaattaattcgaactgtaaaagtcgaagataatggcatagccattgcgcatggttcagaagataaaatttatcatccagtaacagttgcacaagcagcagatgaactgttaagtttagaaggtattgaagcatcatatgttgttgcgagacgtgaagataatctgattggtatatctgcgcgttcactcggttcagtaaatgtccagttaacaatggaagcacttggtggcggtggacatttaaccaatgctgcaacacaacttaaaggtgtgacagtcgaagaggcgatagcacaattacaacaagcaattacagaa

SEQ ID NO: 4618 - DNA, 444 bp, Staphylococcus aureus
atgaaagtaatttttacacaagatgttaaaggtaaaggtaaaaaaggtgaagttaaagaagtaccagtaggttatgcaaataacttcttattgaaaaagaattatgctgtagaagcaacaccaggtaaccttaaacaattagagttacagaaaaaacgtgcaaaacaagaacgccaacaagaaattgaagatgctaaagcattaaaagaaactttatcaaacattgaagttgaagtatcagcaaaaactggtgaaggtggtaaattgtttggatcagtaagtacaaaacaaattgccgaagcactaaaagcacaacatgatattaaaattgataaacgtaaaatggatttaccaaacggaattcattccctaggatatacgaatgtacctgttaaattagataaagaagttgaaggtacaattcgcgtacacacagttgaacaa

SEQ ID NO: 4619 - DNA, 1362 bp, Staphylococcus aureus
ccacataacaatgaagctgaacagtctgtcttaggttcaattattatagatccagaattgattaatactactcaggaagtgttgcttcctgagtcattttataggggtgcccatcaacatattttccgtgcaatgatgcacttaaatgaagataataaagaaattgatgttgtaacattgatggatcaattatcgacggaaggtacgttgaatgaagcgggtggcccgcaatatcttgcagagttatctacaaatgtaccaacgacgcgaaatgttcagtattatactgatatcgtttctaagcatgcattaaaacgtagattgattcaaactgcagatagtattgccaatgatggatataatgatgaacttgaactagatgcgattttaagtgatgcagaacgtcgaattttagagctatcatcttctcgtgaaagcgatggctttaaagacattcgagatgtcttaggacaagtatatgaaacagctgaagagcttgatcaaaatagtggtcaaacaccaggtattcctacaggatatcgagatttagaccaaatgacagcagggttcaaccgaaatgatttaattatccttgcagcgcgtccatctgtaggtaagactgcgttcgcacttaatattgcacaaaaagttgcaacgcatgaagatatgtatacagttggtattttctcactagagatgggtgctgatcagttagccacacgtatgatttgtagttctggtaatgttgactcaaaccgcttaagaaccggtactatgactgaggaagattggagtcgttttactatagcggtaggtaaattatcacgtacgaagatttttattgatgatacaccgggcattcgaattaatgatctacgttctaaatgtcgtcgattaaagcaagaacatggcttagacatgattgtaattgactacttacagttgattcaaggtagtggttcacgtgcgtccgataacagacaacaggaagtttctgaaatctctcgtacattaaaagcattagctcgtgaattagaatgtccagttatcgcgttgagtcagttatctcgtggtgttgaacaacgacaagataaacgtccaatgatgagtgatattcgtgaatctggttcgattgagcaagatgccgatatcgttgcattcttataccgtgatgattactataaccgtggcggcgatgaagatgatgacgatgatagtggttttgagccacaaacgaatgatgaaaacggtgaaattgaaatcatcattgctaagcaacgtaatggtccaacaggcacagttaagttacactttatgaaacaatataataaatttacagatatcgattatgcacatgctgat

SEQ ID NO: 4620 - DNA, 1281 bp, Staphylococcus aureus
atgtcatcaatcgtagtagttgggacacaatggggagacgaaggaaaaggaaaaataacggatttcttggcagaacagtcagatgttatcgcgcgtttttcaggtggtaataatgcaggccataccattcaatttggcggagaaacatataaattacatttagtaccatctggtatcttttacaaagacaaattagcggtaatcggtaacggagtcgttgttgatccagttgcactattgaaagaattagacggattaaatgaacgtggcattcctacaagtaatttacgtatatctaatcgtgcacaattgattttaccatatcacttagcacaagatgaatatgaagaacgtttacgcggtgagaataagattggtacaactaaaaaaggtatcggtccagcatatgtagacaaagttcaacgtatcggtattcgtatggcagatttacttgaaaaagaaacattcgaaagattattaaaatcaaacattgaatataaacaagcatatttcaaaggtatgtttaacgaaacatgtccatcatttgatgatatctttgaagaatattatgcagcaggtcaacgtctaaaagaatttgtaacagacacatcaaaaatcttagacgatgcatttgtagcagatgaaaaggtacttttcgaaggtgcgcaaggtgtaatgttagatatcgaccatggtacatatccattcgttacatcaagtaatccaattgcaggtaacgttactgttggtacaggtgtaggtcctacattcgtttcaaaggtaattggtgtatgtaaagcttatacatcacgtgttggtgatggtccattccctactgaattattcgatgaagatggacatcatattagagaagttggtcgtgaatacggtacaacaacaggacgtcctcgtcgtgtaggttggtttgattcagttgtattacgtcactctcgtcgtgtaagtggtattacagatttatctattaactcaattgatgttttaacaggcctagacacagtgaaaatttgtacagcttatgaattagacggtaaagaaattgctgagtacccagcaaacttagatcaattaaaacgttgtaaaccaatctttgaagagttaccaggttggacagaagacgtaacaagtgtgcgtactttagaagaattacctgaaaatgcacgtaagtatttagagcgtatttcagaattatgtaatgtacaaatttctatcttctcagttggtccagatagagaacaaacaaacctattaaaagaattgtgg

SEQ ID NO: 4621 - DNA, 699 bp, Staphylococcus aureus
atggctagaaaagttgttgtagttgatgatgaaaaaccgattgctgatattttagaatttaacttaaaaaaagaaggatacgatgtttactgtgcatacgatggtaatgatgcagtcgacttaatttatgaagaagaaccagacatcgtattattagatatcatgttacctggtcgtgatggtatggaagtatgtcgtgaagtgcgcaaaaaatacgaaatgccaattataatgcttactgctaaagattcagaaattgataaagtgcttggtttagaactaggtgcagatgactatgtaacgaaaccgtttagtacgcgtgaattaatcgcacgtgtgaaagcgaacttacgtcgtcattactcacaaccagcacaagacactggaaatgtaacgaatgaaatcacaattaaagatattgtgatttatccagacgcatattctattaaaaaacgtggcgaagatattgaattaacacatcgtgaatttgaattgttccactatttatcaaaacatatgggacaagtaatgacacgtgaacatttattacaaacagtatggggctatgattactttggcgatgtacgtacggtcgatgtaacgattcgtcgtttacgtgaaaagattgaagatgatccgtcacatcctgaatacattgtgacgcgtagaggcgttggatatttcctccaacaacatgag

SEQ ID NO: 4622 - DNA, 1824 bp, Staphylococcus aureus
atgaagtggctaaaacaactacaatcccttcatactaaacttgtaattgtttatgtattactgattatcattggtatgcaaattatcgggctgtattttacaaataaccttgaaaaagagctgcttgataattttaagaagaatattacgcagtacgctaaacaattagaaattagtattgaaaaagtatatgacgaaaagggctccgtaaatgcacaaaaagatattcaaaatttattaagtgagtatgccaaccgtcaagaaattggagaaattcgttttatagataaagaccaaattattattgcgacgacgaagcagtctaaccgtagtctaatcaatcaaaaagcgaatgatagttctgtccaaaaagcactatcactgggacaatcaaacgatcatttaattttaaaagattatggcggtggtaaggaccgtgtctgggtatataatatcccagttaaagtcgataaaaaggtaattggtaatatttatatcgaatcaaaaattaatgacgtttataaccaattaaataatataaatcaaatattcattgttggtacagctatttcattattaatcacagtcatcctaggattctttatagcgcgaacgattaccaaaccaatcaccgatatgcgtaaccagacggtcgaaatgtccagaggtaactatacgcaacgtgtgaagatttatggtaatgatgaaattggcgaattagctttagcatttaataacttgtctaaacgtgtacaagaagcgcaggctaatactgaaagtgagaaacgtagactggactcagttatcacccatatgagtgatggtattatcgcaacagaccgtcgaggacgtattcgtatcgtcaatgatatggcacttaagatgcttggtatggcgaaagaagacatcatcggttattacatgttaagtgtattaagtcttgaagatgaatttaaacttgaagaaattcaagagaataatgatagtttcttattagatttaaatgaagaagaaggactaatcgcacgtgttaactttagtacgattgtgcaggaaacaggatttgtaacgggttatatcgctgtgttacatgacgttactgaacaacaacaagttgaacgtgagcgtcgtgaatttgttgccaatgtatcacatgagttacgtacacctttaacttctatgaatagttacattgaagcacttgaagaaggtgcatggaaagatgaggaacttgcgccacaatttttatctgttacccgtgaagaaacagaacgaatgattcgactggtcaatgacttgctacagttatctaaaatggataatgagtctgatcaaatcaacaaagaaattatcgactttaatatgttcattaataaaattattaatcgacatgaaatgtctgcgaaagatacaacatttattcgagatattccgaaaaagacgattttcacagaatttgatcctgataaaatgacgcaagtatttgataatgtcattaccaatgcgatgaaatattctagaggcgataaacgtgtcgagttccacgtgaaacaaaatccactttataatcgaatgacgattcgtattaaagataatggcatcggtattcctatcaataaagtcgataagatattcgaccgattctatcgtgtagataaggcacgtacgcgtaaaatgggtggtactggattaggactagccatttcgaaagagattgtggaagcgcacaatggtcgtatttgggcaaacagtgtagaaggtcaaggcacatctatctttatcacacttccatgtgaagtcattgaagacggtgattgggatgaa

SEQ ID NO: 4623 - DNA, 1290 bp, Staphylococcus aureus
aaacaagttattatttcgggcctcatgttattttcactattttttggagccggaaatttaatattcccgcccatgcttggccatacagcgggtcaaaatatgtggattggtatgctaggctttgcccttacaggcatattactcccctttattactgttattgttgttgcattttatgatgaaggtgttgaaagtgtaggcaatcgtatacatccatggttcgggtttatttttgctgtcgtgatttacatgtctatcggagcattttacggtattccacgtgctgcaaatgtcgcgtacgaaattggtacaagacacattttacctgtgcacaaccaatggactttaattatattcgcagcagtcttttttgccatcgtttactggattagtttaaatccatcgaaaatcgttgataatttaggtaaattattaacaccgttattactattaatggtcgctctattaagtattgctgtcattttcaaccctgaatctgcactaagtgcacctaaggataaatatataacacatcctttcatttcaggaagtttggaaggctattttacaatggaccttgttgctgcgttagctttttccgtagtcattgtcaatggctataagtttaaaggcctcacagatcgcacgaaaatattaaagtatgtctgcttttcaggatttattgcagctatattacttggtatgatttactttgcgttggcatatgtaggtgcgtcaacagctccaggaaactttaaagatggtactgatatattgacatacaattcattacgcgtatttggttcgttcggtaacctcgtatttggaatgacggttattcttgcatgcctaacaacatgtataggactcgtcaacgcttgtgcaacatttactaagaaacacgtgcctaagttttcttataaaatattcgcacttgttttctctatcataggatttttatttacaacacttggtttagaaatgattttaaaaattgctgtaccattgttgacattaatatatcccgtgtctattgcacttgtactgatatcatttgctaacatgtttagcacattcagattcagttgggcctatcgactcgcaactgttattacattgattatttcaattttacaaatactaaatagtttcaacttattacacggtgttattttgaaatggtttatgatgttacctttagcagatatcgatttagcttggcttgtaccattcattcttttggcaatcataggtttcatcatcgatgtagttatacgccgtccgaaacaa

SEQ ID NO: 4624 - DNA, 897 bp, Staphylococcus aureus
attgagtattctcgagaagttcagcaagcacgggagaacaatcaaccgattgtagcattagaatcaacaattatttcgcatggtatgccgtacccacaaaatgttgaaatggcaacaacggtagagcaaattatcagaaataatggtgccattccagcaaccatagccattatagagggcaaaattaaaattggtttagaaagtgaagatttagaaatacttgcaactaataaagacgttgctaaagtgtctagaagggatttagcagaaattgttgcgatgaagcgtattggtgctactactgtagcgacgacgatgatatgtgctgcaatggctggtattcaattttttgttactggaggtattgggggtgtccataaaggtgcagaacatacgatggacatttcagcagacttagaagaactgtctaaaacaaatgtcactgttatctgtgcaggtgccaaatcaattttagacttacctaagacaatggagtatttagaaacaaaaggcgttccagttattggatatcaaacgaatgaattgccagcattcttcactcgcgaaagcggtgttaagttaacaagttcggttgaaacgccagaacgacttgctgacattcatttaacaaaacagcagttaaatcttgaaggtggcattgttgttgctaatcccattccatatgagcatgccttatcaaaagcatatattgaggcaatcataaatgaagctgttgttgaagccgaaaatcaaggtattaaaggtaaggacgccacaccgttcttgttagggaaaattgtagaaaaaacgaatggtaaaagtttagcagcaaatataaaacttgttgaaaacaatgcggcgttgggtgctaaaattgctgtcgctgttaataaatta

SEQ ID NO: 4625 - DNA, 774 bp, Staphylococcus aureus
atcgcaattgatattggaggtactcaaattaaatcggcagttattgataagcaattgaatatgtttgactatcaacaaataccaacgccggacaataaaagtgagcttattactgacaaagtatatgagattgtaacaggatatatgaagcaatatcagttaatccaacctgtcataggtatttcatcagcaggcgttgttgatgaacaaaaaggcgaaattgtatacgcagggccaaccattccgaattataaaggtactaattttaagcgattattaaaatccctgtctccttatgtcaaagtaaaaaatgatgtaaacgctgcattactaggcgaattgaaattacatcaatatcaagcagaacggatcttttgtatgacgcttggtacaggcattgggggtgcgtacaaaaataatcaaggccatattgataatggtgaacttcataaggcaaatgaagttgggtatttattgtatcgtccaactgaaaatacaacgtttgagcaacgtgctgcaacgagtgcattgaaaaagcgcatgattgacggagggtttacaagaagcacacatgtgccagtattgtttgaagcagctgaagaaggtgatgatattgcaaaacaaatattaaatgagtgggcagaagatgtagcagaagggattgcccaaatacaagtcatgtatgatccagggcttatattaattggtggcggtatatctgaacaaggagacaacctcattaaatatatcgagccgaaagttgcacactattta

SEQ ID NO: 4626 - DNA, 681 bp, Staphylococcus aureus
acaaaaactgataaacgcatcgtcaattatataagacaaaatggttatagcgatgccttttcaacgattaactccttagcccatgcgattggtacatcaccagcaacgatgacacgctttagtcataagctggattatgagaatttccaagatttaaaatttaatattcaacaagaaatgacagagacagttattgaaaatagcccaatcattcaaagaattcataaatatcatcaacaaatcattcaacaaactggtgaatttattgataacgacattatccaaacctttatcgacaaacttcaatcaagtcgacatatactctttgctggactaggtagctctggtttatcagcgactgaattttattatcgtatgattcgtatggggctaaaaggtaatgttactaccgattcacatttaatgaaaatatcggcatctctactatctcattcggacatgtttattgctatgtcaaatagtggtaatacttcggaattaatttcagcagcggaagtcgccaaatctcatggtgcatatgtcgttgccatcacaaatttcgaaggtagtaaacttacagattgtgcagatttagtacttttaacaacggatcaatcgcgtaataccgaccatcaatttatcaacacacaaattgcgacactctttttaatcgatatcgtg

SEQ ID NO: 4627 - DNA, 1266 bp, Staphylococcus aureus
cgtttttttgtctatagtttagtgggcatactatgtttctttattccttttacgattaatggtaacaacactattttcgtcgatcatgttcatctagccattcgctcaatcataggtccacttatgccctatgttgcactgattatgattttaattggtacagcgttaccaatagtgagacgtacttttatgacttcaatcacaaacttggtcattacattatttaaagttgcaggtgcaataatcggtataatgtatgtatttaaaatcggtccatcaatactatttaaagctaactatggtccgtttttgtttgaaaaattaatgatgccattaagtatcttaattccagtaggtgcaattgcgctttctttattagtgggctatggcttattagaatttgtcggtgtttatatggagcctattatgagacctatttttaaaacaccaggaaaatccgctgtcgatgcagtggcttcgtttgtcggcagttattccttaggattattgattactaatcgtgtctataagcaagggatgtacaacaaaagagaagccacgattattgcgactggcttttcaacagtttcagcaacttttatgattatcgttgctaaaactttagggctaatgccgcattggaatttatacttttggataactttagtcatcacatttgtcgtgactgcaattactgcatggctaccgccaatcaccaatgaatcaacagaatattataacggacaagaaggagaacaagaagttgctattgaaggaagcagactgaaaactgcatatgcagaggcgatgaaacaaaatgcattaacaccatccctcgtgaagaacgtttgggacaatttgaaagacggtttagaaatgactgttggtattttaccttctatattatcgattggttttttagggctgattgtagcgaactatacaccattcattgattggcttggctatatattctatccatttatttatattttcccaattgctgatcaggctgtacttgcaaaagcttcagcgatttctattgtagaaatgtttctaccatctttgttagtaactaaagctgcaatgagtactaaatttgtcgtcggtgtagtaagcgtatcagccattatctttttctcagcattagtgccatgtatactagcaactgaaattaaaatacctgtctggaaactcatcatcatttggtttttacgcgtggcattgtcgctattaatcactatccccgtcgctttactcattttt

SEQ ID NO: 4628 - DNA, 930 bp, Staphylococcus aureus
atgtaccgatacaaaccacttttacaatcaatccacttacctaatggcatcaaaatttcgaatcgctttgtattatcaccaatgaccgtaaacgcatcaacaaaagaaggctatattacaaaagcagacttggcttatgctgcacgtcgctctaattcagctggtatgcaagtcaccggcgctgcttacattgaaccttatggtcaattgtttgaatacggctttaatattgatcatgatgcttgtatccctggattaactaacatggcatctacgatgaaacaacatggtagcctcgctattattcagttagcgcatgctggtcgtttttcaaatcaagcaattttaaattttggaaaggtgtatggaccaagccctatgacgttgcattcaccgattgaacacgatgttatcgccatgtctcaagagaaaatcaatagcatcattcagcagtatcgtgatgctacattacgcgcgattaaagcaggttttgatggtgtggaaatttcgattgcacaacgtttgctgattcaaacatttttctcaactttttcgaataaacgtacagaccattacggtgccgactcattaaaaaatcgtgcaagattatgtttagaagttatgcgcgcggtacaagaagtgattgataaagaagcacctgacaattttattttaggatttcgagcaacgccagaagaaaccagaggtagtgatttaggatataccattgacgagttcaatcaattaatcgattgggtcatggacgtttcaaacatccaatatttagcaatcgctagctggggtcgacatatttatcaaaatacgtctcgtacaccaggtgaacatttcggtcggccagttaaccaaattgtctatgaacatttagcaggtcgtatccctttaattgcaagtggcgggattaattctcca

SEQ ID NO: 4629 - DNA, 996 bp, Staphylococcus aureus
ttggttaaattaagcgtattagactatgccttaatagatgaaggtaaggatgcacaaaaggcgttgcaagattcagtgacacttgcaaaattagcagatcgacttggctttaagcgaatttggtttacggaacatcataatgtaccagcgtttgcgtgtagtagtccagaacttttgatgatgcatacattggcgcagacaaatcacatacgagttggctctggtggtgtgatgttgccgcactatcgaccttataaaattgctgagcattttagaatgatgacagcgttatatccaaatcgtattgatttaggtattggtaataatccaggtactactatggtaaagcaagctttagatggaataaatcctaaatatgatagttacgatgaatcgatttcgttattacgtgattatcttacaataaaggataaaccaagtgcgcatatgttaggtgtccaaccacacattgatcattttccagaaatgtggttattaagtagtagcgcaacatctgccaaaatagctgccgaactaggtatagggctttctgttggaacatttttgctaccagatataaatgcgatacatgcagcgaaggataacattgatatttacaaaaaacatttccgtgcatcaatgattaaaatggacgcaaaagtgatggcatctgtatttgtcattgtagctgataacgaagcggaagtagcagcattacaacatgccttagatgtttggttattaggtaaattacaatttgcagaatttgaacattttccatcggtagacacagcgcaaaagtataagctcaatgatcgagacaaagagatgattcaagcacatcaagcacgtatcattgcaggtacacaagaacaggttaaagcacaattagatgatttcattgctacgtttgaagttgatgaggtgttagtagcaccgcttattccaggcattgaagaacgttgtaaaacattaaaattactcgcagaaatctat

SEQ ID NO: 4630 - DNA, 294 bp, Staphylococcus aureus
gataagatgaaaaagttagccaattatttatgggtagaaaaagtaggagatttgtatgtgtttagtatgacacctgaattgcaagatgatattgggacagtaggttatgttgaattcgtgagtccagatgaagttaaagtggatgatgaaattgtgagtatcgaagcatcgaaaacggtcattgatgtgcaaacgccattgtcaggaacgattattgagcgaaatacaaaagcggaagaagaaccgacaattttaaattctgaaaaaccagaagaaaattggttgttcaaattg

SEQ ID NO: 4631 - DNA, 1311 bp, Staphylococcus aureus
tttatagtcgatattttaagtcaaccagccattcttgttgcactgattgcctttataggtttaatcgttcagaaaaaacctgccgcaacaatcacttcaggaaccattaaaacgatattaggcttcttaattttaagtgcaggtgctgatgtcgtcgttcgatctcttgagccattcggcaaaatatttcaacacgcattcggtgtgcaaggtatcgtacctaacaacgaagctatcgtctcactagccttaaaagattttggaacaacagctgcactcatcatggtctgtggcatgattgttaatattttaattgcccgcttcactaatttaaaatatatctttttaacaggtcatcatacattttacatggctgcgtttttagcaatcattttaacagtcagtcatattaaaggctggctaacgattgttatcggcgcactcgtattaggattaatcatggcagtcttacctgcattactccaacctacgatgcgaaaaattacagggaatgatcaagtagcgttaggtcatttcggctcaatcagttactttgccgcaggtgctgtaggtcaattattcaaaggtaagtctaaatcaacggaagagattaaatttccaaaaggattaagtttcttgcgagaaagtacaattagtatctcgattacgatggcattactttacttcatcgcatgcttatttgcgggcgttagttatgtacacgaatctattagtgatggtcaaaactttattgtattttcattaattcaaggtgtgacatttgctgctggtgtatttattattttaacgggcgttcgcttaatcttagctgaaatcgtcccagcatttaaaggcatttctgaaaagcttgtaccaaattctaaacctgcattagactgccctattgtgttcccttatgcacaaaatgcagtactaattggattctttgtcagctttattacaggtgtcatcggtatgtttatcttattcttatttggtggcgtcgtcattttacctggcgtagttgcacacttcttcttaggtgcaacggctgctgtattcggtaatgcaagaggcggtattaaaggtgctgttgctggcgccgctctaaatggtatcctaataacgtttttaccattattattcttgccatttttaggcgaattaggtggtgctgcaacaacattctcagatacagactttttagctgtcggtatcgtgttcggtaacgcagtaaaatatatgggattatttggtgcgattctatttattattatcgtaggtgcgacagcaattttattaaaaggtcgt

SEQ ID NO: 4632 - DNA, 429 bp, Staphylococcus aureus
gacattttgtcaacaacacgcatcattgtaaaagaacaagtaaatgattggactgaagctataactatagcttctcagccattactacaagaacaaattattgaacaaggctatgttcaagcaatgattgatagcgttaatgaatttggaccttatatcgttatcgcacctgaaattgcaattgcacatgcaagaccgaacaatgacgtacatcaagttggtttaagtctattaaagttgaatcaacatgtggcattttgtgatgaagatcactacgcatcactcatttttgtattgagtgccatcgacaatcattcacacttatctgtattacaaaatttagcaaccgtactgggcgataaccaaacagtccagcaactattaactgcaacaaacgcacaagacattaaaaacattttaaaggagcat

SEQ ID NO: 4633 - DNA, 1824 bp, Staphylococcus aureus
ttaagttatagacaaatcgaaattttgtatcttttaattcatgagcaaacgtttattcaaatcaataccattgctaatcaacttggtgtatcacctcgtaccattcaatatgatatagcatatattgagcaatatgctgaaacttatcattaccaagtcagccgtaataaagctgcaggcatcaaagtaacaacagctaacacaacgatattaaatgaattagaacacaatctaacgaatcaaattcatttttcaaaagatgagcggctcacacatatcgctttaaagttattcgaaacaactgatcctgtttcaacaaagcaacttgcacaagatgttaatgtttcgcgtcggacaattgcagatgatattaaaatgattcaagcccaactagatcaataccatttaaagttaaattatgtccacaataaaggattcaatattattggtgaggaagatcattatcgtaaagcgtatgcacactttatacatcaatatatgaaacaagctgcaccttttatagaggctgatatctttaattcagaatctatcgcattggttcgccgtgccattattaagacattaaatagtgaaaattatcatttagttcagtcggctatcgatggcttaatctatcatatactcattgccattcagcgtttaaatgaaaatttttcgttcgatatacctatcaatgaaattgataaatggcgacatactaatcagtatgctattgctttaaaaatgatagaaaacttagaacgcagttgtaatgtcacatttccagagtctgaaattatctttatcacgttacatttactaggctctaaaatgaccgaacatacagcatcttcaattacctttgaataccatgatttatcgcaaaatatacatgaattgatcacttatgttagccaagaattaggcattgatatgtcaaaagacaacaagttgcataccagtctaatcacacatatcaaaccagctatacatcgtattaaatacgatatgctacaacctaatcctttgaggcaagaagttatgcgtcgctatcctcaaatcattgaagccgttagcaagcatattagcccaattgaacaagatgctgctattcgcttcaacgaagatgaattaacatacattacaattcatttcgcatcaagtatagagcgtgttgcaacacataaacaatcaatgattaaggttgtcttactatgtggttctggtataggcacgtcgcaacttttaaaatcaaaactaaatcatctgtatcctgagtttcacatttgggatgcctattccatttatcaattggaagaaagtcgattattgcaagataacattgattatgtcatttcaacagtaccttgtgaaatctcaactgtaccagttattcatgtcgatccatttatcaatcagcaatctcgtcaaaaattgaatcaaattatcaatgactcaagagaacaacgagtcatgaaaatggcaactgatggcaagtcactctcagatttattgcctgaacatcgcatcataataaataaacaaccattatcaattgaatcggcaattacagtggctgtgcaacctttaatcaatgatggcattgtcaattcaaattatacagctgcaattttaaaacaattagaacaattcgggtcatatatggtcattagtccacatattgcacttattcacgctggtactgattatgtacagaatggtgtaggtttcgcactaacttatttcactgaaaggattatttttggtagtaaagctaacgatcccgttcaccttgtaattacattagcaacggaccaccccaat

SEQ ID NO: 4634 - DNA, 753 bp, Staphylococcus aureus
ttagaaaataaagttgcagtcgtaacaggagcaagtacaggtatcggacaagcttctgcaatcgctttagctcaagaaggtgcgtatgtattggcggtagacatagctgaagcggtatcggagactgtcgataaaattaaaagtaatggtgacaaagcaaaggcttatgttgtggatattgcaagcgaacaacaaattgacaattttgcatcagaaattagagaacagtttgggcatgttgatgtgttatttaataatgccggtgtggataatgcggctggtagaattcatgagtatccaacagacgtatatgacaagattatgaatgtagatatgcgtggaacatttttgatgacgaaaatgatgttacctttaatgatgactaaaggtggctctattgttaacacatcttcattttcaggacaggcagcagatttgtatcgctcaggatataatgctgcgaaaggggcagtgattaattttactaaatccattgcaatcgaatatggtagagatggcattcgagctaatgcaattgcaccaggtacgattgaaaccccgttagtagataaactgacaggtactagcgaagataaggaaggcaaagcattcagagaaaatcagaaatggatgacaccgctgggacgtttaggtaaaccagaagaagtaggcaagctcgttgtctttttagcatctgatgagagttcatttattactggtgaaacaattcgcattgatggcggtgttatggct

SEQ ID NO: 4635 - DNA, 819 bp, Staphylococcus aureus
atgaataactttaataatgaaatcaaattgatattacaacaatatttagaaaagtttgaagcgcattacgagcgtgtattacaagacgatcaatatatcgaagcattagaaacattgatggatgactatagtgaatttattttaaatcctatttatgaacaacaatttaatgcttggcgtgacgttgaagaaaaagcacaattaataaaatcactgcaatatattacagcgcagtgtgttaaacaagtggaagtcattagagctagacgtctattagacggacaggcgtctaccacaggttattttgacaatatagaacattgtattgatgaagagtttggacaatgtagtatagctagcaatgacaaattattgctagttggttcaggtgcatatccaatgacgttaattcaagtagcaaaagaaacaggtgcttcagttatcggtattgatattgatccacaagccgttgacctaggacgcagaatcgttaacgtcttagcaccaaatgaagatataacaattacggatcaaaaggtatctgaacttaaagatatcaaagatgtgacgcatatcatattcagctcgacaattcctttaaagtacagcattttagaagaattatatgatttaacaaatgaaaatgtcgtagttgcaatgcgctttggtgatggcatcaaagcaatatttaattatccgtcacaagaaacagcggaagataagtggcaatgtgtgaataaacatatgagaccacagcaaatttttgatatagcactttataaaaaagcagctataaaggtaggtattacggatgtctaa

SEQ ID NO: 4636 - DNA, 1302 bp, Staphylococcus aureus
atgtctaaattattaatgataggcactggtccggtcgcaatccaattagcgaatatttgctatttaaaatcagattatgagattgatatggttggacgtgcctcaacatcagaaaaatcaaaacgcttatatcaagcgtataaaaaagagaaacaatttgaagtcaaaatacaaaacgaggcgcatcaacatctggaaggtaagtttgaaattaatcgtttgtataaagatgttaaaaacgttaagggtgaatacgaaacggttgtcatggcatgcacagcagatgcttattatgacacactacagcaattgtcgttagaaactttgcaaagtgtcaaacatgtcattttaatttcaccgacatttggatcgcaaatgattgtggaacaatttatgtctaagttcagtcagaatatcgaagtgatttcattttcaacttatcttggtgatacacgtattgttgataaagaagcacctaatcatgtgttgacaacaggtgtaaaaaagaaattgtacatgggatcgacacattcaaactcaacaatgtgtaaacgaatctctactttagctgagcaattgaagattcaattagaagtcgttgaatcgccactgcatgctgaaacgcgaaacagttcgctttatgtgcacccaccactatttatgaatgacttttcattgaaagccattttcgaaggaacggatgtaccggtttatgtgtataagttatttcctgaaggaccgataacgatgacattaatccgtgaaatgcgtttaatgtggaaggaaatgatggctattttacaagcatttagagtgccgtcagtcaacctgcttcaatttatggtgaaggaaaattatccagtacgtcctgaaactttggatgaaggtgatattgagcatttcgaaatcttgccagatatcttacaagaatatctgctttatgtaagatataccgcaatcctcattgatccattttcacagccagacgaaaacggacattactttgatttttcagctgtaccatttaagcaagtctataaaaatgaacaggatgttgttcaaattccaagaatgccaagtgaggattattacagaacagcgatgattcagcatattgggaaaatgctaggtatccaaacgccaatgattgatcagttcctagctcgctatgaagcaagttgccaggcgtacaaggatatgcatcaagatcaacacttatcttctcaatttaatacaaatttatttgaagaagataaagcactcgtcacaaaatttttggaaatcaatagaacgctttcataa

SEQ ID NO: 4637 - DNA, 852 bp, Staphylococcus aureus
atgagtaaaatttttgtaactggtgcaacgggccttatcggcattaaattagttcaaagactaaaagaagaggggcatgaggttgctggttttactacatctgagaatggtcaacaaaagctagctgctgttaatgtaaaagcatatattggtgatatattaaaagctgatactattgatcaagcgttagcagattttaaaccagaaatcattatcaaccaaattacggatttaaaaaatgttgatatggcagcaaatacgaaagtacgtattgaaggttctaaaaacttaattgatgcggcgaaaaagcatgacgttaagaaagtaattgcccaaagtattgcctttatgtatgaacctggcgaaggattagcaaatgaggaaacttcacttgattttaactcaactggtgatagaaaagtaacggttgatggtgtggttggtctagaagaagaaacggctcgtatggatgaatacgttgttttacgttttggttggttatatggcccaggtacttggtacggaaaagatggcatgatttataatcaatttatggatggtcaagtgacactttcagatggtgtaacatcatttgtgcatcttgatgatgcagttgaaacatctattcaagctattcattttgaaaatggtatttataatgtagcagatgatgcacctgttataggttctgaatttgcagaatggtataaagaacaacttggtgttgaaccaaatattgatattcaacctgcgcaaccatttgaacgtggcgtaagcaatgagaagtttaaagcacaaggtggtactctgatttataaaacttggaaagatggcatgaatccaattaaataa

SEQ ID NO: 4638 - DNA, 432 bp, Staphylococcus aureus
atgttactaccaaaacgtgtaaaatatcgtcgtcaacatcgtcctaaaacaactggtcgttctaaaggcggtaactacgtaacatttggtgagtttggtttacaagctacaacaacgtcttggatcacatctcgtcaaatcgaatctgctcgtatagcaatgacacgttacatgaaacgtggcgggaaagtttggattaaaatcttcccacatacaccatatactaaaaaacctttagaagtacgtatgggtgctggtaaaggtgcggttgaaggctggatcgcagttgttaaaccaggtagaattttattcgaagttgctggcgtttctgaagaagttgcgcgtgaagcactacgtttagcaagtcacaaacttccagtaaaaactaagtttgtaaaacgtgaggaattgggtggtgaaacaaatgaaagc

SEQ ID NO: 4639 - DNA, 1761 bp, Staphylococcus aureus
aaaatgtattccccgcgatacttacccggattagatggattgagggcattcgcagttataggaatcattatttatcacttgaatgcacaatggttaagtgggggctttttaggagtagatacattcttcgttatttcaggttatttaataacaagtttgttgataagtgagtattatcggacgcaaaaaatcgatttgctagagttctggaagcgacgattgaaacgactcattccggcagtgttatttttaatctgtgtcgtgcttatgttcacactgatatttaaaccggaattgattatacaaatgaaacgagatgctattgcagctatattctatgtttcaaactggtggtacatttcacagaatgtagattattttaaccaatttgctattgaaccactcaaacatttatggtctttagccattgaagaacaattttacttgcttttcccattggttatcacgttcttattacatagatttaaaccgagaaatattattcaaacgctatttattgtatcgttgatttctttaggacttatgatagtgattcattttatcactggagataattcacgtgtgtattttgggacagatacacgactgcaaactttattgcttggttgtatattagcatttatttggccaccgtttgctttgaaaaaagatatttctaaaaagattgtcgtatcattagatattatagggatatctggttttgcggtgctaatgactttgttctttatagttggagaccaagatcaatggatatataatggaggattttacattatatcatttgcaactttattcattattgcgattgcggtacatccttctagtttatttgctaaatttttaagtatgaaacctttactaattataggtaaacgatcatatagcttatatttatggcattatcctatcattgtttttgtgaacagttattacgtacaaggacaaataccggtatacgtttatattatagaaattttgttaacagcgttaatggctgaaatttcgtatcgctttattgaaacacctatacgtaaaaaaggatttaaagcttttgcatttttacctaaaaagaagagtcaatttgctagaactgtgttagttatcttattattgattccatctatcatcgtgctcagtgggcaatttgatgcacttggtaaacaacatgaagctgagaagaaagagaagaagactgaatttaaaacaacgaagaaaaaagtcgttaaaaaagataaacaagaggataagcagacggcgaatagtaaagaggatattaaaaagtcatcaccactattaattggtgactcggttatggtagatattggtaatgtctttactaagaaaataccaaatgcacaaattgatggtaaagttggacggcaactcgttgatgctacaccaattgtgaaatcgcaatataaagactatgctaaaaaaggtcaaaaagttgtagtagagcttggtacaaatggggcatttacgaaagatcaattaaatgaactattggatagttttggaaaagcagacatatatttagtttctattagagtacctagagattatgaaggtagaataaataaattaatttatgaggcagctgaaaagcgctctaatgtacatctagtcgattggtataaagcttctgcaggtcatccggagtactttgcatatgacggtattcacttagaatatgcaggtagtaaagcgctgactgatttgattgtaaaaacgatggaaaca

SEQ ID NO: 4640 - DNA, 489 bp, Staphylococcus aureus
atgaaaaccatgaaaaaatatatcaaaacagcatttttctgtagtatgtattggttaattgttcaactaaatatagcaaatttaggtacaagaattcctgacaagtattttcgtcagaagcatataatatttaaatcatttaactttgagaagcatggaaaattttggaacaaatggttttacgtaagaaaatggaagcataagattttagatggtcataagcttaatcgaaatatatataatcagcgtcatttaatgacaatcaatactgatgaaattgaaaaaatgattatagagacaaagagggcagagttgatccattggatatcgatacttccagtcatcatattcaataaaggccctcgtttagtaaagtatataaatgttttctatgcaatgatagctaatgttccaatcattattgtgcaacgttataatcgaccgagattaacgcagttactacgcatattaaaacgaagaggtgaacgt

SEQ ID NO: 4641 - DNA, 1321 bp, Staphylococcus aureus
atgactaaacatatcatcgttattggtggtggcttaggtgggatttctgcagcaattcgaatggcacaaagtggctattcggtctcattatatgaacaaaataatcatataggaggcaaagtgaatcgtcatgaatcagatggctttggctttgatttaggtccatctattttaacgatgccttatatttttgaaaaattattcgaatatagcaagaagcaaatgtcagactacgttacaatcaagagattgccacatcaatggcgtagcttttttccagatggaacgactatcgatttgtatgaaggtattaaagaaacagatcagcataatgcgatattgtcgaacaaggatatagaggaactgcaaaattatttgaattatacaagacgaatcgatcgtattactgaaaaagggtattttaactatggtttagatacactatctcaaattattaaatttcatggaccattaaatgcacttattaattatgattatgtacatactatgcaacaggccatagacaagcgtatctcgaatccattcttgcgacaaatgttaggctattttatcaaatatgtaggttcttcatcatacgatgcgccagcagtattatctatgttattccatatgcaacaagagcaaggcctttggtatgtagaaggtggaatccatcatttagccaatgccttggaaaagctagcgcgtgaagaaggtgtcacaattcatacaggtacacgtgtggacaatattaaaacatatcaaagacgtgtgacgggtgtcagattagatacaggtgagtttgtaaaggcagattatattatttcaaatatggaagtcatacctacttataaatatttacttcaccttggtactcaacgattaaacaaattagagcgggaatttgagccagcaagctcaggatatgtgatgcatttaggtgttgcttgccaatacccgcaattagcacatcataatttcttttttacggaaaatgcttatctcaattatcaacaagtttttcatgaaaaggtattgccagatgatccgaccatttatctagtaaatacgaataaaactgatcacacacaagcgccagtaggttatgaaaatatcaaagtcttaccacatattccatatattcaagatcagccttttacaactgaagattatgcgaagtttagggataaaattttagataaattagaaaaaatgggactcactgatttaagaaaatacattatttatgaagatgtttggacaccggaggatattgaaaaaaattatcgttctaatcgtggtgcaatatatggtgttgtag

SEQ ID NO: 4642 - DNA, 2382 bp, Staphylococcus aureus
gtggctaatacgaaaaaaacaacgttagatatcactggtatgacttgtgccgcatgttcaaatcgtatagaaaagaaactgaataaacttgatgacgttaatgcccaagtgaatttaactacagagaaagcaactgttgagtataaccctgatcaacatgatgtccaagaatttattaatacgattcaacatttaggttacggtgtcgctgtagaaactgtcgaattagacattacaggcatgacttgtgctgcatgctcaagccgtattgaaaaagtgttaaataaaatggacggcgttcaaaatgcaacggtcaatttaacaacagagcaagctaaagttgactattatcctgaagaaacagatgctgataaacttgtcactcgcattcaaaaattaggttatgacgcgtctattaaagataacaataaagatcaaacgtcacgcaaagctgaagcgctacaacataaattgattaagcttatcatatcagcagtattatctttaccgctattaatgttaatgtttgtgcatcttttcaatatgcatataccagcactatttacgaatccatggttccaatttattttagctacacctgtacaatttattattggatggcaattttatgtaggtgcttataaaaacttaagaaatggtggcgccaatatggatgtacttgttgctgttggtacaagtgcagcatatttttacagtatttatgaaatggttcgttggctaaatggctcaacaacgcaaccgcatttatactttgaaacaagcgccgtactaattaccttaatcttattcggtaagtatttagaagctagagcgaagtctcaaacaaccaatgcgcttggcgaattattaagtttacaagctaaagaagcacgcattttaaaagacggtaatgaagtgatgattcctctaaatgaagtacatgttggagatacacttatcgttaaaccaggtgaaaagatacctgttgatggcaaaattattaaaggtatgactgccatcgacgaatctatgttaacaggtgaatctatccctgttgaaaagaatgttgatgacactgtaattggttcaacgatgaacaaaaacggtactattactatgacagcaacaaaagttggcggagacactgcgttggcaaatattattaaagttgtcgaagaagctcaaagttctaaagcgccgattcagcgattggcagatattatttctggttatttcgttcctatcgttgttggtatcgcactattaacatttatcgtgtggattactttagttacaccaggtacatttgaacctgcacttgttgcgagtatttccgttctcgtcattgcttgtccatgtgcattaggacttgctacaccaacttctattatggtaggtactggtcgcgctgctgaaaatggtattttatttaaaggtggcgagtttgttgaacgcacacatcaaattgataccatcgttttagataagacgggtaccattacaaatggtcgtccagtcgtgacagattatcatggtgacgatcaaacgctacaactacttgctactgctgaaaaagattctgaacacccattggcagaagccatagtcaattatgcaaaagaaaagcaattaacattaactgagacaacaacatttaaagcagtacctggtcatggaattgaagcaacgattgatcatcaccatatattggttggtaaccgtaaattaatggctgacaatgatattagcttgcctaagcatatttctgatgatttaacacattatgaacgagatggtaaaactgctatgctcattgctgttaattattcattaactggtatcatcgcagtggcagatactgtaaaagatcatgccaaagatgctataaaacaattgcatgatatgggcattgaagttgccatgttaactggcgataataaaaatactgctcaagctattgcaaaacaagtaggcatagatactgttattgcagatattttaccagaagaaaaagctgcacaaattgcgaaactacagcaacaaggtaagaaggttgtgatggttggtgacggtgtaaatgatgcacctgcattagttaaagctgatatcggtatcgccattggtacaggtacagaagttgccattgaagcagctgatattactattcttggtggcgacttgatgcttattcctaaagccatttatgcaagtaaagcaactattcgtaatattcgtcaaaatctattttgggcattcggctataatattgccggtatccctatagctgcattgggcttacttgcgccatgggttgctggtgctgcaatggcactaagttcagtaagtgttgtcacaaacgcacttagattgaaaaagatgcga

SEQ ID NO: 4643 - DNA, 558 bp, Staphylococcus aureus
atgaatagtatgatgatgcaaaaggagtgtgtgtttatggtatataagagttactatgattcgcctgtaggacgattggaacttgtgagtgatggggtaagtctgaccgctgttttgtttgaaaatcaacaagatgatagtactagggaagaaaatacgtctttagcgatatttaaagaggcgacacagtggttagacgcgtattttaaaggtgacaatcctgaaatcacaatacctttaaagccaacaggtagtcattttcaacagtgtgtttggaatgaattaagacagattccttatgggacgttaacaacgtatggtgctattgccaaaaaagtaggcaaggtgcttgataagccaaaaatgtcggcccaagcggttggaggtgcagtcggaagtaatccattatctattatcgtgccatgtcatcgtgttgtcggtaaaacgggtagcttaacaggattcggtggaacgattaataataaaattaagctgttagagttggagaatatcgatatgtcaaagctttatgtaccaaaacatagcacgaagccgtaa

SEQ ID NO: 4644 - DNA, 1287 bp, Staphylococcus aureus
atgtccatgcaaagtttagataagaatttccgacatttatctcgtcaacaaaagttacaacaattggtagataagcaatggttatcagaagagcaattcaacattttattgaatcatccattaattgatgaggaagtagcaaatagtttaattgaaaatgtcatcgcgcaaggtgcattacccgttggattattaccgaatatcattgtggacgataaggcatatgttgtacctatgatggtggaagagccttcagttgtcgctgcagctagttatggtgcaaagctagtgaatcagactggcggatttaaaacggtatcttctgaacgtattatgataggtcaaatcgtctttgatggcgttgacgatactgaaaaattatcagcagacattaaagctttagaaaagcaaattcataaaattgcggatgaggcatatccttctattaaagcgcgtggtggtggttaccaacgtatagctattgatacatttcctgagcaacagttactatctttaaaagtatttgttgatacgaaagatgctatgggcgctaatatgcttaatacgattttagaggccataactgcatttttaaaaaatgaatttccgcaaagcgacattttaatgagtattttatccaatcatgcaacagtgtccgttgttaaagttcaaggcgaaattgatgttaaagatttagcaaggggcgagagaactggagaagaggttgccaaacgaatggaacgtgcttctgtattggcacaagttgatattcatcgtgctgcaacacataataaaggtgttatgaatggcatacatgccgttgttttagcaacaggaaatgatacgcgtggtgcagaagcaagtgcgcatgcatacgcaagtagagatggtcaatatcgtggtattgcaacatggagatacgatcaagaacgtcaacgtttaattggtacaatagaagtgcctatgacattggcaatcgttggcggtggtacaaaagtattaccaattgctaaagcttctttagaattgctaaatgtagactcagcacaagaattaggtcatgtagttgctgccgttggtttagcacaaaactttgcagcatgtcgcgcgctcgtttccgaaggtatccagcaaggccatatgagcttgcaatataaatctttagctattgttgtaggtgcaaaaggtgatgaaattgcgcaagtagctgaagcattgaagcaagaaccccgtgcgaatacacaagtagctgaacgcattttacaagatttaagaagccaacaataa

SEQ ID NO: 4645 - DNA, 1101 bp, Staphylococcus aureus
atgttagttgcagtagtcaaagaattaaaacaaggtgaaggacgtgtagcttgcacacccgaaaatgtgcgtaagttaacggctgcaggacataaagtaattgtagaaaaaaatgctggcattggttcaggattttctaacgatatgtatgaaaaagaaggcgctaagatcgtaactcacgaacaagcatgggaagcagatcttgttatcaaagtaaaagaacctcatgaaagcgaatatcaatatttcaaaaagaatcaaattatatggggatttttacatttagcatcttcaaaagaaatagtagaaaaaatgcaagaagttggtgtaactgcgattagtggtgaaaccattataaaaaatggaaaagcagaattattagcgccaatgagtgctatagcaggtcaacgctcagcaattatgggagcttactactctgaagcacaacatggtggtcaaggtactttagtgactggtgtacatgaaaatgtggatatacctggtagtacatatgtgattttcggtggtggagtagcagcaacaaatgcagcaaatgttgccttgggactaaatgctaaagtaatcattatcgagttaaacgatgaccgcattaaatatcttgaagatatgtatgcagaaaaagatgtcacagtagtcaaatcaacaccagaaaatttagcagaacaaattaaaaaagcagatgtatttatttctacaattttaattcctggtgcgaaaccgccaaaattggttactcgtgagatggttaaatcaatgaaaaaaggttcagtattaatcgatatagctattgaccaaggtggaactattgaaacaattagaccaactacaatttctgatccggtgtatgaagaagaaggtgtgattcattatggtgtaccaaatcaaccaggagcagtcccaagaacttcaacaatggcattagcacaaggaaatattgattatatattagaaatttgtgacaaaggcctagaacaaacaattaaagataatgaagccttaagtactggagtaaacatttaccaaggacaagtgacaaaccaaggattagctacatcacatgacctagattataaagaaata

SEQ ID NO: 4646 - DNA, 237 bp, Staphylococcus aureus
atggcaggtggaccaagaagaggcggacgtcgtcgcaaaaaagtatgctatttcacagcaaatggtattacacatatcgactacaaagacactgaattattaaaacgttttatctcagaacgcggtaaaattttaccacgtcgtgtaactggtacttcagctaaatatcaacgtatgttgactacagctatcaaacgttctcgtcatatggcattattaccatatgttaaagaagaa

SEQ ID NO: 4647 - DNA, 1305 bp, Staphylococcus aureus
aaaaatgaaaacattaatgtagagattttaactacgtcagatatgcatagtcatttcttaaatggtgattatggttcaaatatttatagagctggtacttatgttaaccaagtaagagcacaaaatcatcgcgtcattttattagatagtggcggaagtttagctggctcgttagcggcctattattatgctattgttgcaccttataaacgacatccaatgataaagttgatgaacagaatgcattatgatgctagcggtgtgagtccaagtgaattcaagtttggtttatcatttttaactcgttcaattgctttggcacgttttccatggttatcagcaaatattgaatacaatgttactaaggagccttatttttcaactccatattgtattaaacattttggtgacttaaaaattgctatcgtaggcgttacagcagatggtttaatggaaaatgagtattctgaaatggagcaagatgtatctattgaaaagacattagtggcctcaaaacgatggattagatatatccatgaagttgaagagccagattttttgattgtaatttatcatggtggattgaataaaattagtaatagcacgaaaaataaaaaggcaagttcgaatgaagctgaaaaattaatggaagaactcggtgttatagatttaatgattacagctcatcagcatcaaacaatagtaggtcaagatcatgaaacgtattatgttcaggctggtcaagatgcaaaagagcttgtacatctttcgattaattttaaaaagagaacaacaacttatgatgttgaaagtattgattctaaagtgattgacttaaatgagtatgaagaggatcaagaattattagatttaacattctatgatagaaaagcagtggcttattggtcacaggaaatcataagtgataaaggtttgatgttatcagtaaatgggttacaagatttagtctgtcaaacacatccattttcgcaattattacatgatgcaattcaccttgcatttgataatgatataacatgtgtccacgtgcctatgaacggagagaaggggttgagtggacagattcgaaatgaagatttgtatcatgcatacccttatccagataagccaatggatatgacaattagtggtcaaaatatcaaagatatattggagtatagttattcacatttagattttgttaacgagcaattaagcttaacaattattgatgaaacattatgtacaatgtggcaaggattcaattatgaaattgatatgaatcaagaacctgggcaaagagta

SEQ ID NO: 4648 - DNA, 6077 bp, Staphylococcus aureus
accaagcaatgcatggcttaagagaaagtattcaagataacgcagcaactaaagcaaatagcaaatatatcaacgaagatcaaccagaacaacaaaactacgatcaagcagtgcaagctgcaaatagcattatcaatgagcaaacagcgacattagataataatgcgattaatcaagcagcgacaactgtgaatacaacgaaagcagcattacatggtgatgtgaagttacaaaatgataaagatcatgctaaacaaacggttagtcaattagcatatctaaacaatgcacaaaaacatatggaagatacgttgattgatagtgaaacaactagaatagcagttaagcaagatttgactgaagcacaagcattagatcaacttatgaatacattacaacaaagtattgctgacaaagatgcaacacgtgcgagcagtgcatatgtcaatgcagaaccgaataaaaaacaagcatatgatgaagcagttcaaaatgctgagtctatcattgcaggattaaataatccgactatcaataaaggaaatgtatcaagtgcgacacaagcagtgacaacatctaaaaatggtttagatggtgttgaacgattagctcaagataagcaaacagctggaaattctctgaatcatttagatcaattaacaccagctcaacaacaagcgttagaaaatcaaattaataatgcaacaactcgtgataaagtggctgaaatcattgcacaagcgcaagcattaaatgaagcgatgaaagcattaaaagaaagtattaaagatcaaccacaaactgaagcaagtagtaaatttattaacgaggatcaagcgcaaaaagatgcttatacgcaagcagtacaacacgcgaaagatttgattaacaaaacaactgatcctacattagttaaatcagtaattgatcaagcaacacaagcagtgaatgacgctaaaaacaacttacatggtgatcaaaaattagctcaagataagcaacgtgcaacagaaacgttaaataacttgtctaacttgaatacaccacaacgtcaagcacttgaaaatcaaatcaataatgcagcaactcgtggcgaagtagcacaaaaattaactgaggcacaagcacttaaccaagcaatggaagcattacgtaatagcattcaagatcaacagcaaacagaagcgggtagcaagtttatcaatgaagataagccacaaaaagatgcataccaagcagcagtacaacatgccaaagatttgattaatcaaactagcaatccaacgcttgataaagcacaagttgaacaattgacacaaggtgttaaccaagctaaagataacctacatggtgatcaaaaacttgcagacgataaacaacatgcagttactgatttaaatcaattaaatagtttaaataatccgcaacgtcaagctcttgaaagtcaaataaacaacgcagcaactcgtgatgaagtagcgcaaaaattagctgaagcacaagcgcttgatcaagcaatgcaagcattacgtaatagtattcaagatcaacaacaaacagaatctggtagcaagtttatcaatgaagataagccacaaaaagatgcataccaagcagcagtacaacatgccaaagatttaattaaccaaacaggtaatccaacactcgataaatcacaagttgaacaattaacacaagcagtaacaactgcaaaagataacctacatggtgatcaaaaacttgctcgtgatcaacaacaagcagtaacgactgttaatgcattaccaaacttaaatcatgcgcaacaacaagctttaactgatgctataaatgcagcgcctacaagaacagaggttgcacaacatgttcaaactgctactgaacttgatcacgcgatggaaacattgaaaaataaagttgatcaagtgaatacagataaggctcaaccaaattacactgaagcgtcaactgataaaaaagaagcagtagatcaagcgttacaagctgcagaaagcattacagatccaactaatggttcaaatgcgaataaagacgctgtagaacaagcattaactaagcttcaagaaaaagtaaatgagttaaatggtaatgagagagtcgctgaagctaaagcacaagcgaaacaaactattgaccaattagcacatttaaatgctgatcaaattgcaactgctaaacaaaacattgatcaagcgacgaaacttcaaccaatcgctgaattagtagatcaagcaacgcaattgaatcaatctatggatcaattgcaacaagcagtcaatgaacatgctaacgttgagcaaactgtagattacacgcaagcagattcagataagcaaaatgcttataaacaagctattgcagaagctgaaaatgtattaaaacaaaattcgaataagcaacaagtggatcaagcacttcaaaacattttaaatgcaaaacaagcattaaatggtgatgaacgtgtagcacttgctaaaacaaatggtaaacatgacatcgaccaattgaatgcattaaacaatgctcaacaagatggatttaaaggtcgcatcgatcaatcacacgatttaaatcaaatccaacaaattgtagatgaggctaaggcacttaatcgtgcaatggatcaattgtcacaagaaatctctggcaatgaaggacgcacgaaaggtagcacgaactatgtcaatgcagatacacaagttaaacaagtgtatgatgaagcggttgataaagcgaaacaagcacttgataaatcgacaggtcaaaacttaactgcagaacaagttatcaaattaaatgatgcagtcactgcagctaagaaagcattaaatggtgaagaaagacttaataatcgtaagtctgaagcattacaaagattggatcaattaacacatctaaacaatgctcaaagacaattagcaatccaacaaattaataatgctgaaacgctaaataaagcatctcgagcaattaatagagcgactaaattagataatgcaatgggtgcagtacaacaatatattgacgaacagcaccttggtgttatcagcagcacaaattacatcaatgcagatgataatttgaaagcaaattatgataatgcaattgcgaatgcagcacatgagttagataaagtgcaaggtaatgcaattgcaaaagctgaagcagagcaattgaaacaaaatattatcgatgctcaaaatgcattaaatggagaccaaaaccttgcaaatgccaaagataaagcaaatgcgtttgttaattcgttaaatggattaaatcaacagcaacaagatcttgcacataatgcaattaacaatgctgatactgtatcagatgtaacagatattgttaataatcaaattgacttaaatgatgcaatggaaacattgaaacatttagttgacaatgaaattccaaatgcagagcaaactgtcaattaccaaaacgctgacgataatgctaaaacaaacttcgatgatgctaaacgtctagcaaatacattgctaaatagtgataacacaaatgtgaacgatatcaatggtgcaattcaagcagtcaaagatgcaatccaaaatcttaacggtgagcaacgtctacaagaagctaaggacaaagcaattcaaaatgttaacaaagtattagcagataaattgaaagaaatcgaagcttcaaacgcgacggatcaagacaagcttattgcgaaaaataaagcagaagaattggcaaacagcatcattaataacattaataaagcaacaagtaatcaggatgtatctcaagttcaaacagctggcaaccaagcgattgaacaagtgcatgccaatgaaataccgaaagctaaaattgatgcaaataaagatgttgataagcaagttcaagcattaattgatgaaatcggtcgaaatccaaatctaacagataaggaaaaacaagcactcaaagatcgaatcaatcaaatacttcaacaaggtcataacgacattaacaatgcactgactaaagaagcaattgaacaagcaaaagagcgtttagcacaagcattacaagacatcaaagatttagtgaaagctaaagaagatgcgaaaaataaaataaaagccttagctaatgcgaagcgtgatcaaatcaattcaaatccagatttaacacctgagcaaaaagcaaaagcgctcaaagaaattgacgaagctgaaaaacgagcactacaaaacgttgagaatgctcaaactatagatcaattaaatcgaggattaaacttaggtttagatgacattagaaatacgcatgtatgggaggttgacgatcaacctgctgtaaatgaaatttctgaagcaacacctgaacaattgcttgttaatggtgaactaatcgtacatcgtgatgacatcattacagagcaagatgttttagcacacattaacttaatagatcagcttacagcagaagttatcgatacaccatcaactgcaacgatttctgatagcttaacagcaaaagttgaagttacattgcttgatggatcaaaagtgattgttaatgttcctgtaaaagttgtagaaaaagaattgtcagtagtcaaacaacaggcaattgaatcaattgaaaatgcggtacaacaaaagattaatgaaatcaataatagtgtgacattaacactggaacaaaaagaagcagcaattgccgaagttaataagcttaaacaacaagcaattgatcatattaacaatgcacctgatgttcattcagttgaagaaattcaacaacaagaacaagcgcatattgaacaatttaatccagaacaatttacgattgaacaagcaaaatcaaatgcaattaaatcgattgaagatgcaattcaacatatgattgatgaaatcaaagctcgtactgatctaacagataaagagaagcaagaagctattgctaagttaaatcaattaaaagaacaagcaattcaattgattcaacgtgcgcaaagcatcgatgaaataactgagcaattggaacaatttaaagctcaaatgaaagcagctaatccaacagcaaaagaactagctaaacgcaagcaagaagctattagtaaaattaaagacttttcaaatgaaaaaatgaatagtattcgaaatagtgaaattggcacagctgatgaaaaacaagcagcaatgaatcaaattaacgaaattgtgcttgaaacaattagagatattaataatgcgcatacattacagcaagttgaggctgcattgaacaatggtattgctcgaatttcagcagtacaaattgtaacatctgatcgtgctaaacaatcatcaagtactggaaatgaatctaatagccatttaacaattggttatggaactgcaaatcatccatttaacagttcgactattggacataaaaagaaacttgatgaagatgatgacattgatccacttcatatgcgtcactttagtaataatttcggtaatgttattaaaaacgctattggtgtggtgggtatctctggcttactagctagtttctggttcttcattgccaaacgtcgtcgtaaagaagatgaagaggaagaattagaaataagagataataataaagattcaataaaagagactttagacgatacaaaacatttaccacttttatttgcgaaacgtcgcagaaaagaagatgaagaagatgttactgttgaagaaaaagattcgttaaatactggcgagtcactcgataaagttaaacatacgccgttcttcttaccaaaacgccgtcgtaaagaagatgaagaagatgtggaagttacaaatgaaaacacagatgaaaaagtgttgaaagataacgaacattcaccactcttaatcgcaaaacgacgcaaagataaagaggaagatgttgaaacaacaactagtattgaatctaaagatgaggacgttcctttattattggctaaaaagaaaaatcaaaaagataaccaatccgaagacaaaaagtcagcatcaaaaaatacttctaaaaaggtagcagctaaaaagaagaaaaagaaatctaagaaaaataaa

SEQ ID NO: 4649 - DNA, 1278 bp, Staphylococcus aureus
atgaacggggataatcagcaaatactcagagaaattgtattgaatcctactattcatggtaaagaacttgaatcgatatttggtttgtctcgtagacaacttggatatcgcattcaaaaaatcaatttgtggcttgaacaagagggttatccaaaacttgaaagaacaagccaaggaaattttattgtaagttctgaaatcatgacgttattcaagcgagatgtatcggagcagcaaatgttaaacggcaacaatgtcatttttagcatagaaacacgtcgttattatttaatgctcatgctttttagtaaggaaaacgcaatgtctctaaaccatttttcaattgatttacaagtcagtaaaaatactgtcattcacgatataaatcatgtgaaagagcaattggaagatcatggtttgtcacttaagtattctcgaaaacatggttatgaaattgttggtgatgaatttgaagttcgccgtttcttcattaagttgattgatcaaaggttaaatcatgatattactaaaagtgaagttttaaaggcgctcaacttaacattcgaagatatcgcatatcaaaaagacaagatcaaacaggtagaacaatttttgaagagtcgctttatagacaaatcacttagttcattgccttatgtcctttgtgtgattcgtagacgaattcaaaatggtcatgtgattaatccattaaatattaattatcagtatttgagggatacgaaagaatatcaagcaacggagattatgacgcaacatgagccggatttgccagaagcggaaaagttatatttgacattacacttactttcaacaagtgtgcaatggactgatttgcaggaatcagataacatatcgaatttaacgatggccatcgctcaaatgattcaccattttgaacaaatcacttttattaacattgaagataaggagaaattatcacagcaactcttgttacatttaacgcctgctttttataggattaaatacaacttaacggatcgtgatgaattaataaatcctttacaaggaaattatcaatccttatttcatatggtgaaacaatcatgtcaatcgttaactgaatatttcggaaaatcgttgcctgataatgaaatagcatatttaaccatgttgttcggaggtagtttgagacgtcaagatgaaaacttcgatggcaagataaaagctattatcgtgtgtacacaaggcacgtcagtatcacaaatgatgttatacgagttgagaaacttatttcca

SEQ ID NO: 4650 - DNA, 1029 bp, Staphylococcus aureus
gtgaaagctttagtaaaaacaagagaaggacatggcaacttagaacttcttgataaagaagttgcaacaccgctagatgataaagtaaagattaaagtacattatgcaggaatttgtggcacagatattcatacttatgaaggtcattataaagttaattttccagtgacattaggtcatgaattttctggtgaaatcgttgaagttggagcagacgttaaagattttaaagttggtgaccgtgtcacttctgaaacgacattctatgtttgtaatgagtgtgaatactgtgaatcaaaagactataatttatgcaaccatcgaaaaggtattggaacacaagttgatggcgcatttactaattatgtcattgcacgtgaagaaagtttgcatcatattccagatgaagtatcgtaccagtctgcagctatgacagaaccattagcatgtgcacatcatggcgtttctaagattcaagtgaactctggcgatgtagcagttgtaatggggcctgggccaatcggattacttgtagcacaagtgttaaaaagtaaaggcgcaactgttgtggtaactggattggacaatgacaaagtcagattagataaagcagaagcattgcacatggattatgtagtcaatttacaacaaacagacttaaaaacgtatatcaatggaattacagacggttacggtgcagatgttgttgttgaatgttcaggtgcagttccagcagcacgacaaggtttggatattttacgcaaaaaaggtttctacagtcaaataggtatttttaaggatgctgaaatcccatttgatatggaaaaagtgattcaaaaagaaataacagttgttggtagtagaagtcaaaagccagcagattgggaaccttcattgcaacttatggctgatggtttagtaaatgctgaagctttggtgacaaaaatatatgatatttcgaaatgggacgaggcgtatcaacatttaaaatctggcgaaggtattaaagcattacttaagccgctcgat

SEQ ID NO: 4651 - DNA, 915 bp, Staphylococcus aureus
gtgaaagcattgaaattatatggcgtggaagatttacggtatgaggataatgaaaagccagtcattgaaagtgtgaatgacgttattgttaaagtacgagcgactggcatatgtggttcagacacgtcacgatacaaaaaaatggggccatacattaaaggtatgccatttggtcatgaattttcaggtgttgtagatgccattggaagtgatgttacgcatgttaatgtaggcgacaaagtgacaggttgcccagcaataccttgttatcaatgcgagtattgtttaaaaggtgaatatgcacgatgtgaaaagttgttcgtcattggctcatatgaacctggatcgttcgcggaatatgtcaaattgccagcgcaaaatgttttaaaggttccagacaatgttgattacattgaagcagcaatggttgaaccatcagccattgttgcgcatgggttttataaatcaaatatacaacctggtatgactgttgcagtaatggggtgtggcagtataggattgttagctattcaatgggcacgaatatttggtgctgcacatatcatcgctatagatatagatgcgcataaactagatattgcaacatcattgggcgcacatcaaacaattaattcaaaagaagaaaatcttgagaaattcatcgaaaatcattacgccaatcaaatcgatttagctatagaatcatcaggtgctaaagttacgattggtcaaatattgacgctaccgaaaaaaggtggcgaggtggtattactcggaataccatatgatgatattgagattgaacgcgttcattttgaaaaaattctgcgtaacgagttgacagtatgtggctcttggaactgtttgtccagtaattttccgggcaaagagtggacggcaaccttacattatatg

SEQ ID NO: 4652 - DNA, 708 bp, Staphylococcus aureus
atggaggacaacatgatttatgcaggtattttagcaggaggtattggttcgagaatgggaaacgtgccattaccaaaacaatttttagatattgataataaaccgattttaatccatacaattgagaagttcattttagtgagtgaatttaatgagattattattgcaacgccagcacagtggatttcccatacacaggatattttaaaaaaatataacattacagatcaacgtgtcaaagtagttgcaggtggtacggatcgaaacgaaacaatcatgaacattatcgaccatattcgcaatacgcagggtatcaatgatgatgatgtgattgtaactcatgatgccgtaagaccatttttaactcaacgtattattaaagagaacattgaagtagcagcaaaatatggtgcagtagatacagtcattgaagcaattgatacgattgtaatgtctaaagataaacagaacatacacagtatccctgtaaggaatgaaatgtatcaaggccaaacaccacaatcatttaatattaaattattacaagatagttatcgcgccttaagtagtgcacaaaaagaaatcttatcagatgcatgtaaaatcattgtcgaatctggacatgcagttaaattggtacgtggagaactctacaacattaaagtgacaacaccgtatgatttaaaagtagcaaatgccattattcaa

SEQ ID NO: 4653 - DNA, 831 bp, Staphylococcus aureus
atggctattaaaaagtataagccaataacaaatggtcgtcgtaatatgacttcgttagatttcgcagaaatcacgaaaactacacctgaaaagtcattattaaaaccgctaccgaaaaaagcgggacgtaacaaccaaggtaaattgactgtaagacaccatggtggtggacacaaacgtcaataccgtgttatcgatttcaaacgtaacaaagatggtatcaatgcaaaagttgattctattcaatatgatccaaaccggtcagcaaacatcgctttagttgtatatgcagacggtgaaaaacgatatatcattgctcctaaaggattagaagtaggtcaaatcgttgaaagtggtgctgaagctgacatcaaagttggtaacgcattaccattacaaaacattccagttggtacagtagtacacaacatcgagcttaaacctggtaaaggtggacaaatcgctcgttcagctggtgcaagtgctcaagtacttggtaaagaaggtaaatacgtattaatcagattaagatctggtgaagttcgtatgatcttatctacttgccgtgctacaatcggtcaagttggtaacctacaacacgaattagttaacgttggtaaagccggacgttcaagatggaaaggtatccgtccaacagttcgtggttctgtaatgaaccctaacgatcacccacacggtggtggtgaaggtcgtgctcctatcggtagaccatctccaatgtcaccatggggtaaacctacgcttggtaagaaaactcgtcgtggtaaaaaatcatcagacaaacttatcgttcgtggacgtaagaaaaaa

SEQ ID NO: 4654 - DNA, 1116 bp, Staphylococcus aureus
agtagaagtttcttatttaaagctatttttaatattacaaagttactacatattaaaagaagcaaaacaatattattcacatcagattcacgtccgaatttatcaggtaactttaaatatgtatatgatgagttactacgccaaaaagtagattttgattacgatattcaaacagtatttaaggcgaatattacggatagacgtaaatggagagacaagtttagattgccatatttacttggtaaggccgattatatttttgtcgatgatttccatccattaatttatacggttcgctttagaccatcacaagaaattattcaagtgtggcatgccgttggtgcttttaaaacagttggctttagtcgtacaggtaaaaaaagtggtccgtttatcgattcattaaaccatcgtagttacacgaaagcatatgtttcatcagaaaccgatattccattttatgctgaagcatttggaattagagaagaaaatgttgtaccaacaggtgtaccacgtactgatgtactatttgatgaagcttatgcaacacaaattaaacaagagatggaagatgaattgccaattataaaaggtaagaaagttattctattcgcaccgacatttagaggtaatggtcacggtacggcacattatccattttttaaaattgattttgaacgtttagcaagatactgtgaaaaaaataatgcggttgtattatttaaaatgcatccatttgtaaaaaatagactcaatatttcacgtgaacacagacaatactttatcgatgtatcagattatcgtgaagtcaatgatattctctttgttacagacttattgattagtgattattcatcattaatatatgaatacgcagtatttaaaaagccaatgattttctatgcatttgacttagaagattatattacgacacgtgatttttatgagccatatgaatcatttgttccaggtaaaattgtgcaatcctttgatgcattaatggatgctttggataatgaagattatgaggttgaaaaagttgtgccattcttagataaacattttaaatatcaagatggtcgctcaagtgaacgtttagtcaaagatttgtttaga

SEQ ID NO: 4655 - DNA, 1194 bp, Staphylococcus aureus
attacaaaaacacgtcggaggtacgacatgattaaaactacaattaaaaaattgatagaacacagtatatatacgacttttaaattactatcaaaattgccaaacaagaatctaatttattttgaaagctttcatggtaaacaatacagcgacaatcccaaagcattatatgaatacttaactgaacatagcgatgcccaattaatatggggtgtgaaaaaaggatatgaacacatattccaacagcacaatgtaccatatgttacaaagttttcaatgaaatggtttttagcgatgccaagagcgaaagcgtggatgattaacacacgtacaccagattggttatataaatcaccgcgaacgacctacttacaaacatggcatggcacgccattgaaaaagattggtttggatattagtaatgttaaaatgctaggaacaaatactcaaaattaccaagatggctttaaaaaagaaagccaacgttgggattatctagtgtcacctaatccatattcgacatcgatatttcaacatgcatttcatgttagtcgagataagattttggaaacaggttatccaagaaatgataaattatcacataaacgcaatgatactgaatatattaacggtattaagacaagattaaatattccattagataaaaaagtgattatgtatgcgccaacttggcgtgacgatgaagcgattcgagaaggttcatatcaatttaatgttaactttgatatagaagctttgcgtcaagcgctggatgatgattatgtcattttattacgcatgcattatttagttgtgacacgtattgatgaacatgatgattttgtgaaagacgtttcagattatgaagacatttcggatttatacttaatcagcgatgcgttagttaccgactactcatctgtcatgttcgacttcggtgtattaaagcgtccgcaaattttctatgcgtatgacttagataaatatggcgatgagcttagaggtttttacatggattataaaaaagagttgccaggtccaattgttgaaaatcaaacagcactcattgatgcattaaaacaaatcgatgagactgcaaatgagtatattgaagcacgaacggtattttatcagaaattctgttcattagaagatggacacgcgtcacaacgaatttgccaaacgatttttaag

SEQ ID NO: 4656 - DNA, 681 bp, Staphylococcus aureus
attctagctggaggtataggctcaagaatgggtaacgtacctttacctaaacaatttttagatttagacaacaaaccgattttaatccatacattagaaaaatttattttaattaatgattttgaaaaaattattatcgcgacgccacaacaatggatgacgcatacgaaagatacacttagaaaattcaaaatttctgatgaaagaattgaagtcattcaaggtggtagagatcgtaacgatacaattatgaatatcgttaaacatattgaatcaacaaatggtattaacgatgacgatgtcattgtgacacatgatgcagttagaccatttttaacgcatcgtattattaaagaaaatattcaagctgctttagagtacggtgcagtagatacagtgattgatgctatagatacgattgttacatctaaagataatcaaacgattgatgcaattccagtgcgtaatgaaatgtaccaaggtcaaacacctcaatcgtttaatattaatttattaaaagaaagctatgcacagttaagtgatgagcaaaagagtgttttatctgatgcttgtaagattattgtagaaacaaacaaaccggttcgacttgtaaaaggtgagttatataacattaaagtaacaacaccttacgatttaaaagtagcgaatgctattattcga

SEQ ID NO: 4657 - DNA, 1053 bp, Staphylococcus aureus
atgctattattcgaggtggtattgccgatgattaatcaagtatatcaattagttgcacctagacaatttgaagttacgtataacaacgtagatatttacagtgactatgtccttgtacgtcctttatatatgtcaatttgtgctgccgatcaaagatattatactggtagccgtgatgagaatgtcttatctcagaaattgccaatgtctttaattcatgaaggtgttggtgaggtcgtatttgacagtaaaggtgtgtttaataaaggtacaaaagtagttatggtaccgaatacgccgacagaaaaagacgatgtcattgctgaaaactatttaaaatcgagctacttcagatcaagtggacatgatgggtttatgcaagattttgtgttgctaaatcatgatagagctgtaccactacctgatgatattgatttaagtattatttcatatacagagcttgtaacagtaagtttgcatgctattcgtcgttttgaaaagaaatctatttcaaataaaaatacatttggtatttggggtgatggtaacttaggttacattacagccattttattacgtaaattatatccagagtctaaaatatatgtctttggtaaaacagattataaattgagtcacttctcatttgttgatgatgtcttctttattaataaaatacctgaaggcttaacatttgatcatgcatttgagtgcgttggtgggcgtggtagccaatcagcaataaatcaaatgattgattatatttcaccagaaggaagcattgcactgttaggtgtaagtgagttcccagtagaagtcaatacacgtctagtattggaaaaaggactaacgttgattggtagtagtcgaagtggttcaaaagatttccaagatgttgtagacttatacattcaatacccagatattgtagataaattagcgttgttaaaaggtcaagaatttgaaattgcaacaattaatgatcttacagaagcttttgaagcagacctgtctacatcttggggtaaaacagtattaaaatggattatgtaa

SEQ ID NO: 4658 - DNA, 1155 bp, Staphylococcus aureus
atcgttcgtaaatataaagaattacgtaagtatttccgcaaacaatcatttaatacaagacaatttatttttaaagcgatatttaatacgacgaaatttttccacttgaaaaaagggaatacggtgttgttcacatcagactctagaccaacgatgtctggaaactttgaatacatctataacgaaatgttacgtcaaaatttagataaaaagtatgatattcacactgtttttaaagcgaatattacagatagacgtggcatcatcgacaagtttagattgccatatttacttgggaaggcagactacatctttgttgatgactttcacccattgatttatacagtgcgttttagacgttctcaagaagttattcaagtatggcatgccgttggtgcctttaaaacagttggctttagtcgtactggtaaaaagggtggaccatttattgattcattaaatcatcgtagctatacaaaagcttatgtatcatctgaaaccgatattccattctacgctgaagcatttggtattaaagagaaaaatgtagtgcctactggtgttccacgtactgatgtactatttgatgaagcttatgcgacacagatcaaacaagagatggaagatgaattaccaattattaaaggtaagaaagtcattcttttcgcaccaacatttagaggtagtggtcatggtacagcacattacccatttttcaaaattgatttcgaacgtttagcaagatattgcgaaaaaaataacgcggttgtattatttaaaatgcatccatttgtgaaaaatagacttaatattgcagacaaacataaacaatattttgttgatgtttctgactttagagaagttaatgatatactgttcataacagatttattaattagtgactattcatctttaatatatgaatatgcagtatttaaaaagccaatgattttctatgcatttgatttagaagattatattacgacgcgtgatttttatgagccatatgaatcatttgttccaggtaaaattgtgcaatcatttgacgcattaatggacgccttggacaatgaagattatgaaggagaaaaagtcattccattcttagataaacattttaaatatcaagatggccgatcaagtgagcgtttagtc

SEQ ID NO: 4659 - DNA, 1074 bp, Staphylococcus aureus
ttttcagtaatagttccaacatacaattcagaaaagtatataacagaattactcaatagccttgcgaaacaagattttccgaaaactgaatttgaagtggttgtagttgatgactgttcaacagatcaaacgttacaaatagttgaaaagtatcgtaataaattgaacttgaaagtaagtcaactcgaaacaaattctggtggtccgggtaaacctagaaatgtggcgttaaaacaagcagaaggtgaatttgtattatttgtggactccgatgactatataaacaaagagactttaaaggatgcagcagcatttattgatgaacatcactcagatgttttattgattaaaatgaaaggtgttaatggtcgtggtgtaccacaatctatgtttaaagaaacagcacctgaagttactttgttaaattcaagaattatctatactttaagcccgactaaaatctatagaacagcattactaaaagataatgacatatattttccagaagaattaaagagtgcagaagatcaattatttacaatgaaagcatatttgaatgcaaatcgaatcagtgtgttaagtgataaagcgtattattatgctacaaagcgtgaaggggaacatatgagtagtgcgtatgtttcacctgaagacttttacgaagtcatgagattgattgctgtagaaatattaaatgcagatttagaagaagcccataaagatcaaatcttagcagaatttttaaatcgtcattttagtttttctcgtacgaatggcttctcacttaaagttaaactagaagagcaaccacaatggattaatgctctaggagactttatacaagcagttccagaacgtgtagatgcattggtgatgagtaaattacgaccattgttgcactacgcgagagcgaaagatatagacaactatagaactgtagaagaaagttaccgtcaaggtcaatactaccgttttgatattgtagatggtaaattaaacattcaattcaatgaaggcgaaccatactttgaaggcattgatatcgctaagccaaaagtgaaaatgacagcattt

SEQ ID NO: 4660 - DNA, 672 bp, Staphylococcus aureus
atgataaataaaaatgatatagtagcagatgtagtaacagattatccgaaagcagcagatatttttagaagcgtaggtatagacttttgctgtggtggacaagtaagtatagaagcagcatccttagaaaagaaaaatgtagatttgaacgaattattacagcgtctcaacgacattgaacaaacgaatacaccaggttcgcttaaccctaaatttttaaatgtttcgtcacttattcaatatattcaagcagcatatcatgaacctcttagagaagaatttaaaaatttaacaccttatgtgatgaaattatcgaaagtacatggacctaatcatccatatttagtcgagttaaaagaaacatatgatacatttaaaaatggcatgttagagcatatgcaaaaagaagatgatgttgattttccaaaactaattaaatatgaacaaggtgaagtagtagacgatattaatacagtgattgatgatttagtatctgatcacattgcaacgggacaattgttagtgaaaatgagcgatttaacatcaagctatgaaccaccgatagaggcatgtggtacttggcgactcgtttatcagagattaaaagcacttgaagtgttaacacatgagcatgttcatttagagaatcatgttttatttaaaaaagtatca

SEQ ID NO: 4661 - DNA, 1752 bp, Staphylococcus aureus
gtgctatcgctaacaatgttattacttgagcgtgtaggtttaattattattttggcctatgtgttgatgaatattccatattttaaaaacttaatgaatcgtcgacgtacatggaaagcacgttggcaattatgtattattttcagtttgtttgccttaatgtctaatttaactggtatcgtcatcgatcatcaacatagtttgtcaggaagtgtgtacttccgtttagatgatgatgtatctttagctaacactcgtgtattaacgataggtgtcgcaggattagttggtggcccttttgtaggtctatttgttggcgttatttcaggtattttcagagtgtatatgggtggggcggatgcacaagtttatcttatctcatctatatttatcggtataattgctggttattttggcttacaagctcaaagacgcaagcgttacccgagtattgcgaaaagtgccgtgattggaattgttatggaaatgattcaaatgttgagcattttaacattttcccacgacaaagcatatgcggttgacctcatatcattaattgcactaccaatgattattgttaatagcgttggtacggcgatttttatgtctattatcatttcaacattaaagcaagaggagcaaatgaaggctgttcaaacacatgatgtactgcaattgatgaaccagacattgccgtattttaaagaaggattgaatagagaatcggcacagcaaattgcgatgattattaaaaatttaatgaaagtatctgccgtagcaattacaagcaaaaatgaaatcttatcgcatgtaggtgcaggtagtgatcatcacataccaacaaatgaaatattaacaagtctgtctaaagatgtattgaaatcagggaagttgaaagaagttcatactaaagaagagattggttgtagtcatccgaattgcccgcttagagcagctatcgtgataccacttgagatgcatggttctatcgtcggtacattgaagatgtattttacaaaccctaatgatttaacttttgtggaacgtcaacttgcagaaggattggcaaatatttttagtagccaaattgaacttggtgaagccgaaacgcaaagtaagttattgaaagatgctgagattaagtcattacaggcacaagtgagtccacattttttcttcaattcaattaacacgatttcagctttagttagaataaatagcgaaaaggcacgagagttactattagaattgagttattttttcagagcgaatttacaaggctcaaagcaacatacgattactttagataaagagttaagtcaagtgcgtgcatacttatcactcgaacaagcacgttacccaggaagatttaatatcaatattaatgttgaagacaaatatcgcgatgtgcttgtaccaccatttttaattcaaattttagttgaaaatgccatcaaacatgcgtttacgaatcgaaagcaaggtaacgatattgacgtgtcagtgattaaagaaactgcaacacatgtacgtattattgtacaagataatggtcagggtatttctaaagataaaatgcatttgttgggagaaacatctgtagaatcagaatctggaactggtagtgctttagaaaatttaaacttacgcctaaaaggattatttggaaaatccgcagcattacaatttgaatcgacatcgagcggtaccactttttggtgtgtacttccttatgaaagacaagaggaggaa

SEQ ID NO: 4662 - DNA, 738 bp, Staphylococcus aureus
atgaaagcattaatcatagatgatgagccattagcacgtaatgaattaacatatttattaaatgaaattggtggttttgaagaaattaatgaggcagaaaatgtaaaagaaacattggaagcactactgataaatcaatatgacattatatttttagatgtcaatttaatggatgaaaatgggatcgaattaggagctaaaattcaaaagatgaaagagccacctgcgattatttttgcaactgcacatgaccaatacgcagtacaggcatttgaattaaatgcgacagactatattttgaaaccgtttggtcaaaaacgtattgaacaagcagtcaataaagttcgtgcgactaaagccaaagatgataatagcgcaaatgcaattgcgaatgatatgtcggcgaattttgatcaaagtttacctgttgaaattgacgataaaattcacatgttaaagcaacaaaatattattgggattggcacacataatggtattacaaccatacatacaacgaatcataaatacgaaacaacagagccattgaatcgttatgaaaaacgattgaatcccacttattttatacgtattcatcgttcatatattattaacactaaacacattaaagaagtgcaacaatggtttaactacacttatatggtaatattgacaaatggtgtcaagatgcaagttggacgttcatttatgaaagattttaaagcgtcgataggattactt

SEQ ID NO: 4663 - DNA, 426 bp, Staphylococcus aureus
atcgctggtcgtcgtattttacttaaagaagtaagagattcaatttttagagagaaaatggtaggcgaaggcttggcaatcaaagctcatgaagaatccaaagtaatcgcaccgttcaatggcttagtatctatgattgtaccaactaagcatgcagttggtattcaatcagaagacggtgtggacatagtcattcatattggtgtgaatacagttgacttggaaggtaaaggattcaagtgctttgtaaagcaaaatgatcgtgttgaagcagggcaaacgttgttacaattcgatcaacaatatattcaggaacaaggttataactcagacgttattgtcgttattagcaactctgccgatttaggaaaagtagaactgacaatgaatgaaatcattacgactgaagatgttatttttaaaata

SEQ ID NO: 4664 - DNA, 1434 bp, Staphylococcus aureus
atgacaaaattaccgcaaaattttatgtggggtggcgctcttgccgcaaatcaatttgaaggtggatatgataaaggtggtaaagggttaagtgtaattgatgttatgacgagtggtgcacatggcaaagcacgtcagattacagaatctatagatcccaatcactattatccaaatcatgaaggtattgatttttatcatcgttataaggaagatattgccttgtttaaagaaatgggattgaaatgtttacgtacgtcgattgcgtggacacgtatctttcctaatggggatgaagatgtgccaaatgaagaaggacttgccttttatgatcgtatctttgatgaattaattgcacaaggtattgaacctgttgtgacgttatcacattttgagatgccacttcatttagcgaaacattatggtggatttagaaatagagaagttgtcgattattttgtgcattttgcgcgtgttgtatttgaaagatataaagataaagtgacatattggatgacgtttaatgaaattaataatcagatggacacatcaaatcctatctttttatggacgaattctggggtagcattaacagaaaatgataatcccgaagaattcttgtatcaagtagcacatcatgaacttttagccagtgctttagcggttcgtcttggtaaagagattaatccgaaatttaagattggaacaatgatttcacatgtacccatttatccatattcgtgtcatccgaaagatatgatggaagcacaaattgcgaatcgcttacgtttctttttcccggatgttcaagtaagaggttattatccaagctatgctaaaaaaatgttggcacgaaaaggatatgattttggatggcaagaaggggacgacagtattttacagcagggcacggttgattatattggctttagttattacatgtctacggctgtaaaacatgatgttgatactacagttgaaaacaacatcgtcaacggtggtttgaatcattctgtggagaatccgcatatcgcaacgagtgattggggttgggcgattgatccagatggcttaagatatacattgaatgtgttatatgatcgttatcagttgccactttttattgtggaaaatggttttggtgcagttgatgaagtggtagatggacatattcatgatgattatcgcattgaatatttaaaagcacatattacagcagcgatagaagcagttgatcaagatggtgtagatttaatcggttatacaccgtggggaatcattgatattgtttcatttacaactggtgaaatgaagaaacgctatggtttaatatatgttgatcgagataatgatggtcatggcacgatggaacgcttgaaaaaagattcgttctattggtatcaacaagtgatagcatcaaatggagataaatta

SEQ ID NO: 4665 - DNA, 981 bp, Staphylococcus aureus
atgtgcacaggattcacaatacaaactttaaataatcaagtacttcttggacgcacgatggattatgattatccattagatggttcgccagcagtgacgcctagaaattatcgttggacatctcgcactggcacgacaggccaaacgcaatatggctttattggtacaggaacagatatggaaggttttatttatggtgatggtgttaatgaacatggcgttgccatttcaacacaatatttccgaggttatagttcatatggctcaacacacaaagcggatgcgatgaatattacgcaaaatgaaattgtgacatggattttgggatatacaacaagcattgaagatatgaaacaacaagcatcccaaatacatgttgtagctgtatatttaaatgatatcggtgaagttccgccattgcattatcatgtttccgatgcaactggacattcagtcgaagtttcatttaaagagggtgaagtgattataaaagataaccctattggtgtcttaacaaatcatccagacttagattggcattatagtaatttaagacaatatatcaatatttctccttatccagcaacagcaaatttattggaaggtgaaacgattgaacctttaggcaatgaagcaggtacatttggattgccaggtggatttacttcaactgagcgctttgtgagaatggcatttatgaaagcaaacattgctcaaaacaatgataaagaaatggatttaatgaatgcattttatttattagatgcggtaaatataccgattggaattgtacgtccgcatgatgctgacaatcactatacaatgtatcagaccgtaataaatttaactacaagaacgttatatattaagtattatggcagcaatgaaatagtagcattaaagctcacagatgatttaattaatagaaaagatatgacgatttttaagcctgagaagcatatcactattaaaaagttgaat

SEQ ID NO: 4666 - DNA, 504 bp, Staphylococcus aureus
gtaccacgtccgatagggtggatctctactgtatcgaaagatgggaaagataatttagcaccttatagtcagtatcaaaacttaacttgggatccgcctatggttatgttcgcagcaaatcaatctgttcttggtgatcatgagcgtaaagatacagtaaaaaatgcagaagagacagggtggtttgtatggaacatggccacgtatgatttaagagaagctgttaatttatcgtcgaaggcactaccacctgaagaggatgaatttgaatatgcaggtgtgacgaaagaagcatgtatagaagcaccaggttatcgagtcaaagaatcgccagtacattttgaatgtgagtacgttcaaacgattcgtattccgacaggagaccctgtatcaacagttgatattgttataggaagagttgctcaggttcatattgacgataaggtcattcttgataatggtaaattagacattaagtctattaaacctattgctaggttagga

SEQ ID NO: 4667 - DNA, 1554 bp, Staphylococcus aureus
atgaaatactttattccagcttggtatgatgaccaacgatggtggcaagacacgactgtgccgtattatcagacgcaaaataagacggaatttgacgatatgattagtttaatggggatgcaccttgaaaataatttagattatcaactgattgttctcaatcatgcgccgaatataagaacatttttacatcgatatgatttgtatgaaacaaagtattggtctgtgtttgatgaaattcaaggattcagtcaccatgcgccacaagcgattaattatcatcacttaaaatggccggatgatgttgagtttgtgtacacgccgtatttattaaaatgtgtgacgagtgaacagacctatacaaatatttattttagtcaagaggggtattcaatttggtttgaagaatttgaaagagatcagttacaacggcgttatatttttgatgacagaggttatttatcagctatacgttattttgataatcagggagaggcttcttaccaagaatatttaacgattaatggagattgtgtgctttatgaaaactttaaaaatggacgagtcactgtttcaaaaagatatcaacatcactatcaacaaacagaatataacaatatggctcaactaattgaagaaaaatttcaagcaatgattgcacaacaaatacatgaagatgatcatgtgattgtggcttcagatgctaggcacaatcgacaaatagccaatcatattccggcgaaattattaagttattcattttttaaaaatagaaatgaaactgtgtcagatgaggaatatcaatctatcgtaaagaatgcccatttaattgttgatagtgtgcaactagaacgtgatttaattagacatcaagagaagtatcagcgagagaatacaatgattcgaatcacgccatttgaaacgagacaatcacctaatataagtagtcaattgatggaaacatttataggtgtatggatagatggtatgagtgacgctgatttgcaacaaatgatgcaacgacttgtggattatatcgcacaagaagataattaccgtttaattttattaacgcgccatcaaaatgacataccgatgtggcttcgtgaatgtattgcgtcggtaaatgaggaataccaagctaaacagaatgcggatgttaatgtttcagcattaatgacacctgaagatcaagatgacatcattgctgttaagacgatacatgctgaacatgatgttgtagaagcattgcggacgttgcgacttgtgatagatatgtcaaaagaacctgatttgtatttacaaattagtgcaattagcgctgggattccacaaattaatggtcaacaaacagattacgtctctgattatgacaatggccgtattataaatacagttgatgaattagatgatgcgttaaattattatttgttttatttgaaaaattggaattatgcgtacgcctattctttaaaattaatagatgcatatgcttctaagaatattattaatcagctcgatgagttaatagaaggtgaaaatgatgccacgtaa

SEQ ID NO: 4668 - DNA, 1572 bp, Staphylococcus aureus
atgatgccacgtaaatttagagttttgcaaattggaggagacgatttagaacctattttccaacacaaaaaaggtgtgagttgggattacttcgatattggattgtttgaatttgatagtggttatgtagaggctattgaagcgattgttgaagcagaagggcgctttgattttatctatattcaagcaccatactcggagacattaacgaatttattacaaatgataagcgaaccatacaatacgtatgttgatgaatcattttggtctgttgaatatgaacaagacgaaaatgtccaaaaatacgttgttcaaccattacattatcgaaacattgaagaacgtaataataaattagaggcagttagtttctcaggacagtatggagataaggtttctcctaagttagcacttgttcatccgaattttaaaggagatgtcgtttaccaaggtaattcagagctcacgttgagtggagaatttggaaaagaatttaaacctatcgcatcttggcaaaataatctcgtttacgataaagataaagttattcaaatatggccagaatttgatattgatggtgcggtcgagttgcaatatacatttagattgattcagactggcgctgatggtgcattaattgaacaaatcatattgactgatgaaatgttagacagtcctttagagatacctacgaaaccatttgatgcttatataagtgtaactgttaaggcgcgtggcaacgggacggtacatttaggacctatacacaaacgatggtctagattagacatgggtcaatttttacttggtggtagtcgttttgtagatagtcaacgacaggaatttatttattatttccaccctggtgatatgaaaccaccactaaacgtatattttagtggttatcgaacagcggaaggtttcgaaggatattatatgatgaaacgtatgaatgcaccgtttttacttatcggcgatcctcgtgttgaaggtggtagcttttatatcggttcatctgaatatgaacaaggtattatcaatgttattgacgagacattagaaaagctgaattttaaatcacatgaattaatattatctggtttatctatgggttcatttggtgccttgtattatggtgctcagttaaatcctcaggcaattattgttggtaaaccacttgttaatattggaacgattgctgaacatatgcgattacttagaccagaagagttcggtacagcattagacgtcctggtgtctaatgaaggtgatacatctcaagcgtcgatacaggcattaaatcaaaaattttggcaaacatttcagaagaaatcattgtcacaaactatttttgccatagcatatatgcaacatgatgattatgatccacatgcatttcaagagctactacctgtattgacagcacaccaagcaagagtgatgaatcgcagtattcctgggcgacataatgatgattcacctaccattgcaagttggtttgttaatttttacaacattattttggaagacaagtttgggagagttcaacatgctgaaaaacaaaacatttaa

SEQ ID NO: 4669 - DNA, 2378 bp, Staphylococcus aureus
ataaactagatgttacgataaacgaattaagactaaagtcgattagaaaaatagtgaaacgcatcaatacatggagcgatgaagttaaatcatattctgatgatgcgttaaaacaaaagacaatagaatttaaagaacgtttagcatcaggagttgatacactagacacattgttacctgaagcttatgcagtggcacgtgaagcgagctggagagtattaggtatgtatcctaaagaagttcagttaatcggagcgattgtattgcatgaaggtaacattgcggagatgcaaacaggcgaaggtaaaacattaacagcaacgatgcctttatatttaaatgcactttcgggaaaaggaacatatttaattacaacgaatgattatttagcgaagcgtgattttgaagagatgcaaccattatatgaatggttaggtttaacttcttcattaggttttgttgatattgtggattatgagtatcaaaaaggggaaaaacgtaatatatatgaacatgatattatatatacaactaatggacgtctcggttttgattatttaattgataatttggcagatagtgcggaaggaaaatttttaccacaattaaattacggtattattgatgaagtggactcaatcattttagatgctgctcaaacaccattagttatttcgggcgcaccaagattacaatcaaatctatttcatattgtgaaagagtttgtagatacattgattgaagacgtgcattttaaaatgaagaagaccaaaaaagaaatatggctgttaaatcaaggtattgaagcggcacaatcatactttaatgttgaagatttatatagcgaaaaagcgatggtcctagtgcgtaatattaatctagcactgcgcgcgcaatatttgtttgaatctaatgtcgattatttcgtatataatggtgatattgttttaattgaccgtattacaggtcgtatgttaccgggaactaagttgcaagctggacttcaccaagctattgaagcgaaagaaggtatggaggtttcaacagataaaagtgttatggcaacaattaccttccagaatttatttaaactttttggatcattttcaggtatgacagctacaggaaaattaggcgaatcagagttctttgatttgtattcaaaaatagtcgtacaagtaccaactgataaagcgattcaacgtatcgatgaaccagataaagtgtttcgttcagttgatgagaaaaacatcgcgatgattcatgatatagttgaacttcatgaaacggggcgaccggttttactcataacgagaactgctgaagcggctgaatacttttcgaaagtattattccaaatggatattcctaataatttactcattgcgcaaaatgttgcaaaagaagcgcagatgatagctgaagcagggcaaattggttccatgactgttgcgactagtatggcaggtcgaggcacagatattaaacttggtgaaggtgtcgaagcattaggtggattagctgttattattcatgagcatatggaaaatagccgtgtagacaggcaattacgtggtcgttctggtagacaaggggatccaggatcatcttgtatatatatttcactagatgattatttagttaagcgatggagcgatagtaatttagcggaaaataatcaattatattcattagatgcacaacgattatcgcaaagtagtttgtttaatcgcaaagttaagcaaattgtagttaaagcgcagcgtatctcggaagaacaaggggttaaagctcgtgaaatggctaatgaatttgaaaaaagcattagtatacagcgagatcttgtatacgaggaacgcaatcgagttttagaaatagatgatgctgagaatcgagattttaaagcgttagctaaagatgtatttgaaatgtttgtaaatgaggaaaaggtgctaacaaaatcgcgtgttgtcgagtatatttatcaaaatttaagtttccaatttaataaagatgtggcttgtgttaattttaaagataagcaagcagtagtgacatttttattagagcaatttgaaaagcaagtagctttgaatcgtaaaaacatgcaaagtgcatattattataatattttcgttcaaaaagtctttttgaaagcaattgattcatgttggttagaacaagtcgactatttacaacaattaaaagcaagcgttaatcaacgacaaaatgggcaacgtaacgctatttttgaataccatagagttgcattagattcatttgaagttatgacacgaaatatcaaaaaaagaatggtgaaaaatatttgtcaaagcatgattacatttgataaagagggtatgccagttatacatttt

SEQ ID NO: 4670 - DNA, 528 bp, Staphylococcus aureus
atgaataaaaccagtaaagtttgtgtagcagcaacattagcattgggcacactgattggagtaacagttgttgaaaattcggcgccaacaagtaaacaggcacaggcagcaataaccccatattatacttacaatggttatattggtaataatgctaattttattctggataagaattttattaacgcgattaagtatgataacgtgaaattcaatggtattaaattagctaaaacgaatacgataaaaaaagtagagaaatatgatcaaacttttaaaggtgtttccgcaaaaggaaacgaagcaagtcaattgcaatttgtagttaaaaataatatttcattaaaagatatccaaaaagcttatggcaaggacttgaaaaaagaaaatggtaaaacaaaggaagctgatagcggtattttttactatcaaaatgctaaaaagacattaggcatctggtttgtcgttgatcataatagagttgtcgaagtaacagttggacatacaccatacaaaacaagtaaataa

SEQ ID NO: 4671 - DNA, 930 bp, Staphylococcus aureus
aaagagaaaattgtcattgcattaggcggtaatgcgatacagacaaaagaagcaacagctgaagcacaacaaacagctattagacgtgcgatgcaaaaccttaaacctttatttgattcaccagcgcgtattgtcatttcacatggtaatggcccacaaattggaagtttattaatccaacaagctaaatcgaacagtgacacaacgccggcaatgccattggatacttgtggtgcaatgtcacagggtatgataggctattggttggaaactgaaatcaatcgcattttaactgaaatgaatagtgatagaactgtaggcacaatcgttacacgtgtggaagtagacaaaaatgatccacgatttgataacccaactaaaccaattggtcctttttatacgaaagaagaagttgaagaattacaaaaagaacagccagactcagtctttaaagaagatgcaggacgtggttatagaaaagtagttgcgtcaccactacctcaatctatactagaacaccagttaattcgaactttagcagacggtaaaaatattgtcattgcatgcggtggtggcggtattccagttataaaaaaagaaaatacctatgaaggtgttgaagcggttatagataaagattttgctagtgagaaattagcaacgctgattgaagcagataccttaatgattcttacgaatgtagaaaatgtatttattaactttaatgaacctaatcaacaacaaatagatgatattgatgtagcaacactgaaaaaatacgcagcacaaggtaagtttgcggaaggatcgatgttgccaaaaatagaagctgcgatacgatttgttgaaagtggggaaaacaaaaaagttatcattaccaatttagagcaggcatacgaagctttgattggtaataaaggtacacacatt

SEQ ID NO: 4672 - DNA, 1014 bp, Staphylococcus aureus
aaagatatattaatactagctgttgaaacaagttgtgatgaaacaagcgttagtgttataaaaaatgacagagatattttatcaaatacagttttaagtcagattgaaagtcataaacgatttggcggtgtcgttcccgaagtggcaagtagacatcacgttgaaggtataacaacaacaataaacgaggctctagtggatgccgatgtatcaatggaagatattgatgccatagcggttacagaaggccctggactaattggtgcgttactaataggtgttaatgcagccaaagcattagcatttgcttatgataagccacttattccagttcatcatattgcaggacatatatatgctaatcacatagaagagccattaacattcccgctaattgcacttattgtctcaggtggacatactgaattagtttatatgaaagatcatttaacatttgaagtcattggtgaaacacgagatgacgcagtaggtgaggcttatgataaagtggcacgaacaattggtttaaattatccaggtggtccacaagttgatcggttggctgctgaaggtgaagatacttattcattccctcgtgtttggttggataaagatagttatgattttagttttagtgggttgaaaagtgccgtaatcaatcaacttcacaatcaacgacaaaaaaatattccaatcattgaagctaacgtagcaacgagctttcaaaatagtgttgtagaggtgcttacgtttaaagctattcaagcttgtaaagaatatggtgttcagcgattaattgttgccggtggcgtggcgagtaataaaggattacgtcaatctttagcggatcaatgcaaagtcaatgacattcaattaactatcccaagtcctaaattatgcacagataatgctgcaatgataggtgttgccggccactatttgtatcagcaaggtcgatttgctgatttaggattaaatgggcacagcaatatagatttagaagagtattctgca

SEQ ID NO: 4673 - DNA, 1662 bp, Staphylococcus aureus
tcaggatcagaagtgctagtagaagctctacttaaagaaaatgtggattatttattcggttatcctggtggtgccgtactacctttatacgacacattttatgatggtaaaatcaaacatattttagcaagacacgaacaaggtgctgttcatgctgcagaaggttatgcacgtgtatctggtaaaactggcgtcgttgtagttacaagcggtccaggtgcaactaatgtaatgacaggtattacggatgcacattgcgactctttacctctagttgtattcactggacaagttgctacaccaggcattggtaaagatgcattccaagaagcggatattctatctatgacttcaccaattacaaaacaaaattatcaagtgaaacgtgttgaagatatccctaaaatcgtacacgaagctttccatgtagctaattctggacgcaaaggtcctgtagtgatcgattttccaaaagatatgggtgttttagctacaaatgtggatttatgcgacgaaatcaatattccaggttatgaagttgttacagaaccagaaaataaagacattgacactttcatctcacttttaaaagaagcgaaaaagcctgtcgtattagccggcgcaggtattaatcaatcaaaatcaaatcaattattaacacagtttgttaataaacatcaaatcccaacagttactactttactaggtctaggtgctgtaccttatgaggatacactatttttaggtatgggaggtatgcatggttcttatgctagtaacatggcattaactgagtgtgatttactcattaatttaggtagccacttcgatgatagattagcaagcaaacctgatgcctttgcacctaacgccaaaattgtacatgtagatattgacccttcagaaattaataaagttattcatgtagatttaggtattattgcagactgtaaacgatttttagaatgtttaaatgataaaaatgttgagactgtagaacacagtgactgggttaaacattgtcaaaataataagcagaaacacccatttaaacttggtgaagaagatcaagtattttgtaagccacaacaaacaatcgaatatatcggcaaaattacaaatggtgaagcaattgttactacagacgtgggacaacatcaaatgtgggcagctcaattttatccatttaaaaatcacggacaatgggttacaagcggtggtttaggaacaatgggattcggtattccttcgtcaattggtgccaaattagctgatcctgataaaacagtcgtatgtttcgtcggtgacggtggtttccaaatgacaaaccaagaaatggcactattacccgaatatggtttagatgtcaaaatcgtactaatcaataatggaacattaggtatggttaaacaatggcaagataagttctttaatcaacgcttctcacactcagtatttaatggtcaacctgattttatgaaaatggcagaagcatatggcgtcaaaggtttcttaatcgataagccagaacaactggaagaacaattagatgcagcgtttgcttatcaaggaccagctttaattgaggttcgtatttcccctactgaagctgtaaacccaatggttccgagtggcaaatcaaatcatgaaatggagggctta

SEQ ID NO: 4674 - DNA, 984 bp, Staphylococcus aureus
atgacaacagtttattatgatcaagatgtaaaaacggacgctttacaaggcaaaaaaattgcagtagtaggttatggatcacaaggccacgcgcatgcacaaaacttaaaagacaatggatatgatgttgtcatcggtattcgaccaggtcgttcttttgacaaagctaaagaagatggatttgatgtgttccctgttgcagaagcagttaagcaagctgatgtaattatggtgctattacctgatgaaattcaaggtgatgtatataaaaacgaaattgaaccaaatttagaaaaacataatgcgcttgcatttgctcatggctttaacattcattttggtgttattcaaccacccgctgatgttgatgtatttttagtagctcctaaaggaccgggtcatttagttagacgtacatttgttgaaggttctgctgtaccatcactatttggtattcaacaagacgcttcaggtcaagcacgtaatattgctttaagttatgcaaaaggtattggtgcaactcgtgcaggtgttattgaaacaacatttaaagaagaaacagagacagatttatttggtgaacaagcagtactttgcggtggtgtatcgaaattaattcaaagtggctttgaaacattagtagaagcgggttatcaaccagaattagcttattttgaagtattacatgaaatgaaattaatcgttgatttgatgtatgaaggcggtatggaaaatgtacgttactcaatttcaaatactgctgaatttggtgactatgtttcaggaccacgtgttatcacaccagatgttaaagaaaatatgaaagctgtattaactgatatccaaaatggtaacttcagtaatcgctttatcgaagacaataaaaatggattcaaagaattttataaattacgcgaagaacaacatggtcatcaaattgaaaaagttggtcgtgaattacgcgaaatgatgccttttattaaa

SEQ ID NO: 4675 - DNA, 1932 bp, Staphylococcus aureus
atgggtcaaacattatttgacaaggtgtggaacagacatgtgttatacggaaaattgggcgaaccgcaactattatacattgatttacaccttatacatgaagttacttctcctcaagcatttgaaggacttaggcttcaaaacagaaaattaaggcgcccagatttaacatttgcaacactcgatcacaatgttcctactattgatattttcaatattaaagatgaaattgcaaacaaacaaatcacaacattacaaaaaaacgccatagattttggggtgcatatttttgatatgggttctgatgaacaaggtattgttcacatggtaggacctgagacaggacttacacagcctggcaaaacaatcgtttgtggtgactctcacacagcaacacatggagcatttggtgctattgcatttggaattggaacaagtgaagttgaacatgttttcgcaactcaaacgctatggcaaacaaaacccaaaaacttaaaaatcgatattaatggtaccttaccaacaggcgtctatgctaaggacattattctgcatttaattaaaacgtatggtgttgactttggtacaggctatgctttggaatttactggcgaaacaattaaaaacctttcaatggacggtcgaatgactatttgtaacatggccatcgaaggtggtgccaaatacggcataatccaacctgatgatataacatttgaatatgttaaagggagaccatttgccgataacttcgctaaatcagttgataagtggcgtgagctatattctgatgacgacgcgatatttgatcgtgtaattgaacttgatgtttcaacattagaaccacaagtgacatggggaactaatcctgaaatgggtgttaatttcagtgaaccattccctgaaatcagtgatatcaacgatcaacgtgcgtatgattatatggggttagaaccaggacaaaaagctgaagatatcgatttagggtatgttttcctcggttcatgtacaaatgctagactatcagatttgattgaagctagtcatattgttaaaggaaataaagttcacccaaatattacagctattgtcgtaccaggttctcgtacagtaaaaagagaagctgaaaaattaggtctagatactatttttaaaaatgcaggatttgaatggcgtgaaccaggatgttcaatgtgtttaggcatgaatcctgaccaagtacctgagggtgtacattgtgcatctacaagtaatcgaaacttcgaaggacgacaaggcaaaggtgctagaacacatttagtatcccctgctatggcagcagcagcagctattcatggtaaatttgtggacgtaagaaaggtggttgtttaaatggcagcaatcaaacctattacaacatataaaggtaaaatagtccctcttttcaacgataatatcgatacagatcaaatcattcctaaggtacacttaaagcgtatttcaaaaagtggctttggtccatttgcttttgatgaatggcggtacttacctgatggttcagataatcctgatttcaatccaaataagcctcaatataaaggtgcatccatattaattactggagataatttcggatgtggttcaagtcgtgaacatgcagcttgggcacttaaggactatggctttcatattattattgcaggaagtttcagtgacattttttatatgaattgtacaaaaaatgcaatgttaccaattgttttagaaaaaaatgcacgtgaacatcttgcgaaatatgttgaaattgaggtcgatttaccaaatcaaactgtgtcatcaccagacaagagtttccattttgaaattgatgaaacttggaagaataaacttgtaaatggcttagatgacattgcaatcaccctacaatatgaatcattaatagaaaaatatgaa

SEQ ID NO: 4676 - DNA, 516 bp, Staphylococcus aureus
atagcaaaagatcaaactcaaatcaatgacaaaattcgtgcaaaagaattacgtttaatcggtcaagatggtgaacaaattggtgttaaatcaaagcgagaagctttagaaatggctgaacgtgtagatttagacttagtggtcgttgcaccgaatgcgaaaccaccagttgcaagaattatggattacggtaaattcaaattcgaacaacagaaaaaagaaaaagaaatgaaaaagaaacaaaaaattatcaatgttaaagaaattcgtttaagtccaacaattgaggaacatgatttccaaactaagttgaaaaacggacgtaaatttttaactaaaggcgataaatgtaaagtatctattcgtttcagagggcgtgccattacgcataaggaaattggtcaacgtgtgttagaaaaatatgcagatgaatgcaaagatatagcaacagttgaacaaaaacctaaaatggacgggcgtcaaatgtttatcatgttagcgccaacagctgaaaaa

SEQ ID NO: 4677 - DNA, 198 bp, Staphylococcus aureus
atgccaaaaatgaaaactcaccgcggagcagctaaacgtgttaaaagaactgcttcaggtcaattaaaacgttcaagagctttcacatctcacttattcgcaaacaagagcactaaacaaaaacgtcaattacgtaaagctagattagtgtctaagagcgatatgaaacgtgtaaaacaattattagcatacaaaaaa

SEQ ID NO: 4678 - DNA, 1338 bp, Staphylococcus aureus
atgccaaaacgtactttcactaaagacgacattcgtaaatttgcagaagaggaaaatgtaagatatttaagattacaattcactgatattttaggaacaattaaaaatgttgaagtgcctgtaagccaattagaaaaagtacttgataacgaaatgatgtttgacggttcttctatcgaaggtttcgtacgtatcgaagaatcagatatgtacttacatccagatttagatacttgggtaatcttcccatggactgctggacaaggtaaagttgcacgtttaatttgtgatgtatataaaacagatggtacaccatttgaaggggatcctcgtgcaaacttaaaacgtgtattaaaagaaatggaagatttaggcttcacagactttaacctagggcctgaaccagaattcttcttgtttaagttggatgaaaaaggggaaccaactttagaacttaatgatgatggtggatatttcgacttagcacctacagatttaggtgaaaactgtcgtcgtgatattgttttagaattagaggatatgggcttcgatattgaagctagtcaccatgaagttgcccctggtcaacatgaaattgactttaaatatgcagatgctgttacagcatgtgataacatccaaacatttaaattggttgttaaaacaatcgcacgtaaacataatttacacgcaacatttatgcctaaaccattatttggtgtgaatggtagcggtatgcactttaacgtttcattattcaaaggtaaagaaaatgcattcttcgatccaaatactgaaatgggcttaacggaaactgcatatcaatttacagcaggtgtacttaaaaatgcacgcggatttactgctgtatgtaacccgttagtaaactcatataaacgtttagtacctggttatgaagcaccatgttatattgcatggagtggtaaaaaccgttcaccattaatccgtgtaccatcttcaagaggattatcaactcgtatcgaagtacgttcagtagatccagctgcaaacccatacatggcgttagctgcaatcttagaagctggactagatggtattaaaaataaattaaaagttccagaaccagttaaccaaaatatttacgaaatgaaccgtgaagaacgtgaagcagtaggcattcaagacttaccttcaacactttatactgcattaaaagcaatgcgtgaaaatgaagttattaaaaaagctttaggaaatcatatctataatcaatttattaattcaaaatcaattgaatgggattactacagaactcaagtatctgaatgggaaagagatcagtacatgaagcaatat

SEQ ID NO: 4679 - DNA, 1917 bp, Staphylococcus aureus
gaacaaattaatattcaatttccagatggtaataaaaaggcgtttgataaaggtactactactgaagatatagcacaatcaattagtcctggattacgtaaaaaagcagttgccggcaaatttaacgggcaacttgtagatttaactaaaccgcttgaaactgatggatcaattgaaattgtgacaccaggtagtgaagaagcgttagaggtattacgtcattctactgcacatttaatggcacatgcgattaaaagattatatggtaatgttaaatttggtgttggtcctgtaatagaaggtggcttctactatgacttcgacatagaccaaaacatctcatctgatgactttgaacaaattgaaaaaacaatgaaacaaatcgttaacgaaaatatgaaaatcgaacgaaaagtggtttcacgagatgaagcgaaagagttattcagcaatgatgaatacaaattagaattaatcgacgcgattcctgaagatgaaaatgtaacattatatagtcaaggtgattttactgatttatgtcgtggagttcacgttccatcaacagctaaaattaaagagtttaaactattatctacagcaggtgcatactggcgtggagatagtaacaacaaaatgttacaacgtatatacggtactgctttctttgataaaaaagaattaaaagcacatttacaaatgttagaagagcgtaaagaacgtgatcatcgtaaaattggtaaagagttagaattattcacaaatagccaattagttggtgctggtttgccattatggttacctaacggtgcaacaatcagacgtgaaattgaacgttacattgttgataaagaagttagcatggggtatgaccacgtttatacaccagtacttgctaatgttgatttatacaaaacatctggtcactgggatcactatcaagaagatatgttcccaccaatgcagttagatgaaactgaatctatggtattacgtccaatgaactgtccacatcatatgatgatttatgcgaataaaccacactcatatcgtgaattacctatccgtatcgctgagctaggaactatgcatagatatgaagcaagtggtgctgtatcaggattacaacgtgttcgtggtatgactttaaatgattcacatatctttgttcgacctgatcaaattaaagaagaattcaaacgcgttgtaaacatgattattgatgtgtataaagactttggtttcgaggattatagctttagattaagttatagagaccctgaagataaagaaaagtactttgatgatgatgacatgtggaataaagctgaaaatatgcttaaagaggcagcggatgagcttggcttatcgtacgaagaagcgattggtgaagcggcattctatggtccgaaactagatgttcaagttaaaacagcgatgggtaaagaagagacattatcaacagcacaacttgatttcttattaccagaacgttttgatttaacttatattggtcaagatggtgaacatcatcgtccagttgttattcatcgtggtgttgtatcaacaatggaacgatttgtagcatttttaactgaagaaactaaaggtgcattcccaacttggttagcgccaaaacaagttcaaatcattccagttaacgttgatttacattatgattatgcgcgccaattacaagatgaattgaaatctcaaggtgttcgtgtaagtattgatgagcgtaatgaaaaaatgggttataaaattagagaagctcaaatgcaaaaaataccttatcaaatcgtagttggggataaggaagttgaaaataatcaagtgaatgtgcgtcaatatggatcgcaagaccaagaaacagttgaaaaagatgaatttatctggaatctagttgatgaaattcgt

SEQ ID NO: 4680 - DNA, 1572 bp, Staphylococcus aureus
atgaacttaaagcaagaagttgagtctagaaagacttttgcgattatttcacatcccgatgcagggaaaacaacgttaactgaaaaactattgtacttcagtggtgccattcgtgaagcgggtacagttaaagggaagaagactggtaaatttgcgacaagtgactggatgaaagttgaacaagagcgtggtatttctgtaacaagttcagtaatgcaatttgattacgatgattataaaatcaatatcttagatacaccagggcatgaagacttttcagaagatacgtatagaacattaatggcagttgacagtgctgtcatggtcatagactgtgcaaaaggtattgaaccacaaaccttgaagttatttaaagtttgtaaaatgcgtggtattccaatctttacattcattaataaattagaccgagtaggtaaagaaccatttgaattattagatgaaatcgaagagacattaaatattgaaacataccctatgaattggccaattggtatggggcaaagtttctttggcatcattgatagaaagtctaaaacaattgaaccatttagagatgaagaaaatatattacatttgaatgatgattttgagttggaagaagatcatgcaattacaaatgatagtgcttttgaacaagcgattgaagaattaatgttggttgaagaagcgggtgaagcctttgataatgacgcgctgttgagtggagacttaacacctgtatttttcggttcagctttagctaactttggtgtacaaaatttcttaaatgcatatgttgattttgcgccaatgccaaatgcgagacaaacaaaagaagaggttgaagtaagcccgtttgatgattcattttcaggatttatctttaaaattcaagccaacatggaccctaaacaccgtgatagaattgcctttatgcgtgtcgttagtggtgcatttgaacgtggtatggatgttactttgcaacgtactaataaaaagcaaaagatcacacgttcaacgtcatttatggcagacgataaagaaactgtgaatcatgctgtagcaggcgatatcattggactatatgatactggtaattatcaaattggagatactttagttgggggaaaacaaacctacagtttccaagatttaccacaatttacgccagaaatttttatgaaagtttctgctaaaaacgtcatgaaacagaagcatttccataaaggtattgaacaattagtacaagaaggtgcgattcaatactataaaacattacacacaaaccaaattattttaggtgctgttggtcagttacaatttgaagttttcgaacatagaatgaaaaacgaatataatgttgatgttgttatggaaccagtaggccgtaaaattgcacgttggattgaaaatgaagaccaaattacagataagatgaacacatcaagatcgattttagtgaaagatagatatgacgatttggtattcttatttgaaaatgaatttgcaacaagatggttcgaagagaaattccctgaaattaaattgtatagtttactttaacggctcaat

SEQ ID NO: 4681 - DNA, 321 bp, Staphylococcus aureus
ttagttaaaacgttacgaatgaattatttgtttgatttttatcaatccttattgacgaataaacaacgtaattatttggaattattttatctcgaagattattctttaagtgaaatcgcagatacttttaatgtgagtagacaagcagtttatgataatataagaagaactggcgatttagttgaagattatgaaaagaaattggaattataccagaaatttgagcaacgccgagaaatatatgatgaaatgaaacaacatttaagtaatccagaacaaatacaacgttatattcaacaattagaagacttagaatagata

SEQ ID NO: 4682 - DNA, 948 bp, Staphylococcus aureus
gattcattgttagattctgtagggcaaacacctatggttcaacttcatcaactatttccgaaacatgaagtgtttgcaaagttagagtatatgaatcctggaggcagcatgaaagatcgacctgccaagtacatcattgaacatggtattaaacatggtttaatcactgagaatacacatttaattgaaagtacttctggtaatttaggcattgcgttggcaatgatagctaaaatcaagggattaaaactcacgtgtgttgttgatcctaaaatatcaccaacaaatttgaaaattattaaaagttatggtgccaatgtagaaatggttgaagaacctgatgcacatgggggttatttaatgactcgtattgcaaaggtgcaagaactgttagccactattgacgatgcatattggattaatcaatatgcgaatgagttaaattggcaatcccattatcatggtgcaggcacagagattgttgaaacaattaagcaacctatagattattttgtcgcgccagtcagcacgacaggtagcattatgggtatgagtagaaaaataaaagaagtgcatccaaacgcacaaattattgctgttgatgcgaaagggtcagtcatttttggtgacaaacctattaatagagaattacctggtatcggtgctagtcgtgtacccgaaatattgaatagatcagaaattaatcaagtgatccatgtagatgattatcaatctgctttgggctgtcgaaaactgattgattatgaaggcatatttgctggaggttcaacaggttcgattattgcagcgattgagcagttgataacgtcaattgaagaaggtgcaacaattgtcacgattttaccagatcgaggcgatcgttacttagatttagtttattcagatacatggttagaaaaaatgaaatcaagacaaggagttaaatca

SEQ ID NO: 4683 - DNA, 816 bp, Staphylococcus aureus
attgtgaaggagaaacatattaaatgggataaaatattttatggggacgactgggtaaataacgtagtcgaaacgataagaacgaaagatatattacaaagcgtttatttaaaacgttatttattacgcgctatgatggcaggatttattatcggtattattacggtcttcgtgctatcagttaaagcaacacacgaaccagatttaccaccaggtatagtgaatatggccagcgccattacattcagctttgcgttagtactcattttatttacaaactccgaactactaactagtaacttcatgtactttactgtaggcctgtattataaagtaattaaaccaactagagtattgaaaatatttttattatgctttgcaggaaatattttaggtgctgctattttatttagtttcatgcgtttttcaaatgtaatgacgccagatatgttaaatcaattatcagcagttatagaacataaaacgttgtctactgggtttgtaagtatattaatgaaagcgatattcgccaacttttttattaatatttcattagttatcgccatgcaaattgacgatgtacttgcaaaaatgtttgtcatgatgttcggtgttaccatattcgcctttatgggttatgaacatgtcgtttacaacagttgcttgtttatgggaggcttaatttatcaagttgatacattgcacttcattcctgctatttcaaatattgctgccgcttttatcggtaactatatcggaggcggactcattataggtttattctatgcttacttgaatgatcatcatcaattttat

SEQ ID NO: 4684 - DNA, 201 bp, Staphylococcus aureus
gtttctggaccaattccgttaccaactgagaaatcagtatacacaatcatccgtgccgtgcataagtataaagattcacgtgaacaattcgaacaacgtacacataaacgtttaatcgatattgtaaacccaacaccaaaaacagttgacgctttaatgggcttaaacttaccatctggtgtagacatcgaaatcaaatta

SEQ ID NO: 4685 - DNA, 261 bp, Staphylococcus aureus
gcaagagatattcttaagcgccccgtaatcactgagaaatcttctgaagcaatggctgaagacaaatacactttcgacgttgatactcgtgttaataaaacacaagtgaaaatggcagttgaagaaatcttcaacgtaaaagttgcaagtgttaatatcatgaattacaaacctaagaaaaaacgtatgggccgttaccaaggctatacaaacaaaagaagaaaagcgattgtaactcttaaagaaggatcaatcgactta

SEQ ID NO: 4686 - DNA, 153 bp, Staphylococcus aureus
atggaggtgttttgcatggtaaaacgtacttatcaaccaaataaacgtaaacatagtaaagttcatggtttcagaaaacgcatgagcacaaaaaatggccgtaaagttttagcgcgccgtcgtcgtaaaggccgtaaagttttatctgcataa

SEQ ID NO: 4687 - DNA, 2310 bp, Staphylococcus aureus
caagtgacgaatcaagtatcggtcgaggatacatataaagcacgttatgatgtaacgatattaatcaatggactaccccttgtccaagttgaattgaaacgtcgaggcattgatattaatgaggcgtttaaccaagtaaaacgttaccgtaaacaaaattacacaggcttattccgctacatacaaatgtttatcattagtaatggtgttgaaacgcgatacttttctaataatgatagcgaactattgaagagtcacatgttttattggagtgataaacagaataaccgaatcaatacattgcaatcgtttgctgagtcatttatgagaccttgtcaattagctaagatgatatcgcgctatatgattattaatgaaacagatagaatactgatggcaatgcgcccgtatcaagtgtatgcggtagaagcactaattcaacaagcgactgagacagggaataatggatatatttggcatacaactggaagtggtaagacgttgacttcttttaaagcgagtcagattttatcacagcaagatgacattaagaaagttatctttttggttgaccgtaaagacttggatagtcaaacagaagaggaatttaataaatttgctaagggtgctgtagacaaaacttttaatacctcgcaactggtacgccaactaaatgataaaagtttgccacttattgtaacgacgattcaaaaaatggctaaagcgattcaaggtaatgcccatttattagaacagtataaaacgaataaagttgtatttattattgatgagtgtcatcgcagtcaatttggtgacatgcatcgtctagttaaacaacatttcaaaaatgcccaatactttgggttcactggtacgccacgattcccagaaaatagtagtcaagatggtagaacaactgcagatattttcggtagatgcttacatacgtatttaattagagatgccattcatgatggtaatgtacttggtttctcagttgactatattaatacttttaaaaataaagctttaaaagcagaggataacagcatggttgaagcaattgatactgaagaagtctggttagcggataaacgtgtggaattagtaacacgacatatcaccaataatcatgataaatatacacgtaatcgtcaatattcaagtatatttacagttcaaagtattcacgcgcttattaaatattatgagacatttaagcgacttaacaaaaagttggaacaaccattaacggtagctggtatatttacgtttaaacctaatgaagatgatcgtgatggtgaagtgccatatcattcgcgtgaaaaattagagaaaatgattagtgattataataaaaagttcgagacgaatttttcaacagacacgactaatgagtattttaatcatatttcaaaaaacgttaaaaagggcgttaaagatagtaaaattgatatcttaatcgttgttaatatgttcttaactggttttgatagtaaagtactgaacactttatatgttgataagaatttaatgtatcatgatttaattcaagcgtattcacgtacaaatagggttgaaaaagaatcaaagccatttggtaaaattgtaaactatcgtgacttgaaaaaagagacagacgatgctctgagagtattctcacaaacaaatgatacggatacaattttaatgcgtagttatgaagagtataaaaaagaatttatggacgcttatcgtgagcttaaaatgattgtgccgacaccacacatggttgatgacattcaagatgaagaagagctaaagcgctttgttgaagcttatcgtttattagctaaaataatattacgtttaaaagcatttgacgagtttgagtttacaattgatgaaattggaatggatgaacaagagaatgaagactataaaagtaaatatttagccgtgtacgatcaagtaaaaagagcgacggctgagaaaaataaagtatccattttaaatgatattgatttcgaaatagaaatgatgcgtaatgatacgattaatgtgaattatattatgaatatattgagacaaattgatcttgaagacaaagcggaacaacgtcgtaaccaagaacaaattagacgtattttagatcatgcagatgatccgacattgaggttaaaacgagatctaattagagaattcatcgacaatgttgtaccttctttaaataaggatgatgatatcgatcaagaatatgttaatttcgaaagcattaaaaaagaagcggagttcaaaggatttgctggagagagagctatcgatgaacaa

SEQ ID NO: 4688 - DNA, 874 bp, Staphylococcus aureus
atttcagcaaaacttgttaaagaattacgtgaaaaaactggcgcgggtatgatggattgtaaaaaagcgctaactgaaactgatggtgacatcgataaagcgattgattacctacgtgaaaaaggtattgctaaagcagctaaaaaagcagaccgtattgcggctgaaggtttagtacatgtagaaactaaaggtaacgacgcagttatcgttgaaattaactctgaaacagactcttgttgctcgtaacgaaggtttccaagagttagttaaagaaatcgctaatcaagtattagatacaaaagctgaaactgttgaagctttaatggaaacaactttaccaaatggtaaatcagttgatgaaagaattaaagaagcaatttcaacaatcggtgaaaaattaagtgttcgtcgttttgctatcagaactaaaactgataacgatgctttcggcgcttacttacacatgggtggacgcattggtgtattaacagttgttgaaggttcaactgacgaagaggcagcaagagacgttgctatgcatatcgctgcaatcaaccctaaatatgtttcttctgaacaagttagcgaagaagaaatcaaccacgaaagagaagttttaaaacaacaagcattaaatgaaggtaaaccagaaaacatcgttgaaaaaatggtggaaggacgtttacgtaaatacttacaagaaatttgtgctgtagatcaagacttcgttaaaaaccctgatgtaacagttgaagctttcttaaaaacaaaaggtggaaaacttgttgacttcgtacgctatgaagtaggcgaaggtatggaaaaacgcgaagaaaactttgcggatgaagttaaaggacaaatgaaataa

SEQ ID NO: 4689 - DNA, 501 bp, Staphylococcus aureus
atgctaaatagagttgtattagtaggtcgtttaacgaaagatccggaatacagaaccactccctcaggtgtgagtgtagcgacattcactcttgcagtaaatcgtacgttcacgaatgctcaaggggagcgcgaagcagattttattaactgtgttgtttttagaagacaagcagataatgtaaataactatttatctaaaggtagtttagctggtgtagatggtcgcttacaatcccgtaattatgaaaatcaagaaggtcgtcgtgtgtttgttactgaagttgtgtgtgatagtgttcaattccttgaacctaaaaatgcgcaacaaaatggtggccaacgtcaacaaaatgaattccaagattacggtcaaggattcggtggtcaacaatcaggacaaaacaattcgtacaataattcatcaaacacgaaacaatctgataatccatttgcaaatgcaaacggaccgattgatataagtgatgatgacttaccattc

SEQ ID NO: 4690 - DNA, 846 bp, Staphylococcus aureus
gtaaaagcaatatttttggatatggatggtacaattttacatgaaaataatcaagcatcaacgtatacgaaagatgtcattaatcgattgatagagaaaggatataaagtatttttggcgactggacgttcgcattctggaatacatcaacttgtaccacaagattttgcgggtaatggcatcattagttcaaatggaaccattggagaagtagatggagaaattatcttcaaacatggtttatcattgtctcaagtgcaacaaattattaatttagctaagcgccaacaaatttattatgaggtatttccttttgaaggtaatagagtttctttaaaagaagatgaaacatggatgcgagatatgattcgtagtcaagatcctattaatggcgtaagtcatagtgagtggtcttcaagacaagatgcgcttgctggtaagatagattgggtaactaagtttcctgaaggtgaatattcaaaaatttatctattcagttctaatttagaaaaaataacagcatttagagatgaattaaagcaaaatcatgtgcaactacagattagtgtttcaaattcatcaagatttaatgcggaaacaatggcttatcaaactgataaaggtacaggcattaaagaaatgattgaacattttggcatcaatcaagaagaaacgttagtcattggtgatagtgataatgatagagccatgtttgaatttggacattacacagtcgcaatgaaaaatgcacgccctgaaatccaagcattaacttcagatgtaacggcttatacgaatgaagaggatggcgcagcaaaatatttagcaaagcattttttagctgat

SEQ ID NO: 4691 - DNA, 1237 bp, Staphylococcus aureus
cagaaatttttatcatttcttgggcctgggttattagtcgctgttggttacatggatcccggaaactggataacatcaatgcaaggtggcgcgcaatatggctatactttgctattcgtaattcttatttcaagtttatcagcaatgttacttcaaagcatgacagtgagattaggaatagcaacaggtatggacttagctcaaatgacacgacattatttatcaagaacctattgctataatcttttggattattgcagaactagcaattatcgccacagatattgctgaggttattggtagtgctattgctctcaatctcctatttaacatacctttaatcgtcggtgcactaataactgtacttgatgtatttttactactatttataatgaaatatggttttagaaaaattgaagctattgttggtacattaattttcacagtgttattcatctttatatttgaagtctatatttcatcaccacagttgaacgctgtgttaaatggatttataccacatagtgaaatcattacaaataacggcattctctatattgcattaggtattattggagctacaattatgcctcataatttgtacttacattcatcaattgtacaatctagaacatactcaagacataacaatgaagaaaaggcgcaagcgattaaatttgctacgatagattcgaacattcagttatcaatcgcatttgtagtcaattgcttattattagtgttaggagcatcactatttttcaactcaaacgctgacgatttaggtggtttctatgatttatatcatgccttaaaaactgaacctgtactgggtgcaacaatgggtgcaatcatgagtacattatttgcagttgcattattagcgtcaggtcaaaattcaacgattactggtactttagcaggacaaatcgtaatggattgttttttaagattacacataccaaattggttaagacgtttaattacacgttcccttgctgtcattcctgttatcgtatgtttaatcatttttagaggtaatgcagctaaaattgagcagctacttgtattctctcaagtattcttaagtattgctcttccgttctgtttaataccattacaattagcaactagtaataaagacttgatgggacctttctataataaaacatgggttaatatcatttcatggacacttattattattctaagtattttaaatgtctatttaatcgtt

SEQ ID NO: 4692 - DNA, 290 bp, Staphylococcus aureus
gttaattatacgggaagtagctcagcttggtagagcacttggtttgggaccaaggggtcgcaggttcgaatcctgtcttcccgatatactgtaattattatgggggcttagctcagctgggagagcgcctgctttgcacgcaggaggtcagcggttcgatcccgctagtctccaccatattatttacaaactatataaggcggtgtagctcagctggctagagcgtacggttcatacccgtgaggtcgggggttcgatcccctccaccgccactatttattagttgtaaa

SEQ ID NO: 4693 - DNA, 1206 bp, Staphylococcus aureus
atgaagaaccaattgatagatagattaacaagatatacgacaattgatacgcaatctgatccaaaatctacaacaacaccttcaactgaaaagcaatgggatttgttacatttattagataaagaattacaacaattaggattgccaactgatttagatgaaaatggctacttatttgctacattagaaagtaacatcgatgcagacgtcccaacagttggatttttggcgcatgttgatacatcacctgatttcaatgcttcaaatgttaaaccgcaaattattgaaaactatgatggtaagccatacaaactaggcaatactaaacgtgtcttagatcctaaagtatttccagaacttaacagtttagttggtcatacattaatggtaactgatggtacatcgttactaggtgcagacgataaagcgggtattgtggaaattatggaagctatttgttatttaaaagaacatccagaaattaaacatggtaccattcgcattggatttacaccagacgaagaaatcggtcgtggtccacataaatttgatgttgaccgcttcaatgctgattttgcttatactatggatggtagtcaatatggagaattacaatatgaaagctttaacgctgctgaagcggttattacatgccacggtgtgaatgttcatcctggttcagctaaaaatgcaatggtaaacgcaatacgtttaggtgaacaattcgatagtttgctacctgatagtgaagttccggagcgaacagaaggatacgaaggcttttatcacttaatgaactttgaaggaactgttgaaaaagcaactttgcaatacattattcgtgatcatgataaaaaacaattcgaattgcgtaagaaacgtattttagaaatacgtgacgatatcaatgcccattttgacaattatccagttaaagttgatatatcggatcaatatttcaatatggcagaaaaaatattaccattgcctcatattattgatatacctaaacgtgtctttgctaaattagatattccagcaaacactgaacctattcgtggtggtacagatggttcacaattgtcatttatggggttaccaactccaaacatctttacaggttgcggtaacttccacggcccatatgaatatgcatccattgatgtcatggaaaaggcagtacaagtaatcattggaattgtagaa

SEQ ID NO: 4694 - DNA, 1053 bp, Staphylococcus aureus
atgccattattcaaggtgatattgccgatgattaatcaagtatatcaactcgttgcaccgagacagttcgacgtcacatataataatgttgatatttatggtaatcatgtcatcgtaagacctttatacttgtctatttgtgcagctgatcaaaggtattacacaggtcgaagagatgaaaatgtactgcgcaaaaaattaccaatgtcattagttcatgaagctgttggtgaagttgtatttgatagtaaaggggtatttgaaaaaggtacgaaagtagtaatggtaccgaatacacctacagagcaacatcatattattgcggagaattacttagcctctagttattttaggtctagtggttatgatggttttatgcaagactacgttgtgatggcacatgatcgtatcgttccgctgcctaatgacattgatttgagtacgatttcatacacagagttagtgtcagtaagttatcatgctatacaacgatttgaacgtaaatctatacctttgaaaaccagctttggtatttggggtgatggtaacttaggttatattactgctattttgctacgtaagttgtacccagaagctaaaatttatgtatttggtaagacagactataaattaagtcatttttcatttgtagatgacatctttacagtaaatcaaataccagatgatcttaaaattgatcatgcatttgaatgtgttggaggtaaaggaagtcaagttgcacttcaacaaatagttgaacatatttcaccagaaggcagtattgctttgttaggcgtaagtgaattacccgtggaagtgaatacacgattagtacttgaaaaaggattaacgttgattggtagtagtcgaagcggctctaaagattttgagcaagttgttgatttatatcgtaagtacccagacattgttgaaaagttagcattattaaaaggacatgaaattaatgtatgtacgatgcaagatatcgtccaagcgtttgaaatggatttatcgacatcttggggaaaaacagtattgaaatggacgatttaa

SEQ ID NO: 4695 - DNA, 1521 bp, Staphylococcus aureus
ttagtaacctttttaaatgaggttgtttggagtaagccattagtttatggtttgctaattactggtgtgctatttacattgcgtatgcgattttttcaagttagacattttaaagaaatgattcgattaatgtttcaaggagagaagtctcctaatggtatttcaagttttcaagcgatagccatgtctttagcaggcagggttggtacaggtaatattgtcggtgtatctactgcaatatttataggaggacctggtgcagtattttggatgtggattactgcgtttttaggtgcaagtagtgcttttattgaatctacacttggtcaaatattcaagagagttgaaaataatgaataccgtggtggaccagcgtattatattgaatatggtattggtggtaaatttggtaaaatttacggaattatctttgctattgttacgattatctcagtaggtctgttgcttcctggtgtgcaatctaacgctatagcaagttctatgcacaatgcgattcatgttacacaatggttaatgggtggtattgttgtagttattttgggattaattatttttggtggtgtacgtagtattgccaatgttgcaacagccattgtaccatttatggcaattatttacatactaatggctgtcattatcatttgtatcaatatacaagaagtgccagcgttatttgcattaattttcaaatcagcatttggattacaatctgcttttggtggtatcgttggcgcaatgatagagattggtgttaaacgtggattatactcaaatgaggctgatcaaggtacaggtccacacgcagcagcggcagcagaagtatcacatccaagtaaacaaggtctagtacaagcattttcagtttatattgatacattatttgtatgtactgcaactgctctgattatacttatttctggtacatataatgtgactgatggtacgcttaatgcgaatggcacaccgcatttaattaaagatggcgggatttatgttgaaaatgcaacaggcaaagattattcaggaactgcgatgtatgcacaagccggcattgataaagcgttccatggcagtggttatcaatttgatcctactttctctggtgtaggttcgtactttattgcatttgctttattcttctttgcatttactactattttgtcgtactactacattacagaaacaaatgtcgcttatttaacgcgtaatcaaaataatcaagtttcatcggtatttattaatattgcacgtgtgattattttgttcgctacattttacggtgcagttaaaacagctgatgtagcatgggcattcggtgatttaggtgtaggtctaatggcttggttaaatatcattgcgatttggattttacataagcctgccgtaaatgctttaaaagattatgaaattcaaaagaaacgtttaggcaacggttataatgcagtttatcaacctgatccgaataaattacctaatgctgtcttttggttgaagacatat

SEQ ID NO: 4696 - DNA, 618 bp, Staphylococcus aureus
atgaaaaaatggacaaatcgattaatgacaatcgctggtgtggtacttatcctagtggcagcatatttgtttgctaaaccacatatcgataattatcttcacgataaagataaagatgaaaagattgaacaatatgataaaaatgtaaaagaacaggcgagtaaggataaaaagcagcaagctaaacctcaaattccgaaagataaatcgaaagtggcaggctatattgaaattccagatgctgatattaaagaaccagtatatccaggaccagcaacacctgaacaattaaatagaggtgtaagctttgcagaagaaaatgaatcactagatgatcaaaatatttcaattgcaggacacactttcattgaccgtccgaactatcaatttacaaatcttaaagcagccaaaaaaggtagtatggtgtactttaaagttggtaatgaaacacgtaagtataaaatgacaagtataagagatgttaagcctacagatgtagaagttctggatgaacaaaaaggtaaagataaacaattaacattaattacttgtgatgattacaatgaaaagacaggcgtttgggaaacacgtaaaatctttgtagctacagaagttaaa

SEQ ID NO: 4697 - DNA, 351 bp, Staphylococcus aureus
atgccacgagttaaaggtggaacagtaacaagagcgcgtcgtaaaaaaacgattaaattagctaaaggttacttcggttcaaaacatacattatataaagtagctaagcaacaagtaatgaaatcaggtcaatacgctttccgtgaccgtcgtcaacgtaaacgtgacttccgtaaattatggattacacgtatcaacgcagcagctcgtcaacatgaaatgagctactcacgtttaatgaacggtttgaaaaaagctggtatcgacattaaccgtaaaatgttatcagaaattgcaatttctgacgaaaaagcatttgctcaattagtaactaaagctaaagatgcttta

SEQ ID NO: 4698 - DNA, 1050 bp, Staphylococcus aureus
atgaaattagcgataaaagagattatgttttacaaatttcgttatattttaatcacattaatcattcttttattaagtattatggtgttatttattagtggtttagctcaagggcttggtagggagaatatttcgttatttgaacactttgataatgatgaatatgttgttcaaaaaatgaaagagccgcaaattgagaaatcgcaacttagtgatacgcaacagaatcaaattaaaaaggtaattcatcaagaaccacataaaatgaatgttcaaacattgaaattatctaataaagaacaagatgtgattacaatgaatgacgttaaacaacaacgcttacaacttaaaaaaggtgattatcctaaaaatgctcatgaggtcgctattaatgataagttagctgcagacaacattagagtcggggatagattacattttaaaaataattcaactagttatagagtttctggtattttaaacgacacaatgtatgcgcatagttccattgtgctattgaacgataacggatttaatgcattgaataaggttaatacggcattttatccagtgaaaaatttaacgcaacaacaacgtgatgcgcttaataaaataaatgacgttcaagttgtgagtgaaaaagatttaacaggtaatattgcgagttatcaagcagagcaagcaccgttaaatatgatgattgttagtttgtttgctattacagcaattgttctaagtgcatttttctatgttatgacgattcaaaaaatatcacaaattggcattttgaaagcaattggtattaagacaagacatttattgagtgcgttagttttacaaattttaacactaacaataattggggtaggtattgctgtgatcatcatagtaggactatcatttatgatgccggtaaccatgcctttttacttaacaacgcaaaatattttattgatggtggggatatttatattagtagcgattttaggtgcctcactatcatttatcaaattatttaaagtggatcctatcgaagcaattggaggtgca

SEQ ID NO: 4699 - DNA, 366 bp, Staphylococcus aureus
attccgtcttgcgaggattattgcgcattaaggattaatgcaggtatgagtccaaagacgcgcgaagcagctgaaaaaggattacctaatgccttatttacagtaaccttgtatgataaagaccggttaattggtatgggtagagtgattggcgatggaggaactgtttttcaaattgttgatattgcagttttgaaaagttaccaaggtcaaggttacggcagtcaaattatggaacatattatgaagtatattaaaaatgtatctgtcgaaagtgcatacgttagtctgatcgcagactacccagcggataaattatatgcaaaatttggatttatgcctaccgaaccagattcaggcggtatg

SEQ ID NO: 4700 - DNA, 630 bp, Staphylococcus aureus
atgaaaagattagttacagggttactagcattatcattatttttagctgcatgtggtcaagatagtgaccaacaaaaagacagtaataaagaaatagatgataaagcgaaaactgaacaacaagataaaaaaacaaatgattcatctaaagataagaaagataataaagatgatagtaaagacgtaaacaaagataataaagataatagtgcaaacgataaccagcaacaatctaattcaaatgcaacaaacaatgaccaaaaccaaacaaataataaccaatcaagtaataatcaagcgaataataatcaaaaatcaagttacgttgcaccatattatggacaaaatgccgcgccgattgcacgtcaaatttatccgtttaatggaaataaaactcaagctttacagcaattgccaaatttccaaacagctttaaatgcggctaataatgaagcaaataaatttggtagtaataataaagtgtataatgattattctattgaagaacataatggcaactataagtatgtgtttagttttaaagacccaaatgcaaatggaaaatattcaattgtaacggttgattatactggacaagcaatggttactgatccaaactaccaacaataa

SEQ ID NO: 4701 - DNA, 510 bp, Staphylococcus aureus
atgatccgtctaggtaaaatgtcagatttagatcaaatcttaaatctagtagaagaagcaaaagaattaatgaaagaacacgacaacgagcaatgggacgatcagtaccctcttttagaacattttgaagaagatattgctaaagattatttgtacgtattagaggaaaatgacaaaatttatggctttattgttgtcgaccaagaccaagcagaatggtatgatgacattgactggccagtaaatagagaaggtgcctttgttattcatcgattaactggttcgaaagaatataaaggagctgctacagaattattcaattatgttattgatgtagttaaagcacgtggtgcagaagttattttaacggacacctttgcgttaaacaaacctgcacaaggtttatttgccaaatttggatttcataaagtcggtgaacaattaatggaatatccgccatatgataaaggtgaaccattttatgcatattataaaaatttaaaagaatag

SEQ ID NO: 4702 - DNA, 153 bp, Staphylococcus aureus
aaagctaccccggggataacaggcttatctcccccaagagttcacatcgacggggaggtttggcacctcgatgtcggctcatcgcatcctggggctgtagtcggtcccaagggttgggctgttcgcccattaaagcggtacgcgagctgggtt

SEQ ID NO: 4703 - DNA, 631 bp, Staphylococcus aureus
gggtctttccgtcctgtcgcgggtaacctgcatcttcacaggtactatgatttcaccgagtctctcgttgagacagtgcccaaatcgttacgcctttcgtgcgggtcggaacttacccgacaaggaatttcgctaccttaggaccgttatagttacggccgccgtttactggggcttcgattcgtagcttcgcagaagctaaccactcctcttaaccttccagcaccgggcaggcgtcagcccctatacatcaccttacggtttagcagagacctgtgtttttgataaacagtcgcttgggcctattcactgcggctcttctgggcgttaaccctaaagagcaccccttctcccgaagttacggggtcattttgccgagttccttaacgagagttcgctcgctcaccttagaattctcatcttgactacctgtgtcggtttgcggtacgggcacctattttctatctagaggcttttctcggcagtgtgaaatcaacgactcgaagacacaatgtcttctccccatcacagctcagccttaacgagtaccggatttgcctaatactcagccttactgcttagacgtgcaatccaatcgcacgcttcgcctatcctactgcgtccccccatc

SEQ ID NO: 4704 - DNA, 957 bp, Staphylococcus aureus
atgttaactaaagaatttgcacaacgcgtagaactaagtgagaagcaagtccgtaaaattgttcaacatttagaagaacgtggttaccaactaagcaagactgaatatcgtggtcgtgaagcaactgatttcaaagaagaagatatcgagcttttcaaagacattgccgacaaagtaaaacaaacaaatagttatgatctagcgtttgatgaattagaaaaagaaaaagacttcctgcaagtcattgtcaaaaacgatgacaaaaacttacctactaatcaaaatgtcgctcaactagtagaagatttacgtctagaaatccagaaaatgcgcgaagaacgtcacctacttggtcaaatgatgaatcaagtacatcagcaacaacaagaattaaaagaacttcaaaatcaacttacaactaaaatcaattcaaatagtgaatccttaaaagccatccaaacatcacaagaggctatccaagaagcacaagcatctcaagctaaagtattggctgaatcaacaaataaagttgaaagtaatgctgttactgaagataaagctgacagcaaagattcaaaggttgctggagtgaatacatcaacagacgctaagatggatactaaagcagaaaatgcaggcgatggcactgctactaaagtagataaagaggatcaaatttctgcaactgaagcaattgaaaaagccagcgttgagcagtctaaaaatgacaaagcagctgagacttcaagtaaagaagctacagtagatgcagaagcgcaacatgatgctgaacaacaagtagcagaagcccatgcagaagcttctaaacaagctacttcgaacgattcattggaagcgaaagcagaaaatgacagcacagcttcacagtctgaaatggcagaacctaaacctcaagaagagaaaaaaggtttcttcgcacgtttattcaacctgtaa

SEQ ID NO: 4705 - DNA, 697 bp, Staphylococcus aureus
atgaatgccatagaattaagtaatgttagttattcaagtgaccagtttaatttaaagaatatctctttcaaagttcctcaaggattcgtcactggttttattggtagaaatggcgctggtaaaaccacaataataaggttaattatggatttgtatcaaccacaaactggtgttattagagtattagaagaggatatggctctcaatccaatagagttaaagaatagaattgggtttgtttacgctgaaaattattttaatgagagatggactacgaagcaacttgaaaaaatgattgcccctttttatcgtacatgggaccatcaagtatttgaattctatcttgcaaagttcgagttaccaatcaatcaatcaatataaaacattttcgactggcatgaaaatgaaattatcactagcagttgcattttcacatcatgctgaattgtatatttttgatgagcctacttcaggtcttgatcccttagctagaaatgagctattggagataattcagcaagaattaattgatgaaaataaaacaatattcatgtcgacacacattatctcagatttagaaaaaatagctgattatatcattcacttaagtgacggtgaagttatcttaaatggttcaaaagaacaactgttacaaagatatcaagttgtgagtggtgcaattgaggaccttgatgat

SEQ ID NO: 4706 - DNA, 1023 bp, Staphylococcus aureus
gcagaggttattattccaaataatacgattgatttcaaaggagaaagagatgacgttagaacgcgtgaaacaaatttaggaaacgcgattgcagatgctatggaagcatatggcgttaagaatttctctaaaaagactgactttgccgtgacaaatggtggaggtattcgcgcctctatcgcaaaaggtaaggtgacacactatgatttaatttcagtattaccatttggaaatacgattgcgcaaattgatgtaaaaggttcagacgtctggacggcttttgaacatagtttaggcgcaccaacaacacaaaaagatggtaagacagtattaacagcgaatggcggtttactacatatctctgattcaatccgtgtttactatgatatgaataaaccgtctggcaaacgaattaatgctattcaaattttaaataaagagacaggtaagtttgaaaatattgatttaaaacgtgtatatcacgtaacgatgaatgacttcacagcatcaggtggcgacggatatagtatgttcggtggccctagagaagaaggtatttcattagatcaagtactagcaagttatttaaaaacagctaacttagctaagtatgatccgacagaaccacaacgtatgttattaggtaaaccagcagtaagtgaacaaccagctaaaggacaacaaagtagcaaaggtagtaagtctggtaaagatgcacaaccaattggtaaagacaaagtgatgaatccagcgaaacaaccggcgccaagtaaagttgtgttgttgccaacgcatagaggaactgatagtagtggtagagaaggttctgatcgcgcattggaaggaactgctgtatcaagtaagagtgggaaacaattggctagcatgtcagcgcctaaaggtagcacacatgagaaacagttaccaaaaactggaaatgatcaaagttcaagcccagcagcgatgtttgtattagtagcaggtataggtttaatcgctactgtacgacgtagaaaagctagc

SEQ ID NO: 4707 - DNA, 1851 bp, Staphylococcus aureus
ctagaacaaattggtcgtaacttaacgcaagaggctcgtgacggattattagatccagtcatcggtcgtgataaagaaatccaagaaactgcagaagtcttaagtagacgcactaaaaacaatcctatcctagtcggagaagctggagttggtaaaactgcgattgtcgaaggtttagcgcaagcaatcgttgaagggaacgtacctgcagcaatcaaagataaagaaattatatctatagatatttcatcgcttgaagctggaacgcaatatcgtggcgcctttgaagaaaacatccaaaagttagttgaaggcgttaaatcatcacaaaatgctgtgctcttctttgacgaaattcaccaaatcatcggttccggcgcaacaggaagtgattccggtagtaaagggttatctgatattttaaaaccagcattaagtcgtggttaaatttcaattataggtgcaacaactcaagatgaatatcgcaataatatcatgaaagacgctgcattaacacgtcgttttaacgaggtactggttaacgaaccaagcgcaagagatacggttgaaattttaaaaggaattcgcgaaaaatttgaagcacaccatcaagtcaaattacctgatgacgtattaaaggcatgtgtagacttatccattcaatatattccacaacgcttattacctgacaaagcaatcgatgtattagatattacagctgcacatttatctgcacaaagccctgctattgataaagtcgcgactgaaaaacgtatttctgaattggaacatgataagcgtaaagctgtaagtgctgaagaatataaaaaagcagatgacattcaaaatgaaatcaaatctctacaagataaattagaaaacagtaatggtgaacatactgcagtagcaacggtgcacgatatttctgataccattcaacgattaactggtattcctgtatctcaaatggatgccaatgacattgaacgtttaaaaaatatttctagtcgtttaagaagtaaaatcatcggtcaagataaagctgtagaaatggtttctcgtgccattcgtcgtaatcgagctggttttgatgatggcaatcgtccaattggtagcttcctatttgtcggtcctactggtgttggtaaaacagagcttgccaaacagttagccattgatttatttggtaataaagaggcactgattcgacttgatatgagtgaatatagtgatactactgctgtttctaaaatgattggtacaactgctggttatgtcggttatgacgataattcaaatacattaactgaaaaagtacgacgcaatccatattcagtcattctatttgatgaaattgaaaaggctaatccacaaatattaacattattactacaagtgatggatgatggtaatttaacagatggtcaaggtaacgtcatcaactttaaaaacacaatcattatttgtacgtcgaacgctggttttggtaacggtacagaccaagaatacgatgacattatgcaagaaatgaaaaaattcttccgccctgaatttcttaaccgcttcaatggtattgtggaattcttacacctagataaagaatcactacaggaaatcattaatttattgttggatgatgtccaagtaacatttgataaaaaaggtattacgatgaatgtctctcaagatgcaaaagattggttaattgaagagggatatgatgaagagttaggcgcacgcccattaagacgcattgttgaacaacaagtgcgtgacaaaataacagattattatttagatcatacagacgttaaacatgtggatttagatatcgaagacaacgaattagtc

SEQ ID NO: 4708 - DNA, 702 bp, Staphylococcus aureus
acacaagtgacaaacattgaactgaacgtaagagacttagacttaatgacaacattttacaaaaacattttaggactatccgttaaaagttctgacgataacacaaccgtattatctgttgggactggtggccatactctaacgttacatttattagaagacggccgtcagacttccccacgagaagcaggactttttcatatagcatttttattaccaactactgaggatctagctaacttcttatatttcgtggcacaaaaaaatatgggcatcggcgctggtgatcatttagtaagtgaagctttatatttcaacgaccccgaaggtaatggtattgaagtctatcgcgatagaccttcatcttcatgggaatggcaaaatggcaaagttaaaatggatactttagaagttgatagccaaaccttattaacacatcgtactgatgaaggttggcaaggaatgccagcaaaaggcatgattggacacttacatttaaaaacacatgacttagacgcagcatatcaatgttacattgaacaattaggattccaacatgtgtctgattttccacgtgcgctatttatgtcaacgaatcattatcaccatcatattgctgctaatacttggcaatccaatcaagcaagacaaaacaatgcacaaagttatggattaacacatgttgatatttatcaacccgac

SEQ ID NO: 4709 - DNA, 1485 bp, Staphylococcus aureus
cgtttcttgaatagtgttgaaaaaattggaaataaattgccagatcctagcgtcttattctttttaatgtgtgtgggcttagccattatgacgtgggttatctcattatttaatgtatctgttaagcatccaggtacgcatcaaaccatttatattaaaaatataattagccatgatggatttacgatgataatgaatgatacgattaaaaatttctcagagttcccagcattaggcttagtactagcagtgatgattggtataggtgttgcagagaaaacaggatacttcgacaagttaatgatttctgttgtgaatcgcgcaccacgtttcttaattttaccgactattatattaattggtattttaggtagtacagccggcgatgctgctacaattatcttgccgccgctcgcagcgatgctttttattaaaattggctatcaccctatcgctggactaacaatggcatatgcttccgctgtaggtggctttgccgcaaatatagttgttggtatgcaagatgttttggtctattcatttacagaaccagcaacacgtatcgtttcagattctattaaaacaaacgttgctatgaactggtactttatcgcagcgagtgtcgttgtattacttcctacgatattgctagttacaactaaactgattattcctaggttaggtcaatatgatgatcgtttaatgcatgatgatcatgaagaaacgtcttcacatattactgacaaagaagcacatgctttaaaatgggcaaatatcagtttcatagtcacaattattttattaattattacagccattcctgaacatagctttttaagaaatgctaaaacaggcagcttactagacgatgcgccattaattaacggtgtcggattaattattcttgtcgtatttttagtacctggattagtttatgggattttaagcaaagaaattaaaaatacaaaagacttaggtaaaatgtttggcgatgctgtaggatcaatgggaacatttatcgttattgtgttttttgcagcacagctacttgcatatttaaagtggagtaatttaggaattatcgctgctgttaaaggtgccaaattattagaacatcaaaacggtattgtattgatactaggtattattgtactgagtgcaatggtcaacatgttaatcggaagcgcatcggctaaatggggtattttaggaccgatattcgtaccaatgttaatccttatcggctttcatcccgcatttacacaagtcatttaccgtgtaggagattcaattaccaatccaattacaccgatgatgccgtacttacctttattattaacttatgcacaaaaatacgataaacgcatgaaactcggagccttactttctagtttaatgccgtattcaatcgcgctaagtattgtgtggacagtatttgtcattatttggttcttattaggtatccctgttggaccaggtggtccg

SEQ ID NO: 4710 - DNA, 171 bp, Staphylococcus aureus
atgaaaatgaaggagagaattaatatggtagaatcaatgctaacttttatgcttgggccattgagacaaatcactgatttttatatggaacatttactcgtaagtaattccatcgtcattgcaggttattttgcgacaggtatttttaaaaagaaaaaagttgtgaattaa

SEQ ID NO: 4711 - DNA, 408 bp, Staphylococcus aureus
ggtacaggaatatcaacctgttatccatcgcctacgcctgtcggcctcagcttaggacccgactaacccagagcggacgagccttcctctggaaaccttagtcaatcggtggacgggattctcacccgtctttcgctactcacaccggcattctcacttctaagcgctccacatgtccttacgatcatgcttcaacgcccttagaacgctctcctaccattgtccaaaggacaatccacagcttcggtaatatgtttagccccggtacattttcggcgcagtgtcactcgactagtgagctattacgcactctttaaatgatggctgcttctaagccaacatcctagttgtctgggcaacgccacatccttttccacttaacatatattttgggaccttagctggtgg

SEQ ID NO: 4712 - DNA, 201 bp, Staphylococcus aureus
atgacaaatgaagagaaagtattagctattagagagaagttaaatattgttaatcaaggattattagatcctgaaaaatatacaaatgcaaatgaagaagaattaacagatatatatgattttgttcaatcaagagaaagattatcgccaagtgaagtgacagctattgctgacgctttaggacaattgcgacacgactag

SEQ ID NO: 4713 - DNA, 390 bp, Staphylococcus aureus
gccacttatgaccaaagtacaggggtcgtaacgttaacgcaagatacaacaagccaaaaaggtgccattacattaggaacacgtattgactctaataagagttttcatttttctggaaaagtaaatttaggtaacaaatatgaagggcatggaaatggtggagatggtatcggttttgccttttcaccaggtgtattaggtgaaacagggttaaacggtgccgcagtaggtattggtggcttaagtaacgcatttggcttcaaattagatacgtatcacaatacatctacgccaaattcatcagcaaaggcgaaagctgacccatctaatgtagctggtggaggtgcgtttggtgcctttgtaacaacagatagttatggtgttgcatca

SEQ ID NO: 4714 - DNA, 2679 bp, Staphylococcus aureus
ggtaacggtatggcgggcattcgaacaatcgaagaaatattagaacgcgccaacgatttatatgatattacggtaattggtaaagaaccttatccaaactataaccgcatcatgctttcaaatattttacaaaataaaatgacagttgaagaaacaattatgaatccatatgagtggtatgaggaacatggtattgagttaattacaaatgatcctgtaattgaagtagatagagcaaatcaatcagttactactgcaaatggtattgaagtatcatacgataaattgatttttgcgacaggttctaaagcattcgtcattccagttccaggttcgacattaccgagtgtaattggttggagaacgattgatgatactgaacaaatgatgaatattgctaagactaaaaagaaagcaattgtaattggtggaggcttactaggtttagagtgtgcacgtggtttattagatcaaggtatggaagtaacggtgttacatttagctgaatggttgatggaaatgcagctagaccgtaaagctggaaatatgcttaaagcagatctagaaaagcaaggtatgaagtttgaaatgcaagccaacacaactgaaatcttaggagaagatgatgttgaaggtgttaaattggctgatggacgcgagattccggcagacttagttgttatgtcagtaggtattcgaccatacacagaagtagccaaagaatcaggtctagatgttaatcgtggtattgttgtcaatgatgtgatgcaaacaagtgatagcaatgtatatgcagttggtgaatgtgcagaacataacggcaaagtttatggactcgttgcaccactatatgaacaaggtaaagtattagctgatcatttaacaaataaagaaacgaacggatacaagggatcaacaacatttacgtcattaaaagtttctggttgtgacttgtatagtgctggtcaaattgtagaaaatgcagaaattaaaggtattgaaatatttaatagcgttgataataactataaaaaaatctttttaaaagacggtaatgtagttggtgcagtactatatggtgatatcgatgatggttcacgcttttataacatgatgaaaaaaggtgaatctactgaagactacacactggtatcattgcttactaaaggtggagaagaggcatcgctatcaattgctgatatggctgatgatgaaacaatttgtggttgtaatggtgttgataaaggtactatagtaaatgctattacggaaaatggctttacaacagttgaagaagtaacggctaaaacaaaagcggggaattcatgtggtaaatgtaaaccgcaaattgctcaaatattgcagcacaccttaggagatgactttgttgccgcaaaacctgctggtatatgtggttgtactgatttgacacgcgatcaaattgtaacgcaaataagagcgaaaggtttaaaaacatctaaagaagttcgacatgttttaaactttaaaaataaaggtggatgtccaaaatgtcgaccagcaatcaactattatttaaacatggtttatccacatgatcatgaagatgaaagagaatcaagatttgctaacgaacgttaccatgcgaatattcaaaatgatggtacattttctgttatacctcaaatgcgtggaggtgttacagatgcagaccaactgattcgtctaggagaagtggctaaaaaatatcatgtaccattagttaaagtgacaggttcacaacgtgttggtttgtatggagttaaaaaagaagaattaccaaatatatgggaagacctaggtatgcgttcagcatcagcttatggtaagaaaacacgctcagttaaaagctgtgttggtaaagagttttgtcgatttggtacgcaatacacgacacgacttggcattcgtttagaaaaaacatttgaatacatcgatacacctcataaattcaaaatgggtgtatcaggctgcccaagaagttgtgttgaatcaggtgttaaagattttggtattatctcagttgaaaatggattccaaatctatatcggtggtaatggaggtacagaagttgaaaaagctgaatttttaacaactgtagaaacagaagatgaagtaatcaaattatgtggtgctttgatgcaatattatcgcgaaacaggtatatatgctgaaagaacagcgccatggttaagaagacttggatttgaaaatgtaaaagaagtcttacttaacccagaaagacaaaatgaactatttgaacgcattatggatgctaaaaaagcagtcgaagctgaaccttgggaagcaataactagcaatgcgcaagcacgtaaaatttttgaagtggagaaggtgtaatacatggaaacaaaagaaaaaattaaagtgacaactatagatgaattaacacccctaattggaaaaaaggttattgtcaaaggcaaagaggtaggattgtttttaacagaaagtggcaaaattcatgcgattcacaatatctgtccacacaaacaaggaccattgtctgaagggacagtgagtggagaatatgtattttgcccgctccacgatcaaaaaattgatttaaatacaggtattgttcaagaacctgatgaaggttgtgtagatgtttatgaggtagaagttacagacgggaac

SEQ ID NO: 4715 - DNA, 1172 bp, Staphylococcus aureus
atgttagaatttgaacaaggatttaatcatttagcgactttaaaggtcattggtgtaggtggtggcggtaacaacgccgtaaaccgaatgattgaccacggaatgaataatgttgaatttatcgctatcaacacagacggtcaagctttaaacttatctaaagctgaatctaaaatccaaatcggtgaaaaattaacacgtggtttaggagcaggagctaatcctgaaatcggtaaaaaagctgcagaggaatctcgtgaacaaattgaagatgcaatccaaggtgcagacatggtatttgttacttctggtatgggtggcggaactggtactggtgcagcaccagtcgttgctaaaattgcaaaagaaatgggcgcattaactgttggtgttgtaactcgtccatttagttttgaaggacgtaaacgtcaaactcaagctgctgctggagtagaagctatgaaagctgcagtagatacattaatcgttataccaaatgaccgtttattagatatcgttgacaaatctacgccaatgatggaagcatttaaagaagctgacaacgtgttacgccaaggtgtacaaggtatctcagacttaatcgctgtttctggtgaagtaaacttagactttgcagacgttaagacaattatgtctaaccaaggttctgcattaatgggtattggtgtttcttctggtgaaaatagagcggtagaagctgctaaaaaagcaatctcttctccattacttgaaacatctatcgttggtgcacaaggtgtgcttatgaatattactggtggcgagtcattgtcattatttgaagcacaagaggctgctgatattgtccaagatgctgcagatgaagacgttaatatgattttcggtacagttattaatcctgaattacaagatgagattgttgtaacagttattgcaactggttttgatgacaaaccaacatcacatggtcgtaaatctggtagcactggattcggaacaagcgtaaatacttctagcaatgcaacttctaaagatgaatcattcacttcaaattcatcaaatgcacaagcaactgatagtgtaagtgtaagacacatacaactaaagaagatgatattcctagcttcattagaaatagagaagaaagacgttcaagaagaacaagacgcgat

SEQ ID NO: 4716 - DNA, 963 bp, Staphylococcus aureus
atgaacttaaaattaaatagaaagaaagtgatttctatgattaaaaataaaatattaacagcaactttagcagttggtttaatagcccctttagccaatccatttatagaaatttctaaagcagaaaataagatagaagatatcggccaaggtgcagaaatcatcaaaagaacacaagacattactagcaaacgattagctataactcaaaacattcaatttgattttgtaaaagataaaaaatataacaaagatgccctagttgttaagatgcaaggcttcattagctctagaacaacatattcagacttaaaaaaatatccatatattaaaagaatgatatggccatttcaatataatatcagtttgaaaacgaaagactctaatgttgatttaattaattatcttcctaaaaataaaattgattcagcagatgttagtcagaaattaggctataatatcggcggaaacttccaatcagcgccatcaatcggaggcagtggctcattcaactactctaaaacaattagttataatcaaaaaaactatgttactgaagtagaaagtcagaactctaaaggtgttaaatggggagtgaaagcaaattcattcgttacaccgaatggtcaagtatctgcatatgatcaatacttatttgcacaagacccaactggtccagcagcacgagactatttcgtcccagataatcaactacctcctttaattcaaagtggctttaatccatcatttattacaacattgtcacacgaaagaggtaaaggtgataaaagcgagtttgaaatcacttacggcagaaacatggatgctacatatgcttacgtgacaagacatcgtttagccgttgatagaaaacatgatgcttttaaaaaccgaaacgttacagttaaatatgaagtgaactggaaaacacatgaagtaaaaattaaaagcatcacacctaag

SEQ ID NO: 4717 - DNA, 262 bp, Staphylococcus aureus
atgagattagataaatatttaaaagtatcacggttaataaagcgacgtacgctagcaaaagaagtaagtgatcaaggtagaattacaataaatggtaatgttgctaaagctggatcggatgatgaaagttgaagatgtgctgacgattcgctttggtcaaaaattagtaacagttaaagtaactgcattaaatgaacatgcatctaaagataacgcgaagggtatgtatgaaatcattgaagagcgtcgacttgaagaagcg

SEQ ID NO: 4718 - DNA, 805 bp, Staphylococcus aureus
atgcgttatacaattttaactaaaggtgactccaagtctaatgccttaaagcataaaatgatgaactatatgagagattttcgcatgattgaggatagtgaaaatcctgaaattgttatttcagttggtggtgacggtacattactacaagcattccatcagtatagccacatgttatcaaaagtggcatttggttggagttcatacaggtcatttaggattttatgcggattggttacctcatgaagttgaaaaattaatcatcgaaattaataattcagagtttcaggtcattgaatatccattgcttgaaattattatgagatacaacgacaacggctatgaaacaaggtatttagcattaaatgaagcaacgatgaaaactgaaaatggctcaacacttgttgtggatgttaacttaagagggaaacactttgagcgatttagaggcgatggattatgtgtatcaacaccttcgggttcaacggcttataacaaagcgctaggtggcgcactgatacatccttcacttgaagcaatgcaaattacagaaattgcctcgataaataatcgtgtgtttagaacggtaggatcaccacttgtattaccaaagcatcatacatgtttaatatcaccagttaatcatgataccattagaatgacgatagatcatgttagtatcaaacataaaaatgttaattcaatacaataccgtgtagcaaatgaaaaagtgaggtttgcacgttttagaccattcccattctggaaacgtgtgcacgattctttcatatcaagtgatgaagaa

SEQ ID NO: 4719 - DNA, 773 bp, Staphylococcus aureus
actgttaaaacttttttagcacgacatgatttttctaagaagacagtgagcgccattaaaaataatggcgctttaattgttaatgatgaaccagtcacagtgcgtaacaattaatgacaaatgatatattagaaattcatttaccgcgagaaataccgagtgttaatttaataccttatgctcgtaagctagaagtattgtatgaagatgcttttatcatcatagttactaaaccaaacaatcaaaattgtacgccttcgagagaacatcctcatgaaagtttaatcgaacaagtactatatcattgtcaggaacatggtgaaaatattaacccacatattgttacgcgtctagatcgtaatacaactggtattgtgatattcgctaaatatggacatatccatcatttattttctaaagtaaacttgaaaaaaatatatacttgccttgtatatggtaaaacccatacatctggtattattgaagctaatattagacggtcaaaggataggattataactagagaagttgcctcggatggtaaatacgctaaaacatcttatgaagtaataaatcagaatgataaatacagtttatgcaaagttcatttgcatacgggacgtacacatcaaattcgtgtacattttcaacatattgggcatccaattgtgggagattctttgtatgatggttttcatgacaaaattcatggtcaagtactgcaatgtacgcaaatatattttgttcatccaatcaataagaacaatatttat

SEQ ID NO: 4720 - DNA, 275 bp, Staphylococcus aureus
atggcagttaaaattcgtttaacacgtttaggttcaaaaagaaatccattctatcgtatcgtagtagcagatgctcgttctccacgtgacggacgtatcatcgaacaaatcggtacttataacccaacgagcgctaatgctccagaaattaaagttgacgaagcgttactttaaaatggttaaatgatggtgcgaaaccaactgatacagttcacaatatcttatcaaaagaaggtattatgaaaaaatttgacgaacaaaagaaagctaagtaa

SEQ ID NO: 4721 - DNA, 631 bp, Staphylococcus aureus
aaaatgaatagtgcaaaattgattgatcacactttattgaagcctgagtcaacacgtacgcaaatcgatcaaatcatcgatgaagcgaaagcataccattttaaatctgtatgtgtgaatccaacgcatgttaaatatgcagcagagcgactagctgattcagaggtgttagtttgtacggtaataggattcccattaggtgcatcgacaactgcgacgaaagcatttgaaacagaagatgcgattcaaaatggtgcagatgaaattgacatggtcatcaacatcggcgcattaaaagatggacgttttgatgatgtacaacaagacattgaagcagtggtgaaagctgcgaaaggtcacacagtaaaagtgattattgagacggtattgttggaccatgacgaaattgtaaaagcgagtgaattaacaaaagcggctggtgcggacttcgttaaaacttcaacaggttttgcaggtggcggtgcgactgcagaagacgttaaattaatgaaagatacagtaggtgctgatatagaagtaaaagcatcaggtggcgtacgtaatttagaatatttcaataaaatggttgaagcaggtgcgacacgtattggtgcgagcgcaggcgttcaaa

SEQ ID NO: 4722 - DNA, 2058 bp, Staphylococcus aureus
atggcactattagaagcatttttaatttttatttttgctgtgattattagttcggttatcaataatcgattcccacaaattcctactgcctttattcaaattgcattaggtgtcgttattttcattattccaatacaagttgatttccaattcaattctgaagtatttatgtttgccgttatcgcgccactactttttgtggaaggtacccacgtctctcgaacaaaattattagaatatcgtaaacctatactattaatgtcaatggcactagtgtttgcaactgtagtcggtgttggctattttatacattggatttggcctgccttaccaatgccagccgcttttgcaatagcagcaattttatgtcctactgatgcagtagcagtatctgctattacacgcggaaaattattacctaaaggttctatgacgattttagaaggtgaatctttactcaatgatgcagcaggtatcatttcatttaaaattgctgttactgcattagtaactggtaccttttcattattccaagctgttgaacaatttatcatttcaacaatactaggtgtacttattggtgcaattattggattcgttgtcgttagaatacgtatagacttaaccgctaataaaggtttaaaagataacaataccttaacttttattcaattattaactccttttgtcgtatactttttagcagaagaagttcatgcttcaggtatcattgcagttgtaatcgcaggtctaatccatggtttagaacgcgaccgtttaattagagcacaaacggaactacaaatgaattaccatcaaatttggaacacatttagttatgccttaaatggttttgtatttgttgtattaggttttatgattcctactgtagtcatagatattttccaaacagagcctgacaacttttcatttttaatagtgatcactatattaatcgctattgcaatttatgcatgtcgatttgtttgggtttatttctggtacaaagatttttatttcccgaaaaatatacaatcttatctagacgaggaacatgattcacatgaaacaccaccttctcgagtgcgttacgcatttattatgaccatgtgtggtattcacggtacaatttcactttcaatggcacttacattaccatttatcattacaaaaggacaagcattcgaataccgtaatgatttattgtttattgcatctttcatggtattaattagtttaatcttagcgcaaattgttttacctttaattacaccatctgccgaagatactacttttaaaggtatgacttatcaatctgccaaaattttcattgttcaaaaagtgatccagcattttaaaaacgaaagtaaaaaagacaaaaacgatacaaattatcgcccagtattaaaccaatactatggagaattgttatttttattaaattcagaacctgataatcaaaatacaaaagaactcaaacgtttagaagatattgcacaagtaatcgaaacatctacacttgagcgtttaattgataaaggtaaggcaacatatcaggatattaataattaccgcaatattgtcgaattaacagagacacaccgtactgcatcatttgttgaaaaatttgcaaacttcttcaagatgttatggcttagacttaaagcgatgaagcactacaaagccttaaataaagaatctaagaagcaagaatttgaaaattcattcaaagatgttcaaaaaattatgcgtattgtgaatcacaatattattttacgcttaaaagaagaacaaaatagtacaaatgtacttgaggttagcttagtcattaatcattactatgatatgagtcgctcattaaagtggcgtgcacaacgtcgaaaagaacgtcaagaaaacagcaatcaaatcataccgcaagctatgttccataaccacaaattggaagcattgtacttacaacgtcatcttttagatgaattaattcgcaaaaataaaatcaacaatatcgttgcagctcaaattcgagaaaatatcaattacaacgaaattgtcttg

SEQ ID NO: 4723 - DNA, 1663 bp, Staphylococcus aureus
atgactgataaaaagtacactgcagccgatatggttattgatactttgaaaaataatggggtagaatatgtttttggtattccgggtgcaaagattgactatctatttaatgctttaattgatgatggtcctgaacttattgtcactcgtcatgaacaaaacgccgcaatgatggcgcaaggtattggaagattaacaggcaaaccgggtgtagtacttgttacaagtggtcctggtgtaagtaatttaactactggattattaaccgcaacatctgaaggggatcctgtattagcgttaggtggccaagtgaaacgtaatgatttattacgattaacgcatcaaagtattgataatgctgcgctattaaaatattcatcaaaatatagtgaagaagtacaagatcctgaatcattatcagaagttatgacaaatgcaattcgaattgctacttcaggaaaaaatggcgcaagttttattagtattccgcaagacgttatttcttcaccagttgaatctaaagctatatcactttgccaaaaaccaaatttaggagtaccgagtgaacaagatattaatgatgtcattgaagcgattaaaaatgcatcatttcctgttttattagctggtatgagaagttcaagtgcagaagaaacaaatgccattcgcaaattagttgagcgcacgaatttaccagttgtagaaacattccaaaggtgcaggtgtaattagtcgtgaattagaaaatcatttcttcggtcgtgtgggcttattccgcaatcaagttggtgatgaattattacgtaaaagtgatttagttgctacaatcggttatgatccaattgaatacgaagctagtaactggaataaagaattagaaacacaaattatcaatattgacgaagttcaagctgaaattactaattatatgcaaccgaaaaaagagttgattggtaatattgctaaaacgattgaaatgatttctgaaaaagtggatgagccatttataaatcaacaacatttagacgaattagaacaattaagaacacatattgatgaagaaactggtattaaagcgacgcatgaagaaggaattctacatccagtggaaattattgaatctatgcaaaaggtattaactgatgatactactgtaacagttgatgttggaagtcactatatttggatggcacgtaatttcagaagttacaatccaagacatttattatttagcaatggtatgcaaacgcttggtgtagcattaccgtgggcaatttcagctgcacttgtgcgccctaatacgcaagttgtgtccgttgctggcgatggtggctttttattttcatcacaagatttagaaacggccgtacgtaaaaatttaaatatcatccagcttatttggaatgatggaaaatataacatggttgaattccaagaagaaatgaaatataaacgttcgtcaggtgtagacttcggtcctgtagattttgtaaaatatgcagaatcatttggcgcgaaaggtttacgagttactaatcaagaagaattagaagcggcaattaaagagggctatgaaacagatggtccagtattaattgatatacctgtaaattacaaagataatatcaaactttcaacaaatatgttacctgacgtatttaac

SEQ ID NO: 4724 - DNA, 2523 bp, Staphylococcus aureus
atgaataataaaaagacagcaacaaatagaaaaggcatgataccaaatcgattaaacaaattttcgataagaaagtattctgtaggtactgcttcaattttagtagggacaacattgatttttgggttaagtggtcatgaagctaaagcggcagaacatacgaatggagaattaaatcaatcaaaaaatgaaacgacagccccaagtgagaataaaacaactaaaaaagttgatagtcgtcaactaaaagacaatacgcaaactgcaactgcagatcagcctaaagtgacaatgagtgatagtgcaacagttaaagaaactagtagtaacatgcaatcaccacaaaacgctacagctaatcaatctactacaaaaactagcaatgtaacaacaaatgataaatcatcaactacatatagtaatgaaactgataaaagtaatttaacacaagcaaaagatgtttcaactacacctaaaacaacgactattaaaccaagaactttaaatcgcatggcagtgaatactgttgcagctccacaacaaggaacaaatgttaatgataaagtacatttttcaaatattgacattgcgattgataaaggacatgttaatcagactactggtaaaactgaattttgggcaacttcaagtgatgttttaaaattaaaagcaaattacacaatcgatgattctgttaaagagggcgatacatttacttttaaatatggtcaatatttccgtccaggatcagtaagattaccttcacaaactcaaaatttatataatgcccaaggtaatattattgcaaaaggtatttatgatagtacaacaaacacaacaacatatacttttacgaactatgtagatcaatatacaaatgttagaggtagctttgaacaagttgcatttgcgaaacgtaaaaatgcaacaactgataaaacagcttataaaatggaagtaactttaggtaatgatacatatagcgaagaaatcattgtcgattatggtaataaaaaagcacaaccgcttatttcaagtacaaactatattaacaatgaagatttatcgcgtaatatgactgcatatgtaaatcaacctaaaaatacatatactaaacaaacgtttgttactaatttaactggatataaatttaatccaaatgcaaaaaacttcaaaatttacgaagtgacagatcaaaatcaatttgtggatagtttcacccctgatacttcaaaacttaaagatgttactgatcaattcgatgttatttatagtaatgataataaaacagctacagtcgatttaatgaaaggccaaacaagcagcaataaacaatacatcattcaacaagttgcttatccagataatagttcaacagataatggaaaaattgattatactttagacactgacaaaactaaatatagttggtcaaatagttattcaaatgtgaatggctcatcaactgctaatggcgaccaaaagaaatataatctaggtgactatgtatgggaagatacaaataaagatggtaaacaagatgccaatgaaaaagggattaaaggtgtttatgtcattcttaaagatagtaacggtaaagaattagatcgtacgacaacagatgaaaatggtaaatatcagttcactggtttaagcaatggaacttatagtgtagagttttcaacaccagccggttatacaccgacaactgcaaatgtaggtacagatgatgctgtagattctgatggactaactacaacaggtgtcattaaagacgctgacaacatgacattagatagtggattctacaaaacaccaaaatatagtttaggtgattatgtttggtacgacagtaataaagatggtaaacaagattcgactgaaaaaggaattaaaggtgttaaagttactttgcaaaacgaaaaaggcgaagtaattggaacaactaaaacagatgaaaatggtaaatatcgtttcgataatttagatagcggtaaatacaaagttatttttgaaaagcctgctggcttaacacaaacagttacaaatacaactgaagatgataaagatgcagatggtggcgaagttgacgtaacaattacggatcatgatgatttcacacttgataacggatacttcgaagaagatacatcagacagcgattcagactcagatagtgactcagacagcgactcagactcagacagcgactcagactcagacagtgattcagattcagacagcgactcagattcagatagcgactcagattcggacagcgattcagactcagatagcgactcagattcagacagtgattcagacagcgattcagactcggatgcaggaaaacatacacctgttaaaccaatgagtactactaaagaccatcacaataaagcaaaagcattaccagaaacaggtagtgaaaataacggctcaaataacgcaacgttatttggtggattatttgcagcattaggttcattattgttattcggtcgtcgcaaaaaacaaaacaaa

SEQ ID NO: 4725 - DNA, 1242 bp, Staphylococcus aureus
agaacggttatatataaaattgtgttgcacacattttttaataaatcgttattctaagggaaatgaatatcggaaattttgtttgaaaggagttttaaattgtcaatcatgcgactatttacattcattttaagtatttttatcgtaggaatggttgaaatgatggttgcaggaattatgaacttgatgagtcaggacttacatgtatcagaagctgtcgttggtcaattagtgacaatgtacgctttaacatttgcgatatgtggacctattctggttaaattaacgaaccgtttttcatcaaggcctgtattattatggacattacttatatttatcattggtaatggcattattgctgtagcgccaaatttttcaatattagtagttggtagaattatctcatctgcagcagcagcactaattatcgtaaaagtattagctattacagcgatgttatcagcacctaaaaatcgtggtaaaatgattggacttgtctatacagggtttagtggtgctaatgtttttggtgtaccaattggaacggttatcggcgatttagtaggttggcgctatacatttctattcttaattattgtgagtattattgttggcttcttgatgatgatctatttaccgaaggatcaggaaatacaacgaggccctgtgaatcatgagacaccatctcatgaaaatcatgttacttcgaaaatattaagacctgctgaagtagcaaaatatttaattattacgtttttagtattgattgcaaactcagtgacattcgtctttataaatccacttattttatctaatggtcatgatatgtcattcgtttcattagcacttctagtaaatggaatcgctggcgttattggaacatcattaggtggtatattctccgataaaattacaagtaagcgttggttaatgatttctgtttctatttttatcgtcatgatgttacttatgaatttaatcttacctggttcaggtctattgttagcaggactatttatttggaatatcatgcaatggagtactaatccagcagtgcaaagcggtgtgattcaacatgttgaaggcgacacaagccaagtaatgagttggaacatgtctagtttaaacgctggtattggtgttggaggcattattggaggcttggtcatgacacatgtttctgttcaagctatcacatatacgagtgccatcattggcgcattaggattaatcgttgttttc

SEQ ID NO: 4726 - DNA, 1399 bp, Staphylococcus aureus
caacaaattggagttattggtttagccgttatgggtaaaaacctagcttggaatattgaatcacgcggatatagtgtatctgtatttaaccgctcaagtgaaaaaactgatttaatggttgaagaatcaaaagggaaaaatattcatccaacgtattcattggaagaatttgttaattctttagaaaaaccacgtaaaattttattaatggttcaagcaggtaaagctacggacgcaacgattgatagtttgttacctttattagatgatggagatattttaattgatggtggtaatacaaactatcaagatactatcagacgtaataaagcattagcacaaagtgcaatcaactttattggtatgggcgtttctggtggtgaaattggagcgttaactggtccgtcattaatgccgggtggacaagaagaagcttataacaaagttgcagatattcttgatgcaattgctgcaaaggcaaaagacggtgcttcatgtgttacttatattggacctaatggtgctggacactatgtgaaaatggtacacaatggtatcgaatatgctgacatgcaattaattgcagaaagttatgctatgatgaaagaattattaggcatgtctcatgaagacattgctcaaacgttcaaagactggaatgctggtgaattagaaagttatttaattgaaatcactggtgatattttcatgaaattagatgaaaataaagaagcattagttgaaaaaattcttgatactgcaggtcaaaaaggtacaggaaaatggacttcaattaacgcattagaattaggtattccattaacaatcattactgaatctgtatttgcacgttttatctcttcaatcaaagaagagcgcgtaaatgcttctaaagaattaaatggtccaaaagcatcatttgatggtgacaagaaagactttttagaaaaaattcgtaaagcattatatatgagtaaaatttgttcttatgcacaaggtttcgcgcaaatgcgtaaagcaagtgaagataatgaatggaatttaaaacttggtgatttagctatgatttggagagaaggttgcattatccgtgcacaattcttacaaaagatcaaagatgcttacgataataatccaggattacaaaacttattgctagatccttactttaaaaacatcgttactgaatatcaagatgcgttacgtgatgatgtcgcaactggtgttcaaaatggtgtaccaacaccctggtttctcatcaagtattaattactatgatagttaccgtgctgctgatttacctgcaaacttaattcaagcacaacgtgactacttcggtgctcatacgtacgaaagaaaagataaagaaggcgtattccatacacaatggattgaagaa

SEQ ID NO: 4727 - DNA, 2181 bp, Staphylococcus aureus
atgacggaaaacaaaggatcttctcagcttaagaaaaacggtaataatggtgggaaatccaactcaaaaaagaatagaaatgtgaagagaacgattattaagattattggcttcatgattattgcatttttcgttgttcttttactaggtatcttattgtttgcttattatgcttggaaagcacctgcttttaccgaagctaaattacaagatccgattcctgcaaagatatatgacaagaacggagaacttgttaaaacattagataatggccaaagacatgagcatgtaaatttaaaagacgtgccgaaatcaatgaaagacgcagtacttgcaactgaagacaatcgtttctacgaacatggcgcacttgattataaacgtttattcggtgcaattggtaagaacttgactggtggatttggttctgaaggtgcctcaacattaacacaacaagttgttaaagatgcatttttatcacaacataaatctattggacgtaaagctcaagaagcatacttatcatatcgtttagaacaagagtatagtaaagatgatatcttccaagtatatctaaacaaaatttactattctgatggcgtaacaggtattaaagctgctgctaagtattactttaataaagatttaaaagatttaaacttagcggaagaagcttatttagccggtttacctcaggttccaaacaactataatatttatgatcatccaaaagctgctgaagatcgtaaaaacactgttttatacttaatgcattatcataaacgcattacagataaacagtgggaagatgctaagaaaatcgatttaaaagcgaacttagtaaatcgtactcctgaagaacgtcaaaacattgatacaaatcaagattctgagtataattcatacgttaactttgtaaaatctgaattaatgaataataaagcattcaaagatgaaaatttaggtaatgtattacaaagtggtattaaaatttatacaaacatggataaagatgttcaaaaaacattacaaaatgatgttgataatggtagcttctacaagaataaagaccaacaagttggtgcaacaattcttgatagtaaaactggtggtttagttgctatatctggtggacgtgatttcaaagacgtcgttaacagaaaccaagcaacagatcctcaccctactggttcatctttaaaacctttcttagcgtatggacctgccattgaaaatatgaaatgggcaacaaaccatgcgattcaagatgaatcttcatatcaagttgatggttctacatttagaaactatgatacgaagagtcacggtactgtatctatttatgatgctttacgacaaagtttcaatatcccagctttaaaagcttggcaatcagttaagcaaaatgctggtaatgatgcacctaagaaattcgctgccaaacttggcttaaactacgaaggcgatattggtccatctgaagtacttggtggttctgcttcagaattctcaccaacacaattagcatcagcatttgctgcaatcgctaacggtggtacttataacaacgcgcattcaattcaaaaagtagttactcgtgatggtgaaacaatcgaatacgatcatactagccataaagcgatgagtgattacactgcatacatgttagctgagatgctaaaaggtacatttaaaccatatggttctgcatatggccatggtgtatctggagtaaatatgggtgctaagacaggtactggtacttacggtgctgaaacttattcacaatataatttacctgataatgcagcgaaagacgtgtggattaacggctttacacctcaatacactatgtcagtgtggatgggcttcagtaaagttaaacaatatggtgaaaactcatttgtgggacatagccaacaagaatatccacagttcttatatgaaaatgtgatgtcaaaaatttcatctagagatggcgaagactttaaacgtcctagctcagtaagtggtagtatcccatcaatcaatgtttctggtagtcaagataacaacactacaaatcgtagtacacacggtggtagtgacacatcagcaaacagcagtggtactgcacaatcaaataacaatactagatctcaacaatctagaaacagcggtggattaacaggtatattcaac

SEQ ID NO: 4728 - DNA, 975 bp, Staphylococcus aureus
atgaaaatgaataaattagtcaaatcatccgttgctacatctatggcattattattactttctggtactgctaatgctgaaggtaaaataacaccagtcagcgtaaaaaaagtcgatgacaaagttactttatacaaaacaacagccacagcagattctgataaatttaaaatttcacagattttaacatttaatttcatcaaagataaaagttatgataaagatactttagtacttaaagctactgggaatattaactcaggctttgtgaaacctaatcctaatgactatgacttttcaaaattatattggggagctaaatacaatgtatctataagctcacaatctaatgattcagtaaacgtcgttgattatgcaccaaaaaatcaaaatgaagagtttcaagttcaaaatactttaggctatacatttggtggtgacattagtatctctaatggtttatctggtggacttaatggaaatacagctttttctgaaacaattaattataaacaagaaagttacagaacaacattaagtcgcaacacaaattataaaaatgttggctggggagttgaagcacataaaattatgaataatggttggggaccttatggaagagatagcttccacccaacatatggtaatgaactcttcttagctggcagacaaagcagtgcatacgctggccaaaacttcatagcgcaacaccaaatgccattattatctagaagtaacttcaatccagaatttttaagcgtactatcacacagacaagatggcgctaaaaaatctaaaattacagtaacttatcaacgtgaaatggatttataccaaattcgttggaatggcttctactgggcaggcgcaaattataaaaactttaaaactagaacatttaaatcaacatatgaaattgattgggaaaatcacaaagtgaaattgttagatacaaaagaaactgaaaacaataaa

SEQ ID NO: 4729 - DNA, 954 bp, Staphylococcus aureus
atgaatttggctaaacgcatattacaaggggaacaattaacaaaagagactgtattgaaaatttatgaggatactaatattgataccttagatttattaaatgaggcgtacattttaagaaaacattattttggtaaaaaagtaaaattaaacatgattttaaatgctaaaagtggtatatgtcctgaaaattgtgggtactgtggacaatcacgagatattaaacaaaaacagcgatatgctttaattccagaggaacaaattatcgatggagcaaaggtggcacatgataatcatattggaacatattgtattgttatgagtggtagaggaccgagcgataaagaagttgatcatattagtaatactgtaagaacgattaaatctcaacacccgcaactaaaaatctgtgcatgtttaggattaacgaatgacgaacaagctaagaaacttaagtcagctggtgtagacagatataaccacaatattaatacaagtgaaaattaccatgataacgtcgtgacaacgcatagttataaagatagaacagatacgatagaactaatgaaagcgaataatatatcaccatgttctggcgtgatttgtggtatgggagaatctaatcaagatattgttgatatggcatttgctttaaaagaaatggatgccgacagtattccgattaattttttgcatccaatcaaaggcacaaagtttggaagcatggatgatttaacaccaatgaaatgtttaagaatcgtagcattattccgattaatcaatcctacgaaagaaattcgtattgctggaggaagagaggtcaacttacgttcgttacagccattagcattaaaagcggcgaattcaatatttgtcggtgattatctaattactggtgggcaaccgaaccaattagactacgatatgattaatgatttaggctttgaaattgat

SEQ ID NO: 4730 - DNA, 1332 bp, Staphylococcus aureus
acacaacaacttaaacaaaaagactcagaatatgtttggcatccatttacacaaatgggtgtatatagcaaagaagaagcaatcatcattgaaaaaggaaagggtagttacctttacgatacgaatggcaataaatatttagatggttatgcatcgttgtgggtcaatgtgcatggtcataataacaaatacttaaataaggtaattaaaaagcaactcaataaaattgcccattctacgctgctaggatcatcaaatattccgtcaatagaacttgcggaaaaattaatcgaaatcacgccaagtaatctaagaaaagtattttattctgatacaggcagtgcgtctgttgaaatcgcaataaagatggcatatcagtattggaaaaatattgatagagaaaaatatgccaagaaaaacaagtttataacgctaaatcacggttatcatggggatacgattggtgcggtaagtgttggtggtatcaagacctttcataaaatatttaaagacttaatatttgagaatattcaagtagaaagcccatctttctatcgcagtaattacgatactgaaaatgaaatgatgacagctattttaacgaatatagagcaaattctaattgaaagaaatgatgaaatcgcagggtttatattggaaccgttgattcaaggtgcgacaggcttgtttgttcatcctaaaggctttttgaaagaagtcgagaaattgtgcaaaaaatacgatgtcttattaatttgtgatgaggtagcagttggttttgggagaactggaaagatgtttgcatgcaatcatgaagatgttcaaccggatattatgtgtttaggtaaggcgattactggtggctacttaccacttgcagctacattgacatctaaaaaaatatacaatgcatttttaagtgattcgcatggtgtgaatacctttttccatggtcatacatacaccggaaatcaaatcgtttgtacggttgcattagaaaatataagactttatgaaaaacgtaagttattgtcacatattgaaacgacatcatcaacacttgagaaacagttacatgcgctgaagcgtcatcgaaatgttggtgatgtaagaggacgaggcttaatgtttggagttgaattagttacagataaagatagtaaaacgccgttagaaattgaaaaagttgaacgtattgtacgtaattgtaaagaaaacgggctaatgattagaaatttagaaaatgtcattacgtttgtgccagtgttaagtatgtcaaataaagaagtgaaaacgatggtacgtatttttaaaaaggcagtacataacatt

SEQ ID NO: 4731 - DNA, 687 bp, Staphylococcus aureus
atggctaaaaaaggtaaaaagtatcaagaagcagctagtaaagttgaccgtactcagcactacagtgttgaagaagcaattaaattagctaaagaaacaagcattgctaactttgacgcttctgttgaagttgcattccgtttaggaattgatacacgtaaaaatgaccaacaaatccgtggtgcagttgtattaccaaacggaactggtaaatcacaaagtgtattagtattcgctaaaggtgacaaaattgctgaagctgaagcagcaggtgctgactatgtaggtgaagcagaatacgttcaaaaaatccaacaaggttggttcgacttcgatgtagtagttgctacaccagacatgatgggtgaagttggtaaattaggtcgtgtattaggaccaaaaggtttaatgccaaaccctaaaactggaactgtaacaatggatgttaaaaaagctgttgaagaaatcaaagctggtaaagtagaatatcgtgctgaaaaagctggtatcgtacatgcatcaattggtaaagtttcatttactgatgaacaattaattgaaaacttcaatactttacaagatgtattagctaaagctaaaccatcatctgctaaaggtacatacttcaaatctgttgctgtaactacaacaatgggtcctggagttaaaattgatactgcaagtttc

SEQ ID NO: 4732 - DNA, 1399 bp, Staphylococcus aureus
attacattatataatacgcttacacgtcaaaaagaagtgttcaagcctatagaaccagggaaagtaaaaatgtatgtatgtggtcctacctgtatataactacattcatattggtaacgcaagaccagcaattaattatgacgtagtgagacgttactttgaataccaaggatataatgtagaatatgtatcaaattttacagacgtagatgataaattaattaaacgttctcaagaattaaatcagtctgttcccgaaattgcagaaaaatatatcgctgcttttcatgaagatgttggtgcgttaaatgttagaaaagcgacttcaaatccaagggtaatggaccatatggatgacattattcaatttattaaagatttggtggatcaaggttatgcatatgaaagtggtggcgatgtttactttagaacacgtaaatttgaaggttatggtaaattaagtcatcaatccatagatgacttaaaagtgggtgctcgtatagatgcaggagagcataaagaagatgcacttgattttacattgtggaaaaaagcgaagcctggcgagattagttgggatagcccatttggtgaaggtagaccaggatggcatatagaatgttctgtaatggcatttcatgagctaggacctacaattgatatacatgcgggtggttcagatttacaatttccacatcatgaaaatgaaatagcacaatcagaagcacataatcatgcgccatttgctaattattggatgcataatggtttcattaatattgataatgaaaaaatgagtaaatcactaggcaactttattttagttcacgatattattaaagaagttgatccagatgtactaagattctttatgattagcgtacattatagaagcccaattaactataatctagaattggtagaatcagcacgtagtggactagagcgtattcgcaatagttatcaattaattgaagagcgcgcacaaattgctactaatattgaaaatcaacagacatatattgatcaaattgatgcgattttaaatcgttttgaaacagttatgaatgatgattttaatacagctaatgcaattacagcttggtatgatttagcaaaacttgcgaataaatatgtactagagaacacaacatcaacagaagtaattgataaatttaaagcagtttatcaaattttcagcgatgttttaggtgtaccgttaaaatctaaaaatgcagatgaattattggatgaagatgttgaaaaattaatcgaagagcgtaatgaagcaaggaaaaacaaagattttgcacgagcagatgaaattcgagacatgctgaaatcacaaaacattatattagaagacacacctcaaggggttagatttaaacgtggataa

SEQ ID NO: 4733 - DNA, 669 bp, Staphylococcus aureus
tctatcgaagaaactttaattcaaaaaattaatcatcgtattgatgcaatagacgtattagaattacgaattgatcaaattgaaaatgtcacagttgatcaagtggcagaaatgattacaaagctgaaggttatgcaagattcattcaaattattagttacgtatcgtacaaagttacaaggtggctatgggcaatttacaaatgactcgtatcttaatttaatatcagacttagcaaatatcaatggcatagatatgattgatatagaatggcaagcagatattgacattgaaaaacatcaacgaatcattacacatttgcaacagtataataaagaggtggttatatcacatcataatttcgaaagtacgcctccattagatgaattgcaatttatattttttaaaatgcaaaaattcaacccagaatacgttaaattagcagtaatgccacataataaaaatgatgtgttaaatttattgcaggcaatgtctacattttcagatactatggactgcaaagttgttggtatttcaatgtctaaacttggactaataagtagaacggctcaaggcgtttttggtggtgcgttgacttatggttgtatcggagtaccacaagctccaggacagattgatgttactgatttaaaagcacaagtgacttta

SEQ ID NO: 4734 - DNA, 1194 bp, Staphylococcus aureus
atggaagaacattactacgtaagtattgatattggatcatcaagcgtaaaaacaatagtaggcgagaaatttcacaatggtataaatgtgataggtacaggacaaacctacacgagcggtataaaaaatggtttaattgatgattttgatattgcgcgacaagcaatcaaagacacaattaaaaaggcatcaatcgcttcgggtgttgatattaaagaagttttcctgaaattacctatcattggaacggaagtttatgatgaatcaaatgaaatcgacttttatgaggatacagaaatcaacggttcacatatcgaaaaagtattagaaggtattagagaaaaaaatgatgtgcaagaaacagaagtaattaatgtgttcccgattcgttttatagtcgataaagaaaatgaggtttcagaccctaaagaattaattgccagacattcattaaaggttgaagcaggcgtaattgctattcaaaaatcgattttaattaatatgattaaatgcgtagaagcatgtggtgttgatgtattagatgtttactctgatgcatataactatggttcaatcctaacagctactgaaaaagagttaggtgcatgtgtcattgatattggtgaagacgttacgcaagttgctttttatgaacgcggtgaattagtagatgctgattctatcgaaatggcagggcgtgatattacagacgatattgcacaaggattaaacacttcttatgaaactgctgaaaaagttaaacaccaatatggtcatgcattctatgattctgcttcagatcaagatatcttcactgttgaacaggttgatagtgatgaaacagtacagtatactcaaaaagatttgagtgactttattgaagcgcgtgtagacgaaatattcttcgaagtatttgatgttttacaagatttaggattaacaaaagtaaatggtgggtttattggaactggtggatctgcaaacttacttggcgtaaaagaattattatcagatatggtaagtgaaaaagttagaattcacacgccatcacaaatgggaattagaaaacctgaattttcttcagcaatttctacaatttctagtagtatcgcttttgatgagttattagattatgttacaattaattatcatgataatgaagaaactgaagaagatgttattgatgtgaaagac

SEQ ID NO: 4735 - DNA, 882 bp, Staphylococcus aureus
tacattttgttgattattcattattttattatttgttattttgttttcagtgtacatccaatgctaagtttgtttttcttttatagtgcttttgccgttccatttacttttaaaaataatgttaaaaaaacggcaactaatcttttcatactaacaatgattatatgtacaataataacgtacttattgtataacaactattttgttgcaatgatggtttattatgtcgttatatcgttaataatgctagataattttaaaaaaatgaaaaaccgtgaatatcaaaaagaaatagcagaaaaaaatagacatattaatacattaattgctgaacaagagcgacatagaattggtcaagacttacatgatacgttagggcatgtgtttgcaagtttatcattaaaatcagaattagcttataaactaatagatgctgatgtagaaaaagtaaaagctgaattattagcaattaataaattatctcgtgaatcattgaacaaagttcgagaaattattgatgatgtaaaattaccatcatttattgaagagattgatagtatacgtaaagttttaaaagatgctgatattgattttacatttgaaaataaagaattagcgcaagtattaagtcctactaaacaatctatgttagttatgattacgcgtgaagcgataaataatgttattaaacatgcaaatgcttcaaaagttcatggtaaattaaaaactgtaaacaatcataaattactgcttatgattgaagatgatggcaaaggtatcgatagtgattgtgaggtgaaaagtatttcacagcgtgtacaacatttaaatggaactttagcagtcgactcaacaaatggaactaaaataatcattgaaatc

SEQ ID NO: 4736 - DNA, 777 bp, Staphylococcus aureus
tatctaaataaaatacgtattgaaaacccattaacaatttgttatacaaacgatgtagttaaaaattttacagcgaatggtttattaagtattggtgctagccctgcaatgagtgaagctcccgaagaagctgaagaattttacaaagttgcacaagcgctattaatcaatatcggtactttaacagcagaaaatgaacaagatattattgcgattgctcaaacggcaaatgaggcaggcttacctattgtatttgaccctgtagctgttggtgcttctacatatcgaaagcaattttgtaaattattattgaaatcagcgaaagtatcagtaattaaaggcaatgcatctgaaatattagcgttgattgatgatacagcaactatgaaaggtacagatagtgatgctaatcttgatgcggttgcaatagcgaaaaaggcttacgcaacatataaaactgcaatagtaatcacaggtaaagaggacgttattgttcaagataataaagccttcgtattagctaatggatctccattattagcacgagtaactggagctggttgtttattaggaggcgttattgctggatttttatttagagaaacagaaccagaaatagaagcgttaattgaagcggtaagcgtatttaatattgctgctgaggtagctgctgaaaatgaaaattgtggtggtcctggtacgttttcaccattgttgcttgatacgttatatcatttaaatgaaacaacctatcaacaacggattcgtattcaagag

SEQ ID NO: 4737 - DNA, 1162 bp, Staphylococcus aureus
atgaaaatagcaactctgaacaaaggcaaagaaacaaaatattttaatggatatcctttaattgaagaagaggatatctattcacaagatcatttaaaagaaggagatatttttcaaattgtgactgataaatcacaatatgtcgcaacggcttatgttggtcgccaacataaaggattaggttgggttctaacatacgataaagctcaacaaatcaacacagctttctttgtaaaattgtttaatactgcattagcagaacgtgattattattctaatatagatggaacaaactgcttttagattatttaatgctgaaggtgatggtgttgggggattaacaatcgacaattacgatggtcatttgttgattcaatggtactcaaaaggtatttataaatttaaatatgccattcttgaagcggttagaaaagtatttgattataaatctatttacgaaaaagtaagatttaaagacagcgaatatagtggtggttttgttgaaggagatgcacctgagtttccaattgttatcgaagaaaacttcacattttataatgtagaccttgaagatggtttgatgacaggtatctttttagatcaaaaagaagtgcgcaagaaattaagggatcaatatgccaaagaacgccatgttttaaacttatttagttatacaggtgctttttctgcaatagcagcaagtgaggcatcttcaacaacaagtgtagatttggctaatcgttctcgtagtttaactgaagaaaattttggattaaatgctattgatcctaaatcccaatatatttatgtcatggacacttttgatttctataaatatgctgcacgacatggacatagttatgacacgatcgtgattgatccacctagctttgcgcgtaacaaaaaacgtacattttcagtgcaaaaagattatgacaaattaattaatggcgccttaaatatcttatcatctgaaggaacattattgttatgtacaaacgcaagtgtatatccattaaagcaatttaaaaatactattaaaaagacgcttgaagagagtggcgttgattatgaattaactgaagttatgggattaccaaaagattttaaaacgcatccacattataagccatctaaatatttaaaagctgtttttgtaaat

SEQ ID NO: 4738 - DNA, 928 bp, Staphylococcus aureus
atgatggcgaaaatagtagtagcattaggtggtaatgccttaggaaatcacctcaagacaactcgagcttgttaaaaatactgcgaaatcattagtaggattaataacaaaaggacatgagattgttattagtcatggtaatggaccacaggttggaagcattaatttgggacttaactatgctgcagaacataaccaaggtccggcatttccatttgctgaatgtggcgcaatgagtcaagcttacatcggctatcaattacaagaaagcttacaaaatgaattgcattctattggaatggataaacaagtggtaacactagtgacacaagttgaagttgatgaaaatgatccggcatttaacaatccttcaaaaccaattgggttattttacaacaaagaagaagctgaacaaattcaaaaagaaaaaggatttatatttgttgaagatgctggaagaggatatagacgcgttgttccttcaccacaacccatctctattattgaattagagagtattaaaacacttattaaaaatgatacactcgttattgctgctggtggtggaggtataccagtaattagagagcaacatgatggttttaaaggtattgatgcagttatagacaaagataaaacaagtgcgttgttgggtgctaatattcaatgcgatcaattgattattttaacagcaattgattatgtatatattaattttaacactgaaaaccaacagcctttgaaaacaacaaatgttgatgaattaaaacgatatatagacgaaaatcaatttgcaaaaggaagtatgttaccaaaaattgaagcagccatatcatttattgaaaacaatccaaaaggaagtgtgcttataacatcattaaatgaattagatgctgccttagagggtaaagtaggtactgtgattaaa

SEQ ID NO: 4739 - DNA, 1884 bp, Staphylococcus aureus
atgcagaaagcttttcgcaatgtgctagttatcgtaataataggcgttattatttttggtctattttcatatttaaacggtaatggaaatatgccgaaacagcttacatataatcaatttactgagaagttggaaaaaggtgaccttaaaactttagaaatccaaccacaacaaaatgtctatatggtaagtggtaaaacgaaaaatgatgaagactattcatcaactattttatataacaacgaaaaagaattacaaaaaattactgatgctgctaaaaagcaaaacggtgtaaaattaacgattaaagaagaagaaaaacaaagtgtctttgtgagtatactttcaacattaattccagttgtagtcatagcgttattatttattttcttcctaagccaagcacaaggtggcggtagtggcggtcgtatgatgaactttggtaaatctaaagcaaaaatgtacgataataataaacgtcgtgttcgtttctctgatgtagcaggggcagatgaagaaaaacaagaattaattgaaattgttgatttcttgaaagataataaaaaattcaaagaaatgggatctaggattcctaaaggtgtcttacttgttggacctccaggtactggtaaaacattacttgctagagcggttgcaggtgaagctggcgcaccattcttctctattagtggttcagactttgtagagatgtttgttggtgttggtgcgagccgtgttcgtgacttattcgataatgctaagaaaaacgcgccttgtatcatctttatcgatgagattgatgctgttggtcgtcaacgtggtgcaggtgttggtggcggtcatgatgaacgtgaacaaaccctaaaccaattattagttgaaatggatggtttcggtgaaaatgaaggtatcattatgatagctgctacaaaccgtcctgatatccttgacccagccttattacgtccaggtcgttttgatagacaaattcaagttggtcgtccagatgtgaaaggccgtgaagcaattcttcatgttcatgctaaaaacaaaccacttgatgaaacggttgatttaaaagcaatttcacaacgtacacctggtttctcaggtgctgatttagagaacttattaaatgaagcatctttaattgctgtacgtgaaggtaaaaagaaaattgacatgagagatatcgaagaggcaacggatagagttatagccggacctgctaagaaatctcgagttatttctaagaaagaacgtaatattgttgctcatcacgaagctggtcatacaattatcggtatggtacttgatgaggcagaagtagtgcataaagttactattgttccacgtggacaagcaggtggttatgcaatgatgctacctaaacaagatcgtttcttaatgactgaacaagagttattagataaaatctgtggtttacttggtggacgtgtatcagaagatattaactttaacgaagtatcaacaggtgcttcaaatgacttcgaacgtgcaacacaaatcgcacgctcaatggttacgcaatatggtatgagtaaaaaattaggaccattacagttcggtcatagcaatggtcaagtattcttaggtaaagatatgcaaggtgagcctaattattcaagccaaatcgcatatgaaattgataaagaagttcaacgaatcgttaaagaacaatacgaacgttgtaaacaaattttattagagcacaaagaacaattaattttaattgctgaaacattattaacagaagaaacattagttgctgaacaaattcaatcattattctacgaaggtaaattacctgaaattgattatgatgcagctaaagttgttaaagatgaagattctgaatttaat

SEQ ID NO: 4740 - DNA, 1524 bp, Staphylococcus aureus
ttgaaaaagaaaaacatttattcaattcgtaaactaggtgtaggtattgcatctgtaactttaggtacattacttatatctggtggcgtaacacctgctgcaaatgctgcgcaacacgatgaagctcaacaaaatgctttttatcaagtcttaaatatgcctaacttaaatgctgatcaacgcaatggttttatccaaagccttaaagatgatccaagccaaagtgctaacgttttaggtgaagctcaaaaacttaatgactctcaagctccaaaagctgatgcgcaacaaaataacttcaacaaagatcaacaaagcgccttctatgaaatcttgaacatgcctaacttaaacgaagcgcaacgtaacggcttcattcaaagtcttaaagacgacccaagccaaagcactaacgttttaggtgaagctaaaaaattaaacgaatctcaagcaccgaaagctgataacaatttcaacaaagaacaacaaaatgctttctatgaaatcttgaatatgcctaacttaaacgaagaacaacgcaatggtttcatccaaagcttaaaagatgacccaagccaaagtgctaacctattgtcagaagctaaaaagttaaatgaatctcaagcaccgaaagcggataacaaattcaacaaagaacaacaaaatgctttctatgaaatcttacatttacctaacttaaacgaagaacaacgcaatggtttcatccaaagcctaaaagatgacccaagccaaagcgctaaccttttagcagaagctaaaaagctaaatgatgctcaagcaccaaaagctgacaacaaattcaacaaagaacaacaaaatgctttctatgaaattttacatttacctaacttaactgaagaacaacgtaacggcttcatccaaagccttaaagacgatccttcagtgagcaaagaaattttagcagaagctaaaaagctaaacgatgctcaagcaccaaaagaggaagacaataacaagcctggcaaagaagacaataacaagcctggcaaagaagacaacaacaagcctggtaaagaagacaacaacaagcctggcaaagaagacggcaacaagcctggtaaagaagacaacaaaaaacctggtaaagaagatggcaacaagcctggtaaagaagacaacaaaaaacctggtaaagaagacggcaacaagcctggcaaagaagatggcaacaaacctggtaaagaagatggtaacggagtacatgtcgttaaacctggtgatacagtaaatgacattgcaaaagcaaacggcactactgctgacaaaattgctgcagataacaaattagctgataaaaacatgatcaaacctggtcaagaacttgttgttgataagaagcaaccagcaaaccatgcagatgctaacaaagctcaagcattaccagaaactggtgaagaaaatccattcatcggtacaactgtatttggtggattatcattagccttaggtgcagcgttattagctggacgtcgtcgcgaacta

SEQ ID NO: 4741 - DNA, 1527 bp, Staphylococcus aureus
atcatgaaatatatgattggtgtcgacattggaacgacgagtaccaagtcagtcttatatgatgaaaatggaacttttatcatgaaacatcaaataggctatgatttacacacaccaaacgttgatgtctcagaagaaaacccagatgaattatttgatgcagtactaatgactattaaatatgttatgagagaatccaaagttaataaagacgacattaagtttgtgtcatttagtgcgcaaatgcatagcttgattgcgatggatcagcaacatcaaagattaacaaataatattacttgggcagataaccgcgctgcaaaatatgcaacagtaataaatgaagtgcatgatggcaatgcgatttaccagcgaacaggcacaccgattcatcctatgtcgccattagcgaagattttttggatgaaacatgaatggcaagatgtatttcaacgtactgctaagtttgcagatattaaaacatacattttctatcatttatttgatacatatatcattgattattcaatggcttccgcaacagggatgtttaatttagaaacattagattgggatgttgaggcattagaactgctgggtatttccaaggaaatgttgccggaattagttccaacaacgtatgtgatgaaaggtatgaaagaacgttatgcaacattaatggggcttaataaagatacaccgtttgttattggtgcgagtgatggggtcctttctaatttaggtgtcaatagtgttggtaaaggagaagttgctgtcacaatcggtacatctggggcgattcgtactgtgatagataaaccgcgtactgattaccaaggtagaatattttgttatgtcttagcagaggaccactacgtcatcggaggtcctgtaaataatggtggtgtcgtattgagatggttgcgcgacgagttgctagcgagtgaagtcgaaactgcgaaacgtctcggtgttgatccttatgatgtcttaactcaaattgcaaagcgtgttaaaccaggtgcagatggtttaatattccatccctatttagcaggagaacgtgcgccgctttggaacgcaaatgcaagaggttcattcttcggtttaactttatctcataaaaaagaacatatgattcgcgctgcattagaaggtgttctttacaatttgtataccgtctatcttgcgcttattgaagtaatgaatgaaacacctaagatgataaaagcaacaggtggttttgcgaaaagtgaagtatggcgtcaaatgatgtcagatatatttgacacagagttagtggttcctgaaagttatgaaagttcatgcttaggtgcctgcgtgctcggacttaaagctgtaggtgacattgaagatttttcaatcgtttcatcgatggtcggtgccacaaacaatcatacgccgattgaagaaaatgtcactgtttaccaagagatcgtatccatttttatcaatttaagtcgttctttaacagagaattatgaacaaattgcagattttcaacgc

SEQ ID NO: 4742 - DNA, 3054 bp, Staphylococcus aureus
gtgaaaaacaatcttaggtacggcattagaaaacataaattgggagcagcatcagtattcttaggaacaatgatcgttgttgggatgggacaagacaaagaagctgcagcatcagaacaaaagacaactacagtagaagaaaatgggaattcagctactgataataaaacaagtgaaacacaaacaactgcaactaacgttaatcatatagaagaaactcaatcatataacgcaacagtaacagaacaaccgtcaaacgcaacacaagtaacaactgaagaagcaccaaaagcagtacaagcaccacaaactgcacaaccagcaaatatagaaacagttaaagaagaggtagttaaggaagaagcgaaacctcaagttaaggaaacaacacaatctcaagacaatagcggagatcaaagacaagtagatttaacacctaaaaaggctacacaaaatcaagtcgcagaaacacaagttgaagtggcacagccaagaacggcatcagaaagtaagccacgtgtgacaagatcagcagatgtagcggaagctaaggaagctagtaacgcgaaagtggaaacgggtacagatgtaacaagtaaagttacagtagaaattggttctattgaggggcataacaatacaaataaagtagaacctcatgcaggacaacgagcggtactaaaatataagttgaaatttgagaatggtttacatcaaggtgactactttgactttactttatcaaataatgtaaatacgcatggcgtatcaactgctagaaaagtaccagaaattaaaaatggttcagtcgtaatggcgacaggtgaagttttagaaggtggaaagattagatatacatttacaaatgatattgaagataaggttgatgtaacggctgaactagaaattaatttatttattgatcctaaaactgtacaaactaatggaaatcaaactataacttcaacactaaatgaagaacaaacttcaaaggaattagatgttaaatataaagatggtattgggaattattatgccaatttaaatggatcgattgagacatttaataaagcgaataatagattttcgcatgttgcatttattaaacctaataatggtaaaacgacaagtgtgactgttactggaactttaatgaaaggtagtaatcagaatggaaatcaaccaaaagttaggatatttgaatacttgggtaataatgaagacatagcgaagagtgtatatgcaaatacgacagatacttctaaatttaaagaagtcacaagtaatatgagtgggaatttgaatttacaaaataatggaagctattcattgaatatagaaaatctagataaaacttatgttgttcactatgatggagagtatttaaatggtactgatgaagttgattttagaacacaaatggtaggacatccagagcaactttataagtattattatgatagaggatataccttaacttgggataatggtttagttttatacagtaataaagcgaacggaaatgggaaaaatggtccgattattcaaaataataaatttgaatataaagaagatacaattaaagaaactcttacaggtcaatatgataagaatttagtaactactgttgaagaggaatatgattcatcaactcttgacattgattaccacacagctatagatggtggaggtggatatgttgatggatacattgaaacaatagaagaaacggattcatcagctattgatatcgattaccatactgctgtggatagcgaagcaggtcacgttggaggatacactgagtcctctgaggaatcaaatccaattgactttgaagaatctacacatgaaaattcaaaacatcacgctgatgttgttgaatatgaagaagatacaaacccaggtggtggtcaggttactactgagtctaacttagttgaatttgacgaagagtctacaaaaggtattgtaactggcgcagtgagcgatcatacaacagttgaagatacgaaagaatatacaactgaaagtaatctgattgaattagtggatgaattacctgaagagcatggtcaagcacaaggaccagtcgaggaaattactgaaaacaatcatcatatttctcattctggtttaggaactgaaaatggtcacgggaattatgacgtgattgaagaaatcgaagaaaatagccacgttgatattaagagtgaattaggttatgaaggtggccaaaatagcggtaaccagtcattcgaggaagacacagaagaagacaaacctaaatatgaacaaggtggcaatatcgtagatatcgattttgatagtgtacctcaaattcatggtcaaaataaaggtaatcagtcattcgaggaagatacagaaaaagacaaacctaagtatgaacatggcggtaacatcattgatatcgacttcgacagtgtgccacatattcacggattcaataagcacactgaaattattgaagaagatacaaataaagataaaccaagttatcaattcggtggacacaatagtgttgactttgaagaagatacacttccaaaagtaagcggccaaaatgaaggtcaacaaacgattgaagaagatacaacacctccaatcgtgccaccaacgccaccgacaccagaagtaccaagtgagccggaaacaccaacgccaccaacaccagaagtaccaagtgagccggaaacaccaacaccaccgacaccagaagtgccgagtgagccagaaactccaacaccgccaacaccagaggtaccagctgaacctggtaaaccagtaccacctgccaaagaagaacctaaaaagccttctaaaccagtggaacaaggtaaagtagtaacacctgttattgaaatcaatgaaaaggttaaagcagtggcaccaactaaaaaaccacaatctaagaaatctgaactacctgaaacaggtggagaagaatcaacaaacaaaggtatgttgttcggcggattattcagcattctaggtttagcattattacgcagaaataaaaagaatcacaaagca

SEQ ID NO: 4743 - DNA, 3171 bp, Staphylococcus aureus
ttgattgatgtaaataatttccattatatgaaaataggattggcttcacctgaaaaaatccgttcttggtcttttggtgaagttaaaaaacctgaaacaatcaactaccgtacattaaaacctgaaaaagatggtctattctgtgaaagaattttcggacctacaaaagactgggaatgtagttgtggtaaatacaaacgtgttcgctacaaaggcatggtctgtgacagatgtggagttgaagtaactaaatctaaagtacgtcgtgaaagaatgggtcacattgaacttgctgctccagtttctcacatttggtatttcaaaggtataccaagtcgtatgggattattgcttgacatgtcaccaagagcattagaagaagttatttactttgcttcttatgttgttgtagatccaggtccaactggtttagaaaagaaaactttattatctgaagctgaattcagagattattatgataaatacccaggtcaattcgttgcaaaaatgggtgcagaaggtattaaagatttacttgaagagattgatcttgacgaagaacttaaattgttacgcgatgagttggaatcagctactggtcaaagacttactcgtgcaattaaacgtttagaagttgttgaatcattccgtaattcaggtaacaaaccttcatggatgattttggatgtacttccaatcatcccaccagaaattcgtccaatggttcaattagatggtggacgatttgcaacaagtgacttaaacgacttataccgtcgtgtaattaatcgaaataatcgtttgaaacgtttattagatttaggtgcacctggtatcatcgttcaaaacgaaaaacgtatgttacaagaagccgttgacgctttaattgataatggtcgtcgtggtcgtccagttactggcccaggtaaccgtccattaaaatctttatctcatatgttaaaaggtaaacaaggtcgtttccgtcaaaacttacttggtaaacgtgttgactattcaggacgttcagttattgcagtaggtccaagcttgaaaatgtaccaatgtggtttaccaaaagaaatggcacttgaactatttaaaccattcgtaatgaaagaattagttcaacgtgaaattgcaactaacattaaaaatgcgaagagtaaaatcgaacgtatggatgatgaagtttgggacgtattggaagaagtaattagagaacatcctgtattacttaaccgtgcaccaacacttcatagacttggtattcaagcatttgaaccaactttagttgaaggtcgtgcgattcgtctacatccacttgtaacaacagcttataacgctgactttgacggtgaccaaatggcggttcacgttcctttatcaaaagaggcacaagctgaagcaagaatgttgatgttagcagcacaaaacatcttgaaccctaaagatggtaaacctgtagttacaccatcacaagatatggtacttggtaactattaccttactttagaaagaaaagatgcagtaaatacaggcgcaatctttaataatacaaatgaagtattaaaagcatatgcaaatggctttgtacatttacacactagaattggtgtacatgcaagttcgttcaataatccaacatttactgaagaacaaaacaaaaagattcttgctacgtcagtaggtaaaattatattcaatgaaatcattccagattcatttgcttatattaatgaacctacgcaagaaaacttagaaagaaagacaccaaacagatatttcatcgatcctacaactttaggtgaaggtggattaaaagaatactttgaaaatgaagaattaattgaacctttcaacaaaaaattcttaggtaatattattgcagaagtattcaacagatttagcatcactgatacatcaatgatgttagaccgtatgaaagacttaggattcaaattctcatctaaagctggtattacagtaggtgttgctgatatcgtagtattacctgataagcaacaaatacttgatgagcatgaaaaattagtcgacagaattacaaaacaattcaaccgtggtttaatcactgaagaagaaagatataatgcagttgttgaaatttggacagatgcaaaagatcaaattcaaggtgaattgatgcaatcacttgataaaactaacccaatcttcatgatgagtgattcaggtgcccgtggtaacgcatctaactttacacagttagcaggtatgcgtggattgatggccgcaccatctggtaagattatcgaattaccaatcacatcttcattccgtgaaggtttaacagtacttgaatacttcatctcaactcacggtgcacgtaaaggtcttgccgatacagcacttaaaacagctgactcaggatatcttactcgtcgtcttgttgacgtggcacaagatgttattgttcgtgaagaagactgtggtactgatagaggtttattagtttctgatattaaagaaggtacagaaatgattgaaccatttatcgaacgtattgaaggtcgttattctaaagaaacaattcgtcatcctgaaactgatgaaataatcattcgtcctgatgaattaattacacctgaaattgctaagaaaattacagatgctggtattgaacaaatgtatattcgctcagcatttacttgtaacgcacgacatggtgtttgtgaaaaatgttacggtaaaaaccttgctactggtgaaaaagttgaagttggtgaagcagttggtacaattgcagcccaatctatcggtgaaccaggtacacagcttacaatgcgtacattccatacaggtggggtagcaggtagcgatatcacacaaggtcttcctcgtattcaagagattttcgaagcacgtaaccctaaaggtcaagcggtaattacggaaatcgaaggtgtcgtagaagatattaaattagcaaaagatagacaacaagaaattgttgttaaaggtgctaatgaaacaagatcataccttgcttcaggtacttcaagaattattgtagaaatcggtcaaccagttcaacgtggtgaagtattaactgaaggttctattgaacctaagaattacttatctgttgctggattaaacgcgactgaaagctacttattaaaagaagtacaaaaa

SEQ ID NO: 4744 - DNA, 1134 bp, Staphylococcus aureus
atgttaagtattaagcatttaacgaaaatttattctggtaataaaaaggcagtagatgacatctctttagatattcaatctggggaatttatcgcatttattggaaccagtggaagtggcaaaacgactgctttaagaatgataaaccgtatgattgaagcgacagaaggacaaattgaaattgatggtaaagatgttcggagtatgaatcctgtcgaattgcgtagaaatattggctatgttattcaacaaattggcttaatgcctcatatgacgattaaagagaatattgtgttggtacccaaattgttgaaatggactaaagaggaaaaggataaacgtgcaaaggaattaattaaacttgtggatttaccggagtcatttttagagcgttatccagcagaactatcaggtgggcaacaacaacgtatcggtgttgtaagagcacttgcggccgaacaagatattattttaatggatgaaccttttggtgcattggatcctattacgagagatacgttacaagatttagttaaaacgttacaacgaaaattaggcaagacgtttatctttgtaacacatgatatggatgaagcgattaaattagcagacaaaatttgtattatgtcagaaggtaaggtggtgcaatttgatacgccagacaatattttaagacatcccgcaaatgattttgtacgtgattttataggacaaaatagactgattcaagaccgtcccaatgacaagactgtagaaggtgtaatgattaaaccaatcacgatacaagcagaagcaacactgaatgacgccgttcatattatgagacaaaaacgtgttgatgctatttttgtagtagatagtaataaccatttactaggtttcttagacattgaagatataaatcagggtatacgtggacacaaaagtttacgagacaccatgcaacaacatatttataccgttcaaattgattctaaattacaagattctgtacgtacgattttaaaaagaaacgttaggaatgtacctgtcgtagatgatcaacagcgtttagtaggactgattacgcgtgccaatgttgttgatattgtatatgacacgatttggggcgatagtgaggatacagtgcaaaca

SEQ ID NO: 4745 - DNA, 1308 bp, Staphylococcus aureus
atgaaaaataaatatatctcgaagttgctagttggggcagcaacaattacgttagctacaatgatttcaaatggggaagcaaaagcgagtgaaaacacgcaacaaacttcaactaagcaccaaacaactcaaaacaactacgtaacagatcaacaaaaagctttttatcaagtattacatctaaaaggtatcacagaagaacaacgtaaccaatacatcaaaacattacgcgaacacccagaacgtgcacaagaagtattctctgaatcacttaaagacagcaagaacccagaccgacgtgttgcacaacaaaacgctttttacaatgttcttaaaaatgataacttaactgaacaagaaaaaaataattacattgcacaaattaaagaaaaccctgatagaagccaacaagtttgggtagaatcagtacaatcttctaaagctaaagaacgtcaaaatattgaaaatgcggataaagcaattaaagatttccaagataacaaagcaccacacgataaatcagcagcatatgaagctaactcaaaattacctaaagatttacgtgataaaaacaaccgctttgtagaaaaagtttcaattgaaaaagcaatcgttcgtcatgatgagcgtgtgaaatcagcaaatgatgcaatctcaaaattaaatgaaaaagattcaattgaaaacagacgtttagcacaacgtgaagttaacaaagcacctatggatgtaaaagagcatttacagaaacaattagacgcattagttgctcaaaaagatgctgaaaagaaagtggcgccaaaagttgaggctcctcaaattcaatcaccacaaattgaaaaacctaaagtagaatcaccaaaagttgaagtccctcaaattcaatcaccaaaagttgaggttcctcaatctaaattattaggttactaccaatcattaaaagattcatttaactatggttacaagtatttaacagatacttataaaagctataaagaaaaatatgatacagcaaagtactactataatacgtactataaatacaaaggtgcgattgatcaaacagtattaacagtactaggtagtggttctaaatcttacatccaaccattgaaagttgatgataaaaacggctacttagctaaatcatatgcacaagtaagaaactatgtaactgagtcaatcaatactggtaaagtattatatactttctaccagaacccaacattagtaaaaccagctattaaagcacaagaaactgcatcatcaatcgtcaatacattaagtaatttggtatccgtctgggaa

SEQ ID NO: 4746 - DNA, 512 bp, Staphylococcus aureus
attactgttttgtttggtgggagtagaccaaacggtaatactgcacaattaacaaaattcgctttgcaagatttagagtatcaatggattgacgtgacacaacatcagtttaaaccgatacgtgacgtgagacatacagcagagactattacttcatatgacgatgactatttgccgattctagataaaatattggctagtgatacaattatttttgcatcaccagtgtattggtatagcatttcagcaccattgaaagcatttatcgaacattggtcagaaacattacaagataaacgatatcctaattttaaggcacaaatggccgaaaaggattttagagttattttagttggtggagattgtccaaaaataaaagcgaagcagcaattacgcaaatgaaatatagtttagactttttaggtgccactttaaatggttatattattggaactgctgaaaagcctggtgacatcatgaaagacaactatgccttagcacgtgcaactgag

SEQ ID NO: 4747 - DNA, 1290 bp, Staphylococcus aureus
gtggcatttgaatttagattacccgatatcggggaaggtatccacgaaggtgaaattgtaaaatggtttgttaaagctggagatactattgaagaagacgatgttttagctgaggtacaaaacgataaatcagtagtagaaatcccatcaccagtatctggtactgtagaagaagttatggtagaagaaggtacagtagctgtagttggtgacgttattgttaaaatcgatgcacctgatgcagaagatatgcaatttaaaggtcatgatgatgattcatcatctaaagaagaacctgcgaaagaggaagcgccagcagagcaagcacctgtagctactcaaactgaagaagtagatgaaaacagaactgttaaagcaatgccttcagtacgtaaatacgcacgtgaaaaaggtgttaacattaaagcagtttctggatctggtaaaaatggtcgtattacaaaagaagatgtagatgcatacttaaatggtggtgcaccaacagcttcaaatgaatcagctgcttcagctacaagtgaagaagttgctgaaactcctgcagcacctgcagcagtaacattagaaggcgacttcccagaaacaactgaaaaaatccctgctatgcgtagagcaattgcgaaagcaatggttaactctaagcatactgcacctcatgtaacattaatggatgaaattgatgttcaagcattatgggatcaccgtaagaaatttaaagaaatcgcagctgaacaaggtactaagttaacattcttaccttatgttgttaaagcacttgtttctgcattgaaaaaatacccagcacttaacacttcattcaatgaagaagctggtgaaatcgttcataaacattactggaatatcggtattgcagcagacactgatagaggattattagtacctgttgttaaacatgctgatcgtaagtctattttccaaatttcagatgaaattaatgaattagctgttaaagcacgtgatggtaaattaacagccgatgaaatgaaaggtgctacatgcacaatcagtaatatcggttcagctggtggacaatggttcactccagttatcaatcacccagaagtagcaatcttaggaattggccgtattgctcaaaaacctatcgttaaagatggagaaattgttgcagcaccagtattagcattatcattaagctttgaccacagacaaattgatggtgcaactggccaaaatgcaatgaatcacattaaacgtttattaaataatccagaattattattaatggagggg

SEQ ID NO: 4748 - DNA, 2979 bp, Staphylococcus aureus
acaatgaagaacgcatttaaattatttaaaatggatctgaagaaagtagctaagacgccagctgtgtggattatcttagcaggcttagctattttgccatcgttctacgcttggtttaacttatgggcaatgtgggatccatatggcaacacgggacacatcaaggtcgcagtcgttaatgaagataaaggcgacacaatcagagggaaaaaagttaatgtcggtaatacgatggttaatacactcaagaaaaataaaagttttgattggcagtttgtaagtagagagaaagctgatcatgagataaaaatgggtaaatattttgcaggtatttacatcccatctaagtttacacatgaaattacagggacactacgtaagcagcctcaaaaagcagatgtagaatttaaggtgaatcagaagattaacgctgttgcgtctaagctaacagatactggttcgtcagttgtcgttgaaaaagcgaatgaacaatttaataaaacagtaactcgagcattattagaagaagctaacaaagcaggtttaactattgaagaaaatgtgccgacaattaacaagataacaaatgcgggatattcagcagataaagctttacctaagattaatgactttgcgaatagaatatgtatatttgaataaccaccaagcggatttagataaatatgccagtgattttagacaactaggatcttatgaaggtgatattttagatgctcagaaaaaattaaacgaatcaatggtgctattccgcaacttaatgaaaaggctaagttgatattagctttaaataattatatgccgaaaattgaaaaagcgttaaattttgcagctgatgacgtgccagcgcagttccctaaaattaatcaaggacttaacattgcgagtcaaggtattgatcaagctaatggacagttaaatgatgccaaaggcttcgtcacacaagttagaagtagagtcggtgattatcaagatgcaattcgacgcgcgcaagatttaaatcgaagaaaccagcaacagattcctcaaaatagcgcggcgaacaacgaaacatcaaatagtgcacctgcagctggtaatggtgtagcatcaacgccaccaagtgcaccaagtggcgatactgcaccaaataataatgttacgcaaaataccgcaccaaatagtaataatgcgcctgtatcgactacaccacaaagtacaagcgggaaaaaagatggtcaaagttttgtagatataacaacaacacaagtcagcacagctaacgagaacacacaaaacattacagataaagatgttaaatcaatggaagcggcattaacgggctctttattatcattatcaaataatttagatacccaagcgaaagccgcacaaaaagatagtcaggcattacgtaatatttcgtatgggattttagcatcggacaagccttctgattttagagagtctttagataatgttaagtccggtttagaatacacaacgcaatataatcaacaatttatcgatacattaaaagagattgagaagaatgaaaatgttgatttatcaaaagaaattgataaggtaaaagcagctaataatcgaattaatgaatcattaaggttagttaatcaattaagcaatgcattaaagaatggtagttcaggaactgctgaagctactaaattactagatcaactttcaaaactagattcatcattatcatcatttagagattatgttaaaaaagatcttaacagctctttagtatcaatatcacaacgtattatggatgaattgaacaaagggcaaactgcattatccaatgttcagtctaaattaaatacaattgatcaagtcattaacagtggacaagctattttaaaaaatggtaaaacacgtattgatcgcttacaaacagtattaccaagtattgaacaacaatacattagtgctgttaaaaatgctcaagcaaacttctcgaaagtgaaaagtgatgtagctaaagctgctaactttgtgcgcaatgacttaccacagttagaacagcgattaactaatgcgacagcaagtgtgaataaaaatttaccaacgttattaaatggttatgatcaagcggtaggattactaaataaaaatcagccacaagcgaaaaaggctttatcagatttagctgatttttctcaaaataaattgcctgatgttgaaaaagatttgaaaaaagcgaataaaattttcaagaaattagacaaagatgatgcagtcgacaaattaatcgacacacttaagaatgatttgaaaaagcaagcgggtattattgcaaatcctattaataagaagactgttgatgttttcccagttaaggattatggttcaggtatgacaccattctatactgcactgtcagtatgggtaggtgcactcttgatggtaagtttattaacggttgataataaacataagagtctagagtcagtcttaacgacaagacaagtgttcttaggtaaggcaggattctttataatgcttggtatgttgcaagcactcattgtatcggttggagatttgttaatcctaaaagcaggagttgagtcacctgtattatttgtacttataacgattttctgttcgattattttcaactcaatcgtatatacgtgcgtatcattacttggtaacccaggtaaagccattgcaatcgtattgcttgtattacaaattgcaggtggtgggggaacattcccaattcaaactacgccacaatttttccaaaacatttcgccatacttaccatttacgtatgcaattgattcattacgtgaaacagtaggcggtattgttccggaaatcctaattacaaaattaattatattaacgttatttggtataggattcttcgttgtaggtttaattttaaaacctgtaacagatccattgatgaagcgcgtatctgaaaaagttgaccaaagtaacgttaca

SEQ ID NO: 4749 - DNA, 939 bp, Staphylococcus aureus
ttaactatggcattatttttacaacccgtttttaaagacagaatttggggcggtcatgcattaaaagcatttaactatgatatccctaatgaaacaactggtgaatgctgggcaatttctgcacatccaaatggtcctaatacaattatcaatggtccatacaaggatatgaccctagatcaactttggtcacaacatcgtgaattattcgataatgattcacgagatagtttccctctgctaactaaagtattagatgccaatgataaattatctgttcaagttcacccagatgatgactacgctttaaaacacgaaggcgaactaggtaaaacagaatgttggtatattttagatgcagccccaggtgctgaaattatatatggcgtacatgcacataataaacagacgttaatagacatgattgataatcatgaatttgacagtcttttcaaacgtatacctgttaagcccggtgacttttattatgttcctgctggcactgtccatgccattggttcgggtattttaattttagagacacaacaatcctccgatacgacataccgtatttatgactatgatagacgagatcaaaatggtcaattgcgtgatttgcacttagagcaaagtaaagatgtgattgaattaggcaatcatgaaccaaatactactcctataacaactcacatcgacacacacactgtaactcaatttgtagataatcaatattttgcagtatataaatgggatattcatggagatttaaaattcaataaaccacatgcttattgcttagttacaattatcgatggtactggtactttaacagtaaacgataagcactatgacatccaaaaaggttctagctttattttaactacggaagacgaggatattcactttgtcggtaatattagtgctatagtaagtcatcct

SEQ ID NO: 4750 - DNA, 426 bp, Staphylococcus aureus
atgttaaacagagcagtattagtaggacgcttaacaaaagacccagaattaagaagcgcgccaaatggcgtaaatgtaggtacattcacattggcagtaaacagaacattcacgaatgctcaaggcgagcgtgaagcagattttataaacgtagtagtgttcaagaaacaagctgaaaatgttaaaaactacctttctaaagggtcgctggcaggtgtagacgggcgactacaaacacgtagctacgaaaataaagtcgggcaacgtgtatttgtgacagaagtagtagcggacagtgttcaattcttagaaccgaagaataacaaccaacaaccaaacaacaattatcatcaacaaagacaaactcaaactggtaataatccttttgataataccactgcgattactgatgatgacttaccgttc

SEQ ID NO: 4751 - DNA, 1346 bp, Staphylococcus aureus
ataatgaaaaaggttttaattgcaaaccgcggtgaaatcgcagttaggattattcgcgcttgtcgtgatttaggcatccaaactgttgcaatctattctgaaggggataaagatgcgctacatactcaaattgctgatgaagcatattgcgtaggtcccactttgtctaaagattcatatttaaatattccgaacatcttatctattgcaacttctacaggttgtgatggcgttcatccgggttatggctttttagctgaaaatgctgattttgcagaattatgcgaacatgccaattgaagttcattggaccaagttatcaatctatccaaaaaatgggtatcaaagatgttgctaaggcagaaatgatcaaagccaatgttccagttgttcctggtagtgacggtttaatgaaagacgtctcagaagctaagaaaatcgccaaaaaaattggctatccggtcatcattaaagctactgctggcggtggcggaaaaggtatccgtgttgctcgtgatgaaaaagaacttgaaactggcttccgaatgacagaacaagaagctcaaactgcatttggtaatggtggactttatatggagaaattcatcgaaaacttccgccatattgaaatccaaattgttggggacagctatggtaatgtaattcatttaggagaacgtgattgtacaattcaaagacgtatgcagaaattagtggaagaagcaccttccccaattttagatgatgaaacacgtcgtgaaatgggaaatgccgcagttcgtgcagcgaaagctgtaaattatgaaaatgcgggaacaattgagtttatatatgatttaaatgataataaattttattttatggaaatgaatacacgtattcaagtagaacatcctgtaactgaaatggtaacaggaattgatttagttaaattacaattacaagttgctatgggtgacgtgttaccgtataaacaagaagatattaaattaacaggacacgcaattgaatttagaattaatgctgaaaatccttacaagaactttatgccatcaccaggtaaaattgagcaatatcttgcaccaggtggatatggtgttcgaatagagtcagcatgttatactaattatacgataccgccatattatgattcgatggtagcgaaattaatcatacatgaaccgacacgagatgaagcgattatggctggcattcgtgcactaagtgaatttgtggttcttggtattgatacaactattccattccatattaaattattgaataacgatatatttagaagcggtaaatttaatacaaactttttagagcaaaatagcattatgaat

SEQ ID NO: 4752 - DNA, 1623 bp, Staphylococcus aureus
gaacgagctaatgatagtttagttaaacatttttatgagcagcaatctgacattgaacagcgagaaggttttgaaagtaaattaacatttggtactgcgggtatacgcggaaaattcggtcttggtgaaggtcgacttaataagtttactattgaaaaattggcattaggtttagcgcgttatttaaatgcccaaacaaacagtccaacaatagtcattcattatgatattagacatctttcaactgaattcgcccaaataattgctaatgtattagcaaaccatcaaataacagtttatttacctgatacatataaaacgacaccggaattatcgttcgcggtgcgcaatcttaatactactgctggcattatgattacagcaagtcataatccgaaagactataacggcatcaaagtatatggttctgatggtgcgcaattatcgactgatgcatctgagcttgcaagtcgttatatcgaagaagttggcgatccattacagattgatatacctatttctaaacaaaatacatcttatatcaagccttttccgaaatctgtaactgatgactatatgaaacacattcaaaatatgattggctatattcctaaatctgatttacaagttgtgttcactagtttgcatggtacaagtgttccgattgtacctgagttattacaatctttgaatttcaatcaatttaatcttgtagaagcacaatgtaaacctgatccgaatttcagctcagttcaaagtgctaatcctgaagatcatcgcgcttttgatcaagcagtcgaacttgcaaataaaagtcatgcagacttattaatatcaactgaccctgatgcagatcgacttggtattgctgaacgtgatgcacacggtcatatcacatattttaatggcaaccaaattggtgcgctgttacttaattatcgtattcaacaaacgtctcaattacgtcaccgcttaatgattcaatctattgtaagtagtgagttaacaaagtcattagcacgctataataatgttgaatacaaagaggtgctgacgggctttaaatttattgctcaggaaataagacaactggatgatcatcaaaatatgattttcgcatttgaagagagttacggttttctatcagagccttttgtacgtgataaagatgccgtacaaattgtgccactcattataaaatacgcttctgagttaaaattatatggcaaaacattgaaagatgaattagaacagatttatcaaactgttggtagacatgaggatacattattctcgcatacgctagaaggatttgaagggaaaaagaaaattaatgcaataatgaccaaattccgttcaaatccaccgcaagagattcaaggactcaaagtgaaagcaattgaagattatttaactagcgaggtttatcatttggataaagatacaacgtcgcagattaattctcctaaatcaaatgttattcgtgtcttatttgacgaaggatttatcgctttacgtccttctggtactgaacctaaaattaaattatatgtgtcgttaaaatgtccgaattttgatgatgtagctcaaaaaattaatgcgatgatttttagctaattaaaa

SEQ ID NO: 4753 - DNA, 1478 bp, Staphylococcus aureus
atgcaagtacgttgtttaagaaagtaaaagtaaagcgtgtattgggttctttagaacaacaaatagatgatatcactactgattcacgtacagcgagagaaggtagcatttttgtcgcttcagttggatatactgtagacagtcataagttctgtcaaaatgtagctgatcaagggtgtaagttggtagtggtcaataaagaacaatcattaccagctaacgtaacacaagtggttgtgccggacacattaagagtagctagtattctagcacacacattatatgattatccgagtcatcagttagtgacatttggtgtaacgggtacaaatggtaaaacttctattgcgacgatgattcatttaattcaaagaaagttacaaaaaaatagtgcatatttaggaactaatggtttccaaattaatgaaacaaagacaaaaggtgcaaatacgacaccagaaacagtttctttaactaagaaaattaaagaagcagttgatgcaggcgctgaatctatgacattagaagtatcaagccatggcttagtattaggacgactgcgaggcgttgaatttgacgttgcaatattttcaaatttaacacaagaccatttagattttcatggcacaatggaagcatacggacacgcgaagtctttattgtttagtcaattaggtgaagatttgtcgaaagaaaagtatgtcgtgttaaacaatgacgattcattttctgagtatttaagaacagtgacgccttatgaagtatttagttatggaattgatgaggaagcccaatttatggctaaaaatattcaagaatctttacaaggtgtcagctttgattttgtaacgccttttggaacttacccagtaaaatcgccttatgttggtaagtttaatatttctaatattatggcggcaatgattgcggtgtggagtaaaggtacatctttagaaacgattattaaagctgttgaaaatttagaacctgttgaagggcgattagaagttttagatccttcgttacctattgatttaattatcgattatgcacatacagctgatggtatgaacaaattaatcgatgcagtacagccttttgtaaagcaaaagttgatatttttagttggtatggcaggcgaacgtgatttaactaaaacgcctgaaatggggcgagttgcctgtcgtgcagattatgtcattttcacaccggataatccggcaaatgatgacccgaaaatgttaacggcagaattagccaaaggtgcaacacatcaaaactatattgaatttgatgatcgtgcagaagggataaaacatgcaattgacatagctgagcctggggatactgtcgttttagcatcaaaaggaagagaaccatatcaaatcatgccagggcatattaaggtgccacatcgagatgatttaattggccttgaagcagcttacaaaaagttcggtggtggccctgttgattaa

SEQ ID NO: 4754 - DNA, 2979 bp, Staphylococcus aureus
atgaacactatttacgaaccgtcaagtatttgtatgattagaacacctttattatcagttgaatttttcaatttatttttaaatactgaacaaattaaatatagcgacttacaattaaatgctcagatgaaagaatcaatcctaacaacaacatttaacttatattgtactttacaagaaataaattttgatggcgataacaagaaggttagagatgctaaagaaagtttattaaaatatttaattagaatgtcaacacgtccaactccatttggattattaagtggtattaatttggggcattttgtaaatgaaccaacacgtcttaaagttggaaatagtattcaaaaatatgtgaaagtcgatggcgaatggttgtataaactggttagttatattgagagtattgatgaatattatcaaaatttgaaagttatttggaatagtaaagcacatattatcaatgatcgaatatatttaaatgaacaaagtgctatttatttaaacaacaataaagatacatctttttccattaaaaatagcgaattactcgtattcatcaaaaccactgtgacgaataataatattactttttcaaatttagctgaaaagataaatcaagaatttgaaattaatgatattactaaagtgaaagtatatatccataatcttgtctcaaaggaaattatatattcaacaatcagaccaccgttatcatatagcgataatttaaattatattttaaataaactttctttacataatgatgattttgtgaaaaaaattagagaaatccagaaattgatattagcttatgaaaaaactgaaattggatttggcgaggaattatataaagacattattcatcatatgaaggcactattcaaatgtaaaaactatcttcaaattgataccaaaattgacatgattaacaattatttacatcaagatatagcaacaaatatatctgaagcagcgtacttattgtggcttttatcaagaaataatattggattcacagatttgaaagttcttcacaaccgttttattgaaaagtatggatttgaacaactcgtgaatattaaagatttgatttcagatataacaggtttcgggacaacaatttttcaagaagaagaaaccgatggaaataatattgtaatgcttaagcaaaaatttttacatgccttgagaaataacgatgagatagtcataaatgaaaaagatgtagagtcattgattaacgataatgaaatcaatcattatcatgcgccaatgagtgcagatgtttatgctgaactttatttaggacgtttttacaatcagtacaatgagctcattgttattagtcctttaacggcgtcttttaatgctggcgctacatttgggcgatttcatcatttaattgatactgaaactttagcaaaattagaacatgaaaaaggacattattatcagaagatgatatgtgatgacaatgtagaaatgatttctataaataacataccgaaatatccgagaaatcataatgtattaactaatcatgactcatacgaatattcattgaatttaggaagtagtaatagttattcaaagtatgagcttaccttagatgatatttatgttggtgctacctttaacaaattatatttatattctagccaactaaataaaagggtactatttgaatcaaacaatatgtataactttttaaaagaatgtaatttatatcgattgttacgagaaatttcaatggaatctgtgaaatgcattgaacctatgaatgatgtgagtattgattcatttagttattcaccacgaatcagatataaaaatgtcattcttaaaccagcatattggaaaattaacgagatggtattacctttacctaaaaatgaagaatgggatcaacaatttttgaaatatcaagaacaattcaatatacctaatatcgtgaatttagtttatggagataacaagcttctactaaatttatcattagctaatcatagatatttattgatgaaagaatataagaagcataaacgtgtacgtttagtagaatcatttttacctcaatcaaagaatgatcatgtgtatgaaattgttacaccaatttataaaaaatcatcttatcgaggacccgaaatcgaaattccaaaatataaaaatacagatattgaatatgacaaagactggtttgcattacatattcatatcgataagccatcgcaagatacatttatcatcgacaatttgtatccatttgtaaaacatcttaaagataagggagatatagatcaatattttttaatgcgttatatcaaacaaggtgacattttaaagttgaggttattcaggaatgacgaaaattacgcagaaatatacagcatcttgaagaattggttaccacatgttcgacaaacgacagaagtttcagattatgaatttgtatcatacgagccagaattttttagatatggtggaaagaacacgattaatgaaatagaagccttctttgaatatgacacgaatttagctgtcaatattattgaaaatgattttaagtttgatcgaccatatattgttgctatttcaataatgtatttatttgagatgttttcaatttctaatgaagagcgtatggaaattgttaataactatgtacctacatcatttaaaagtaaagatattagaccttttaaaaatgaacttgtaactatatgtaatcctgctaataattttgaatatatggctaaacactatagtggtatttatcgaattttaaaagatggcaaccaaattttgagcaaattaaatgaagggcttaaaaaaactttaactactaaaaggtcaaggattattggcagcttaattcatatgcgctgcaatcgaatatttggcattgataaggatcaagaaacatttgttttatctattgtaaaagaaattgttaaaactcaaaagcattggtgtggt

SEQ ID NO: 4755 - DNA, 540 bp, Staphylococcus aureus
attaattttaataaaaccgctttagtgttaatcgacctgcaagaaggtattcttaaaatggattatgccccatatacagctgaaaatgtcgttcaaaacgctaataaattaatagatgtttttagaaaaaacaatggctttatcgcttttgttcgcgtgaatttctatgatggtaaagatgtattgcaaccaaatgcaatgatctcattaccaccaaaagaaggcgacgactacagtcgtttccatcatttattagacaagagagatgacgattttgtcatagacaaacgacattttagtgcatttgtaggaacagatttggacttacaattgcgacgtcgaggaattgatacgattgttcttggtggtgtcgcaacgcatattggcgtagatacgacagcgcgagatgcctatcaattaaactacaatcagttttttgttacagatatgatgagtgcacaaaacgaaacgctacatcaatttccaatagataatgtattcccattgatgggacaaacaataactacaaacgactttcta

SEQ ID NO: 4756 - DNA, 1545 bp, Staphylococcus aureus
gttaacattatcgttgtaggattcatgcttacggttattgttatcgggcttatttggttaattaaagataaaagacaatcacaacatagtgtattaaggaattatcctttactagcacgtattagatatatttcagaaaaaatgggaccggaattacgtcagtatttattttctggggataatgaagggaaacctttttcacgtaatgattataaaaatatcgttttggctggaaaatataactctcgtatgaccagcttcggtactactaaagattatcaagacggcttttacatacagaacacaatgtttccgatgcaacgtaatgagatttcagtagataatacaacattgttatcaacattcatttataaaatcgcgaatgagcgtttatttagtcgtgaagaatatcgtgtgccgacaaagattgatccgtattacttaagtgatgaccatgcaataaaattaggtgaacatttaaaacatccatttattttaaaacgtatcgtaggacaatctggtatgagttatggcgctttaggaaaaaatgccattacagctttatctaaaggtctagctaaagcgggcacttggatgaatacaggtgaaggtggcttatcagaatatcatttaaaaggtaatggggatatcattttccaaattggtcccggtttatttggtgttcgtgataaagaaggtaattttagtgaaggtttatttaaagaggttgcacagttatctaacgtacgcgcatttgagctgaagttggcacaaggtgctaagactcgtggtggtcatatggaagctgaaaaggtaaacgaagaaattgctaaaatccgaaatgttgaaccttataaaacaatcaattcacctaaccgttacgaatttattcataatgctgaagatttgattcgtttcgtcgatcagttgcagcaattaggtcaaaaaccagtaggattcaaaattgtagtaagcaaagtttcagaaattgaaacacttgtacgtacgatggtggaactagataagtatccaagctttattacgattgatggtggtgaaggtggtactggtgcaacattccaagaattacaagatggtgttggcttaccgctatttacagctctacctattgtgtctggcatgttagaaaaatatggtattcgagataaagtgaaattggcggcatctggtaagttagtgacaccagataaaattgcgattgcactaggtttaggtgcagattttgtaaatatcgcacgtgggatgatgattagtgtcggttgtataatgagtcaacaatgtcacatgaatacgtgtcctgtaggtgttgcaacgacagatgcgaagaaagaaaaagcattgattgttggagaaaagcaatatcgtgtcacaaactatgtaacaagtttgcatgaaggcttattcaatattgcagcagctgttggcgtatccagtcctacagaaattactgctgatcatattgtatatcgaaaagtcgatggtgagttacaaacgatacatgattataaattaaaactcattagt

SEQ ID NO: 4757 - DNA, 1458 bp, Staphylococcus aureus
atgaatccgcatgtttacggtggatcaatgtctgctgaaagtatgatatacgagccgcttgtacgtaacacgaaagatggtattaagcctttactagctaaaaagtgggatgtgtctgaagatgggaagacatacacgttccatttgagagatgacgttaaattccatgatggtacgccatttgatgctgacgcagttaagaaaaatattgacgcagttcaagaaaacaaaaaattgcattcttggttaaagatttcgacattaattgacaatgttaaagttaaagataagtacacggttgaattgaatttgaaagaagcatatcaacctgcattggctgaattagcgatgcctcgtccatatgtatttgtgtctccaaaagactttaaaaacggtacaacaaaagatggcgttaaaaagttcgatggtactggtccatttaaattaggtgaacacaaaaaagatgagtctgcagactttaacaaaaatgatcaatactggggcgaaaagtctaaacttaacaaagtacaagcaaaagtaatgcctgctggtgaaacagcattcctatcaatgaaaaaaggtgaaacgaactttgccttcacagatgatagaggtacagatagcttagacaaagactctttaaaacaattgaaagatacaggtgactatcaagttaagcgtagtcaacctatgaatacgaaaatgttagttgtcaattctggtaaaaaagataacgctgtgagtgacaaaacagtcagacaagcgattggtcatatggtaaacagagataaaattgccaaagaaattttagatggtcaagaaaaaccagcaactcaattatttgcgaaaaatgtaacagacattaatttcgatatgccaacacgtaagtatgaccttaaaaaagcagaatcattattagatgaagctggttggaagaaaggtaaagacagcgatgttcgtcaaaaagatggtaaaaaccttgaaatggcaatgtactatgacaaaggttcttcaagtcaaaaagaacaagcagaatacttacaagcagaatttaagaaaatgggtattaagttaaacatcaatggcgaaacatcagataaaattgctgaacgtcgtacttctggtgattatgacttaatgttcaaccaaacttggggattattgtacgatccacaaagtactattgcagcatttaaagcgaaaaatggttatgaaagtgcaacatcaggcattgagaacaaagataaaatatacaacagcattgatgacgcatttaaaatccaaaacggtaaagagcgttcagacgcttataaaaacattttgaaacaaattgatgatgaaggtatctttatccctatttcacacggtagtatgacagttgttgcaccaaaagatttagaaaaagtatcattcacacaatcacagtatgaattaccattcaatgaaatgcagtataaa

SEQ ID NO: 4758 - DNA, 787 bp, Staphylococcus aureus
atgaaacgtttggaaaataaagtagcagtcgtaacaggagcaagtacaggtatcggtcaagcttctgcaatcgctttagctcaataaggtgcgtatgtattggcggtagacatagctgaagcggtatcggagactgtcgataaaattaaaagtaatggtgacaatgcgaaggcgtataatgtggataatgcaagcgaacaacaagtggtagactttgtgtctgacataaaggaacagtttggaagaatcgatgtgttgtttaataatgccggtgtggataatgcggctgatagaattcatgagtatccaatagatgtgtatgacaagattatgaatgtagatatgcgtgggacatttttaatgacgaaaatgatgttacctttaatgatgaatcaaggtggctctattgttaatacgtcttcattttccggacaagcagcagacttgtatcgctctggatataatgctgcgaaaggtgcagtgattaattttacaaaatcaatcgcaattgagtatggccgtgatagcattcgagccaatgcgattgcaccaggtacaattgaaaccccgttagtagataaactgacaggtacgagtgaggatgatgcaggtaaaacatttagagaaaatcaaaaatggatgactccgctgggacgtttaggtaaaccagaagaagttgctaaattagtagtcttcttagcatctgacgacagttcattcataactggagagacgattcgaattgatggtggtgtgatggcttacacatggcctggcgagatgttaa

SEQ ID NO: 4759 - DNA, 573 bp, Staphylococcus aureus
aatttggatataaaaaagttgaattttagaaaggtaaaaaacgcaattcatttaagtttaagtggcgataaataccagtttttggaggacggtaaaactatcaataatacttattttttagctgtatatgataatgcaataaacatttttgaagatttgttttcgccttctgattctataaatttggttcatgtagtatatgtttatagtgaaccttataagaaaacaaatgttataaaaaaatttacatcgttaacaatagatgaattgtattactttaaagaatataaaaaggagaaggatgataatattttgtgcgaggagttttcatataagtgttccataaaagatataaaatataaaaaattattaaaagctatatccaatcaagactttaaagggttagttccaaatatcaatcagaatgataattattctgaaatatatataattaacaatactaaaaacttaatatatcatttatatgatgatagaggtctatggctagcttttaataataatgaagattatgcaagatattctgaaaaatataatgatttaatatcggaattt

SEQ ID NO: 4760 - DNA, 6228 bp, Staphylococcus aureus
atgaatttgttaaagaaaaataaatatagtattaggaagtataaagtaggcatattctctactttaatcggaacagttttattactttcaaacccaaatggtgcacaagccttaactacggataataatgtacaaagcgatactaatcaagcaacacctgtaaattcacaagataaagatgttgctaataatagaggtttagcgaatagtgcgcagaatacacctaatcaatctgcaacaaccaatcaagcaacgaatcaagcattggttaatcataataatggtagtatagtaaatcaagctacgccaacatcagtgcaatcaagtacgccttcagcacaaaacaataatcatacagatggcaatacaacagcaactgagacagtgtcaaacgctaataataatgatgtagtgtcgaataataccgcattaaatgtaccaactaaaacaaatgaaaatggttcaggaggacatctaactttaaaggaaattcaagaagatgttcgtcattcttcaaataaaccagagctagttgcaattgctgaaccagcatctaatagaccgaaaaagagaagtagacgtgcggcaccggcagatcctaatgcaactccagcagatccagcggctgcagcggtaggaaacggtggtgcaccagttgcaattacagcgccatatacgccaacaactgatcctaatgccaataatgcaggacaaaatgcacctaacgaagtgctgtcatttgatgacaatggtattagacaaagtaccaaccgttctgtgccaacagtaaacgttgttaataacttgccgggcttcacactaatcaatggtggcaaagtaggggtgtttagtcatgcaatggtaagaacgagcatgtttgattcaggagataataagaactatcaagcacaaggaaatgtaattgcattaggtcgtatacatggaactgatacgaatgaccatggcgattttaatggtatcgagaaagcattaacagtaaatccgaattctgaattaatctttgaatttaatacaatgactacgaaaaacggtcaaggcgcaacaaatgttattatcaaaaatgctgatactaatgatacgattgctgaaaagactgttgaaggcggtccaactttgcgtttatttaaagtacctgataatgtgagaaatctcaaaattcaatttgtacctaaaaatgacgcaataacagatgcgcgtggcatttatcaactaaaagatggttacaaatactatagctttgttgactctatcggacttcattctgggtcacatgtttttgttgaaagacgaacaatggatccaacagcaacaaataataaagagtttactgtaacaacatcattaaagaataatggtaattctggtgcttctctagatacaaatgactttgtatatcaagttcaattacctgaaggtgttgaatatgtgaacaattcattgactaaagattttccaagtaacaattcaggcgttgatgttaatgatatgaatgttacatatgatgcagcaaatcgtgtgataacaattaaaagtactggaggaggtacagcaaactctccggcacgacttatgcctgataaaatactcgatttaagatataaattacgtgtaaataatgtgccgacaccaagaacagtaacatttaacgagacattaacgtataaaacatatacacaagatttcattaattcagctgcagaaagtcatactgtaagtacaaatccatatactatcgatatcatcatgaataaagatgcattacaagccgaagttgacagacgtattcaacaagctgattatacatttgcgtcattagatatctttaatggtctgaaacgacgcgcacaaacgattttagatgaaaatcgtaacaatgtaccattaaataaaagagtttctcaagcatatattgattcattaactaatcaaatgcaacatacgttaattcgaagtgttgatgctgaaaatgcagttaataaaaaagttgaccaaatggaagatttagttaatcaaaatgatgaattgacagatgaagaaaaacaagcagcaatacaagttatcgaggaacataaaaatgaaataattggtaatattggtgaccaaacgactgatgatggcgttactagaatcaaagatcaaggtatacagaccttaagtggggatactgcaacaccggttgttaaaccaaatgctaaaaaagcaatacgtgataaagcaacgaaacaaagggaaattatcaatgcaacaccagatgttactgaagacgagattcaagatgcactaaatcaattagctacggatgaaacagatgctattgataatgttacgaatgctactacaaatgctgacgttgaaacagctaaaaataatggcatcaatactattggagcagttgttcctcaagtaactcataaaaaagctgcaagagatgcaattaaccaagcaacagcaacgaaaagacaacaaataaatagtaatagagaagcaactcaggaagagaaaaatgcagcattgaacgaattaactcaagcaaccaaccatgctttagaacaaatcaatcaagcaacaacaaatgctgatgttgataacgccaaaggagatggtctaaatgccattaatccaattgctcctgtaactgttgttaagcaagctgcaagggatgccgtatcacatgatgcacaacaacatatcgcagagatcaatgctaatcctgatgcgactcaagaagaaagacaagcagcaattgacaaagtgaatgctgctgtaactgcagcaaacacaaacattttaaacgctaataccaatgctgatgttgaacaagtaaagacaaatgcgattcaaggaatacaagcaattacaccagctacaaaagtaaaaacagatgcaaaaaatgccatcgataaaagtgcggaaacgcaacataatacgatatttaataataatgatgcgacgctcgaagaacaacaagcagcacaacaattacttgatcaagctgtagccacagcgaagcaaaatattaatgcagcagatacgaatcaagaagttgcacaagcaaaagatcagggcacacaaaatatagtagtgattcaaccggcaacacaagttaaaacggatactcgcaatgttgtaaatgataaagcgcgagaggcgataacaaatatcaatgctacaactggcgcgactcgagaagagaaacaagaagcgataaatcgtgtcaatacacttaaaaatagagcattaactgatattggtgtgacgtctactactgcgatggtcaatagtattagagacgatgcagtcaatcaaatcggcgcagttcaaccgcatgtaacgaagaaacaaactgctacaggtgtattaaatgatttagcaactgctaaaaagcaagaaattaatcaaaacacaaatgcaacaactgaagaaaagcaagtggctttaaatcaagtggatcaagagttagcaacggcaattaataatataaatcaagctgatacaaatgcggaagtagatcaagcgcaacaattaggtacaaaagcaattaatgcgattcagccaaatattgttaaaaaacctgcagcattagcacaaatcaatcagcattataatgctaaattagctgaaatcaatgctacaccagatgcaacgaatgatgagaaaaatgctgcgatcaatactttaaatcaagacagacaacaagctattgaaagtattaaacaagctaacacaaatgcagaagtagaccaagctgcgacagtagcagagaataatatcgatgctgttcaagttgatgtagtaaaaaaacaagcagcgcgagataaaatcactgctgaagtggcgaagcgtattgaagcggttaaacaaacacctaatgcaactgacgaagaaaagcaggctgctgttaatcaaatcaatcaacttaaagatcaagcaattaatcaaattaatcaaaaccaaacaaatgatcaggtagacacaactacaaatcaagcggtaaatgctatagataatgttgaagctgaagtagtaattaaaccaaaggcaattgcagatattgaaaaagctgttaaagaaaagcaacagcaaattgataatagtcttgattcaacagataatgagaaagaagttgcttcacaagcattagctaaagaaaaagaaaaagcacttgcagctattgaccaagctcaaacgaatagtcaggtgaatcaagcagcaacaaatggtgtatcagcgattaaaattattcaacctgaaacaaaagttaaaccagctgcacgtgaaaaaatcaatcaaaaagcgaatgaattacgtgctaagattaatcaggataaagaagcaacagcagaagaaagacaagtagcactagataaaatcaatgaatttgtaaatcaagccatgacagatattacgaataatagaacaaatcaacaagttgatgatacaacaagtcaagcgcttgatagcattgctttagtgacgcctgaccatattgttagagcagctgctagagatgcagttaagcaacaatatgaagctaaaaagcgcgaaattgagcaagcggaacatgcgactgatgaagaaaaacaagttgctttaaatcaattagcgaataatgaaaaacgtgcattacaaaacatcgatcaagcaatagcgaataatgatgtgaaacgtgttgaaacaaatggcattgctacactaaaaggtgtacaacctcatattgtaattaagcctgaagcacaacaagcaataaaagcaagtgcagaaaatcaagtagaatcaataaaagatacaccacatgcaacagttgatgaattagatgaagcgaatcaattaattagcgacacactcaaacaagcgcaacaagaaatagaaaatacaaatcaagatgctgctgttactgatgttagaaatcaaacaatcaaggcaatagagcaaataaaacctaaagtaagacgtaaacgagctgcgcttgatagcattgaagaaaataataaaaatcaactcgatgcaatccgaaatacgttggatactactcaagatgaaagagatgttgctattgatactttaaataaaattgtaaatacaattaaaaatgacattgcacaaaacaaaacgaatgcagaagtggatcgaactgagactgatggcaacgacaacatcaaagtgattttacctaaagttcaagttaaaccagcagcgcgtcaatctgttggtgtaaaagccgaagctcaaaatgcactaatcgatcaaagcgatttatcaactgaagaagaaagactagctgctaaacatttagtagaacaagcacttaatcaggctattgatcagatcaatcatgcagataagactgcccaagttaatcaagatagtataaatgctcaaaatattatttcaaaaattaaaccagcgacaacagttaaagcaacagcattacaacaaattcaaaatatcgctacaaataaaattaatttaattaaagcaaataacgaagcgacagatgaagaacaaaatattgcaatagcacaagttgaaaaagagttaattaaagctaaacaacaaattgctagtgcagtgactaatgcagatgtggcatatttattgcatgatgagaaaaacgaaattcgtgaaatcgaacctgttattaacagaaaggcgtctgctcgagaacaattgacaacattattcaacgataaaaaacaagcaattgaagcgaatattcaagcaacggtagaagaaagaaatagtatattagcacagttacaaaatatttatgacactgctattggacaaattgatcaagatcgtagcaatgcacaagttgataaaacagcatcattaaatctacaaacaatacatgatttagatgtacatcctattaaaaagccagatgctgaaaaaacgattaatgatgatcttgcacgcgtcactgctttagtgcaaaattatcgaaaagtaagtaatcgtaataaggctgatgcattaaaagctataactgctttaaaattacaaatggatgaagaattaaaaacagcacgcactaatgctgatgttgatgcagttttaaaacgatttaatgttgcattaagcgatatagaagcagtaattactgaaaaagaaaatagcttactgcgaattgataacattgctcaacaaacatatgcgaaattcaaagcgatcgcaacaccagaacaattagctaaagtaaaagta

SEQ ID NO: 4761 - DNA, 7434 bp, Staphylococcus aureus
atgaatttattcagacaacaaaaatttagtatcagaaaatttaatgtcggtattttttcagctttaattgccactgttacttttatatctactaacccgacaacagcgtctgcagcagagcaaaatcagcctgcacaaaatcaaccagcacaaccagctgatgccaatacacagcctaacgcaaatgctggtgctcaagctaatcctacagcacagccagctgcacctgccaaccaaggacaaccagcagtacaaccagcaaaccaaggtggacaggctaatccagcaggaggagcagcacaaccaaatacacaaccagctggacaaggtaatcaagctgatccgaataacgctgcacaagcacaacctggaaatcaagcaacaccggcaaaccaagcaggtcaaggaaataaccaagcaacacctaataataatgcaacaccggcaaatcaaacacagccagcgaatgctccagcagcagcgcaaccagcagcacctgtagcagcaaacgcacaaactcaagatccaaatgctagcaatactggtgaaggcagtattaatacgacattaacatttgatgatcctgccatatcaacagatgagaatagacaagatccaactgtaactgttacagataaagtaaatggttattcattaattaacaacggtaagattggtttcgttaactcagaattaagacgaagcgatatgtttgataagaataaccctcaaaactatcaagctaaaggaaacgtggctgcattaggtcgtgtgaatgcaaatgattctacagatcatggtaactttaacggtatttcaaaaactgtaaatgtaaaaccagattcagaattaattattaactttactactatgcaaacgaatagtaagcaaggtgcaacaaatttagttattaaagatgctaagaaaaatactgaattagcaactgtaaatgttgctaagactggtactgcacatttatttaaagtaccaactgatgctgatcgtttagatttacaatttattcctgacaatacagcagttgctgatgcttcaagaattacaacaaataaagatggttataaatactattcattcattgataatgtaggtctattctcaggatcacatttatatgtcaaaaatagagatttagcaccgaaagcaactaacaataaagaatatactattaatactgaaatcggtaacaatggtaattttggtgcttcattaaaagcagatcaatttaaatatgaagtaacattaccacaaggtgtaacttacgttaataattcattaactacaacattccctaatggtaatgaagacagtacagtattgaaaaatatgactgttaattatgatcaaaatgcaaataaagttacatttacaagccaaggtgtgacaacggcacgtggtacacacactaaagaagttttattcccagataaatctttaaaattatcatataaagttaatgttgcgaatatcgatacacctaaaaatattgattttaatgaaaaattaacatatcgtactgcttcagatgttgtaattaataatgcgcaaccagaagttacactaactgcagatccattttcagtagcggttgaaatgaacaaagatgcgttgcaacaacaagtaaactcacaagttgataatagtcattacacaacagcatcaattgcagaatacaataaacttaaacaacaagcagatactattttaaatgaagatgcgaatcatgttaaaactgcaaatcgtgcatctcaagcggatattgatggtttagtaactaaattacaagctgcattaattgataatcaagcagcaattgctgaattagatactaaagctcaagaaaaggttacagcagcacaacaaagtaaaaaagttacgcaagatgaagttgcagcacttgtaactaaaattaacaatgataaaaataatgcaatcgcagaaattaataaacaaactacagcacaaggtgtcacaactgaaaaagataatggtatcgcagtgttagaacaagatgtgattacaccaacagttaaacctcaagcgaaacaagatattatccaagcagttacaactcgtaaacaacaaattaaaaagtcaaatgcatcattacaagatgaaaaagatgtagcaaatgataaaattggtaaaattgaaacaaaggcaattaaagatattgatgcagcaacaacaaatgcacaagtagaagccattaaaacaaaagcaatcaatgatattaatcaaactacacctgctacaacagctaaagcagcagctcttgaagaatttgacgaagttgttcaagcacaaattgatcaagcacctttaaatcctgatacaacaaatgaagaagtagcggaagctattgaacgtattaatgcagctaaagtttctggtgttaaagcaattgaagcgacaacgactgcacaagatttagaaagagttaaaaacgaagaaatctcaaaaattgaaaatattactgactctacgcaaacaaaaatggatgcctataatgaagttaaacaagctgcaacagctagaaaagctcaaaatgctacagtttcaaatgcaacaaatgaagaagtagcagaagctgatgcagcagtagatgcagctcaaaagcaaggtttacatgacatccaagttgttaaatcaaaacaggaagttgctgatacaaaatcaaaagtattagataaaatcaatgcaattcaaacacaagcaaaagttaaacctgcagctgatacggaagtagaaaacgcatataatacacgtaaacaagaaattcaaaatagcaatgcttcaactacagaagaaaaacaagctgcatatacagaattagatactaaaaagcaagaagcaagaacaaatcttgatgctgcaaatacaaacagtgatgtaacaacagctaaagacaatagtattgctgcaattaatcaagttcaagctgccacaactaagaaatcggatgcaaaagcggaaatcgctcaaaaagcaagtgaacgtaaaacagcaattgaagcaatgaatgattcgactactgaagaacaacaagcagcgaaagacaaagtggatcaagcagtagttactgcaaacgctgatatagataatgctgcagcaaacaatgatgtggataatgcaaaaactacaaatgaagctacaatcgcagccattacacctgatgcaaatgttaaaccagcagcaaaacaagcaattgcagataaagtacaagctcaagaaacagcaattgatggaaataacggctcaacaactgaagaaaaagcagctgctaaacaacaagttcaaactgaaaaaacaacagctgatgccgcaatagatgcagcacatacaaatgcggaagttgaagcggctaaaaaagcagcaattgctaaaattgaagcgattcagccagcaacaacaactaaagataatgcgaaagaagcaattgctacgaaagcgaatgaacgtaaaacagcaatcgctcaaacgcaagacattactgctgaagaaattgcagcggctaatgcggacgtagataatgctgtgacacaagcaaatagcaacattgaagctgctaatagtcaaaatgatgtagaccaagcgaaaacgacaggtgaaaatagtattgatcaagtaacaccaacagttaataaaaaagcaactgcacgtaatgaaatcacagcaattttaaataacaaattgcaagagattcaagctacgccagatgcaacagatgaagaaaaacaagcagctgatgctgaagcaaatactgaaaatggtaaagcaaatcaagccatttcagcagcaactactaacgcacaagttgatgaagctaaagcaaatgcagaagcagcgattaatgcggtaacaccaaaagttgtgaagaaacaagcggctaaagatgaaattgatcaattacaagcaacgcaaacaaatgttatcaataatgatcagaacgctacaacagaagaaaaagaagcagctattcaacaattagcaacagcagttacagacgcgaaaaataatattacagctgcaactgatgataatggtgtagatcaggcgaaagacgctggaaagaattcaattcaaagcacgcaaccagcaacagcggttaaatcaaatgctaaaaatgatgttgatcaagctgtgacaactcaaaatcaagcaattgataatacaactggtgctacaactgaagagaaaaatgcagcaaaagatttagttttaaaagctaaagaaaaagcgtatcaagatatcttaaatgcacaaacaactaatgatgttacgcaaattaaagatcaagcagttgctgatattcaaggtattactgcagatacaacaattaaagatgttgcgaaagatgaattagcaacaaaagcaaacgaacaaaaagcgcttattgcacaaactgcagatgcgactactgaagaaaaagaacaagcaaatcaacaagtagacgcacaattaacacaaggtaatcaaaatattgaaaatgcacagtcaatcgatgatgtaaacactgcaaaagataatgcaattcaagcaattgacccaattcaagcatcaacagatgttaaaacgaatgcaagagcggaattgctaactgaaatgcaaaataaaataactgaaatacttaataataatgagactactaatgaagaaaaaggtaacgatattggaccagttagagcagcatatgaagaaggtttaaataatattaatgcagcaactactacaggtgatgtaactactgctaaagatacagcagtacaaaaagttcaacaacttcatgcaaatcctgttaagaaaccagcaggtaaaaaagaattagatcaagctgcagctgataagaaaacacaaatagaacaaacaccaaatgcatcacaacaagaaattaatgatgcaaaacaagaagttgatactgaattaaatcaagcgaaaacaaatgtcgatcaatcatcaacaaatgaatatgttgataatgcagttaaagaaggaaaagctaaaattaatgcagttaaaacatttagtgagtacaaaaaagatgctttagctaaaattgaagatgcatataatgctaaagtaaacgaagcggataactctaacgcatcgacttcaagtgaaattgctgaagcgaaacaaaaacttgctgaattaaaacaaactgcggatcaaaatgttaatcaagctacttctaaagatgacattgaagttcaaattcataatgacttagataatattaacgattacacaattccaacaggtaaaaaagaatcagctacaacagatttatatgcttatgcagatcagaagaaaaataatatttcagctgacactaatgcaacacaagatgaaaagcaacaagcaattaagcaagttgaccaaaatgttcaaactgcattagaaagcattaataatggtgtggataatggtgacgttgatgatgcattaacacaaggtaaagcagcaattgatgctattcaagtagatgctactgttaaacctaaagcgaaccaagctattgaagttaaagcagaagatacgaaagaatctattgatcaaagtgaccagttaactgctgaagaaaaaactgaagcattagcaatgattaaacaaattacagatcaagctaaacaaggtattactgatgcaacaacaactgctgaagttgaaaaagcgaaagctcaaggacttgaagcatttgataacattcaaatcgactcaacagaaaaacaaaaagctatcgaagaattagaaactgcactagaccagattgaagcaggtgtaaatgtcaacgctgatgctacaactgaagaaaaagaagcgtttacgaatgctttagaagacattttatcaaaagcaactgaagatatttctgatcaaactacaaatgcagaaatcgctactgtcaaaaatagtgcgcttgaacaacttaaagcacaacgtattaatcctgaagttaagaaaaatgctttggaagcaatcagagaagtggttaacaagcaaatagaaataattaaaaatgcagatgcagatgcatcggcgaaagaaattgcacgtacggatttaggtagatattttgacagatttgctgataaattagataaaacacaaacaaatgcagaagttgctgaattacaaaatgtaacgatacctgcaattgaagcgattgtgcctcagaatgatccagatgctaatgatactaataatggtatagataataatgatgcaacagcaaattcaaatgctaatgcaacaccagaaaatactggacaacctaacgtatctgagacgacagctaatggcaaagcagacgcttctccgacaacaccaaataatagtgatgcggcaacaggtgaaacaacagcaacatcagcaactgatgatgcaaatgataaaccgcaagctaataacaattctagtgtagatgcatcaacaaacagtccgacaatggataacgatgtaactagtaaaccagaagtagaatcaactaataacggcacaactgataaacctgtaacagaaactgataatgcaacgccagcagaaagcacaacaaataacaatagtacaactacagcaacaaacgagaatgcaccaacaggatcaacagcaacggctccaacaactgcgagcacagaagcagcatcatctgctgatagcaaagataatgcatctgtaaatgattcaaaacaaaatgctgaagtaaataatagtgctgaatctcaatcaactaatgacaaggttgcacaaccaaaatctgaaaataaagctaaggcagaaaaagatggtagtgattcaacaaatcaaagtatggttgaatcaacaactgaaacattgccttcagcagacataacagaaccaaatgtaccttctaatacatcaaaagataaagaagaaagtacgacaaatcaaactgatgcaggacaacttaagtctgaaactaacgttgcatctaacgaagcagataaatcgccaagcaaagctgatactgaagtttcgaataaaccatcaacatctgcatcttctgaagcaaaagaaaaaatgacttcaactaatgttagccaaaaagatgatacggcaacagcagatactaatgatacgcaaaaatcagttggttcagctgcaaacaataaagctacgcaaaacgacggtgccaatgcatctccagctacagtttcaaatggaagcaatagtgctaatcaagatatgcttaatgtaactaacactgacgaccaccaagctaagacaaaatcagctcaacaaggaaaagttaataaagctaaacaacaagctaaaactttaccagatactggtatgtcacataatgacgatttaccatatgctgaattagctctaggtgcaggtatggcattcttaattagaagattcactaagaaagaccaacaaactgaagaa

SEQ ID NO: 4762 - DNA, 1273 bp, Staphylococcus aureus
atgacaaaagcgattaaagataaaaataaagcggaattagaatctttgaacaatagtttgaatcagatttggacaagtaatgaaacagtgattcgcaattatgacgcaaatcaatatggacaaattgaagtcgcattattacaacttagaattgcaattcataagtcaccattagatacggcaaaagtgtcacatgcttggacaacttttaaatcaaatattgatcatgtcgataaaaaaagtaatacgtctgcaaatgatcaataccatgtatcacaattaaatgatgcgttagagaaggcgattaaagctatcgacgacaatcaattgtcggatgctgatgctgcgcttacacattttatagaaacttggccgtatgttgaaggtcaaattcaaactaaagacggtgctttgtatacgaaaattgaagataaaataccatattatcaaagtgtattagacgaacataataaagcacatgtgaaagatggtttagtagatttaaataaccaaattaaagaggttgttggccatagttatagcttcgtcgatgtgatgattatctttttacgtgaagggctagaagtgttgttaattgtaatgacattgactaccatgacgcgtaatgtaaaagataagaaagggactgcaagtgtgattggtggtgcaattgccggacttgtactgagtattatcttagcaattacgtttgtagaaactttagggaatagtggcattcttcgtgaaagtatggaagcgggattaggtatcgttgcggtcatattaatgtttatcgttggtgtttggatgcacaaacgttcaaatgcaaaacgttggaatgacatgattaaaaatatgtatgctaatgcgattagtaatggtaatttggtattgttagcgacgattggtttaatatctgtgttgcgtgaaggtgtcgaggttatcattttctatatggggatgataggtgagctagcgaccaaagattttattattggtattgctttagctatcgttattttaatcatctttgcattattatttagatttatagttaaattaatacctattttctatatatttagagtgttgtcgatctttatttttattatgggattcaaaatgcttggcgtaagtattcaaaagttacaattattaggtgcgatgccaagacatgttattgaaggattcccaacgattaactggttgggcttttatccaagttatgaaccattgatagcacaaggtgcttatattatggtagttgctatct

SEQ ID NO: 4763 - DNA, 3687 bp, Staphylococcus aureus
atgggaaaatttggattgaatttctttaagccaacagaaaaatttaatgggaattggtcgatcctagaaagtaaaagtagagaatgggaaaaaatgtacagagaacgttggagccacgataaagaagtaagaacaacacatggtgttaactgtacaggctcatgttcttggaaagtatttgtgaaaaatggtgtgattacctgggaaaatcaacaaactgactatccaagttgtggtccggatatgcctgaatatgaaccgagaggatgtccacgaggtgcgtcattctcttggtatgaatacagtccgcttcgaatcaaatatccatatattcgtggaaaactctgggatttatggactgaagcattagaagaaaacaatggtaatcgcgttgctgcatgggcgtctattgttgaaaatgaagacaaagccaaacaatataagcaagcccgaggtatgggagggcacgtgcgttcaaattggaaagacgttacagagataatcgcagcacaattactgtatacaataaaaaaatatggtccagatcgaatcgcaggatttacacctattccagcgatgtcaatgattagttatgcagcaggtgctcgattcatcaatttgcttggtggtgaaatgcttagtttttatgactggtatgcagatttaccacctgcctctccacaaatttggggagagcaaacagatgtgcctgaatcaagtgactggtataacgcatcatacattattatgtggggctctaatgtacctttaacacgtactccggatgcacattttatgactgaagtccgctataaaggtacaaaagtcatttcagtagcaccagattacgcagaaaatgtgaaatttgcagataactggctagcaccgaatcctggttcagatgctgcaattgcacaagcaatgacgcatgttattttacaagaacattatgttaatcaacctaatgaacgctttataaattacgctaaacaatatacagatatgccgtttcttatcatgctggatgaagatgaaaatggatataaagcgggtcgatttttaagagcgagtgacttaggtcaaacaacagagcaaggcgaatggaagccagttattcatgatgcaatcagcgatagtttagtagtacctaatggcacaatgggtcaacgttgggaagaaggtaagaagtggaacttaaaactagaaacagaagatggttctaaaattaaccctacattatcaatgacagaaggtggatacgaattagaaacaattcaattcccatactttgatagtgatggagatgggatattcaatcgtccaattccaactcgacaagtcactttagcaaatggtgacaaagtccgtattgctacaatttttgacttaatggcaagtcaatatggcgtgcgtcgttttgatcataaattagaatcaaaaggatacgacgatgcagaatcaaaatatacacctgcttggcaagaagccatttcaggcgtaaaacaaagtgttgtcattcaagtagcgaaagaatttgcgcaaaacgctatcgatactgaagggcgttcaatgattatcatgggtgcgggtattaaccattggtttaactcagatacgatttatcgttcaatcttaaacttagttatgttatgtggctgtcaaggtgtgaacggtggcggttgggctcactatgtgggacaagaaaaatgtcgtccgattgaaggatggagtactgtcgcatttgcgaaagactggcaaggaccaccacgtttgcaaaacggaacaagttggttctattttgcaacagaccaatggaaatatgaagagtcaaatgtagatcgtttaaaatctccattagctaaaacagaggagttaaagtatcaacatccagctgattataatgttttagcagctagacttggttggttaccatcatatccacaatttaataaaaatagtttgttgtttgcagaagaagctaaagatgaaggtatagattcaaatgaagcgattttgcaacgtgcaattgatgaagtgaaatcaaaacaaacacaatttgcaatagaagatcctgatttgaaaaagaatcatccaaaatcattatttatatggcgttcaaacttaatttcaagttctgcaaaaggtcaagaatactttatgaagcatttacttggcacaaaatcagggttattagctacaccaaatgaagatgaaaagccagaagaaattacgtggcgtgaagaaacaacaggtaagttagatttagtggtctctttagacttcagaatgacggcaacaccgttatattctgacattgttttgccggcagcgacttggtatgaaaaacatgatttatcatcaacggatatgcatccatatgtacatcctttcaatcctgccattgatccgttatgggaatcgcgttcagactgggatatttataaaacgttggcaaaagcattttcagaaatggcaaaagactatttacctggaacgtttaaagatgttgtgacaactccacttagtcatgatacaaagcaagaaatttcaacaccatacggcgtagtgaaagattggtcgaagggtgaaattgaagcggtacctggacgtacaatgcctaactttgcaattgtagaacgcgactacactaaaatttacgacaaatatgtcacgcttggtcctgtacttgaaaaagggaaagttggagcacatggtgtaagtttcggtgtcagtgaacaatatgaagaattaaaaagtatgttaggtacgtggagtgatacaaatgatgattctgtgagagcgaatcgtccacgtattgatacagcacgtaatgtagctgatgcaatactaagtatttcatctgctacgaatggtaaattatcacaaaaatcatatgaagatctcgaagaacaaactggaatgccgttaaaagatatttctagcgaacgcgctgctgagaaaatttcgtttttaaatataacttcacaaccacgagaagtaataccgacagcagtattcccaggttcaaataaacaaggtcgacgatattcaccatttacaacgaatatagaacgtctagtaccttttagaacattaacaggacgtcaaagttattatgtggatcacgaagttttccaacaatttggggagagcttaccagtatataaaccgacattgccgccaatggtatttgggaatagagataagaaaattaaaggtggtacagatgctttggtactgcgttatttaacgcctcatggaaaatggaatatacactcaatgtatcaagataataagcatatgttgacactatttagaggtggtccaacggtttggatatcaaatgaagatgctgaaaaacacgatatccaagataatgattggctagaagtgtataaccgtaatggtgttgtaacggcaagagcagttatttcgcatcgtatgcctaaaggtacaatgtttatgtatcatgcacaagataaacatattcaaacgcctgggtcagaaattacagatacacgtggtggttcacacaacgcgccgactagaatccatttgaaaccaacacaactagtcggaggatacgcacaaattagttatcactttaattattatggaccaattgggaaccaaagggatttatatgtagcagttagaaagatgaaggaggttaattggcttgaagat

SEQ ID NO: 4764 - DNA, 936 bp, Staphylococcus aureus
atgtctgtagaggaatatggcaaggtttacttgataggtgcgggtccaggtaatccgaattatttgacgaaaaaggctgagcgtttaatacgtgaagcggatgtcattctatatgatcgattagtgaatccgttaattttacaatatgcgaatttgactactgaaattatcgatgttggtaaaaagccgtatgcaaaacatattcagcaagaaaaaataaatgactgtatcgtggaagcagcgcgtcgatataacaaggttgttagacttaaaggtggcgatccagcgatatttggtcgtgtgcaagaagaagtcgacacactaaatgaacatcatattgcgtttgaaattgtaccaggggtgacatcagcgagcgcagcagttgctactatgcagacaggtttgacaatgcgtacagttgctaaaagtgtgacattttctacaggtcactttaaagattcagaagaaaatgaagtggatgtcaattccttagtgaatggtggcacgttagcaatttatatgggggtaaaacgtttagggaaaattatcacacagatacaacaatacacagatattgattacccgatagcgattgtctttcaagcatcgtgttttaacgagtttgttgttaaggggcgtttaagtaatattatttcaaaattgcaacactattcaattgaggcgaaaccaggtatatgtattataggggaagttgttgattatactgaaaacactcctaaatcatatgatcctatgaagcaattttatgtagtaagtggttctaaacatgacgcccttatgctctgtgaacatttatatgacgaaggttatggctgtttgctaaacccaaatgatacatcgaatggcacatatcattcgtcgcaatatgattactatgatgcatttattaagcagcaagaaaatgtaacatatatt

SEQ ID NO: 4765 - DNA, 876 bp, Staphylococcus aureus
tataataatatactcaaggcaccaataaacgaccgtgattcaattttcactaaagaaatattagtaccttttaaaaagaaatttgaggtacaacatatgcctatttataatgatgacaaacagacaatgagtgcgattcaatttttagatgcctttcaaatttctcccaaagatttacgcatgtctgaccaaatgtcaatacaatacctgaataatgatttctggagtaattgcgaaaaatatttaaaagttgctatagatcaattttcaaattatagtatctcatctcaagtttctaactatcatttcacagtattacttggagatcgccaaaaaccacttatgtatctaaataaaaatcgcggtggtgatggtggcataccaggttatattatgatttatttagtgccgagtacaagtacaattaattctatgaaaagcttaattgcacatgaagtaaatcataatatgcgctatcaatatattgattgggatggcggaagtttgattgaattgattattgcagaaggattagctgaaaactatgtagaatcattgtatggtaaagcgcatattggaccgtgggtaacaaatactaattgaagtcgtgataacgtaaaaattaaaaatactatttataatcatttacatttaaagcatatatttgaatcgatgccttatctctatggtgatgatattaataaacttcaaggtaggcctatcgttggcttatctcatgctgccgggtatgcatgtggctatcacttggtaaaatactttttacaaaaaacaaacatacctattgaagttgctacaacacttccagcacaaaaaataataaatgaggtgactgaattttggcatacacatacactt

SEQ ID NO: 4766 - DNA, 1737 bp, Staphylococcus aureus
atggcaaaaataaaagcaaatgaagcattagttaaagcattacaagcatgggatatagatcacttgtatggtattccaggagactcaatcgacgcagtagtcgatagtttacgtacagtgagagatcaatttaaattttatcatgtacgtcatgaagaagtagcaagcttagcggctgctggttacacaaaattaactggtaaaatcggtgtggcattaagtatcggtggccctggtttaattcatttattaaatggtatgtatgatgccaaaatggataatgtaccgcaattaatattatctggacaaacgaatagtacagcacttggaacgaaagcattccaagaaacaaatttacaaaaattatgtgaagatgtagccgtttataatcaccaaattgaaaaaggtgacaatgtgtttgaaatcgttaacgaagcaattcgtacggcatatgaacaaaaaggtgtagctgttgttatttgtcctaacgacttattaactgaaaaaattaaagatacaacgaataaaccagtagatacatcaagaccaacagtagtatcaccaaaatataaagacatcaaaaaagcggttaaactaattaataaaagtaaaaagcctgtcatgttaattggtgtaggtgcgaaacatgcgaaagatgagctacgtgaatttattgaaatggctaaaattcctgtcattcattcattaccagctaaaacaatcttgccggatgatcatccatatagtatcggtaacttaggtaaaatcggtaccaaaacatcttatcaaacaatgcaggaagcggatttattaattatggttggtacaaactatccatatgtggattacttacctaagaaaaatattaaagccattcaaattgacacaaatcctaaaaatatcggacatcgtttcaatattaatgtaggaattgttggagatagtaaaattgcgttgcatcagttaactgaaaatattaaacatgttgctgaaagaccattcttaaacaaaacgttagaacgtaaagcggtttgggataaatggatggaacaagataaaaataataatagtaaaccattacgtccagaacgattaatggcatcaatcaataaatttattaaagatgatgcagtgatttcagcagatgtaggtacagcaacagtttggtcaactcgatacttaaaccttggtgtaaataacaagttcatcatttcaagttggttaggtacaatgggttgcggtcttccaggtgcaattgcatcaaaaattgcatatccaaatagacaagccatcgcaattgctggtgacggtgcattccaaatggtaatgcaagacttcgctacagcagtacaatatgatttacctttaactgtatttgtacttaataacaaacagttagcatttattaaatatgaacaacaagcagctggtgaattagaatatgcagttgatttttctgatatggatcatgcaaaatttgctgaggcagcaggtggtaaaggttatacaattaagagtgctagcgaagtagatgctatagtcgaagaggcattagcacaagatgtaccaacgattgtagatgtatatgttgatcctaatgctgcgccattaccaggtaaaattgtaaatgaagaagcgcttggttatggtaagtgggcatttagatcaattactgaagataaacatttagatttagatcaaattccaccaatttcagtggcagcaaaacgtttctta

SEQ ID NO: 4767 - DNA, 2061 bp, Staphylococcus aureus
atgtttaagaaattgtttggacaattgcaacgtatcggtaaagcattaatgttacctgttgcgattttaccagcagctggtattttattagcgtttggtaacgcaatgcacaacgaacaattagtagaaattgcaccatggttaaaaaacgatatcattgtaatgatttcgtcggtcatggaagcagcaggacaagttgtatttgataacttgccattattatttgcagttggtacagcacttggattagcaggaggagacggtgttgcagcattagcagcgctagtaggttacttaattatgaatgcaacaatggggaaagtgttgcacattacaattgatgacattttctcatatgccaaaggggcaaaagaattaagtcaagcagcgaaagaaccagcacatgctttagtattaggtattccaacgttacaaacgggtgtgtttggtggtattatcatgggtgctttagccgcatggtgttacaacaaattttataatattacactaccaccatttttaggattctttgcaggtaaacgatttgtaccgattgtgacatcggtcgtagcaatcgcaacaggtgtgcttttaagctttgcgtggccaccaattcaagatggattaaatagtttatcgaatttcttattaaataaaaatttaacattaacaacgtttatattcggtattattgaacgctcattaattccatttggtttacatcatattttctattcaccgttctggtttgaattcggaagttatacaaatcacgcaggtgaattggttcgtggtgaccaacgtatttggatggcacaattgaaagatggcgtaccatttactgctggtgcatttactactggtaaatatccatttatgatgtttggtttaccagcggcggcatttgctatttataaaaatgcacgaccagaacgtaaaaaagtcgtgggtggtttaatgttatcagcaggattaactgcatttttaactggtatcactgagccattagaattttcattcttatttgtagcaccagtactttatggaattcacgtattattagctggtacatcattcttagtaatgcatttattaggcgttaaaattggtatgacattctcaggtggtttcatagattatattttatatggtttattaaactgggatcgttcacacgcattattagttattccagtcggtattgtatatgctatcgtgtattacttcttattcgactttgcaattcgtaagtttaaattgaaaacaccaggtcgtgaagatgaagaaactgaaattcgtaactctagtgtcgcaaaattaccatttgatgtcttagatgcaatgggtggaaaagaaaacattaaacatttagatgcatgtattacacgtctacgcgtagaagtggttgataaatcaaaagtagatgtagcaggtattaaagctttaggcgcatcaggtgtattagaagttggaaacaatatgcaagctatctttggtccaaaatcagatcaaattaaacatgatatggccaagattatgagtggtgaaattacgaaaccaagtgaaacgacagtgactgaagaaatgtcagatgaaccagttcacgtagaagcacttggaacaacagacatctatgcaccaggtatcggtcaaatcattccattatcagaagtacctgatcaagtgttcgctggtaaaatgatgggtgatggtgttggctttatccctgaaaaaggtgaaattgtagcaccgtttgatggtacagtgaaaacaatcttccctacgaaacatgcgataggattagaatctgaaagtggcgtcgaagtacttattcatattggtatcgatacagtgaaactgaatggtgaaggattcgaaagtctgattaacgttgatgaaaaagtaacacaaggtcaaccattaatgaaagtgaatttagcatacttgaaagcacacgcaccaagcatcgttacaccaatgattattacaaatcttgaaaataaagaacttgtcattgaagatgtacaagatgctgatccaggtaagctaattatgacagtc

SEQ ID NO: 4768 - DNA, 1937 bp, Staphylococcus aureus
tcaaaagtcaatgtgcctgaattaaagcctgtacaaagtaagcaagctgtgagtgaaagaatgcctgcgagtcaagccacaccatcatcaagatctgattcacaagagtcaaatacaaatgcatataaaacaaataatatgacatcaaacaatgttgagaacaatcaacttattggtcatgcagaaacagaaaatgattatcaaaatgcacaacaatattcagagcagaaaccttctgttgattcaactcaaacggaaatatttgaagaaagtcaagatgataatcaattggaaaatgagcaagttgatcaatcaacttcgtcttcagtttcagaagtaagcgacataactgaagaaagcgaagaaacaacacatccaaacaatactagtggacaacaagataatgatgatcaacaaaaagatttacagtcatcattttcaaataaaaatgaagatacagctaatgaaaatagacctcggacgaaccaacaagatgttgcaacaaatcaagctgtacaaacatctaagccgatgattcgtaaaggcccaaatattaaattgccaagtgtttcattactagaagaaccacaagttattgagtcggacgaggactggattacagataaaaagaaagaactgaatgacgcattattttactttaatgtacctgcagaagtacaagatgtaactgaaggtccaagtgttacaagatttgaattatcagttgaaaaaggtgttaaagtttcaagaattacggcattacaagatgacattaaaatggcattggcagcgaaagatattcgtatagaagcgcctattccaggaactagtcgtgttggtattgaagttccgaaccaaaatccaacgacagtcaacttacgttctattattgaatctccaagttttaaaaatgctgaatctaaattaacagttgcgatggggtatagaattaataatgaaccattacttatggatattgctaaaacgccacacgcactaattgcaggtgcaactggatcagggaaatcagtttgtatcaatagtattttgatgtctttactatataaaaatcatcctgaggaattaagattattacttatcgatccaaaaatggttgaattagctccttataatggtttgccacatttagttgcaccggtaattacagatgtcaaagcagctacacagagtttaaaatgggccgtagaagaaatggaacgacgttataagttatttgcacattaccatgtacgtaatataacagcatttaacaaaaaagcaccatatgatgaaagaatgccaaaaattgtcattgtaattgatgagttggctgatttaatgatgatggctccgcaagaagttgaacagtctattgctagaattgctcaaaaagcgagagcatgtggtattcatatgttagtagtacgcaaagaccatctgtcaatgtaattacaggtttaattaaagccaacataccaacaagaattgcatttatggtatcatcaagtgtagattcgagaacgatattagacagtggtggagcagaacgcttgttaggatatggcgatatgttatatcttggtagcggtatgaataaaccgattagagttcaaggtacatttgtttctgatgacgaaattgatgatgttgttgattttatcaaacaacaaagagaaccggactatctatttgaagaaaaagaattgttgaaaaaaacacaaacacaatcacaagatgaattatttgatgatgtttgtgcatttatggttaatgaaggacatatttcaacatcattaatccaaagacatttccaaattggctataatagagcagcaagaattatcgatcaattagagcaactcggttatgtttcgagtgctaatggttcaaaaccaagggatgtttatgttacggaagcagatttaaataaagaataa

SEQ ID NO: 4769 - DNA, 2661 bp, Staphylococcus aureus
atggctgaattacctcaatcaagaataaatgaacgaaatattaccagtgaaatgcgtgaatcatttttagattatgcgatgagtgttatcgttgctcgtgcattgccagatgttcgtgacggtttaaaaccagtacatcgtcgtatactatatggattaaatgaacaaggtatgacaccggataaatcatataaaaaatcagcacgtatcgttggtgacgtaatgggtaaatatcaccctcatggtgacgcatctatttataaagcaatggtacgtatggctcaagatttcagttatcgttatccgcttgttgatggccaaggtaactttggttcaatggatggagatggcgcagcagcaatgcgttatactgaagcgcgtatgactaaaatcacacttgaactgttacgtgatattaataaagatacaatagattttatcgataactatgatggtaatgaaagagagccgtcagtcttacctgctcgattccctaacttattagccaatggtgcatcaggtatcgcggtaggtatggcaacgaatattccaccacataacttaacagaattaatcaatggtgtacttagcttaagtaagaaccctgatatttcaattgctgagttaatggaggatattgaaggtcctgatttcccaactgctggacttattttaggtaagagtggtattagacgtgcatatgaaacaggtcgtggttcaattcaaatgcgttctcgtgcagttattgaagaacgtggaggcggacgtcaacgtattgttgtcactgaaattcctttccaagtgaataaggctcgtatgattgaaaaaattgcagagctcgttcgtgacaagaaaattgacggtatcactgatttacgtgatgaaacaagtttacgtactggtgtgcgtgtcgttattgatgtgcgtaaggatgcaaatgctagtgtcattttaaataacttatacaaacaaacacctcttcaaacatcatttggtgtgaatatgattgcacttgtaaatggtagaccgaagcttattaatttaaaagaagcgttggtacattatttagagcatcaaaagacagttgttagaagacgtacgcaatacaacttacgtaaagctaaagatcgtgcccacattttagaaggattacgtatcgcacttgaccatatcgatgaaattatttcaacgattcgtgagtcagatacagataaagttgcaatggaaagcttgcaacaacgcttcaaactttctgaaaaacaagctcaagctattttagacatgcgtttaagacgtctaacaggtttagagagagacaaaattgaagctgaatataatgagttattaaattatattagtgaattagaagcaatcttagctgatgaagaagtgttattacagttagttagagatgaattgactgaaattagagatcgtttcggtgatgatcgtcgtacagaaattcaattaggtggatttgaaaacttagaggacgaagacttaattccagaagaacaaatagtaattacactaagccataataactacattaaacgtttgccggtatctacatatcgtgctcaaaaccgtggtggtcgtggtgttcaaggtatgaatacattggaagaagattttgtcagtcaattggtaactttaagtacacatgaccatgtattgttctttactaacaaaggtcgtgtatacaaacttaaaggttacgaagtgcctgagttatcaagacagtctaaaggtattcctgtagtgaatgctattgaacttgaaaatgatgaagtcattagtacaatgattgctgttaaagaccttgaaagtgaagacaacttcttagtgtttgcaactaaacgtggtgtcgttaaacgttcagcattaagtaacttctcaagaataaatagaaatggtaagattgcgatttcgttcagagaagatgatgagttaattgcagttcgcttaacaagtggtcaagaagatatcttgattggtacatcacatgcatcattaattcgattccctgaatcaacattacgtcctttaggccgtacagcaacgggtgtgaaaggtattacacttcgtgaaggtgacgaagttgtagggcttgatgtagctcatgcaaacagtgttgatgaagtattagtagttactgaaaatggttatggtaaacgtacgccagttaatgactatcgcttatcaaatcgtggtggtaaaggtattaaaacagctacgattactgagcgtaatggtaatgttgtatgtatcactacagtaactggtgaagaagatttaatgattgttactaatgcaggtgtcattattcgactagatgttgcagatatttctcaaaatggtcgtgcagcacaaggtgttcgcttaattcgcttaggtgatgatcaatttgtttcaacggttgctaaagtaaaagaagatgcagaagatgaaacgaatgaagatgagcaatctacttcaactgtatctgaagatggtactgaacaacaacgtgaagcggttgtaaatgatgaaacaccaggaaatgcaattcatactgaagtgattgattcagaagaaaatgatgaagatggacgtattgaagtaagacaagatttcatggatcgtgttgaagaagatatacaacaatcatcagatgaagaa

SEQ ID NO: 4770 - DNA, 1825 bp, Staphylococcus aureus
atggcacatttatctgtgaaattgcggcttttaatactagcattaatcgattcactgatagtgacattttcagtattcgtaagttattacattttagaaccgtatttcaaaacatattctgtcaaattattaatattggcagctatatcactattcatatcgcatcatatttcagcatttatttttaatatgtatcatcgagcgtgggaatatgccagtgtgagtgaattgattttaattgttaaagctgtgacgacatctatcgttattacgatggtggtcgtgacaattgttacaggcaatagaccgttttttagattgtatttaattacttggatgatgcacttgattttaataggtggctcaaggttattttggcgtatttatcggaaataccttggaggtaagtcatttaataagaagccaactttagttgttggtgctggtcaagcaggttcaatgctgattagacaaatgttgaaaagtgacgaaatgaaacttgaaccggtattagcagtcgatgatgacgaacataaacgcaatatcacaattactgagggtgtaaaagtccaaggtaaaattgcggatattccagaactagtgaggaaatataagattaaaaaaatcatcattgcaattccaactattggtcaagagcgtttgaaagaaattaataatatttgccatatggatggcgttgagttattgaaaatgccaaatatagaagacgtcatgtctggtgagttagaagtgaaccaacttaaaaaagttgaagtagaagatttactaggcagagatcctgttgaattagatatggatatgatatcaaatgaattgacgaataaaactattttagttacgggtgcaggtggttcaataggatcagaaatttgtagacaagtttgtaatttctatccagaacgtattattctacttggccatggtgaaaacagtatttatttaatcaatcgtgaattgcgaaatcgcttcggaaaaaaatgttgatatcgttcctattatagcggatgtgcaaaatagagcgcgtatgtttgaaattatggaaacgtataaaccatacgcagtttatcatgcagcagcacacaagcacgtgccgttaatggaagacaaccctgaagaagcagtacgtaataatattttaggtacgaaaaatactgctgaagctgctaaaaatgcagaggtaaagaaattcgttatgatttctacggataaagccgttaatccgcctaatgtcatgggagcttcaaagcgaattgcagaaatgattattcaaagtttaaatgatgaaacgcatcgaacaaattttgttgcagtgagatttggtaatgtacttggatcgagaggatctgtgattccacttttcaaaagtcaaattgaagaaggtgggccagttactgtgacacatcctgaaatgacacgttactttatgacaattcctgaagcttctagactagttttgcaggcaggggcattagcagaaggtagcgaagtatttgtgctagatatgggagaaccagtgaaaattgtagatttggcacgtaatttaattaagctaagtggtaaaaaagaagacgacatacgcattacttatacagggattagacccggcgaaaaaatgtttgaagagcttatgaataaagatgaggttcatcctgaacaagtatttgaaaaaatttatcgtggcaaagtacaacatatgaaatgtaatgaagttgaagcgattattcaagacatcgtcaatgactttagtaaagaaaaaattattaactatgccaatggcaaaaagggagataattatgttcgatga

SEQ ID NO: 4771 - DNA, 624 bp, Staphylococcus aureus
atgaggatagcgattgaaaagataattggtttgctgaaaaaccagtcctctaaagaatcgaatgttaagattcatcgcttggcgtatattacaaactcaaaatttgatggcaataactatatagatagatggtgtaaaatcaggaattctcacattggtgaatacagttatattggatttggtagtgattttaataatgtagaagtaggaagatattgttcgatatcttcggatgtaaaaattgggttaggaaaacatcctacacacttttttagctcatcaccgattttttattctaataataatccatttaacataaagcaaaagtttatagactttaatgaccaaccaagccgtacaacaattaaaaatgatgtgtggattggtgcaaatgtaattattatggatggtttaacaataaatactggtgcagtcatagcagccggctcagttgttactaaaaatgtaggagcatatgaggttgttggtggtgttcctgcaaaagtgattaagaagcgatttgacaataaaacaattgaaaaacttttggaaagcaagtggtgggagaaaacgcctgacaaactaaaaggattttcggttgaatatttaaataaaaaggatact

SEQ ID NO: 4772 - DNA, 725 bp, Staphylococcus aureus
tcattgaatatggaaactttagaattacaaggcgctaaattacgataccaccaagtcggacaaggacccgtgctcatctttattcctggtgcaaacggtaccggagacatttttctgcctcttgcagaacagttaaaagaccattttactgttgtagccgttgatcgtcgtgattatggagaaagcgagttaactgaaccactccctgattccgcttcaaaccctgacagtgattatcgtgtcaaacgcgacgcacaggacattgccgaacttgcaaagtcattaagtgatgaacctgtctatatattaggttcaagttcaggttcaatcgttgcgatgcatgtgttaaaagattaccctgaagtcgttaaaaagattgcatttcacgaaccaccaattaatacatttttaccagacagtacttattggaaagataaaaatgatgacattgtgcatcaaattttaacagaaggcttagaaaaaggcatgaaaacatttggcgaaacattaaatatcgcaccaattgatgcaaaaatgatgtctcaacctgctgatactgaagaaggacgtatagaacagtacaaacgtacgatgttctggtcagaatttgaaattagacaatatacgcattcagatattactttggatgatttcacaaaatacagcgataaaatcaccctactaaatgggacagattctagaggctccttcccacaagatgttaa

SEQ ID NO: 4773 - DNA, 787 bp, Staphylococcus aureus
ttgaaaacagtaagtcaattaatagatatgaaacaaaagcaaactaaaatttctatggtaacagcttatgattttccaagtgctaaacaagtggaagcagcgggtattgatatgattcttgttggggattcacttggtatgactgtattaggttatgaaagtaccgtacaagtgacgttagcagatatgattcatcacggtcgtgcagtaagaagaggcgcaccaaatacatttgtagttgttgatatgccgattggtgcagtaggcatctctatgacacaagacttaaatcatgctctaaagctttatcaggagacgaatgcaaatgcaattaaagcagaaggagcgcatattacaccatttattgaaaaagcaacggcaattggtattcctgttgttgcacatttaggagttaacacctcaaagtgttggcgttatggggtataaattacaaggtgcaacgaaagaagcagcggagcaacttattttagacgcgaaaaatgtagaacaagctggtgcagttgcgttagtacttgaagcaattccaaatgatttagcagaagaaattagcaagcacttaacaattccagtcattggtattggtgcaggaaaaggtacagatggtcaagtattggtttatcacgatatgttaaattatggtgttgaacataaagcgaaatttgtgaagcaatttgctgattttagtgttggtgtggatggtttaaaacaatacgatcaagaagttaaatctggtgcatttccatcagaagaatatacgtataaaaag

SEQ ID NO: 4774 - DNA, 333 bp, Staphylococcus aureus
aaagaacaacaattctcgaatctagtaagatcttatcgtaaagaatacgtgggtaaaggacccaatagtattcgagtgtcgtttaaagataattgggcgattgcacatatgacaggtgttttgagtaaagttgagagtttttacctaaacgacaaacgcaatgaatcgatgctccattatacacgcacagagaagattaaacagatgtataaagaaatagatgtaaatgagatggaaagtcttgtaggcgctaagtttgtaaaattatttacagatattgatttgaatgatgatgaagtcatttcaatatttgttttcgataagtcaatagaa

SEQ ID NO: 4775 - DNA, 1005 bp, Staphylococcus aureus
aaaatcgtagcattatttccagaagcagtagaaggtcaagaaaatcaattacttaatactaaaaaagcattaggattaaaaacatttttagaggaaagaggacatgagttcattatattagcagataatggtgaagacttagataaacatttaccagatatggatgtgattattagtgcgccattttatcctgcatatatgactcgtgaacgtattgaaaaagcaccgaacttgaaattagcaattacagcaggtgtaggatctgaccatgtagatttagcggcagcaagtgaacacaatattggtgtcgttgaagttacaggaagtaatacagttagtgtggcagaacatgcggttatggatttattaatacttcttagaaactatgaagaaggtcatcgtcaatcagtagaaggtgaatggaacttgtctcaagtaggtaatcatgcgcatgaattacaacacaaaacaattggtatttttggatttggtcgaattggacaacttgttgctgaaagattagcgccatttaatgtaacattacaacactatgatccaatcaatcaacaagaccataaattgtctaaatttgtaagctttgatgaacttgtttcaacaagtgatgcgattacaattcatgcaccattaacaccagaaactgataacttatttgataaagatgttttaagtcgtatgaaaaaacacagttatttagtgaatactgcacgtggtaaaattgtaaatcgcgatgcgttagttgaagcgttagcatccgagcatttacaaggatatgctggtgatgtttggtatccacaacctgcacctgctgatcatccatggagaacaatgcctagaaatgctatgacggttcactattcaggtatgactttagaagcacaaaaacgtattgaagatggagttaaagatattttagagcgtttcttcaatcatgaacctttccaagataaagatattattgttgcaagtggtcgtattgctagtaaa

SEQ ID NO: 4776 - DNA, 694 bp, Staphylococcus aureus
attggtataattggtgccatggaagaagaagtaacaatattaaaaaataaattaacacaattaagcgaaatttcagttgcacatgttaaattttatactggcattttaaaagatagagaagtagtgattacccaaagtggcattggaaaagttaatgctgcaatttctacgacattattaattaataagtttaaaccggacgtcattattaatacaggttctgctggagctttagatgaaagtttaaatgtaggtgacgttcttataagtgatgatgtaaaatatcatgatgcagacgcaacagcatttggttatgaatatggacaaataccacagatgccggtagcatttcaatcaagtaaacctttaatagaaaaagtatctcaagttgtacaacaacaacaattaacagctaaagtaggcttaattgtaagtggtgatagctttatcggtagtgttgaacaacgccaaaaaattaaaaaagcatttccaaatgcgatggcggttgaaatggaagcaactgcaattgcacaaacatgttatcaatttaatgtaccatttgttgtagttcgtgcagtttcagacttagcaaatggagacagcggaaatgagcttcgaagcatttttagaaaaagcagctgtatcatcaagtcaaactgttgaagcattagtgtctcaattataaaaaggtaaa

SEQ ID NO: 4777 - DNA, 2253 bp, Staphylococcus aureus
ctatttgattattcaatgatcaaaggtactgttgaagcgatattgtttcaaaacagtgataatttttatacagtgcttaaagtagatactattgaaacaaatgaagactttgatacaatgccaactgttgtagggtttcttccgaatattgttgaaggcgatgtctacacatttaaagggcaagttgttgatcatccacgttatggtaaacaattaaaagcagagacttttgaaaaagaaatgccacaaacgaaagaagcaattataagttatttatctagtgatttgtttaaaggtgtaggtaaaaagacagctcaaaatattgttaatacattaggtgacaatgcgataaatgatatattagatgaccattcagtgctagaaaaagtttcgggattatctcaaaagaaacagaaacaaattgcagaacaaatttcagcaaatcaagaatctgaaaaaataatgattcgtttacatgatttagggtttggtcctaaactttcaatggcaatttatcagttttatctcggcgatacactgactattttagatcgaaatccatatcaattgatttatgatattaaaggtattggttttaataaagcagatcaacttgctagaaatattggtatcgcttataacgataatgaacgattaaaagctgcgttgctctatacgttagaagaagaatgtattaaacagggacatacatatttgcctatcaatgttgttatagatttaacggttgatgtattaaattatcaagatgaagaggtcatcgaacctgaaaaattagacgaaatgttgcaatacttaaatgaggaaaaacgactaattattgacaatgaacaagttgcaattccaagtttgtattattctgaaatcaaaagtgttcaaaacttattcagaataaagacgcatacaaataaacttacagaaattgaacagtcagatttacaaatgcatattggtgaaatagaagatgcgaatcaagtgaactatgcagcttcacaaaaagaagctttgcaaacggctatcaattctaaggtgatgctattaaccggtggaccgggaacaggaaaaacgacagtaattaaaggtattgttgaattatatgctgagattcatggcttatcattagattatgatgattatgtcaatgatgattatccagttgtattagcagcgccaacaggaagagcgtctaagagactacaagagtcaactggattagaagcaatgacgattcatcgtttaataggttggaatcaagacacaaagccagaggatatattagaaaatgaaataaacgcacgactcataatcattgatgagatgtctatggtagatacttggttgttccaccaatttttaagtgcagttcctttagatgcacaattgatatttgtaggtgatgaggaccaattgccttctgtaggtcctggtcaagtatttaaagatttaattgaatcgaaagctataccacgagtaaatctgactgaagtatatcgtcaacaagatggttcaagcattatagaattagcacatcgaatgaagttgggtcagaaaattgatattacacagcgttttcatgatagaagttttattaactgtcaggcaaaccaaataccaacagttgttgagaaggtagttactagtgctgttaataaagggtatactatggctgatattcaagtgcttgcaccaatgtataaaggaaatgccggtattaaacgtttaaatcaagttttacaagatattttaaaccctaaaaagaaagacacacgagaaattgagtttggtgatgtagtctttagaaaaggtgacaaagtattacaacttgttaataggccaaatgataacatattcaatggtgacataggagttattgttggtattttttgggcgaaagaaaatgcccttaataaagatgtacttgttgtggattttgaaggtaatgaaattacatttacgaaacaagatatgatggaattaacacatgcttattgtacatcaatccataaatcacaaggttcagaatttcctattgttatcatgcctattgttaaacagtattttagaatgttacaaagaccgatattatatactggtttaactagagcgaaaacgagtttagttttacttggtgatccggaagcatttgatattggattgaaaacaaatggtcaagcgcgtttaacacaattatgtacattgttgaaaaattattttaattcagaagatgaagaaatg

SEQ ID NO: 4778 - DNA, 549 bp, Staphylococcus aureus
atgaacattgaaaaagcaaaacggcttgcaaaagagaaactgccagagaaacgttataatcattctttaagagttgcagaaacagcgattaaattggcagaaatttatgatggagacactagtaaagtagaattagcaggtgtattacatgatttctgtaaatatgatgatttaggtaaaatgtatcaaattgttcgacaatacgaattaggtaatgatctactgagttatggtagtgaaatattgcatggccctgtgtgtgcagcaatcatggaacatgaatatggtatcaatgatgaggaagtattaatggctatcaaataccatactactggacgtcaacaaatgacaaaaactgaaaaactgatttttattgcagattacatcgaacctggaagaacaatcccaggagttgatgatattcgagatatggcatacaatcaaggtagtttagataagacaatttatgaaatttctaaacgcacagtactatttttaatacagaaagatattacggtatataataagacgattgactgtttaaattat

SEQ ID NO: 4779 - DNA, 7311 bp, Staphylococcus aureus
attatcaatcaaacgacaaatccaacgcttaacccagatgaaataacacgtgcattaactcaagtgactgatgctaaaaatggcttaaacggtgaagctaaattggcaactgaaaagcaaaatgctaaagatgccgtaagtgggatgacgcatttaaacgatgctcaaaaacaagcattaaaaggtcaaatcgatcaatcgcctgaaattgctacagtgaaccaagttaaacaaacagcaacgagcctagatcaagcaatggatcaattatcacaagctattaatgataaagctcaaacattagcggacggtaattacttaaatgcagatcctgacaaacaaaatgcgtataaacaggcagtagcaaaagctgaagcattattgaataaacaaagtggtactaatgaagtacaagcacaagttgaaagcatcactaatgaagtgaacgcagcgaaacaagcattaaatggtaatgacaatttggcaaatgcaaaacaacaagcaaaacaacaattggcgaacttaacacacttaaatgatgcacaaaaacaatcatttgaaagtcaaattacacaagcgccacttgttacagatgtcactacgattaatcaaaaagcacaaacgttagatcatgcgatggaattattaagaaatagtgttgcggataatcaaacgacattagcgtctgaagattatcatgatgcaactgcgcaaagacaaaatgactataaccaagctgtaacagctgctaataatatcattaatcaaactacatcgcctacgatgaatccagatgatgttaatggtgcaacgacacaagtgaataatacgaaagttgcattagatggtgatgaaaaccttgcagcagctaaacaacaagcaaacaacagacttgatcaattagatcatttgaataatgcgcaaaagcaacagttacaatcacaaattacgcaatcatctgatattgctgcagttaatggtcacaaacaaacagcagaatctttaaatactgcgatgggtaacttaattaatgcgattgcagatcatcaagccgttgaacaacgtggtaacttcatcaatgctgatactgataaacaaactgcttataatacagcggtaaatgaagcagcagcaatgattaacaaacaaactggtcaaaatgcgaaccaaacagaagtagaacaagctattactaaagttcaaacaacacttcaagcgttaaatggagaccataatttacaagttgctaaaacaaatgcgacgcaagcaattgatgctttaacaagcttaaatgatcctcaaaaaacagcattaaaagaccaagttacagctgcaactttagtaactgcagttcatcaaattgaacaaaatgcgaatacgcttaaccaagcaatgcatggtttaagacagagcattcaagataacgcagcaactaaagcaaatagcaaatatatcaacgaagatcaaccagagcaacaaaactatgatcaagctgttcaagccgcaaataatattatcaatgaacaaactgcaacattagataataatgcgattaatcaagcagcgacaactgtgaatacaacgaaagcagcattacatggtgatgtgaagttacaaaatgataaagatcatgctaagcaaacggttagtcaattagcacatctaaacaatgcacaaaaacatatggaagatacgttaattgatagtgaaacaactagaacagcagttaagcaagatttgactgaagcacaagcattagatcaacttatggatgcattacaacaaagtattgctgacaaagatgcaacacgtgcgagcagtgcatatgtcaatgcagaaccgaataaaaaacaatcctatgatgaagcagttcaaaatgctgagtctatcattgcaggattaaataatccaactatcaataaaggtaatgtatcaagtgcgactcaagcagtaatatcatctaaaaatgcattagatggtgttgaacgattagctcaagataagcaaactgctggaaattctctaaatcatttagatcaattaacaccagctcaacaacaagcgctagaaaatcaaattaataatgcaacaactcgtggcgaagtagcacaaaaattaactgaagcacaagcacttaaccaagcaatggaagctttacgtaatagcattcaagatcaacagcaaacggaagcgggtagcaagtttatcaatgaagataaaccacaaaaagatgcttaccaagcagcagttcaaaatgcaaaagatttaattaatcaaactaacaatccaacgcttgataaagcacaagttgaacaattgacacaagctgttaaccaagctaaagataacctacacggtgatcaaaaacttgcagacgataaacaacatgcggttactgatttaaatcaattaaatggtttgaataatccgcaacgtcaagcacttgaaagccaaataaacaacgcagcaactcgtggcgaagtagcacaaaaattagctgaagcaaaagcgcttgatcaagcaatgcaagcattacgtaatagtattcaagatcaacaacaaacagaatctggtagcaagtttatcaatgaagataaaccgcaaaaagatgcttaccaagcagcagttcaaaatgcaaaagatttaattaaccaaacaggtaatccaacactcgacaaatcacaagtagaacaattgacacaagcagtaacaactgcaaaagataatctacatggtgatcaaaaacttgctcgtgatcaacaacaagcagtaacaactgtaaatgcattgccaaacttaaatcatgcacaacaacaagcattaactgatgctataaatgcagcgcctacaagaacagaggttgcacaacatgttcaaactgctactgaacttgatcacgcgatggaaacattgaaaaataaagttgatcaagtgaatacagataaggctcaaccaaattacactgaagcgtcaactgataaaaaagaagcagtagatcaagcgttacaagctgcagaaagcattacagatccaactaatggttcaaatgcgaataaagacgctgtagaccaagtattaactaagcttcaagaaaaagaaaatgagttaaatggtaatgagagagtcgctgaagctaaaacacaagcgaaacaaactattgaccaattaacacatttaaatgctgatcaaattgcaactgctaaacaaaacattgatcaagcgacgaaacttcaaccaattgctgaattagtagatcaagcaacgcaattgaatcaatctatggatcaattacaacaagcagttaatgaacatgctaacgttgagcaaactgtagattacacacaagcagattcagataaacaaaatgcttataaacaagctattgctgatgctgaaaatgtattgaaacaaaatgcgaataagcaacaagtggatcaagcacttcaaaatattttaaatgcaaaacaagcattaaatggtgatgaacgtgtagcacttgctaaaacaaatggtaaacatgacatcgaccaattgaatgcattaaacaatgctcaacaagatggatttaaaggtcgcatcgatcaatcaaacgatttaaatcaaatccaacaaattgtagatgaggctaaggcacttaatcgtgcaatggatcaattgtcacaagaaatcactgacaatgaaggacgcacgaaaggtagcacgaactatgtcaatgcagatacacaagtcaaacaagtatatgatgaaacggttgataaagcgaaacaagcacttgataaatcgactggtcaaaacttaactgcaaaacaagttatcaaattaaatgatgcagtcactgcagctaagaaagcattaaatggtgaagaaagacttaataatcgtaaagctgaagcattacaaagattggatcaattaacacatctaaacaatgctcaaagacaattagcaatccaacaaattaataatgctgaaacgctaaataaagcatctcgagcaattaatagagcaactaaattagataatgcaatgggtgcagtacaacaatatattgacgaacagcaccttggtgttatcagcagcacaaattacatcaatgcagatgacaatttgaaagcaaattatgataatgcaattgcgaatgcagcacatgagttagataaagtgcaaggtaatgcaattgcaaaagctgaagcagagcaattgaaacaaaatattatcgatgctcaaaatgcattaaatggagaccaaaaccttgcaaatgccaaagataaagcaaatgcgtttgttaattcgttaaatggattaaatcaacagcaacaagatcttgcacataaagcaattaacaatgccgatactgtatcagatgtaacagatattgttaataatcaaattgacttaaatgatgcaatggaaacattgaaacatttagttgacaatgaaattccaaatgcagagcaaactgtcaattaccaaaacgctgacgataatgctaaaacaaacttcgatgatgccaaacgtctagcaaatacattgctaaatagtgataacacaaatgtgaatgatatcaatggcgcaatccaagcagtcaatgatgcaatccataatcttaatggtgatcaacgactacaagatgctaaagacaaggcaattcaatctattaatcaagctttagctaataagctaaaagaaatcgaagcttcaaatgcgacggatcaagacaagcttattgcgaaaaataaagcagaagaattggcaaacagcatcatcaacaacattaataaagcaacaagtaatcaggctgaatctcaagttcaaacagcaggcaaccacgcgattgaacaagtgcatgccaatgaaataccaaaagcaaaaattgatgccaataaagacgttgataagcaagttcaagcattaattgacgaaattgatcgaaatccaaatctaacagataaggaaaaacaagcacttaaagatcgtattaatcaaatacttcaacaaggtcataacggcattaacaatgcgatgactaaagaagaaattgaacaagccaaagcacaacttgcgcaagcattacaagacatcaaagatttagtgaaagctaaagaagatgcgaaacaagatgttgataaacaagttcaagctttaattgacgaaatcgatcaaaatccaaatctaacagataaggaaaaacaagcacttaaagatcgtattaatcaaatacttcaacaaggtcataacgacattaacaatgcgctgactaaagaagaaattgagcaggcaaaagcacaacttgcacaagcattgcaagacatcaaagatttagtgaaagctaaagaagatgcgaaaaatgcaataaaagccttagctaatgcgaagcgtgatcaaatcaattcaaatccagatttaacacctgagcaaaaagcaaaagcgctcaaagaaattgacgaagctgaaaaacgagcactacaaaacgttgagaatgctcaaactatagatcaattaaatcgaggattaaacttaggtttagatgacattagaaatacacatgtatgggaggttgatgaacaacctgctgtaaatgaaatttttgaagcaacacctgagcaaatcctagttaatggtgaactcattgtacatcgtgatgacatcattacagaacaagatattcttgcacacataaacttaattgatcagctttcagcagaagtcatcgatacaccatcaactgcaacgatttctgatagcttaacagcaaaagttgaagttacattgcttgatggatcaaaagtgattgttaatgttcctgtaaaagttgtagaaaaagaattgtcagtagtcaaacaacaggcaattgaatcaatcgaaaatgcggcacaacaaaagattaatgaaatcaataatagtgtgacattaacactggaacaaaaagaagctgcaattgcagaagttaataagcttaaacaacaagcaattgatcatgttaacgatgcacctgatgttcattcagttgaagaaattcaacaacaagaacaagcgcatattgaacaatttaatccagaacaatttacgattgaacaagcaaaatcaaatgcaattaaatcgattgaagatgcaattcaacatatgattgatgaaatcaaagctcgtactgatctaacagataaagagaagcaagaagctattgctaagttaaatcaattaaaagaacaagcaattcaagcgattcaacgtgcgcaaagcatcgatgaaataagtgagcaattggaacaatttaaagctcaaatgaaagcagctaatccaacagcaaaagaactagctaaacgcaagcaagaagctattagtagaattaaagacttttcaaatgaaaaaataaatagtattcgaaatagtgaaattggcacagctgatgaaaaacaagcagcaatgaatcaaattaacgaaattgtgcttgaaacaattagagatattaataatgcgcatacattacagcaagttgaggctgcattgaacaatggtattgctcgaatttcagcagtacaaattgtaacatctgatcgtgctaaacaatcgtcaagtactggaaatgaatctaatagccatttaacaattggttatggaactgcaaatcatccatttaacagttcgactattggacataaaaagaaacttgatgaagatgatgacattgatccacttcatatgcgtcactttagtaataatttcggtaatgttattaaaaacgctattggtgtggtgggtatctctggtttactagctagtttctggttcttcattgccaaacgtcgtcgtaaagaagatgaagaggaagaattagaaataagagataataataaagattcaataaaagagactttagacgatacaaaacatttaccacttttatttgtgaaacgtcgcagaaaagaagatgaagaagatgttactgttgaagaaaaagattcgctaaataatggcgagtcactcgataaagttaaacatacgccgttcttcttaccaaaacgtcgtcgtaaagaagatgaagaagatgtggaagttacaaatgaaaacacagatgaaaaagtgttgaaagataacgaacattcaccactcttattcgcaaaacgacgcaaagataaagaggaagatgttgaaacaacaactagtattgaatctaaagatgaggacgttcctttattattggctaaaaagaaaaatcaaaaagataaccaatccaaagacaaaaagtcagcatcaaaaaatacttctaaaaaggtagcagctaaaaagaagaaaaagaaagctaagaaaaat

SEQ ID NO: 4780 - DNA, 7302 bp, Staphylococcus aureus
atgggtgcattacgtacaagtatccaaaatgataatacgacgaaaacaagtcaaaattatcttgatgcatctgacagcaacaaaaataattacaatactgctgtaaataatgcaaatggtgttattaatgcaacgaacaatccaaatatggatgctaatgcgattaatggcatggcaaatcaagtcaatacaacaaaagcagcgttaaatggtgcacaaaacttagctcaagctaaaacaaatgcgacgaacacaattaacaacgcacatgacttaaaccaaaaacaaaaagatgcattaaaaacacaagttaacaatgcacaacgtgtatctgatgcaaataacgttcaacacactgcaactgaattgaacagtgcgatgacagcacttaaagcagctattgctgataaagaaagaacaaaagcaagcggtaattatgtcaatgctgatcaagaaaaacgtcaagcgtatgattcaaaagtgactaacgctgaaaatatcattagtggtacaccgaatgcgacattaacagtcaatgacgtaaatagtgcggcatcacaagtcaatgcggctaaaacagcattaaatggtgataacaacttacgtgtagcgaaagagcatgccaacaatacaattgacggcttagcacaattgaataatgcacaaaaagcaaaattaaaagaacaagttcaaagtgcaactacattagatggtgttcaaactgttaaaaatagttctcaaacgttgaatacagcgatgaaaggcttaagagatagtattgcgaatgaagcaacaattaaagcaggtcaaaactacactgacgcaagtccaaataatcgtaacgagtacgacagtgcagttactgcagcaaaagcaatcattaatcaaacatcgaacccaacgatggaaccaaatactattacgcaagtaacatcacaagtgacaactaaagaacaggcattaaatggtgcgcgaaacttagctcaagctaagacaactgcgaaaaacaacttgaataacttaacatcaattaacaatgcacaaaaagatgcgttaacgcgtagcattgatggtgcaacaacagtagctggtgtaaatcaagaaactgcaaaagcaacagaattaaataacgcaatgcatagtttacaaaatggtatcaatgatgagacacaaacaaaacaaactcagaaatacctagatgcagagccaagtaagaaatcagcttatgatcaagcagtaaatgcagcgaaagcaattttaacaaaagctagtggtcaaaatgtagacaaagcagcagttgaacaagcattgcaaaatgtgaacagtacgaagacggcgttgaacggtgatgcgaaattaaatgaagctaaagcagctgcgaaacaaacgttaggtacattaacacacattaataatgcacaacgtacagcgttagacaatgaaattacacaagcaacaaatgttgaaggtgttaatacagttaaagccaaagcgcaacaattagatggtgctatgggtcaattagaaacatcaattcgtgataaagacacgacgttacaaagtcaaaattatcaagatgctgatgatgctaaacgaactgcttattctcaagcagtaaatgcagcagcaactattttaaataaaacagctggcggtaatacacctaaagcagatgttgaaagagcaatgcaagctgttacacaagcaaatactgcattaaacggtattcaaaacttagatcgtgcgaaacaggctgctaacacagcgattacaaatgcttcggacttaaatacaaaacaaaaagaagcattaaaagcacaagtaacaagtgcaggacgtgtatctgcagcaaatggtgttgaacatactgcgactgaattaaatactgcgatgacagctttaaagcgtgccattgctgataaagctgagacaaaagctagtggtaactatgtcaatgctgatgcgaataaacgtcaagcatatgatgaaaaagttacagctgccgaaaatatcgttagtggtacaccaacaccaacgttaacaccagcagatgttacaaatgcagcaacgcaagtaacgaatgctaagacgcagttaaacggtaatcataatttagaagtagcgaaacaaaatgctaacactgcaattgatggtttaacttctttaaatggtccgcaaaaagcaaaacttaaagaacaagtgggtcaagcgacgacgttgccaaatgttcaaactgttcgtgataatgcacaaacattaaacactgcaatgaaaggtctacgagatagcattgcgaatgaagcaacgattaaagcaggtcaaaactacacagatgcaagtcaaaacaaacaaactgactacaacagtgcagtcactgcagcaaaagcaatcattggtcaaacaactagtccatcaatgaatgcgcaagaaattaatcaagcgaaagaccaagtgacagctaaacaacaagcgttaaacggtcaagaaaacttaagaactgcgcaaacaaatgcgaagcaacatttgaacggcttaagtgacttaactgacgctcaaaaagatgcagtgaaacgtcaaatcgaaggtgcaacgcatgttaatgaagtaacacaagcacaaaataatgcggatgcattaaatacagctatgacgaacttgaaaaatggtattcaagatcagaatacgattaagcaaggtgttaacttcactgatgccgacgaagcgaaacgtaatgcatatacaaatgcagtgacgcaagctgaacaaattttaaataaagcacaaggtccaaatacttcaaaagacggtgtcgaaactgcgttagaaaatgtacaacgtgctaaaaacgaattgaacggtaatcaaaatgttgcgaacgctaagacaactgcgaaaaatgcattgaataacctaacatcaattaataatgcacaaaaagaagcattgaaatcacaaattgaaggtgcgacaacagttgcaggtgtaaatcaagtgtctacaacggcatctgaattaaatacagcaatgagcaacttacaaaatggtattaatgatgaagcagctacaaaagcagctcagaaatatactgatgcagatagagaaaaacaaactgcatacaatgacgctgtaacagcagctaaaacgttattagataaaacagctggttcaaatgacaataaagcagctgttgaacaagcattacaacgtgtgaatactgctaaaacagcattaaatggtgacgagcgattaaatgaagcgaagaacacagctaaacaacaagtagcgacaatgtcacacttaactgatgctcaaaaagcaaacttaacatcgcaaatcgaaagtggtacgactgttgcaggtgttcaaggtattcaagctaatgccggtactttagatcaagcaatgaatcaattaagacaaagtattgcttctaaagatgcgactaaatcaagcgaagattatcaagacgcgaatgcagatttacaaaatgcatacaatgatgcggtaactaatgctgaaggtattattagtgcaacgaataaccctgaaatgaatcctgatacaattaaccaaaaagcgagccaagtgaacagtgcgaagtctgcattgaacggtgatgaaaaattagcagcagcaaaacaaactgcgaaatcagatatcggtcgtttgacagacttgaacaatgcacaacgaactgcggcaaatgctgaagtggatcaagcaccaaatcttgcagctgtcacagcggctaaaaataaagcaacatcgttaaacacagcgatgggtaatttgaaacatgcacttgctgaaaaggataatacgaaacgtagtgtcaattacacagatgcggatcaaccaaaacaacaagcgtatgatactgcggttacacaagcagaagcaattactaatgctaatggcagcaacgcgaatgaaacacaagttcaagcagcactaaaccaattgaatcaagctaaaaatgacttgaatggtgataataaagttgctcaagcaaaagagtcagcgaaacgtgcattagcttcatatagtaacttgaataatgcgcaatcaactgcagcaactagtcaaattgacaatgcaacgacagtagcaggcgtaactgctgcacaaaatactgctaatgaattaaatacagcaatgggtcaacttcaaaatggtataaatgaccaaaacactgttaaacaacaagtgaactttacagatgctgaccaaggtaagaaagatgcttacacaaatgctgttacgaatgctcaaggtattttagataaagcacacggtcaaaatatgacgaaagcacaagttgaagctgcattaaatcaagtaacgactgctaagaatgctttaaacggtgacgcaaatgtaagacaagcaaaatcagatgcgaaagcaaacttaggtacattaacacacttaaataatgcacaaaaacaagatttaacatcacaaatcgaaggcgcaacaacagtcaacggtgtaaatggtgttaaaacgaaagcacaagacttagatggtgcaatgcaacgattacaatcagctatagcaaataaagatcaaactaaagcgagcgaaaattacatcgacgcagatccaactaagaaaacagcatttgataatgctatcacacaagctgaatcttacttaaataaagatcacggtgcgaataaagataagcaagctgttgaacaagcaattcaaagtgtaacgtctactgaaaatgctttgaacggtgacgcgaacttacaacgcgctaaaactgaagctatacaagctatcgataacttgacacatttgaatacaccacaaaaaacagcattaaaacaacaagtgaacgctgcgcaacgtgtatcaggtgtaactgatctgaaaaatagtgctacatcacttaataatgcgatggatcaattaaaacaagcaattgctgatcatgacacaattgtagctagtggtaattacactaacgcgagtcctgataagcaaggtgcttatactgatgcatataatgctgcgaaaaacattgtaaatggttcgcctaatgtgattacaaatgcagcagatgttacagcagcaacacaacgtgttaataatgctgaaacaggtttaaacggtgatacaaacttagcaactgcgaagcaacaagctaaagatgcattacgtcaaatgacacatttatctgatgcacaaaaacaaagtattactggtcaaattgatagcgcgacacaagtaactggcgttcaaagtgtgaaagacaacgcgacaaatcttgataatgcaatgaatcaacttcgaaatagtattgcgaataaagatgatgtaaaagcgagtcaaccatatgttgatgcagatagagataaacaaaatgcatacaatacagcagttacaaatgctgaaaatatcattaatgcaacgagtcagccgacacttgatccatctgcagtaacacaagcagctaatcaagtgagcactaacaaaactgcgcttaatggtgcacaaaacttagcgaataaaaagcaagaaacgactgctaacatcaaccaattaagtcatttaaataatgctcaaaagcaagatttaaatacgcaagtgacaaatgcaccaaatattagcacagtaaatcaagtgaaaactaaagctgaacaattagatcaagcaatggaacgtttaatcaacggaatccaagacaaagatcaagtgaaacaaagtgttaactttacagatgcagatccagaaaaacaaacagcatacaacaatgcggtaactgctgctgaaaatattattaatcaagcaaatggtacaaatgcgaaccaatcacaagttgaagcagcactttcaactgtaacaactacgaaacaagcgttgaatggtgatagaaaagtaacagatgctaaaaacaatgcaaaccaaacattatctacgttagataacttaaacaatgcacaaaaaggtgctgttactggaaacatcaatcaagcgcacactgtagctgaagtaacgcaagccattcaaaccgctcaggaactgaatacagcgatgggtaacttgaaaaatagcttgaatgataaagacactacacttggcagtcaaaactttgcagatgcagatccagagaagaaaaatgcatacaatgaagcggttcataatgctgaaaatattttaaataaatctacaggtacgaacgtgcctaaagatcaagttgaagcagctatgaatcaagtgaatgctacaaaagcagcgcttaatggtactcaaaaccttgaaaaagctaaacaacacgcaaatacagcaattgacggtttaagccatttaacaaatgcacaaaaagaggcattaaaacaattggtacaacaatcgactactgttgcagaagcacaaggtaatgagcaaaaagcaaacaatgttgatgcagcaatggacaaattacgtcaaagtattgcagataatgcgacaacaaaacaaaaccaaaattatactgatgcaagtcagaataaaaaggatgcgtacaataatgctgtcacaactgcacaaggtattattgatcaaactacaagtccaactttagatccgactgttatcaatcaagctgctggacaagtaagcacaactaaaaatgcattaaatggtaatgaaaacctagaggcagcgaaacaacaagcgtcacaatcattaggttcattagataacttaaataatgcgcaaaaacaaacagttactgatcaaattaatggcgcgcatactgttgatgaagcaaatcaaattaagcaaaatgcgcaaaacttaaatacagcgatgggtaacttgaaacaagcgatagctgacaaagatgctacgaaagcgacagttaacttcactgatgcagatcaagcaaaacaacaagcatataacactgctgttacaaatgctgaaaatatcatttcaaaagctaatggcggcaatgcaacacaagctgaagttgaacaagcaatcaaacaagttaatgctgcaaaacaagcattaaatggtaatgccaacgttcaacatgcaaaagacgaagcaacagcattaattaatagctctaatgaccttaaccaagcacaaaaagacgcattaaaacaacaagttcaaaatgcaactactgtagctggtgtaaacaatgttaaacaaacagcacaagagttaaacaatgctatgacacaattaaaacaaggcattgcagataaagaacaaacaaaagctgatggtaactttgtcaatgcagatcctgataagcaaaatgcatataatcaagcagtagcgaaagctgaagcatta

SEQ ID NO: 4781 - DNA, 3343 bp, Staphylococcus aureus
acaaacaaagtagaaacagaagaagcgccgacagctgagagaaacaaacaaagcagcaacagaagaaacaccagcagttgaagacaccaatgctaagagcaattcaaatgctcaaccatcagaaactgagagaactcaagttgtagatacagttgctaaagatttatataaaaaatctgaagttacagaagcagaaaaagctgaaattgaaaaagtattaccaaaagatatttcaaacttatctaatgaagaaattaaaaaaatagctttaagtgaagtacttaaagaaacagctaacaaagaaaacgcacaaccaagagcaacattccgttcagtaagcagcaatgctagaacaacaaatgttaactattcagcaacagcattaagagcagctgcacaagacacagttactaaaaaaggaactggtaactttactgcgcatggagatataatccataaaacttataaagaagaattccctaatgaaggtaagctaactgcattcaatacaaacttcaatcctgatacaggaactaaaggcgcattagaatataatgataaaatagattttaataaagactttacaattactgttccagtagcaaacaacaaccaaggcaatacaacaggagcagatggctggggcttcatgtttactcaagggaatggccaagacttcttaaaccaaggtggtattttaagagacaaaggtatggcaaatgcatctggttttaaaattgatacggcatataataatgttaatggtaaagtcgataaactcgatgcagataaaacaaacaatctaagtcaaattggcgcagcaaaagttggttacggtacatttgttaaaaatggtgcagatggtgtgactaaccaagttggtcaaaatgccctaaatacaaaagataaacctgtaaataaaataatttatgcagataatacaactaatcatcttgatggtcaattccatggccaaagattaaatgatgtagtattaaattatgatgcagcaacaagtacaataactgctacatatgcaggaaaaacatggaaagctactacagatgatttaggaattgataaatcacaaaaatataatttcttaattacttcaagtcatatgcaaaatagatattctaatggaattatgagaacaaatcttgaaggtgtaacaattacaacgcctcaagctgatttaattgatgatgtggaagtaacgaaacaaccaattcctcataaaactattcgtgagtttgatccaactctagaaccaggctcacctgatgttattgtacaaaaaggtgaagatggagagaaaacaacaactacaccaactaaagttgaccctgatacaggagatgtagttgaacgtggtgaaccaacaacagaagttacaaaaaatccagttgacgagattgtacactttgcacctgaagaagtaccacaaggtcataaagatgagttcgatccaaacttaccaattgacggtacagaagaagtaccaggtaaaccaggcattaagaacccagaaacaggtaaagtggtaacacctccggttgacgatgtcacaaaacatggtccaaaagcaggcgaaccagaggttactaaagaagaaataccattcgagaaaaaacgtgagttcaatccagacttaaaaccaggtgaagagaaagtaacgcaagaaggacaaactggagagaaaacaacaacaacgccaacaacaattaatccattaacgggagaaaaagtaggcgaaggtgaaccaacaacagaagtaacaaaagaaccagtagatgaaatcacacaattcggtggagaagaagtaccacaaggtcataaagatgagttcgatccaaacttaccaattgacggtacagaagaagtaccaggtaaaccaggcattaagaacccagaaacaggtaaagtggtaacacctccggttgacgatgtcacaaaacatggtccaaaagcaggcgaaccagaggttactaaagaagaaataccattcgagaaaaaacgtgagttcaatccagacttaaaaccaggtgaagagaaagtaacgcaagaaggacaaactggagagaaaacaacaacaacgccaacaacaattaatccattaacgggagaaaaagtaggcgaaggtgaaccaacaacagaagtaacaaaagaaccagtagatgaaatcacacaattcggtggagaagaagtaccacaaggtcataaagatgagttcgatccaaacttaccaattgacggtacagaagaagtaccaggtaaaccaggcattaagaacccagaaacaggtaaagtggtaacacctccggttgacgatgtcacaaaacatggtccaaaagcaggcgaaccagaggttactaaagaagaaattccatatgaaactaaacgcgtattagatccaacaatggaaccaggtagtcctgataaagtagctcaaaaaggtgaaaatggtgaaaaaacaacaacaacaccaactacaattaatccattaacgggagaaaaagtaggcgaaggcgaaccaacaacggaagtaacgaaagaaccaatagacgaaattgttaactatgcacctgaaattattcctcatggtacacgtgaagaaattgatccaaacttaccagaaggtgaaactaaagttatcccaggtaaagatggcttgaaagatcctgaaactggagaaatcattgaagaaccacaagatgaagtaatcatccatggtgctaaagatgattcagattcagatgcggacagcgactcagacgcagatagcgattcagatgcggacagcgactcagattcagacagcgactcagacgcagatagcgactcagacgcagatagcgactctgatgcggacagcgactcagacgcagatagcgactcagacgcagatagcgactcagacgcagacagcgattcagacgcagatagcgactctgatgcggacagcgactcagattcagacagcgattcagacgcagatagcgattcagatgcggacagcgattcagacgcagacagcgattcagacgcagatagcgattctgatgcggacagcgattcagacgcagatagcgattcagattcagacagcgactcagacgcagatagcgattcagacgcagatagcgactctgatgcggacagcgactcagacgcagatagagatcataatgacaaaacagataaaccaaataataaagagttaccagatactggtaatgatgctcaaaataatggcacattatttggttcactaatccgtgcgcttggaggattattcttagttggcagacgtcgtaaaaacaaaaataatgaagaaaaataa

SEQ ID NO: 4782 - DNA, 1773 bp, Staphylococcus aureus
ttcaatagcgactttgattcaatttttcgaagaatgatgaaagatatgcaaggttcaaatcaagtcggaaacaaaaagtactatattaatggtaaagaagtttcacctgaagaactagcgcaactcacacaacaaggtggcaatcactctgctgaacaaagtgcgcaagcttttcaacaagcagcacaaagacaacaagggcaacaaggtggcaacggcaattatttagaacaaattggtcgtaaccttacgcaagaagcacgtgacggtttattagatccagtcattggtcgtgataaagaaattcaagaaactgctgaagttttaagtagacgaactaaaaacaatcctatattagttggagaagctggtgttggtaaaactgcgattgttgaaggtttagcacaggcaatcgttgaaggaaatgtaccagcagcaatcaaagacaaagaaattatttctgtagacatttcatcattagaagctggaacgcaatatcgtggtgcttttgaagaaaatattcaaaaattaatcgaaggtgttaaatcttcacaaaatgccgtactattctttgatgaaatccatcaaattatcggttcaggtgccacaggaagtgattcaggtagcaaagggttatctgatattttgaaacctgcattaagtcgtggtgagatttctattattggtgcaacaacacaagatgaatatcgaaacaatattcttaaagatgctgcattaacgcgcagatttaatgaagtgcttgttaatgaaccaagcgctaaagatactgttgaaattttaaaaggtattcgcgaaaaattcgaagaacaccatcaagtaaaattaccagatgacgtattaaaagcatgtgttgacttatcaattcaatatattccacaacgattattaccagataaagcaatcgatgtgttagatattacagcagcacatttatctgcgcaaagtccagctgtcgataaagttgaaactgaaaaacgaatttctgaattagaaaatgataaacgtaaagcagtaagtgctgaagaatataaaaaagctgacgacattcaaaatgaaatcaaatcattacaagataaattagaaaatagtaatggtgaacatactgctgttgctacagttcatgatatttcagatactattcaacgattaactggtattccagtttctcaaatggatgataacgatattgaacgtttaaaaaatatttctaatcgtttaagaagtaaaatcataggtcaagatcaagctgtagaaatggtttcacgtgcaattcgccgtaatcgtgctgggtttgatgacggcaaccgtccaattggcagtttcctatttgttggccctactggtgttggtaaaacagagcttgctaaacaattagcaattgatttatttggtaataaagatgcactgattcgacttgatatgagtgaatatagtgacacaacagctgtttcaaaaatgattggtacaactgctggttatgttggttatgatgacaattcaaatacgttaactgaaaaagtacgccgtaatccatactcagtcattctatttgatgaaatcgaaaaagcaaatccacaaattttaacattgttattacaagtaatggatgatggtaatttgactgatggtcaaggtaatgtcatcaactttaaaaatacaattattatttgtacatcaaatgctggctttggcaatggcaatgacgctgaagaaaaagatattatgcacgaaatgaaaaaattcttccgccct

SEQ ID NO: 4783 - DNA, 1908 bp, Staphylococcus aureus
atgaaaaagcaaataatttcgctaggcgcattagcagttgcatctagcttatttacatgggataacaaagcagatgcgatagtaacaaaggattatagtgggaaatcacaagttaatgctgggagtaaaaatgggacattaatagatagcagatatttaaattcagctctatattatttggaagactatataatttatgctataggattaactaataaatatgaatatggagataatatttataaagaagctaaagataggttgttggaaaaggtattaagggaagatcaatatcttttggagagaaagaaatctcaatatgaagattataaacaatggtatgcaaattataaaaaagaaaatcctcgtacagatttaaaaatggctaattttcataaatataatttagaagaactttcgatgaaagaatacaatgaactacaggatgcattaaagagagcactggatgattttcacagagaagttaaagatattaaggataagaattcagacttgaaaacttttaatgcagcagaagaagataaagcaactaaggaagtatacgatctcgtatctgaaattgatacattagttgtatcatattatggtgataaggattatggggagcacgcgaaagagttacgagcaaaactggacttaatccttggagatacagacaatccacataaaattacaaatgaacgtattaaaaaagaaatgattgatgacttaaattcaattattgatgatttctttatggaaactaaacaaaatagaccgaaatctataacgaaatataatcctacaacacataactataaaacaaatagtgataataaacctaattttgataaattagttgaagaaacgaaaaaagcagttaaagaagcagatgattcttggaaaaagaaaactgtcaaaaaatacggagaaactgaaacaaaatcgccagtagtaaaagaagagaagaaagttgaagaacctcaagcacctaaagttgataaccaacaagaggttaaaactacggctggtaaagctgaagaaacaacacaaccagttgcacaaccattagttaaaattccacagggcacaattacaggtgaaattgtaaaaggtccggaatatccaacgatggaaaataaaacggtacaaggtgaaatcgttcaaggtcccgattttctaacaatggaacaaagcggcccatcattaagcaataattatacaaacccaccgttaacgaaccctattttagaaggtcttgaaggtagctcatctaaacttgaaataaaaccacaaggtactgaatcaacgttaaaaggtactcaaggagaatcaagtgatattgaagttaaacctcaagcaactgaaacaacagaagcttctcaatatggtccgagaccgcaatttaacaaaacacctaaatatgttaaatatagagatgctggtacaggtatccgtgaatacaacgatggaacatttggatatgaagcgagaccaagattcaataagccatcagaaacaaatgcatataacgtaacaacacatgcaaatggtcaagtatcatacggagctcgtccgacatacaagaagccaagcgaaacgaatgcatacaatgtaacaacacatgcaaacggccaagtatcatacggagctcgtccgacacaaaacaagccaagcaaaacaaacgcatataacgtaacaacacatggaaacggccaagtatcatatggcgctcgcccaacacaaaacaagccaagcaaaacaaatgcatacaacgtaacaacacatgcaaacggtcaagtgtcatacggagctcgcccgacatacaagaagccaagtaaaacaaatgcatacaatgtaacaacacatgcagatggtactgcgacatatgggcctagagtaacaaaa

SEQ ID NO: 4784 - DNA, 1830 bp, Staphylococcus aureus
ttcctcacacaattgaaagataatgttttagtagctgatggcgctataggaaccattttatactctgaaggattagacacctgtccagaagcatataatcttagccatccagataaagttgaacgcatccatcgttcatatattgaagccggtgctgatgtcattcaaaccaatacttatggtgcaaattttgaaaagttaaaacgattcggtcttgaagataaagttaaagcaatacatcaagccgccgttcgcatcgcaaaaaaagcagcaaataaagatacgtatatattaggcacagttggtgggtttagaggtatcaaacaagaggatatcagcttacaaactattctttatcatactgaaattcaaatagacaccttaattgaagaaggcgttgacgcgctacttttcgaaacgtattacgacctagaagagttaacaaatgtcatttcacgaacgagaaagaaatacgacattccaatcattgctcaattaaccgcttcaaacacaaattacttagttaatggtcaggcaatcaatgaaggattaaaacaactcgttcaatgtggtgcaaacatcgtgggactcaattgtcatcatggcccgcaccatatgcaagagtctttcacacatattgaattaccagagcacgcattcttatcttgttatccaaatgccagcttattagatattgaaaatagtgaatttaagtatagtgacaatgcacaatatttcggtcaagttgctcaaaatctaattcgcgaaggtgttcgtttaattggtggttgctgtggtacaacgccagagcacatcaaatttattaaagaatctattcagacacttaaacctgttaatgacaaaaaagtgattccgataccaacgaaagcacttttcaatccatctcaaaataaagttagacaatcattaacatctaaggttcaagaacgtccaaccgttattatcgaattggatacaccgaaacatttagacacggatagattttttgaaaatatcgctaaacttgataaagctaatgtagatgcggtaacactcgcagataattcattggcaactgtcagaattagcaatattgctgctgctagcttaattaagcaatattacaatattgaaccactcgtacatattacatgtcgagaccgaaacttaatcggcttgcagtcccatttacttggattatcgctcattggcgttaacgaaatattagccataactggtgatccttcaaaagttggtcacttaccaggtgcaaccaatgtctatgatgttaattctaaaggattaactgaactcgctctaagatttaatcaaggtattaacactgacggtgatgcgctgaagaaacgtacacacttcaacatcgctggcgcctttaaccctaatgttcgtaaattatatggtgccgtcaaaagattagagaaaaagatagaaagcggaatgtcttattttataacacaacccgtgtacagcaaagagaaaatcattgaaatttaccatgccactaagcacttgaacaaaccatttttcataggcattatgcctatcgcaagttacaaaaacgcactctttttgcataatgaagtgccaggaatcaagatgtcagatgaaattttacaacaatttgaagcagttaaagatgataaagccaaaacacgagaactaagtcttaagctttcaaaggatttaatcgatactgttcatgaatattttaatggtttatacattatcacaccgtttcaaaatgtcgaagattcattagaacttgcagcatactcaaaatctattactgctcacaaggaggcaatatta

SEQ ID NO: 4785 - DNA, 168 bp, Staphylococcus aureus
tatggaataaatgatatagtagaaatgaaaaaacaacatgcgtgtggaacaaaccgttttaagattattagaatgggtgcagacataagaattaaatgtgaaaattgtcaaagaagtattatgattccacgtcaaacgtttgataaaaaacttaaaaaaatcatcgaa

SEQ ID NO: 4786 - DNA, 2074 bp, Staphylococcus aureus
atgttaagaggacaagaagaaagaaagtatagtattagaaagtattcaataggcgtggtgtcagtgttagcggctacaatgtttgttgtgtcatcacatgaagcacaagcctcggaaaaaacatcaactaatgcagcggcacaaaaagaaacactaaatcaaccgggagaacaagggaatgcgataacgtcacatcaaatgcagtcaggaaagcaattagacgatatgcataaagagaatggtaaaagtggaacagtgacagaaggtaaagatacgcttcaatcatcgaagcatcaatcaacacaaaatagtaaaacaatcagaacgcaaaatgataatcaagtaaagcaagattctgaacgacaaggttctaaacagtcacaccaaaataatgcgactaataatactgaacgtcaaaatgatcaggttcaaaatacccatcatgctgaacgtaatggatcacaatcgacaacgtcacaatcgaatgatgttgataaatcacaaccatccattccggcacaaaaggtaatacccaatcatgataaagcagcaccaacttcaactacacccccgtctaatgataaaactgcacctaaatcaacaaaagcacaagatgcaaccacggacaaacatccaaatcaacaagatacacatcaacctgcgcatcaaatcatagatgcaaagcaagatgatactgttcgccaaagtgaacagaaaccacaagttggcgatttaagtaaacatatcgatggtcaaaattccccagagaaaccgacagataaaaatactgataataaacaactaatcaaagatgcgcttcaagcgcctaaaacacgttcgactacaaatgcagcagcagatgctaaaaaggttcgaccacttaaagcgaatcaagtacaaccacttaacaaatatccagttgtttttgtacatggatttttaggattagtaggcgataatgcacctgctttatatccaaattattggggtggaaataaatttaaagttatcgaagaattgagaaagcaaggctataatgtacatcaagcaagtgtaagtgcatttggtagtaactatgatcgcgctgtagaactttattattacattaaaggtggtcgcgtagattatggcgcagcacatgcagctaaatacggacatgagcgctatggtaagacttataaaggaatcatgcctaattgggaacctggtaaaaaggtacatcttgtagggcatagtatgggtggtcaaacaattcgtttaatggaagagtttttaagaaatggtaacaaagaagaaattgcctatcataaagcgcatggtggagaaatatcaccattattcactggtggtcataacaatatggttgcatcaatcacaacattagcaacaccacataatggttcacaagcagctgataagtttggaaatacagaagctgttagaaaaatcatgttcgctttaaatcgatttatgggtaacaagtattcgaatatcgatttaggacttaacgcaatggggctttaaacaattaccaaatgagagttacattgactatataaaacgcgttagtaaaagcaaaatttggacatcagacgacaatgctgcctatgatttaacgttagatggctctgcaaaattgaacaacatgacaagtatgaatcctaatattacgtatacgacttatacaggtgtatcatctcatactggtccattaggttatgaaaatcctgatttaggtacatttttcttaatggctacaacgagtagaattattggtcatgatgcaagagaagaatggcgtaaaaatgatggtgtcgtaccagtgatttcgtcattacatccgtccaatcaaccatttgttaatgttacgaatgatgaacctgccacacgcagaggtatctggcaagttaaaccaatcatacaaggatgggatcatgtcgattttatcggtgtggacttcctggatttcaaacgtaaaggtgcagaacttgccaacttctatacaggtattataaatgacttgttgcgtgttgaagcgactgaaagtaaaggaacacaattgaaagcaagttaa

SEQ ID NO: 4787 - DNA, 405 bp, Staphylococcus aureus
gtaacaacaccaattttagtgaaagcaccaatcgctggtcgtcgtattttacttaaagaagtaagagattcaatttttagagagaaaatggtaggtgaaggcttagcaatcaaagctcatgaagaatccaaagtaatcgcaccgttcaatggtttaatatctatgattgtaccaactaagcatgcagttggtattcaatcagaagacggtgtggacatagtcattcatattggcgtgaatacagttgacttggaaggtaaagggttcaagtgctttgtaaagcaaaatgatcatgttgaagcagggcaaacgttgttgcaattcgaccagcaatatatacaacaacaaggctacaatgctgacgttattgtcgttattagcaactctgccgatttaggaaaagta

SEQ ID NO: 4788 - DNA, 830 bp, Staphylococcus aureus
aattatttggtattgcaatcagattttggacttagtgatggcgctgtaagtgcaatgtatggagttgcatatactgtaagtgatgatatacgtgttgaaaacttaacgcatgatataccaccgtatgacatttgggtagcgtcatatcgtttatatcaaactgtaaaatactggcctaaaggcacagtttttgtatcagtggtagacccgggtgtaggtagtgataggcggacattgcttgcttaacatattcaggtcattacattattacacctgataatggttctttaagtcatattaaacattacgaaggtattaaaaaagttatcgaaattgatgaagtgaaaagccgattgcctcattcggaagaaagtcatacttttcatggtagagatgtttatgcatacaatggtgcgagattagctgcaaataagatagcgtttgaacgtctcggtcaggcaattaatgttgatagtattgaggcattagaaataagagaagtgacaaaaaatgaggattctgttacaggaagcattgatattttagatatcagatttgggtcattatggacaaatattccattggcattcttaaaatccttggaaattgttcatggtaataatttggtggtaacaatttatcatcaagataagaaagtctatcaaaatattattaaatttgcgcgatcgtttgcagatgttaatgtgggtgaacctcttgtgtatgttaactcgctagtaaatattggtgtagcagtcaatcaagactcattttcagatttatatcatattggtactggaaatgattggacgattcatttatctaaagca

SEQ ID NO: 4789 - DNA, 351 bp, Staphylococcus aureus
catcttgcagcagatgaaatatcaatgggtgactatgtttaaactggtggagaattgccagcgatgaccatgactgatgctattgttagactgattccaggtgttttaggtaatgaacagtcacatcaagacgattcattttcagatgggttattagagtttccgcaatatacacgtccgcgtgaatttaagggtctaacagttccagatgttttattgtctggaaatcatgccaatattgatgcatggagacatgagcaaaagttgatccgcacatataataaaagacctgacttaattgaaaaatatccattaactaatgcagataagcaaatattagaaagatataaa

SEQ ID NO: 4790 - DNA, 3050 bp, Staphylococcus aureus
gaggcagaagcagctgaaaacaatattgagaatccaactacattaaaagataatgtccaatcaaaagaagtgaagattgaagaagtaacaaacaaagacactgcaccacagggtgtagaagctaaatctgaagtaacttcaaacaaagacacaatcgaacatgaaccatcagtaaaagctgaagatatatcaaaaaaggaggatacaccaaaagaagtagctgatgttgctgaagttcagccgaaatcgtcagtcactcataacgcagagacacctaaggttagaaaagctcgttctgttgatgaaggctcttttgatattacaagagattctaaaaatgtagttgaatctaccccaattacaattcaaggtaaagaacattttgaaggttacggaagtgttgatatacaaaaaaaaccaacagatttaggggtatcagaggtaaccaggtttaatgttggtaatgaaagtaatggtttgataggagctttacaattaaaaaataaaatagattttagtaaggatttcaattttaaagttagagtggcaaataaccatcaatcaaataccacaggtgctgatggttgggggttcttatttagtaaaggaaatgcagaagaatatttaactaatggtggaatccttggggataaaggtctggtaaattcaggcggatttaaaattgatactggatacatttatacaagttccatggacaaaactgaaaagcaagctggacaaggttatagaggatacggagcttttgtgaaaaatgacagttctggtaattcacaaatggttggagaaaatattgataaatcaaaaactaattttttaaactatgcggacaattcaactaatacatcagatggaaagtttcatgggcaacgtttaaatgatgtcatcttaacttatgttgcttcaactggtaaaatgagagcagaatatgctggtaaaacttgggagacttcaataacagatttaggtttatctaaaaatcaggcatataatttcttaattacatctagtcaaagatggggccttaatcaagggataaatgcaaatggctggatgagaactgacttgaaaggttcagagtttacttttacaccagaagcgccaaaaacaataacagaattagaaaaaaagttgaagagattccattcaagaaagaacgtaaatttaatccggatttagcaccagggacagaaaaagtaacaagagaaggacaaaaaggtgagaagacaataacgacaccaacactaaaaaatccattaactggagtaattattagtaaaggtgaaccaaaagaagagattacaaaagatccgattaatgaattaacagaatacggacctgaaacaatagcgccaggtcatcgagacgaatttgatccgaagttaccaacaggagagaaagaggaagttccaggtaaaccaggaattaagaatccagaaacaggagacgtagttagaccgccggtcgatagcgtaacaaaatatggacctgtaaaaggagactcgattgtagaaaaagaagagattccattcgagaaagaacgtaaatttaatccggatttagcaccagggacagaaaaagtaacaagagaaggacaaaaaggtgagaagacaataacgacgccaacactaaaaaatccattaactggagtaattattagtaaaggtgaatcgaaagaagaaatcacaaaagatccgattaatgaattaacagaatacggaccagaaacgataacaccaggtcatcgagacgaatttgatccgaagttaccaacaggagagaaagaggaagttccaggtaaaccaggaattaagaatccagaaacaggagatgtagttagaccaccggtcgatagcgtaacaaaatatggacctgtaaaaggagactcgattgtagaaaaagaagagattccattcgagaaagaacgtaaatttaatccggatttagcaccagggacagaaaaagtaacaagagaaggacaaaaaggtgagaagacaataacgacaccaacactaaaaaatccattaactggagtaattattagtaaaggtgaaccaaaagaagaaatcacaaaagatccgattaatgaattaacagaatacggaccagaaacgataacaccaggtcatcgagacgaatttgatccgaagttaccaacaggagagaaagaagaagttccaggtaaaccaggaattaagaatccagaaacaggagacgtagttagaccaccggtcgatagcgtaacaaaatatggacctgtaaaaggagactcgattgtagaaaaagaagaaattccattcaagaaagaacgtaaatttaatcctgatttagcaccagggacagaaaaagtaacaagagaaggacaaaaaggtgagaagacaataacgacgccaacactaaaaaatccattaactggagaaattattagtaaaggtgaatcgatagaagaaatcacaaaagatccgattaatgaattaacagaatacggaccagaaacgataacaccaggtcatcgagacgaatttgatccgaagttaccaacaggagagaaagaggaagttccaggtaaaccaggaattaagaatccagaaacaggagatgtagttagaccaccggtcgatagcgtaacaaaatatggacctgtaaaaggagactcgattgtagaaaaagaagaaattccattcgagaaagaacgtaaatttaatcctgatttagcaccagggacagaaaaagtaacaagagaaggacaaaaaggtgagaagacaataacgacgccaacactaaaaaatccattaactggagaaattattagtaaaggtgaatcgaaagaagaaatcacaaaagatccagttaatgaattaacagaattcggtggcgagaaaataccgcaaggtcataaagatatctttgatccaaacttaccaacagatcaaacggaaaaagtaccaggtaaaccaggaatcaagaatccagacacaggaaaagtgatcgaagagccagtggatgatgtgattaaacacggaccaaaaacg

SEQ ID NO: 4791 - DNA, 477 bp, Staphylococcus aureus
ggtacaccagaaacaaaaacagtagagataccgtttgaaacaaaacgtgagtttaatccaaaattacaacctggtgaagagcgagtgaaacaagaaggacaaccaggaagtaagacaatcacaacaccaatcacagtgaacccattaacaggtgaaaaagttggcgagggtcaaccaacagaagagatcacaaaacaaccagtagataagattgtagagttcggtggagagaaaccaaaagatccaaaaggacctgaaaacccagagaagccgagcagaccaactcatccaagtggcccagtaaatcctaacaatccaggattatcgaaagacagagcaaaaccaaatggcccagttcattcaatggataaaaatgataaagttaaaaaatctaaaattgctaaagaatcagtagctaatcaagagaaaaaacgagcagaattaccaaaaacaggtttagaaagcacgcaaaaaggt

SEQ ID NO: 4792 - DNA, 384 bp, Staphylococcus aureus
atgaaagaacgtggctatatcgaacagctttggcgtgaggaaaaatatcatgtattgttacacagtcaacagtcttaccaaatgataaggaatgctttaaaaacggatttatcacttcatcaagttcaacaaatgattgatgttgctttgttaattgaaccgagtataggaagtgtatgtaatgcttttgatcatatgtggggatatttaaaaaaatgtgcgaatgaagaagaaagacaacaatcaaaactacttaaagctgattttattaatggtaaaatcgacacccaaactttattagattttttagcagaacttgctaataaatatgatgttcaatatttactacaaagtcgtgttttaaacacaaaaagaaagagatag

SEQ ID NO: 4793 - DNA, 768 bp, Staphylococcus aureus
atgaaacgattaaacaaattggtattgtatattagttttttgatattagtcattagtttcactgctggttgtggcataggtaaagaagcggaagttaagaaaagctttgaaaaaacattgagtatgtatccgattaaaaatctagaggatttatacgataaagaaggttatcgtgatgacgaatttgataaaaatgataaaggtacatggattattggttctgaaatggttgttcaacctaaaggggaacgtatgaaatcaaaaggtatggttctatatatgaatagaaacactaagactacaaccgggaagtatatagtgagtgaaacacttcatgatgaagatggtagacctaagagtaaagataaagaatatcccgttaaaatggtagacaataaaatcattccaactaaaggtatcaaagacgaaaatataaaaaaagaaatcgagaattttaagttcttcgcgcaatatggcagctttaaagatttgtcgaagtacaaagacggcgatatatcatataatccagaggtaccgagttattcagcaaaatatcaattaactaatgatgactataatgtaaaacaattacgaaaaagatataaaataccaacgaataaagcaccaaagttattgttgaaaggttcgggagacttaaaaggttcatcagttggatataaagacattgaatttacttttgtggagaaaaaaggtgaaaatactttttttactgatagtctacatcttgaaccgagtgaggataaataa

SEQ ID NO: 4794 - DNA, 627 bp, Staphylococcus aureus
gtagaagtatttgcggacggtgcagatattgaagaaatgaaagcagcttataaaaacaaacaagtggatggttttacaacaaatcctagtttaatggctaaagcgggcgtaacagattacaaagcttttgctgaagaagctgtgaaagaaattccagatgcttcaatttcatttgaagtatttgcagacgatttagaaactatggaaaaagaagcagcaattttaaaacaatatggcgaaaatgtatttgttaaaattcctattgtaaatacaagaggtgaatcaacgattcctttaattaaaaaactttcagctgacaatgtgagattaaacgttacggctgtttacacaattgaacaagttaaagaaataactgaagcagtaactgaaggtgtgccaacatatgtttcagtatttgcaggacgtattgcagatacaggcgtagatccattaccattaatgaaagaggctgtaaaagttacgcatagtaaagacggcgttaaattattatgggcaagttgccgcgaattattcaatgtgattcaagctgatgaaattggtgcagatattattacatgcccagcagatgttgtgaaaaaagtgaatacaaacttaggtcgcgatatt

SEQ ID NO: 4795 - DNA, 1473 bp, Staphylococcus aureus
attaaatcacttgaaatttatggttacggtcaatttgttcaacgtaaaattgaatttaataaaaacttcactgaaatttttggtgaaaatgaagcgggtaaatcgacgattcaagcattcatccattcgatattatttggatttccaactaaaaagtctaaagagccaagactagaaccacgtctaggtaaccaatacggtggtaaattagtacttattcttgatgatggcttagagattgaagttgaacgaattaaaggcagtgctcaaggtgatgtgaaagtatatttacctaatggtgctgtgcgtgatgatgcttggttacaaaagaaacttaattatatttctaaaaagacatatcaaggtatcttttcatttgatgtactagggcttcaagacattcatagaaatctaaatgaaaaacaattgcaagattatttattacaagcaggggctttaggatcaactgaattcacgtcaatgcgcgaagtgattaatcgtaaaaaagatgaattatataaaaaatcaggtaaaaatccgatcattaatcaacaaattgagcaattaaaacaactagaaagtcaaattcgtgaagaagaagcaaagctagaaacatatcatcgcttagtagatgatcgagataaatcatcacgtcgattagagaatttaaagcataatttaaatcaattatcaaaaatgcatgaagaaaaacaaaaagaggttgctttacatgatcattcacaagaatggaagtctctagaacaacagttaaatattgagccaatcacattcccagaaaaaggtgtggatcgttacgaaaaagcacgagcgcataagcaatcgttagaaagagatattggtttaagaaatgagcgtttagctcaacttaaagaagaagcgactcaattagagccagttaaacaatctgatattgacgccttcattagtttgaatcaacaagaaaatgaaattaaaaataaagaatttgaacttactgcaatcgaaaaggatattgcgaataaacaacgtgataaagatgaattgcaatcaaatattggttggtctgaaacgcatcatgacgtagatagttcagaggcaatgaaaagttatgtcagtgagcaaatcaagaataaacaagaacaagctgcatacattaaacaattagaacgtagtttagaagaaaataaaatcgaagataatgcggttcatagcgaactagattctgttgaagaaaaaatagttcctgaagagacttttgaaaagaaaaaagaatactcacaacaagtcattgaattaaacgaaaaagagaacttgtatagcaaattgaaagaacgtttcgaaattgagcaacaagaaaaacaaaaacgtcaaaaattgttacgaacaacgtttattcttttaacattagtaggtattggtttaactgccttctcatttatttcaaacaacatgttgtttggtattattttcgca

SEQ ID NO: 4796 - DNA, 813 bp, Staphylococcus aureus
atgacattgttaacagttaaacatttgacgattacagatacctggacagatcaaccactcgtgagtgatgtgaattttacattaactaagggtgaaactttaggcgttattggagaaagtggtagtggtaaatcaatcacttgtaaatcgattattggtttgaatcccgaacgactcggggtgacaggtgaaattatctttgatggtacatcaatgttgtcattatctgaatcgcaattgaaaaagtaccgtggtaaagacattgcgatggtcatgcaacaaggtagtcgtgcctttgacccatcaactactgtcggtaaacaaatgtttgagactatgaaagtacatacgtcaatgtctacacaagaaattgaaaagacattgattgaatatatggattatttaagtttgaaagatcctaaacgtatattaaaatcatacccttacatgttatcaggaggaatgttacagcgattgatgattgctttagcgttagctttgaaaccaaagttaatcattgctgatgagccgacaacggctttagatacaattacacaatatgatgtactggaagcatttatagatattaaaaaacactttgactgtgcgatgattttcatttcacatgatttaacggttattaacaagattgcagaccgtgttgttgtgatgaaaaatggtcagcttattgaacaagggacacgtgaatcagtcttgcatcatccagaacatgtttatacgaagtatttattatcaacgaagaagaagattaatgatcattttaaacatgtgatgaggggtgatgtacatgat

SEQ ID NO: 4797 - DNA, 273 bp, Staphylococcus aureus
ctgactgctatcattgaagctaattaacaactagttgatgacattgctgtggtactatcaaattcagtttcaacagtaatcgttgactaccgtggactaacagtagctgaagttactgacttacgttcacaattacgtgaagctggtgttgagtctaaagtatcactcaacactatggtacgtcgtgcagctgaaaaagctggtatcgaaggcttagctgaattcttaacaggtcctactgctatcgcgacttcaagtgatgatgctgttgct

SEQ ID NO: 4798 - DNA, 544 bp, Staphylococcus aureus
atgatggggtatataaaaagaatggctttatacatgagtgtatttcttttaatcatttttattgttggatgtcgaaatatgaaagatgaacagaaaaaagaagaacaaacaaataaaacagattcaaaagaagaacaaatcaaaaagagttttgagaaaacattagatatgtatccaattaagaatctcgaggagttatacgacaaagaaggataccgagatggcgaatttaaaaagggtgataaagggatgtggacgatatatacagatttcgccaaaagtaataaacaaggtggattgagtaatgaaggtatggtcttatacttagatagaaatacacggactgcaaagggacattattttgttaagacattctataataagggcaaattcccagatagaaaaaattataaagttgaaatgaaaaataataaaattatcttattagataaagtagaagatacaaatctaaaaaagagaatagaaaactttaaattttttggacaatatgcaaaccttaaagaattgaaaaacttcaacaagg

SEQ ID NO: 4799 - DNA, 1035 bp, Staphylococcus aureus
gtcaaagcacccggaaaactttatattgctggagaatatgctgtaacagaaccaggatataaatctgtacttattgcgttagatcgttttgtaactgctactattgaagaaacagaccaatataaaggtaccattcattcaaaagcattacatcataacccagttacatttagtagagatgaagatagtattgtcatttcagatccacatgcagcaaaacaattaaattatgtggtcacagctattgaaatatttgaacaatacgcgaaaagttgcgatatagcgatgaagcattttcatctgactattgatagtaatttagatgattcaaatggtcataaatatggattaggttcaagtgcagcagtacttgtgtcagttataaaagtattaaatgaattttatgatatgaagttatctaatttatacatttataaactagcagtgattgcaaatatgaagttacaaagtttaagttcatgcggagatattgctgtgagtgtatatagtggatggctagcgtatagtacttttgatcatgaatgggttaagcatcaaattgaagatactacggttgaagaagttttaatcaaaaactggcctggattgcacatcgaaccattacaagcacctgaaaatatggaagtacttatcggttggactggctcaccggcgtcatcaccacactttgttagcgaagtgaaacgtttgaaatcagatccttcattttacggtgacttcttagaagattcacatcgttgtgttgaaaaacttattcatgcttttaaaacaaataacattaaaggtgtgcaaaagatggtgcgtcagaatcgtacaattattcaacgtatggataaagaagctacagttgatatagaaactgaaaagctaaaatatttgtgtgatattgctgaaaagtatcacggcgcatctaaaacatcaggcgctggtggtggagactgtggtattacaattatcaataaagatgtagataaagaaaaaatttatgatgaatggacaaaacatggtattaaa

SEQ ID NO: 4800 - DNA, 474 bp, Staphylococcus aureus
atggctgagagaatatcttctaaaattagacgcttagaaaaatcagaagaacaaattaagttagaaagtttaaatgaagttacagaggcaattgcagcgaataaagatagtatattaaaagcaatcaagcttattaaaacattagatgatgcaaaactattagatgctttaaatggtgcaattcgaggacgtcaagtcatcataaataaatttgcagttgaacttaataaagatatttatacagggctattatctaatatggcttcaatggtatttttattaggtgaactcaatgtatcagatttaagcgacttcctaaataaagttaataaaggattacacgttgccaatcaagcgagtccaaatgctaagacaactataagaagtctattgggcgtattgaaagatgacgacatgaaccgtagtttaacatacatgcttaatatgctaaaaggtatgtctcgagaagaataa

SEQ ID NO: 4801 - DNA, 804 bp, Staphylococcus aureus
atgaagtattttgagaaacggtgggaatgtatgaaagcacataaaattttctggttaaacttagcagcaattattattatttcaattgtagtcagtggcgatatgtttttggcaatgaagtgggaacaaattcatttgaaagatggtcttaaaaaagtactaagtacgtatcctattaaaaacttagaaacgctttatgaaattgatggtcacgataatccccattatgaaaataatgatcaagacacatggtatatagaatcctcttattcagttgttggatcagatgagcttttaaaagaagaccgtatgttgttaaaggtagataagaacacacataaaataactggtgaatatgacacaactacaaacgataaaaaaaatgctactgactcgacatacaaaagttatccagtaaaagtagttaataataaaatcgttttcacaaaagacgtaaaagatcccgcgctgaaacaaaaaatcgaaaacaatcaatttttgattcaaagtggtgatttaacaagcattttaaatagcaatgatttgaaagtcacacatgatcctaccactgattattataatttatctggtaagttgtcgaacgataatccaaacgttaaacaattaaaacgtagatataatattcctaaaaacgcatcaacaaaggtggaattaaagggaatgagtgatttaaaaggcaataatcatcaagatcagaaactttatttttatttttcaagtcctggaaaagaccaaatcatttataaagaaagccttacttataataaaataagtgaacattaa

SEQ ID NO: 4802 - DNA, 1518 bp, Staphylococcus aureus
atgacagcttcaacatggaagaaatttgaagtttatgaagttgacaaaaatttaccagtcgaattagtatcatatgattctgataaagattatgcctatactcttttcccagtatctaatggtacgagagaagttaaaattgtgtcatctattgaatatggtgagtgcatccatgaagactatgattatacgctaatggtctttgcacagcctattactaataacccggacgactatgtggatgaagaaacatacaatttacaaaaattattagctccgtatcacaaagctaaaacgttagaaagacaagtttatgaattagaaaaattacaagagaaattgccagaaaaatataaggcggaatataaaaagaaattagatcaaactagagtagagttagctgatcaagttaaatcagcagtgacggaatttgaaaatgttacacctacaaatgatcaattaacagatttacaagaagcgcattttgttgtttttgaaagtgaagaaaatagtgagtcagttatggacggctttgttgaacatccattctatacagcaactttaaatggtcaaaaatatgtagtgatgaaaacaaaggatgacagttactggaaagatttaattgtagaaggtaaacgtgtcactactgtttctaaagatcctaaaaataattctagaacgctgattttcccatatatacctgacaaagcagtttacaatgcgattgttaaagtcgttgtggcaaacattggttatgaaggtcaatatcatgtcagaattataaatcaggatatcaatacaaaagatgatgatacatcacaaaataacacgagtgaaccgctaaatgtacaaacaggacaagaaggtaaggttgctgatacagatgtagctgaaaatagcagcactgcaacaaatcctaaagatgcgtctgataaagcagatgtgatagaaccagagtctgacgtggttaaagatgctgataataatattgataaagatgtgcaacatgatgttgatcatttatccgatatgtcggataataatcacttcgataaatatgatttaaaagaaatggatactcaaattgccaaagatactgatagaaatgtggataaagatgccgataatagcgttggtatgtcatctaatgtcgatactgataaagactctaataaaaataaagacaaagtcatacagctgaatcatattgccgataaaaataatcatactggaaaagcagcaaagcttgacgtagtgaaacaaaattataataatacagacaaagttactgacaaaaaaacaactgaacatctgccgagtgatattcataaaactgtagataaaacagtgaaaacaaaagaaaaagccggcacaccatcgaaagaaaacaaacttagtcaatctaaaatgctaccaaaaactggagaaacaacttcaagccaatcatggtggggcttatatgcgttattaggtatgttagctttattcattcctaaattcagaaaagaatctaaataa

SEQ ID NO: 4803 - DNA, 1914 bp, Staphylococcus aureus
atgttgatggctaaatatcgagggaaaccgtttcaattatatgtaaagttatcgtgttcgacaatgatggcgacaagtatcattttaacgaatatcttgccgtacgatgcccaagctgcatctgaaaaggatactgaaattacaaaagagatattatctaagcaagatttattagacaaagttgacaaggcaattcgtcaaattgagcaattaaaacagttatcggcttcatctaaagaacattataaagcacaactaaatgaagcgaaaacagcatcgcaaatagatgaaatcataaaacgagctaatgagttggatagcaaagacaataaaagttctcacactgaaatgaacggtcaaagtgatatagacagtaaattagatcaattgcttaaagatttaaatgaggtttcttcaaatgttgataggggtcaacaaagtggcgaggacgatcttaatgcaatgaaaaatgatatgtcacaaacggctacaacaaaacatggagaaaaagatgataaaaatgatgaagcaatggtaaataaggcgttagaagacctagaccatttgaatcagcaaatacacaaatcgaaagatgcatcgaaagatacatcggaagatccagcagtgtctacaacagataataatcatgaagtagctaaaacgccaaataatgatggttctggacatgttgtgttaaataaattcctttcaaatgaagagaatcaaagccatagtaatcgactcactgataaattacaaggaagcgataaaattaatcatgctatgattgaaaaattagctaaaagtaatgcctcaacgcaacattacacatatcataaactgaatacgttacaatctttagatcaacgtattgcaaatacgcaacttcctaaaaatcaaaaatcagacttaatgagcgaagtaaataagacgaaagagcgtataaaaagtcaacgaaatattattttggaagaacttgcacgtactgatgataaaaagtatgctacacaaagcattttagaaagtatatttaataaagacgaggcagttaaaattctaaaagatatacgtgttgatggtaaaacagatcaacaaattgcagatcaaattactcgtcatattgatcaattatctctgacaacgagtgatgatttattaacgtcattgattgatcaatcacaagataagtcgctattgatttctcaaattttacaaacgaaattaggaaaagctgaagcagataaattggctaaagattggacgaataaaggattatcaaatcgccaaatcgttgaccaattgaagaaacattttgcatcaactggcgacacgtcttcagatgatatattaaaagcaattttgaataatgccaaagataaaaaacaagcaattgaaacgattttagcaacacgtatagaaagacaaaaggcaaaattactggcagatttaattactaaaatagaaacagatcaaaataaaatttttaatttagttaaatcggcattgaatggtaaagcggatgatttattgaatttacaaaagagactcaatcaaacgaaaaaagatatagattatattttatcaccaatagtaaatcgtccaagtttactagatcgattgaataaaaatgggaaaacgacagatttaaataagttagcaaatttaatgaatcaaggatcagatttattagacagtattccagatatacccacaccaaagccagaaaagacgttaacacttggtaaaggtaatggattgttaagtggattattaaatgctgatggtaatgtatctttgcctaaagcgggggaaacgataaaagaacattggttgccgatatctgtaattgttggtgcaatgggtgtactaatgatttggttatcacgacgcaataagttgaaaaataaagcataa

SEQ ID NO: 4804 - DNA, 798 bp, Staphylococcus aureus
atgatgattcattcaaagaaattaacgctcggtatatgcttggtattactcattatattgattgtaggttatgtcattatgacaaaaacaaatggtcgaaacgcccaaattaaagacacatttaatcaaacattaaaattatatccaaccaaaaatctcgatgatttttacgataaagaaggctttcgagatcaagaatttaaaaagggtgataaaggtacttggatagttaattctgaaatggtaatcgagccaaaaggtaaggatatggaaacgagaggaatggtgctctatatcaatcgcaatactagaaccacaaaagggtattattttataagtgaaatgacagatgacagtaacggcagaccaaaggatgatgaaaaaaggtatccggtaaaaatggaacataataaaatcataccaacgaagccactaccgaatgacaagttaaaaaaagagattgaaaactttaagttctttgtacaatatggcaactttaaagatattaatgattataaagatggtgatatttcatataatcctaatgtaccaagttattcggcaaaatatcaattgaataatgatgattataatgtccaacagttaagaaaaagatatgatattccaaccaaacaagcgccgaaactattattgaaaggcgatggagatttaaaaggttcatccgtaggttctagaagtcttgaatttacctttgtcgaaaataaagaagaaaacatttattttacagattctgtacaatatactccaagtgaggatacaaggtatgagtcaaactga

SEQ ID NO: 4805 - DNA, 789 bp, Staphylococcus aureus
atgatgattcattcaaagaaattaacgctcggtatatgtttggtattactcattatattgattggaggttgtgtcattatgacaaaaacaaatggtcgaaacgctcaaattaaagaaaatttcaacaaaacattaagtgtatatccaaccaagaatctcgatgatttttacgataaggaaggttttcgagatcaagaatttgataaaagagataaagggacttggattatttattctgaaatggttatcgaaccaaaagggaaaaatatggaatcgagaggaatggtgctctatatcaatcgcaatactagaacaacgaagggtaattttattgtcaccgaaataactgaagatagtaaaggatattcacgtagtaaagaaaaaaaatatcctgtcaagatggaaaataatcgaattattccaacaaagcctataccggatgacaagttaaaaaaagagattgaaaactttaagttctttgtacaatatggaaattttaaagattttaaagattataaaaatggtgatatttcatataatcctaatgtgccaagttattctgcaaagtatcaattgaataatgatgactataatgttcaacagttaagaaaacgatatcatattccaaccaaacaagcgcccgaattaaaattgaaaggatccggcaatttaaaaggctcatccgtaggatctaaggatctagaatttacgtttgtagaaaatcaagaagagaatatctatttttcagattcggtcgaatttacacctagcgaggatgataaatcatga

SEQ ID NO: 4806 - DNA, 240 bp, Staphylococcus aureus
atgtctttgagtcattatccaatccaagattgtagtgatctcgtatttgagtggaaggcatttatgaacactatcgctgattttgatgatgaaacattatgctgtattgctaaaacatatgaagatgatacgcgtttcaaagattactttaattcatatgataatcaaaatttagcatcatacatttcagaagctgttaattattttttgagcaatgtgaataagagcgacaatttttaa

SEQ ID NO: 4807 - DNA, 570 bp, Staphylococcus aureus
atgaaagttggcattgacgctggcggtacactaattaaaatcgttcaagagcaagataaccaacgtacttttaaaactgaattaactaaaaatattgatcaagttgtggaatggttaaaccaacagcaaattgaaaaattatgcttaactggaggtaatgcaggtgtcattgctgaaaacatcaacattcctgcacaaatttttgtagagtttgatgctgcatctcaaggactaggtattttgttaaaagagcaaggccatgacttagcagattatatttttgcaaatgttggtaccggtacgtcactacattatttcgacggccaatcacaacgtcgtgtaggcggtatcggtacaggtggaggcatgattcaaggactcggttatttactaagtcaaatcactgattataaacagttaactgacatggcacaacacggtgatcgtaacactatcgatttaaaggttagacatatttataaagataccgaaccacccattcccggtgatttaacagcagctaattttggtcatgtactacatcatttagatgctgattttacaccctag

SEQ ID NO: 4808 - DNA, 204 bp, Staphylococcus aureus
atggataaagaatctgtcgtagcaagtttagctagaaacaaaaagattgctgtagaaacaatggccggtcaaaggtacatcatagaacgcattttacatacaaatgatgaaaaacatattcatattttgaaacctaaagatgtcgtgttagatgtagatagcatcaaagaaattgacgaaaatcatttaaatgatgcaacataa

SEQ ID NO: 4809 - DNA, 1260 bp, Staphylococcus aureus
atgaagcacaataaaatttctggttttcaatgggcaatgacgattttcgtcttctttgtcattacaatggcgttatccattatgctcagagatttccagtctataattggtgtcaaacactttatatttgaagttacagatctagcaccattaattgctgcaatcatttgtatactcgttttcaaatataaaaaggtccaacttgcaggtttaaaattctcaatcagcctgaaagtaattgaacgtctattgctagctttaattttacctttaattattctaattattggtatgtacagctttaatacatttgcagatagctttattttattacaatcaacaggcttatcagtacctattacacacattctgattggacatattctgatggcgttcgtagtagaattcggattccgttcatacttacaaaatattgttgaaacgaaaatgaacacgttctttgcaagtattgttgttggtttgatgtattcagttttctcagcaaatacaacttatggtacagaatttgctgcttataacttcctttatacattctcattctctatgattcttggtgaattaattagagcgactaaaggacgtacaatttatattgcaacgacattccatgcttcaatgacattcggacttattttcttgtttagcgaagaaatcggcgatctattttcaatcaaagtcatcgccatttcaacagcaatcgttgcagtaggatacattggtttaagcttaattatccgaggtattgcatatttaacaacaagacgaaaccttgaagaacttgagcctaataattatttagaccatgtcaatgacgatgaagaaactaatcatactgaggctgaaaaatcttcttcaaatattaaagatgctgaaaaaacaggtgtagctactgcatcaacggttggtgttgctaaaaatgatactgaaaatacagtggctgacgaaccaagcattcatgaaggtactgaaaaaacagaacctcaacatcacataggtaatcaaactgaatctaatcatgatgaagatcatgacatcacttcggagtcagtagaatcagcagaatcagttaaacaagcaccacaaagtgacgatttaacaaacgattcaaatgaagatgaaatagagcaatcattaaaagaacctgcgacttataaagaagacagacgttcatcagttgtaattgatgcagaaaaacatatcgaaaaaactgaagaacaatcttcagataaaaacaaataa

SEQ ID NO: 4810 - DNA, 413 bp, Staphylococcus aureus
cctaatgcattatggggggaacaaaagcagtttgtggctatagcaagtgtattagcactaacccttctgtcattatattagatgaggcgacttctatgttagatcgtcatgcacgtcaatatttattggatttagtgagaacagttaaatcagaacataatattacaatcatttctatgacgcatgatttatctgaggcgatgtaatcagatcatgttatcgttatgaataaagggactgtctataaagaaggctcagcgactgaaattttcgtcaatgcagaagagttcccaagaataggtctagatttgccattcccaatcaacataaatcaaatgctgggacaccatacatcattcttaacttatgaagggctggtcgatcaactatgactatacggtttgccaatgtaa

SEQ ID NO: 4811 - DNA, 538 bp, Staphylococcus aureus
atgagtcgtgttggtaagaaaattattgacatccctagtgacgtaacagtaacttttgatggaaatcatgtaactgttaaaggtcctaaaggtgaattatcaagaactttaaatgaaagaatgacattcaaacaagaagataacacaattgaagttgtaagaccatctgattctaaagaagatagaacaaaccatggtacaactcgtgctttattaaacaatatggtacaaggtgtttctcaaggatacgtataagtacttgaacttgttggtgtaggttaccgtgctcaaatgcaaggtaaagacttaatccttaacgttggttattctcacccagtagaaattaaagctgaagaaaacattactttctcagttgagaaaaacacagtcgttaaagttgaaggtatttcaaaagaacaagttggagcattagcatctaacatccgttcagtaagacctccagagccttacaaaggtaaaggtattcgttaccaaggtgaatacgttcgccgtaaagcagcgtaaaactggtaaataa

SEQ ID NO: 4812 - DNA, 267 bp, Staphylococcus aureus
aatatcaattcagtcattgaaaatgcgaaacgtgttattacaccattatcaccaatttcgatttttgcagcacgaaatccatgggaaggattagaagcggatacgtttgaagatgtcgcaaaatggttacgtgatgttcgagatgtggatattttcccaaataaagcattaatagaaagcgctgtggcacgtggtgaattagatgaaagtgtctttaatcaacttgttactgatatgttacttgaacatcactacaatatcccgcaa

SEQ ID NO: 4813 - DNA, 571 bp, Staphylococcus aureus
cgaacgagaaagttgcaaatgtttaaagaccatgaattgctgattaagaagaaccgtttagttgatcatttaggaggcgcaattctataaagccacattgtccatacacccacaatccgcataaaattgttgctggtgatgaagtaaaagtattatcttacgggtcaacagggttacagttttagaaattgtcaatgatgaagaagcaattgttcaaatgggaattattaaaatgaagttacctattgaagatttagagaaaaaacaaaaagaaaaagttaagccaacgaaaatggttacacgtcaaaatcgtcaaacaattaaaactgaacttgacttacgaggctatcgttatgaggatgctttaattgaactagatcaatatttagatcaagccgttttaagtaattacgaacaagtttatatcattcatggtaaaggtacaggtgcacttcaaaaaggtgtacaacaacatttgaaaaagcataaaagtgttagtgactttagaggtggtatgccaagcgaaggtggatttggcgttaccgttgcaacactaaaataaattataatt

SEQ ID NO: 4814 - DNA, 198 bp, Staphylococcus aureus
  misc_feature (1)...(198): n = A,T,C or G
ataagacgtacagatttagcacaatataaatcaagtgtatttagggncnccagggcaattattccttcatctggtgaataagtacaaatttggatagctaatgatgtattatcaacatatggtcatggagcaattaagccagtaccagcgcaaggtgccagtaatcaattattcgatattaaatatgaattgccatta

SEQ ID NO: 4815 - DNA, 394 bp, Staphylococcus aureus
attaaaattttaaagtaaacggttaaaaataccatgataaccgtaaaccactgtagaaattttcgtagaaaaaactaagtatataaacgcaaagtatatcccccaagttatgtatgatcattatcctggaatttcattggacacaatatatagaaacctgcacttatttaaagatttaggaattattgaaaatacagaacttgatggtgaaatgaagtttagaatcgcttgtacaaaccatcatcatcatcattttatctgtgaaaagtgtgtagatacaaaggtaatagattattgtccaatagatcagataaaattatcactacctggtgttaatattcacaaacacaaactggaagtaaatggtgtatgtgagtcttgccaagatccacac

SEQ ID NO: 4816 - DNA, 219 bp, Staphylococcus aureus
gccataggtccaacgcatctaaggtatattgaatgggatgttcgcgcagcagggatataacatgcaattgacatagctgagcttggggagactgtcgttttagcgtaaaaagaaagagagctatatcgaatcagcccagggcatattaaggtgccacatcaagatgatttaattggccttgaagcagctaacaaaaagttcggtggtggccgtgttgat

SEQ ID NO: 4817 - DNA, 136 bp, Staphylococcus aureus
gtgaaaaacaatcttaggtacggcattagaaaacataaattgggagcagcatcagtattcttaggaacaatgatcgttgttgggatgggacaagacaaagaagctgcagcatcagaacaaaagacaactacagtag

SEQ ID NO: 4818 - DNA, 1267 bp, Staphylococcus aureus
tttgaatactttactctaaacgataaaaggttaaaaaaacaacaaaaagaaaatattactgtcataattggaaatacaccgtattctgctggtcaatctagtgtaaataatgataataaaaaaatgaatatgaaaaattaaatgcaaaaatagcaaatacctatgcaaatttttcaacagcaaatttaaaaaaatcattatatgattcgtatatacaggcttttcgatgggcaactgatagagttggaaaaaaggtattataggatttgtaacaaatggatcatttattgatagtcaaagcactgatggatttagaaaagttttatacgatgaatttaactatctgtacataattaatttgagaggcgaccaacgaacacagggtgaaaaatcaagaaaagaaggtggaaaaatatttggatcaggaagtagagcaccgatagctatatctattttagttaaagatggaagttacaatcacgatatctattataatgacattggtgaatatttaactagagagcaaaaattagatactttaatgaaacatcaatcaattgtgaatttgaaaagtttgaatgttttacccgataaaaacaatgattggattaatcaacgagacataaactatgagaattatttaccaatgtatgattccaaggatattgaaaattctatatatttagatcaatttaatggagtaaattcagcaagagataattgggtaacaaatttttcgaatgaaaaagcattagtaaatgcaaaattacttgtagataactataattctgaaatagatagattaattgatatcttagattcaagagaacgtataaatttagtgaacaaagatgaaacatttattagttggacacgaggacttacccaaaaattttctaaaggaaaaaatatttcaattaatccagagagaattgttaaatttatgcatagaccatttacaaaaaaatggatagtgtacgacaaaaatattatggaaatgccaagtagatattataatataatggagaatactggacaggtgatttatatacaaggacagggaatgaataaagaattctcggctatgatcacggacatattacctaatttccaatttattggtaatggcaaaggctttgctacatacaaaggtaaagatagtttgaggcttgtagataatatttctaattcttttaaaaagaaaataaatcttaattcagaagagatagtatattatatatatgcaattttgcatcataaatattat

SEQ ID NO: 4819 - DNA, 939 bp, Staphylococcus aureus
atgttaacgacagaaaaactagttgaaacattaaagttagatttaatcgctggtgaagaaggactatcgaagccaattaaaaatgctgatatatcaagaccgggcttagagatggcaggttatttttcacattatgcgtcagatagaatacaactattaggaacaacggaactatcgttttacaatttattaccagataaggatcgcgcaggtcgtatgcgtaaactatgcagaccagaaacgcctgcaattattgtgacacgtggattgcagccaccagaagaattagttgaagctgcaaaagaattaaataccccacttatagttgctaaagatgcgactacaagtttaatgagtcgcttaacaacgtttttagagcatgcacttgcaaagacgacatctttacatggtgttttagtagatgtttacggtgttggtgtactaattaccggtgattcaggaataggtaaaagtgagactgcgttggaattagttaaacgtgggcatagattagtagcagatgataatgtggaaatacgtcaaattaataaagatgaactaatagggaaaccaccaaagttaatagaacatctattagaaatacgtggactaggtattatcaatgttatgactttatttggcgcgggttcaatattaactgaaaaacgaattagattaaatattaatttggaaaactggaacaagcaaaagttatatgaccgcgtaggtcttaatgaagagacgctaagtattttagatactgaaatcactaaaaaaacaatacctgtaagacctggtagaaatgttgcggtaattattgaggtcgctgcaatgaactatcgattaaatatcatgggcattaacacggccgaagaatttagtgaaagattaaatgaagaaattatcaagaacagtcataagagtgaggagtaggttgaa

SEQ ID NO: 4820 - DNA, 1233 bp, Staphylococcus aureus
ttgcttttgggtatcgttttaggggttattaccttttggctattcgcgcagtcacttgttaatcttgttgtcccattacaatcaacatatagtagtgacgttggaacgataaatatcgctgttagcttatctgccttatttgctggtttgtttatcgtaggtgctggtgatgttgctgataaatttggtcgcgtcaaaattacttatgtaggattgatattaaatgttgtaggttcattactcatcatcattacacctttgccagcatttttaattataggtagaataattcaaggtttgtctgcagcatgtattatgccatcaacacttgctattattaacgaatattatattggtacaagaagacaacgtgccttaagctattggtctattggttcttggggtggtagtggtatttgtacgttgtttggtggcttaatggctacatatataggttggcgttcaatatttgttgtttcaattctattaacattattagcaatgtacttaatcaaacatgcacctgagactaaagcagaaccaatcaaaggtatgaaagcagaagctaaaaagtttgacgttattggtttagtcattttagtagtgacgatgttaagtttaaatgtaatcatcacacagacgtctcattttggtttagtttcaccgttaattctaggtttaattgttgtgtttatctgttcattagttggttttgtatattacgaaaataaaataaagcatccacttgttgatttttcaatttttaaaaatagaggatacagtggtgcaactatttcaaacttcttattaaatggtgtagcaggtggtgcacttatcgttattaacacgtattatcaacaacaattaggatttaattcttcgcaaacgggttatatttcattaacgtatttaataacagtgttgtcaatgattcgtgtaggtgaaaagattttatctcaacatggtccgaagcgcccactattactaggaagtggctttacagtgattgggttaatcttattgtcgttaacatttttaccagaagtgtggtatatcatatctagtatagttggatatttattgtttggtactggtttaggattatatgctacaccatcaactgatacagcagttgctagtgcgccagatgataagtcgggtgttgcttcaagtgtgtataaaatggcgtcatcattaggaaatgcgtttggagtagcaatatctggtaccgtt

SEQ ID NO: 4821 - DNA, 932 bp, Staphylococcus aureus
tgtttgttagtcattttaatcgcaactgcttatatttcgtttgtaaccggtacaattaaattgtcatttaatgacctatttacaaaatttacaactggtagcaatgaagcagtggattcaatcattgatttgcgattgccacgtatattaattgcattgatggttggcgcaatgttagcagtttctggagcattattacaagcagcactacaaaatcctttggcagaggcgaatatcattggcgtttcctcaggtgcacttataatgagagcactttgtatgttgtttattccacaattgtacttttacttaccattattaagttttattggaggtttaataccatttttaataattatattgttgcattctaaatttagattcaatgctgtaagtatgatattagtaggtgttgcgttattcgtattattaaatggtgttttagaaattttaactcaaaaccctttaatgaaaattcctcaaggcttaacaatgaaaatatggagcgacgtatacatattagcagtatcagcattattgggattaatattaacattactattgtcccctaaattgaatttactaaatttagacgacatacaagcgcgaagtatcggttttaatattgatcgttacagatggttaacaggtttattagcagtatttttagcaagtgcaactgttgcgattgttggacaactagcctttttaggtattattgtgcacatgtggttagaaagctagttgggggcaattacagagtacttattccgttttctacagttattggtgcatggctattgttagtggctgatttattaggacgagtgatacagcctcctttagaaattccagccaatgctattttaatgattgtcggtggtccaatgctaatttacttaatttgtcaaagtcaacgaaatcgaatctaa

SEQ ID NO: 4822 - DNA, 570 bp, Staphylococcus aureus
tggaaagaaaaagttcaacaatacgaagatcaaatcattaatgacttaaaaggattattagcaattgaaagtgtgagagatgatgcaaaagcatcagaagacgcaccagttggtccaggtcctcgtaaggcattagactacatgtatgaaattgcacatagagatggatttacaacacatgatgtggatcatattgcaggaagaattgaggcaggtaaaggaaatgacgtattaggtatcttatgtcatgttgacgttgttcctgctggtgatggatgggatagtaatccgttcgagccggttgtaacagaagatgctatcatagctagaggtacacttgatgacaaaggtccaacaattgctgcttattatgcaattaagatattagaagatatgaatgtggattggaagaaacgtattcatatgattattggtacggatgaagaatctgattggaaatgtacggatcgctattttaaaacagaagaaatgccaacattaggttttgcaccagatgcagaatttccatgtattcatggtgaaaaaggcattacaacatttgatttagtt

SEQ ID NO: 4823 - DNA, 768 bp, Staphylococcus aureus
cagagaaaaaatgaacatgttgaaatagcaatggcccaatctgacgcaatgcattcagattttgataagatgcgttttgtgcatcattctatcccatcaattaatgtaaatgatatcgatttgacatcacagacgcctgacttaacgatggcatatccggtttatattaatgcaatgacgggtggtagcgagtggacgaaaaacatcaatgaaaagctagctgtagttgcaagagaaactggcttagcgatggcagttggatcaacacatgcggcattgagaaatccacgcatggctgagacgtttacgattgcgcgaaaaatgaatcctgaaggcatgatttttagcaatgttggtgcggacgtaccagtagaaaaggctttggaagcagttgaattacttgaggcacaagcgttacaaatccatgttaattctcctcaagaattagttatgcctgaagggaatcgtgaatttgtgacttggttagataatatagcgtggattgtatcacgagtgtctgttccagtcattataaaagaagttggatttggtatgagcaaagaattaatgcatgacttacaacaaataggcgtcaagtatgtcgatgttagtggcaaaggtggtactaactttgtagatattgaaaatgaacgtcgtgcaaataaagatatggattacttatcatcatggggacagtctacagttgagtcattacttgaaacaacggcttatcaaagcaaaatttgatattttactagtggtacgttg

SEQ ID NO: 4824 - DNA, 174 bp, Staphylococcus aureus
atgacaatgatgcaaagattgatcgcacaaattgaaaaagggaagccatttttccagaaattatctcgtaccatatatttaacacccatcggtgaaggatatagttcagcaccgcctgtcgtattattatcaagtatctttttagtaagtgcatagggggcaaatataataggt

SEQ ID NO: 4825 - DNA, 551 bp, Staphylococcus aureus
ccgggtaaggaagccaactaccaagcctggcaaagtagacggcttccaaggctgggtaaagaaaacaactgaaaaccctggaacagaagatggcaacaagcctggtaaagaagacaccaaaaaacctggtaaagaagacggcaacaagcctggcaaagaagatggcaacaaacctggtaaagaagatggtaacggagtacatgtcgttaaacctggtgatacagtaaatgacattgcaaaagcaaacggcactactgctgacaaaattgctgcagataacaaattagctgataaaaacatgatcaaacctggtcaagaacttgttgttgataagaagcaaccagcaaaccatgcagatgctaacaaagctcaagcattaccagaaactggtgaagaaaatccattcatcggtacaactgtatttggtggattatcattagccttaggtgcagcgttattagctggacgtcgtcgcgaactataaaaacaaacaatacacaacgatagatatcattttatccaaaccaattttaacttatatacgttgatta

SEQ ID NO: 4826 - DNA, 628 bp, Staphylococcus aureus
ttgactatttatcattttatgtcagataaattgaatttatacagtgatataggaaatattattgctttaagacaacgtgctaaaaaacgaaatattaaagttaatgtcgtagaaatcaatgaaacagaaggtattacctttgatgaatgtgatattttctttatcggtggtggaagtgatagagaacaagcattagcaacaaaagaattaagtaaaattaagacaccacttaaagaagcgattgaagatggtatgccgggattaacgatttgtggaggctatcaatttttagggaaaaaatatatcacgcctgatggtacagaattagaagggttaggtattttagatttttatactgaatcaaagacaaaccgattaacaggagatattgttatcgaaagtgatacttttggaactattgtaggttttgaaaatcacggtggtagaacatatcatgatttcggtacacttggtcatgttacttttggttatggtaataatgatgaagataaaaaagaaggcattcattataaaaatttattaggtacttatttacatggcaccaatttcacctaaaaattacgaaatcactgattatctgttagaaaaagcttgtgaacgtaagggt

SEQ ID NO: 4827 - DNA, 2460 bp, Staphylococcus aureus
ttgaacttacatgaaaaagcacacgggccacatggtttagttgctggtaccactggttcagggaaatctgagattatccaatcatacattttatctttagctattaattttcaccctcatgaagttgcattcctattgattgactataaaggtgggggtatggcgaacttatttaaagatttagtccatttagttggtacgattacaaacttagatggcgatgaagcgatgcgtgccttaacatcaatcaaagccgaattgagaaaacgtcaacgtttattcggagagcatgatgttaaccatattaatcaataccataagttatttaaagaaggtattgcgacagaaccaatgccacatttattcattatttccgatgagtttgccgaattaaaatcagaacaacctgattttatgaaagaacttgtatcaacggcacgtattggacgttcgttaggtattcatttaatacttgcgacacaaaaaccatcgggtgttgttgatgaccaaatttggtctaactctaaatttaagttggcattaaaagtacaagatagacaagacagtaatgaaattttaaaaacaccagatgcagcagacattacattaccaggtcgtgcgtatttacaagttggtaataatgaaatttatgaattattccaatctgcatggagtggtgcaacatatgacatcgaaggcgataaattagaagttgaagataagacgatttacatgattaatgactatggtcaacttcaagcaatcaacaaagacttgagtggacttgaagatgaagaaacgaaagaaaatcaaactgagttagaagcggtcatagatcatatcgaatctattacaacacgattagaaatcgaagaagttaagcgtccatggctaccaccattgccagaaaatgtatatcaagaagatttagtagaaacagatttcagaaaattatggtcagatgatgcaaaagaagtggaattaacattaggacttaaagacgtaccagaagaacaatatcaaggaccgatggtattgcaattgaaaaaagctgggcacatcgcgttaatcggaagtccaggatatggtagaacaacgttcttacacaacattattttcgatgttgcaagacaccatcgtcctgatcaagcacacatgtacttgttcgatttcggtaccaatggtttgatgccagttacagacataccacatgtcgctgattactttacagtagatcaagaagacaagattgctaaggcgatacgtatatttaatgatgaaattgatcgtcgtaagaagattttaagtcagtatcgtgtcactagtatttctgaatatcgaaaattaactggtgaaacaattccgcatgtctttattcttattgataactttgacgcagtaaaagattcacctttccaagaagtttttgaaaatatgatgattaaaatgacgcgtgaagggctagcattagacatgcaagtaaccttaactgcttcaagagctaacgctatgaaaacaccaatgtacattaatatgaaaacgcgtatcgcaatgtttttatatgataaatcagaggtgtcgaacgtagtaggacagcaaaaatttgcggttaaagatgttgtgggtcgagcattgttaagtagtgatgacaacgtatcattccatattggccaaccatttaaacatgatgagaccaaatcatataatgatcaaattaatgatgaagtatcggcgatgacagaattttataaaggtgaaacaccaaatgatattcctatgatgccagatgaaattaaatatgaagattacagagaatcattaaacttaccagatatagttgcaaatggtgctttaccaattggattagattatgaaggtgttacactacaaaaaattaaattaactgaaccagcaatgatttcatcagaaaatccgagagaaattgcgcatattgctgaaattatgatgaaagaaattgacatattaaatgaaaaatatgcgatttgtatcgcagactcaagtggagagtttaaagcttataggcatcaagtggctaactttgccgaagaaagagaagacattaaagcgattcatcaactaatgattgaagacttaaagcaaagagaaatggacggcccatttgaaaaagattcactttatattatcaatgattttaaaacatttattgattgcacgtatattccggaagatgatgttaaaaagcttattacaaaaggaccagaacttggcttgaacattttatttgtcggcattcataaagaattaatagatgcttatgataaacagattgatgttgcacgtaaaatgattaaccaatttagtataggtattcgtatttcagaccaacaattctttaaatttagatttattcaacgagaacctgttattaaagaaaatgaagcatatatggtcgcaaaccaagcttatcaaaagattaga

SEQ ID NO: 4828 - DNA, 2511 bp, Staphylococcus aureus
gcattaaaagcacaagtaacaagtgcaggacgtgtatctgcagcaaatggtgttgaacatactgcgactgaattaaatactgcgatgacagctttaaagcgtgccattgctgataaagctgagacaaaagctagtggtaactatgtcaatgctgatgcgaataaacgtcaagcatatgatgaaaaagttacagctgccgaaaatatcgttagtggtacaccaacaccaacgttaacaccagcagatgttacaaatgcagcaacgcaagtaacgaatgctaagacgcagttaaacggtaatcataatttagaagtagcgaaacaaaatgctaacactgcaattgatggtttaacttctttaaatggtccgcaaaaagcaaaacttaaagaacaagtgggtcaagcgacgacgttgccaaatgttcaaactgttcgtgataatgcacaaacattaaacactgcaatgaaaggtctacgagatagcattgcgaatgaagcaacgattaaagcaggtcaaaactacacagatgcaagtcaaaacaaacaaactgactacaacagtgcagtcactgcagcaaaagcaatcattggtcaaacaactagtccatcaatgaatgcgcaagaaattaatcaagcgaaagaccaagtgacagctaaacaacaagcgttaaacggtcaagaaaacttaagaactgcgcaaacaaatgcgaagcaacatttgaacggcttaagtgacttaactgacgctcaaaaagatgcagtgaaacgtcaaatcgaaggtgcaacgcatgttaatgaagtaacacaagcacaaaataatgcggatgcattaaatacagctatgacgaacttgaaaaatggtattcaagatcagaatacgattaagcaaggtgttaacttcactgatgccgacgaagcgaaacgtaatgcatatacaaatgcagtgacgcaagctgaacaaattttaaataaagcacaaggtccaaatacttcaaaagacggtgtcgaaactgcgttagaaaatgtacaacgtgctaaaaacgaattgaacggtaatcaaaatgttgcgaacgctaagacaactgcgaaaaatgcattgaataacctaacatcaattaataatgcacaaaaagaagcattgaaatcacaaattgaaggtgcgacaacagttgcaggtgtaaatcaagtgtctacaacggcatctgaattaaatacagcaatgagcaacttacaaaatggtattaatgatgaagcagctacaaaagcagcgcttaatggtactcaaaaccttgaaaaagctaaacaacacgcaaatacagcaattgacggtttaagccatttaacaaatgcacaaaaagaggcattaaaacaattggtacaacaatcgactactgttgcagaagcacaaggtaatgagcaaaaagcaaacaatgttgatgcagcaatggacaaattacgtcaaagtattgcagataatgcgacaacaaaacaaaaccaaaattatactgatgcaagtcagaataaaaaggatgcgtacaataatgctgtcacaactgcacaaggtattattgatcaaactacaagtccaactttagatccgactgttatcaatcaagctgctggacaagtaagcacaactaaaaatgcattaaatggtaatgaaaacctagaggcagcgaaacaacaagcgtcacaatcattaggttcattagataacttaaataatgcgcaaaaacaaacagttactgatcaaattaatggcgcgcatactgttgatgaagcaaatcaaattaagcaaaatgcgcaaaacttaaatacagcgatgggtaacttgaaacaagcgatagctgacaaagatgctacgaaagcgacagttaacttcactgatgcagatcaagcaaaacaacaagcatataacactgctgttacaaatgctgaaaatatcatttcaaaagctaatggcggcaatgcaacacaagctgaagttgaacaagcaatcaaacaagttaatgctgcaaaacaagcattaaatggtaatgccaacgttcaacatgcaaaagacgaagcaacagcattaattaatagctctaatgaccttaaccaagcacaaaaagacgcattaaaacaacaagttcaaaatgcaactactgtagctggtgtaaacaatgttaaacaaacagcacaagagttaaacaatgctatgacacaattaaaacaaggcattgcagataaagaacaaacaaaagctgatggtaactttgtcaatgcagatcctgataagcaaaatgcatataatcaagcagtagcgaaagctgaagcattaattagtgctacgcctgatgttgtcgttacacctagcgaaattactgcagcgttaaataaagttacgcaagctaaaaatgatttaaatggtaatacaaacttagcaacggcgaaacaaaatgttcaacatgctattgatcaattgccaaacttaaaccaagcgcaacgtgatgaatacagcaaacaaatc

SEQ ID NO: 4829 - DNA, 1272 bp, Staphylococcus aureus
atgatgaaattaattaaaaacggtaaagtattacaaaatggcgaattacaacaagcagatattttaattgatggtaaggtaattaaacaaattgcacctgcaattgaaccaagcaatggtgttgacatcatagatgcgaaaggtcactttgtgtcacctggatttgtcgatgttcatgttcatttacgtgaacctggtggtgaatataaagagacaattgaaactggtactaaagctgctgctagaggcggatttacaactgtatgtccaatgcctaacacaagaccggtaccagattctgtagaacattttgaagctttacaaaaattaatcgatgacaatgctcaagtacgtgtattaccttatgcttcaattacaacacgtcaattaggtaaagaattggttgatttcccagcactagtaaaagaaggtgcctttgcgtttacagatgacggtgtaggagtacaaactgcaagcatgatgtatgaaggcatgattgaagctgcaaaagtaaacaaagccatcgtagcacactgtgaagataattcattaatctatggtggtgcaatgcatgaagggaaacgcagtaaagagttaggtataccaggtattccaaacatttgtgaatctgttcaaatcgcaagagatgtactattagctgaagcagcaggttgtcattatcatgtatgtcatgtttctactaaagaaagtgttagagtcattcgtgacgctaaacgcgcaggcattcatgttacagctgaagttacaccacaccatttattgttaacagaagatgatattcctggtaataatgccatttataaaatgaatccaccattgagaagtactgaagatagagaggctttgttagaagggttactagacggtacaattgactgtatcgcaacagaccatgcaccacatgcacgtgatgaaaaagcacaaccaatggaaaaagcaccattcggaattgttggtagtgaaacagcattcccattattatatacgcattttgtaaaaaatggtgattggacattacaacaattagtagattacttaacaattaaaccatgtgagacatttaatttagaatacggcacattaaaagaaaatggttatgcagatttaacaatcattgatttagatagtgaacaagaaattaaaggagaagatttcttatcaaaagcagataatacaccatttatcggctataaagtttatggaaatccgatcttaacaatggttgaaggcgaagttaaatttgagggggat

SEQ ID NO: 4830 - DNA, 3087 bp, Staphylococcus aureus
acgatgtctgttgatgatgttaatcgtgcaacttcagctgttacttctaataaaaatgcattaaatggttatgaaaaattagcacaatctaaaacagatgctgcaagagcaattgatgcattaccacatttaaataatgcacaaaaagcagatgttaaatctaaaattaatgctgcatcaaatattgctggcgtaaatactgttaaacaacaaggtacagatttaaatacagcgatgggtaacttgcaaggtgcaatcaatgatgaacaaacgacgcttaatagtcaaaactatcaagatgcgacacctagtaagaaaacagcatacacaaatgcggtacaagctgcgaaagatattttaaataaatcaaatggtcaaaataaaacgaaagatcaagttactgaagcgatgaatcaagtgaattctgctaaaaataacttagatggtacgcgtttattagatcaagcgaagcaaacagcaaaacagcagttaaataatatgacgcatttaacaactgcacaaaaaacgaatttaacaaaccaaattaatagtggtactactgtcgctggtgttcaaacggttcaatcaaatgccaatacattagatcaagccatgaatacgttaagacaaagtattgccaacaaagatgcgactaaagcaagtgaagattacgtagatgctaataatgataagcaaacagcatataacaacgcagtagctgctgctgaaacgattattaatgctaatagtaatccagaaatgaatccaagtacgattacacaaaaagcagagcaagtgaatagttctaaaacggcacttaacggtgatgaaaacttaactgctgcaaaacaaaatgcgaaaacgtacttaaacacattgacaagtattacagatgctcaaaagaacaatttgattagtcaaattactagtgcgacaagagtgagtggtgttgatactgtaaaacaaaatgcgcaacatctagaccaagctatggctagcttacagaatggtattaacaacgaatctcaagtgaaatcatctgagaaatatcgtgatgctgatacaaataaacaacaagagtatgataatgctattactgcagcgaaagcgattttaaataaatcgacaggtccaaacactgcgcaaaatgcagttgaagcagcattacaacgtgttaataatgcgaaagatgcattgaatggtgatgcaaaattaattgcagctcaaaacgcagcgaaacaacatttaggtactttaacgcatatcactacagctcaacgtaatgatttaacaaatcaaatttcacaagctacaaacttagctggtgttgaatctgttaaacaaaatgcgaatagtttagatggtgctatgggtaacttacaaacggctatcaacgataagtcaggaacattagcgagccaaaacttcttggatgctgatgagcaaaaacgtaatgcatacaatcaagctgtatcagcagccgaaaccattttaaataaacaaactggaccgaatacagcgaaaacagcagtcgaacaagcacttaataatgttaataatgcgaaacatgcattaaatggtacgcaaaacttaaacaatgcgaaacaagcagcgattacagcaatcaatggcgcatctgatttaaatcaaaaacaaaaagatgcattaaaagcacaagctaatggtgctcaacgcgtatctaatgcacaagatgtacagcacaatgcgactgaactgaacacggcaatgggcacattaaaacatgccatcgcagataagacgaatacgttagcaagcagtaaatatgttaatgccgatagcactaaacaaaatgcttacacaactaaagttaccaatgctgaacatattattagcggtacgccaacggttgttacgacaccttcagaagtaacagctgcagctaatcaagtaaacagcgcgaaacaagaattaaatggtgacgaaagattacgtgaagcaaaacaaaacgccaatactgctattgatgcattaacacaattaaatacacctcaaaaagctaaattaaaagaacaagtgggacaagccaatagattagaagacgtacaaactgttcaaacaaatggacaagcattgaacaatgcaatgaaaggcttaagagatagtattgctaacgaaacaacagtcaaaacaagtcaaaactatacagacgcaagtccgaataaccaatcaacatataatagcgctgtgtcaaatgcgaaaggtatcattaatcaaactaacaatccgactatggatactagtgcgattacccaagctacaacacaagtgaataatgctaaaaatggtttaaacggtgctgaaaacttaagaaatgcacaaaacactgctaagcaaaacttaaatacattatcacacttaacaaataaccaaaaatctgccatctcatcacaaattgatcgtgcaggtcatgtgagtgaggtaactgctactaaaaatgcagcaactgagttgaatacgcaaatgggtaacttggaacaagctatccatgatcaaaacacagttaaacaaagtgttaaatttactgatgcagataaagctaaacgtgatgcgtatacaaatgcggtaagcagagctgaagcaattctgaataaaacgcaaggtgcaaatacgtctaaacaagatgttgaagcggctattcaaaatgtttcaagtgctaaaaatgcattgaatggtgatcaaaacgttacaaatgcgaagaatgcagctaaaaatgcattaaataacttaacgtcaattaataatgcacaaaaacgtgacttaacaactaaaattgatcaagcaacaactgtagctggtgttgaagctgtatctaatacgagtacacaattgaatacagcgatggctaacttgcaaaatggtattaatgataaaacaaatacactagcaagtgaaaactatcatgatgctgattcagataagaaaactgcttatactcaagccgttacgaacgcagaaaatattttaaataaaaatagtggatcaaatttagacaaaactgccgttgaaaacgcgttgtcacaagttgctaatgcgaaaggtgcccta

SEQ ID NO: 4831 - DNA, 882 bp, Staphylococcus aureus
acgaccgaagcgcgtaatgaagcgacgatgcatcttgatgaaatgactgtggaagaggctttaattacgatgaataaagaagatcagcaagtcccgttagcagttcgaaaggcaataccacaattgacaaaagtaattaaaaaaacaattgcacagtataaaaagggtggacgattgatttatatcggtgcaggtacaagtggaaggttgggtgtcttagatgcagcggagtgtgtacctacattcaatactgaccctcatgaaattataggtattattgctggtggacaacatgctatgacgatggctgtagaaggtgcggaagatcacaaaaaattagcggaagaagatttgaaaaatatagatttaacatcaaaagatgtcgttataggaattgccgcgagtggcaaaacgccatatgttataggcggtttaacatttgctaacacaatcggtgctacaacagtatctatttcatgcaatgaacatgcagttataagtgaaattgcgcagtatccagtagaagttaaagttggtccagaagtattaactggttcaacacgtttaaagtctggtacagcacaaaagttaattttaaatatgatttcaaccatcacaatggttggtgtcggaaaagtttacgataacctcatgattgatgttaaagcaaccaatcaaaaactgatcgaccgttcagtgcgtattattcaagaaatatgtgctatcacatatgatgaagcaatggcgttatatcaggtatctgagcatgatgtgaaagttgcgacagttatgggtatgtgtggcatttctaaggaagaagcaacaagacggttattaaacaatggtgacattgttaaacgagcaatcagagatagacaacct

SEQ ID NO: 4832 - DNA, 1164 bp, Staphylococcus aureus
aatggtttacgattatttattatccccacacgcaggttttcaaaagacatttgtcacgttacactacacaattttggttcatagaataatcaattcaaaccccttggacaagaccaatttgttactgtacctgatggagttgctcactttttagaacataaattatttgaaaaagaagaagaagacttatttactgcgtttgctgaagataacgcacaagcaaatgcgtttacaagctttgatcgtacaagctacttgttcagtgcaactgataatattgaaaacaacattaaacgtttacttacaatggttgaaacgccttattttacaaaagaaactgttgataaagaaaaaggtattattgcagaagaaataaaaatgtatcaagagcaacctggatataaattaatgtttaatacattgcgtgcaatgtatcaacaacatccaatacgtgttgatattgccggtagtgtagaaagtatatacgatattacaaaagatgatttgtatctatgttatgaaacgttttatcatccatcaaatatggttttatttgttgttggcgatgtggatcctgaagcaatatgtcgaatagtaaaacaacacgaggatgctcgtaataaagttaaccaacccaaaatcgaacgaggacttgttgatgaaccggaggatgttaaagaagcatttgttactgaatctatgaaaattcaatcaccaagactaatgcttggttttaaaaataaaccattacaagaagcgcctcaaaaatatgtacaacgtgatttagaaatgtcattattctttgagttaatttttggggaagaaacagatttttatcagaatttattaaacgaaggacttatcgatgatacatttggttatcaatttgtactagagccgacgtatagtttttcaatcgtgacaagtgctactgaagaaccagataaattaaaaaaattattattagatgagttgcgtgataaaaaaggcaatttccaagatgcagaagcatttgaacttttgaaaaagcaatttataggtgaattcatatcaagtttaaactcacttgaatatattgctaatcaatatactaaattgtattttgaaggtgttagcgtgtttgacatgttagacattgttgaaaatatcacgttagatagtatt

SEQ ID NO: 4833 - DNA, 337 bp, Staphylococcus aureus
aatcgtgaatgagcaccaggaacagaaagagtacaagagagggcaatcaggtaaggtgacaatgtgtacgccaacactagaaaatccattaaatggaggaattattagtaaaggtgaatcgagagaagaaatcccgtaagatccgatgaatgaatgagcagaatacggaccaggaacgataacaccaggtcatcgagacgaatttgatccgaagttaccaacaggagagaaagaggaagttccaggtaaaccaggaattaagaatccagaaacaggagatgtagttagaccaccggtcgatagcgtaacaaaatatggacctgtaaaaggagactcg

SEQ ID NO: 4834 - DNA, 672 bp, Staphylococcus aureus
ttgcgtgtgaaagataatttacaacaaatctcaacacaaattaatgacaaaagtgaaaaaaataatttttcaacaaaaccaaacgtgattgcagttacaaaatatgttacaatagagcgagctaaagaagcgtatgaggctggaataagacattttggtgagaatagattggaaggcttttttcaaaagaaagaagcattaccatcagatgcggtgatccattttataggatcattacaatctcgaaaagttaaggacgttataaacgacgtagattatttccatgctttagatcgattgagcttagccaaagaaattaacaaacgtgcagaacataaaattaaatgtttcttgcaagtgaacgtttcgggagaagcttctaaacatggtattgctttagaagatgttgatcagtttatagatgatcttaaaaaatatgacaaaatcgaaattgtaggtttaatgacgatggcaccattgacagatgatgaagcatatattagatcgttatttaaacagttacgtttgaaaaaagaagaaatacaacgactcaatttagaatatgcgccttgtgatgaattatcaatgggaatgagtaatgactatcttattgcagttgaagaaggtgcgacgtttgttagaattgggactaaacttgtaggagaagaggag

SEQ ID NO: 4835 - DNA, 258 bp, Staphylococcus aureus
gaataccaattaatctcatgtccgttacatattcactatgatttttcgagaacaattttaatgcgtcaatctacagatctttttgcaagaggtgttggtgattcaaccgatgtcgtacaaaaagaaatgtatacatttaaagataaaggcgatagaagtattacattaagacctgagggaacagctgcagttgcgcgttcatatattgaacataaaatgcaaggttatccaaaccaaccaattgaactttattacaac

SEQ ID NO: 4836 - DNA, 969 bp, Staphylococcus aureus
aaaaatatcacaatttgtacgttagcactatcgactactttcactgtattaccagctacttcatttgcaaagattaattctgaaatcaaacaagtttctgagaagaatcttgatggtgatactaaaatgtatacacgtacagctacaacaagtgatagtcaaaaaaatattactcaaagcttacaatttaatttcttaactgaacctaattatgataaagaaacagtatttattaaagcaaaaggtacaattggtagtggtttgagaattttagacccaaatggttattggaatagtacattaagatggcctggatcttattcagtttcaattcaaaatgttgatgacaacaacaatacaaatgtgactgactttgcaccaaaaaatcaggatgaatcaagagaagttaaatatacgtatggttataaaacaggtggagatttttcgattaatcgtggaggcttaactggaaatattacaaaagagagtaattattcagagacgattagttatcaacaaccatcatatcgtacattacttgatcaatctacgtcacataaaggtgtaggttggaaagtagaagcacatttgataaataatatgggacatgaccatacgagacaattaactaatgatagtgataatagaactaaaagtgaaattttttctttaacacgaaatggaaatttatgggcgaaagataatttcacacctaaagacaaaatgcctgtaactgtgtctgaagggtttaatccagaatttttagctgttatgtcacatgataaaaaagacaaaggtaaatcacaatttgttgttcattataaaagatcaatggatgagtttaaaatagattggaatcgccatggtttctggggctattggtctggtgaaaaccatgtagataaaaaagaagaaaaattatcagcattatatgaagttgattggaagacacataatgtgaagtttgta

SEQ ID NO: 4837 - DNA, 931 bp, Staphylococcus aureus
ttagattttgaaaaaccactttttgaaattcgaaataaaattgaatctttaaaagaatctcaagataaaaatgatgtggatttacaagaagaaattgacatgcttgaagcgtcattggaacgagaaactaaaaaaatatatacaaatctaaaaccatgggatcgtgtgcaaattgcgcgtttgcaagaaagacctacgaccctagattatattccatatatctttgattcgtttatggaactacatggtgatcgtaattttagagatgatccagcaatgattggtggtattggctttttaaatggtcgtgctgttacagttattggacaacaacgtggaaaagatacaaaagataatatttatcgaaattttggtatggcgcatccagaaggttatcgaaaagcattacgtttaatgaaacaagctgaaaaattcaatcgtcctatctttacatttatagatacaaaaggtgcatatcctggtaaagctgctgaagaacgtggacaaagtgaatctatcgcaacaaaatttgattgagatggcttcattaaaagtaccagttattgcgattgtcattggtgaaggtggcagtggaggtgctctaggtattggtattgccaataaagtattgatgttagagaatagtacttactctgttatatctcctgaaggtgcagcggcattattatggaaagacagtaatttggctaaaattgcagctgaaacaatgaaaattactgcccatgatattaagcaattaggtattatagatgatgtcatttctgaaccacttggcggtgcacataaagatattgaacagcaagctttagctattaaatcagcgtttgttgcacagttagattcacttgagtcattatcacgtgatgaaattgctaatgatcgctttgaaaaattcagaaatatcggttct

SEQ ID NO: 4838 - DNA, 1303 bp, Staphylococcus aureus
caaactgtaaatgtaataggtgctggtcttgccggttcagaagcggcatatcaattagctgaaagaggaattaaagttaatctaatagagatgagacctgttaaacaaacaccagcgcaccatactgataaatttgcggaacttgtatgttccaattcattacgcggaaatgctttaactaatggtgtgggtgttttaaaagaagaaatgagaagattgaattctataattattgaagcggctgataaggcacgagttccagctggtggtgcattagcagttgatagacacgatttttcaggttatattactgaaaacacttaaaaatcatgaaaatatcacagttattaatgaagaaattaatgccattccagatggatacacaattatcgcaacaggaccacttactacagaaacccttgcgcaagaaatagtggacattactggtaaagatcaactttatttctatgatgcggctgctccaattattgaaaaagaatctattgatatggataaagtttacttaaagtcccgttatgataaaggtgaagctgcatatttaaactgtcctatgactgaggatgaatttaatcgcttttatgatgcagtattagaagctgaagttgcgcctgtaaattcatttgaaaaagaaaaatatttcgagggttgtatgccttttgaagtaatggcagaacgcggacgcaagacattactatttggaccaatgaaaccagtaggattagaagatccaaagactgggaaacgtccttatgcggtggttcaattaagacaagatgacgctgctggtacactctacaatattgttggcttccaaacgcatttaaaatggggagctcaaaaagaagtcattaaattaattccaggcttagaaaatgttgatattgttagatatggtgtgatgcatagaaataccttcattaattcaccggacgtattaaacgagaaatatgaattgatttcacaaccaaacatacagtttgcgggacaaatgactggtgttgaaggttatgtagaaagcgcagctagcggcttagttgcaggtatcaatcttgcgcataaaatattaggcaagggtgaggtagtatttccgagagaaacaatgattggaagtatggcttactatatttctcatgctaaaaacaataagaatttccaacctatgaatgctaacttcgggttattaccatctttagaaactagaattaaagataaaaaagaacgctatgaagcacaagctaatagagctttggattacttagaaaatttcaaaaaaactttataa

SEQ ID NO: 4839 - DNA, 782 bp, Staphylococcus aureus
atgttaagaggacaagaagaaagaaagtatagtattagaaagtattcaataggcgtggtgtcagtgttagcggctacaatgtttgttgtgtcatcacatgaagcacaagcctcggaaaaaacatcaactaatgcagcggcacaaaaagaaacactaaatcaaccgggagaacaagggaatgcgataacgtcacatcaaatgcagtcaggaaagcaattagacgatatgcataaagagaatggtaaaagtggaacagtgacagaaggtaaagatacgcttcaatcatcgaagcatcaatcaacacaaaatagtaaaacaatcagaacgcaaaatgataatcaagtaaagcaagattctgaacgacaaggttctaaacagtcacaccaaaataatgcgactaataatactgaacgtcaaaatgatcagggtcaaaatacccatcatgctgaacctaatggatcacaatcgacaacgtcccaatccaatgatgttgataaatcacaacccttcctttccgggacaaaaggtaatccccaatcctgataaagccgcaccaactttaactacccccccgtttaatgataaaactggacctaaattaaccaaagcccagaatgcacccccggccaaccttccaaatcaccagatccccctgaacctggcccttaaatcttaagtccaagccaaatgatcttggcgcccaaggaaacggaaacccccagttggggaattaaagtaacccttttgcaggggcaaattcccccgaaaaacccgcccggtta

SEQ ID NO: 4840 - DNA, 918 bp, Staphylococcus aureus
ggggtttcaagcttgtctgcctgcagtgtcgactcgtgaggatccccaggatttaaagaaggtttatcaaaagactacatccaaccacgtatgactatgattacaccaattgataaaaatgatgatgagttattaaatagttttgaacgccgaaatcgttcaaaagtgcgcttggctttaaagcgaggtacgacagtagaacgatctgatagagaaggtttaaaaacatttgctgagttaatgaaaatcactggggaacgcgatggcttcttaacgcgtgatattagttactttgaaaatatttatgatgcgttgcatgaagatggagatgctgaactatttttagtaaagttggatccaaaagaaaatatagcgaaagtaaatcaagaattgaatgaacttcatgccgaaattgctaaatggcagcagaagatgaaaacatctgaaaagcaagctaaaaaagcgcaaaatatgattaatgatgcgcaaaataaaattgctaaaaatgaagatttaaaacgagacctagaagctttagaaaaggaacatcctgaaggtatttatctttctggtgcactattaatgtttgctggctcaaaatcatattacttatatggtgcgtcttctaatgaatttagagattttttaccaaatcatcatatgcagtatacgatgatgaagtatgcacgtgaacatggtgcaacaacttacgatttcggtggtacagataatgatccagataaagactcagaacattatggattatgggcatttaaaaaagtgtggggaacatacttaagtgaaaagattggtgaatttgattatgtattgaatcagccattgtaccaattaattgagcaagttaaaccgcgtttaacaaaagctaaaattaaaatatctcgtaaattaaaacgaaaa

SEQ ID NO: 4841 - DNA, 1960 bp, Staphylococcus aureus
ttgtattgagcaaccccaatatactatcatagtgggaatttacatataggacatgcatattctacagtggctggagatgttattgcaagatataagagaatgcaaggatatgatgttcgctatttgactggaacggatgaacacggtcaaaaaattcaagaaaaagctcaaaaagctggtaagacagaaattgaatatttggatgagatgattgctggaattaaacaattgtgggctaagcttgaaatttcaaatgatgattttatcagaacaactgaagaacgtcataaacatgtcgttgagcaagtgtttgaacgtttattaaagcaaggtgatatctatttaggtgaatatgaaggttggtattctgttccggatgaaacatactatacagagtcacaattagtagacccacaatacgaaaacggtaaaattattggtggcaaaagtccagattctggacacgaagttgaactagttaaagaagaaagtaatttctttaatattagtaaatatacagaccgttttttagagttctatgaccaaaatccagattttatacaaccaccatcaagaaaaaatgaaatgattaacaacttcattaaaccaggacttgctgatttagctgtttctcgtacatcatttaacttggggtgtccatgttccgtctaatccaaaacatgttgtttatgtttggattgatgcgttagttaactatatttcagcattaggctatttatcagatgatgagtcactatttaacaaatactggccagcagatattcatttaatggctaaggaaattgtgcgattccactcaattatttggcctattttattgatggcattagacttaccgttacctaaaaaagtctttgcacatggttggattttgatgaaagatggaaaaatgagtaaatctaaaggtaatgtcgtagaccctaatattttaattgatcgctatggtttagatgctacacgttattatctaatgcgtgaattaccatttggttcagatggcgtatttacacctgaagcatttgttgagcgtacaaatttcgatctagcaaatgacttaggtaacttagtaaaccgtacgatttctatggttaataagtactttgatggcgaattaccagcgtatcaaggtccacttcatgaattagatgaagaaatggaagctatggctttagaaacagtgaaaagctacactgaaagcatggaaagtttgcaattttctgtggcattatctacggtatggaagtttattagtagaacgaataagtatattgacgaaacaacgccttgggtattagctaaggacgatagccaaaaagatatgttaggcaatgtaatggctcacttagttgaaaatattcgttatgcagctgtattattacgtccattcttaacacatgcgccgaaagagatttttgaacaattgaacattaacaatcctcaatttatggaatttagtagtttagagcaatatggtgtgcttaatgagtcaattatggttactgggcaacctaaacctattttcccaagattggatagcgaagcggaaattgcatatatcaaagaatcaatgcaaccgcctgctactaaagaggaaaaagaagagattcctagcaaacctcaaattgatattaaagactttgataaagttgaaattaaggcagcaacgattattgatgctgaacatgttaagaagtcagataagcttttaaaaattcaagtagacttagattctgaacaaagacaaattgtatcaggaattgccaaattctatacaccagatgatattattggtaaaaaagtagcagttgttactaacctgaaaccagctaaattaatgggacaaaaatctgaaggtatgatattatctgctgaaaaagatggtgtattaaccttagtaagtttaccaagtgcaattccaaatggtgcagtgattaaataa

SEQ ID NO: 4842 - DNA, 729 bp, Staphylococcus aureus
atgacatcaaaacatcaacaaaaggggtctatcgtcaatcgtttcttgaatagtgttgaaaaaatcggaaataaattgccagatcctagcgtcttattctttttaatgtgtgtgggcttagccattatgacatgggttatctcattatttaatgtatctgttaagcatccaggtacgcatcaaaccatttatattaaaaatataattagccatgatggatttacgatgataatgaatgatacgattaaaaatttctcagagttcccagcattaggcttagtactagcagtgatgattggtattggtgttgcagagaaaacaggatacttcgataagttaatgatttctgttgtgaatcgcgcaccacgtttcttaattttaccgactattatattaattggtattttaggtagtacagccggcgatgctgcgacaattatcttgccgccgcttgcagcaatgctttttattaaaattggctatcaccctatcgctggactaacgatggcatatgcttccgctgttggaggatttgcagcaaatatagttgttggtatgcaagatgctttggtctattcatttacagaaccggcaacacgtatcgtttcagattctattaaaacaaacgttgctatgaactggtactttatcgcagcgagtgtcgttgtattacttcctacgatattgctagttacaactaagctcattattcctagattaggaaaatat

SEQ ID NO: 4843 - DNA, 4047 bp, Staphylococcus aureus
atgctaaacagagaaaataaaacggcaataacaaggaaaggcatggtatccaatcgattaaataaattttcgattagaaagtacacagtgggaacagcatcaattttagtaggtacaacattaatttttggtctggggaaccaagaagcaaaggctgcagaaagtactaataaagaattgaacgaagcgacaacttcagcaagtgataatcaatcgagtgataaagttgatatgcagcaactaaatcaagaagacaatactaaaaatgataatcaaaaagaaatggtatcatctcaaggtaatgaaacgacttcaaatgggaataaattaatagaaaaagaaagtgtacaatctaccactggaaataaagttgaagtttcaactgccaaatcagatgagcaagcttcaccaaaatctacgaatgaagatttaaacactaaacaaactataagtaatcaagaagcgttacaacctgatttgcaagagaataaatcagtggtaaatgttcaaccaactaatgaggaaaacaaaaaggtagatgccaaaactgaatcaactacattaaatgttaaaagtgatgctatcaagagtaatgatgaaactcttgttgataacaatagtaattcaaataatgaaaataatgcagatatcattttgccaaaaagtacagcacctaaacgtttgaatacaagaatgcgtatagcagcagtacagccatcatcaacagaggctaaaaatgttaatgatttaatcacatcaaatacaacattaactgtcgttgatgcagataaaaacaataaaatcgtaccagcccaagattatttatcattaaaatcacaaattacagttgatgacaaagttaaatcaggtgattatttcacaattaaatactcagatacagtacaagtatatggattgaatccggaagatattaaaaatattggtgatattaaagatccaaataatggtgaaacaattgcgactgcaaaacatgatactgcaaataatttaattacatatacatttacagattatgttgatcgatttaattctgtacaaatgggaattaattattcaatttatatggatgctgatacaattcctgttagtaaaaacgatgttgagtttaatgttacgataggtaatactacaacaaaaacaactgctaacattcaatatccagattatgttgtaaatgagaaaaattcaattggatcagcgttcactgaaacagtttcacatgttggaaataaagaaaatccagggtactataaacaaacgatttatgtaaatccatcggaaaattctttaacaaatgccaaactaaaagttcaagcttaccactcaagttatcctaataatatcgggcaaataaataaagatgtaacagatataaaaatatatcaagttcctaaaggttatacattaaataaaggatacgatgtgaatactaaagagcttacagatgtaacaaatcaatacttgcagaaaattacatatggcgacaacaatagcgctgttattgattttggaaatgcagattctgcttatgttgtaatggttaatacaaaattccaatatacaaatagcgaaagcccaacacttgttcaaatggctactttatcttcaacaggtaataaatccgtttctactggcaatgctttaggatttactaataaccaaagtggcggagctggtcaagaagtatataaaattggtaactacgtatgggaagatactaataaaaacggtgttcaagaattaggagaaaaaggcgttggcaatgtaactgtaactgtatttgataataatacaaatacaaaagtaggagaagcagttactaaagaagatgggtcatacttgattccaaacttacctaatggagattaccgtgtagaattttcaaacttaccaaaaggttatgaagtaaccccttcaaaacaaggtaataacgaagaattagattcaaacggcttatcttcagttattacagttaatggcaaagataacttatctgcagacttaggtatttacaaacctaaatacaacttatgtgactatgtctgggaagatacaaataaaaatggtatccaagaccaagatgaaaaaggtatatctggcgtaacggtaacattaaaagatgaaaacggtgacgtgttaaaaacagttacaacagacgctgatggcaaatataaatttactgatttacataatggtaattataaagttgaatttactacaccagaaggctatacaccgactacagtaacatctggtagcgacattgaaaaagactctaatggtttaacaacaacaggtgttattaatggtgctgataacatgacattagatagtggattctacaaaacaccaaaatataatttaggtaattatgtatgggaagatacaaataaagatggtaagcaggattcaactgaaaaaggtatttcaggcgtaacagttacattgaaaaatgaaaacggtgaagttttacaaacaactaaaacagataaagatggtaaatatcaatttactggattagaaaatggaacttataaagttgaattcgaaacaccatcaggttacacaccaacacaagtaggttcaggaactgatgaaggtatagattcaaatggtacatcaacaacaggtgtcattaaagataaagataacgatactattgactctggtttctacaaaccgacttacaacttaggtgactatgtatgggaagatacaaataaaaacggtgttcaagataaagatgaaaagggcatttcaggtgtaacagttacgttaaaagatgaaaacgacaaagttttaaaaacagttacaacagatgaaaatggtaaatatcaattcactgatttaaacaatggaacttataaagttgaattcgagacaccatcaggttatacaccaacttcagtaacttctggaaatgatactgaaaaagattctaatggtttaacaacaacaggtgtcattaaagatgcagataacatgacattagacagtggtttctataaaacaccaaaatatagtttaggtgattatgtttggtacgacagtaataaagacggcaaacaagattcaactgaaaaaggtatcaaagatgttaaagttactttattaaatgaaaaaggcgaagtaattggaacaactaaaacagatgaaaatggtaaatactgctttgataatttagatagcggtaaatacaaagttatttttgaaaagcctgctggcttaacacaaacagttacaaatacaactgaagatgataaagatgcagatggtggcgaagttgacgtaacaattacggatcatgatgatttcacacttgataacggatacttcgaagaagatacatcagacagcgattcagactcagatagtgactcagacagcgactcagactcagacagcgactcagactcagacagtgattcagattcagacagcgactcagattcagatagcgactcagattcggacagcgattcagactcagatagcgactcagattcagatagcgattcagactcagacagcgactcagattcagatagcgattcggactcagacagcgattcagactcagatagcgactcagactcagacagcgactcagattcagatagcgattcggactcagatagcgactcagattcagacagcgattcagactcagatagcgactcagattcagacagcgattcagactcagatagcgactcagactcagacagtgattcagattcagacagcgactcagactcagatagcgactcagattcggacagcgactcagactctgatagcgactcagactcagacagtgattcagacagcgattcagactcggatgctggaaaacgtacacctgttaaaccaatgagtactactaaagaccatcacaataaagcaaaagcattaccagaaacaggtagtgaaaataacggctcaaataacgcaacgttatttggtggattatttgcagcattaggttcattattgttattcggtcgtcgcaaaaaacaaaacaaa

SEQ ID NO: 4844 - DNA, 2301 bp, Staphylococcus aureus
gtgaaaagcaatcttagatacggcataagaaaacacaaattgggagcggcctcagtattcttaggaacaatgatcgttgttggaatgggacaagaaaaagaagctgcagcatcggaacaaaacaatactacagtagaggaaagtgggagttcagctactgaaagtaaagcaagcgaaacacaaacaactacaaataacgttaatacaatagatgaaacacaatcatacagcgcgacatcaactgagcaaccatcacaatcaacacaagtaacaacagaagaagcaccgaaaactgtgcaagcaccaaaagtagaaacttcgcgagttgatttgccatcggaaaaagttgctgataaggaaactacaggaactcaagttgacatagctcaaccaagtaacgtctcagaaattaaaccaagaatgaaaagatcaactgacgttacagcagttgcagagaaagaagtagtggaagaaactaaagcgacaggtacagatgtaacaaataaagtggaagtagaagaaggtagtgaaattgtaggacataaacaagatacgaatgttgtaaatcctcataacgcagaaagagtaaccttgaaatataaatggaaatttggagaaggaattaaggcgggagattattttgatttcacattaagcgataatgttgaaactcatggtatctcaacactgcgtaaagttccggagataaaaagtacagatggtcaagttatggcgacaggagaaataattggagaaagaaaagttagatatacgtttaaagaatatgtacaagaaaagaaagatttaactgctgaattatctttaaatctatttattgatcctacaacagtgacgcaaaaaggtaaccaaaatgttgaagttaaattgggtgagactacggttagcaaaatatttaatattcaatatttaggtggagttagagataattggggagtaacagctaatggtcgaattgatactttaaataaagtagatgggaaatttagtcattttgcgtacatgaaacctaacaaccagtcgttaagctctgtgacagtaactggtcaagtaactaaaggaaataaaccaggggttaataatccaacagttaaggtatataaacacattggttcagacgatttagctgaaagcgtatatgcaaagcttgatgatgtcagcaaatttgaagatgtgactgataatatgagtttagattttgatactaatggtggttattctttaaactttaataatttagaccaaagtaaaaattatgtaataaaatatgaagggtattatgattcaaatgctagcaacttagaatttcaaacacacctttttggatattataactattattatacaagtaatttaacttggaaaaatggcgttgcattttactctaataacgctcaaggcgacggcaaagataaactaaaggaacctattatagaacatagtactcctatcgaacttgaatttaaatcagagccgccagtggagaagcatgaattgactggtacaatcgaagaaagtaatgattctaagccaattgattttgaatatcatacagctgttgaaggtgcagaaggtcatgcagaaggtaccattgaaactgaagaagattctattcatgtagactttgaagaatcgacacatgaaaattcaaaacatcatgctgatgttgttgaatatgaagaagatacaaacccaggtggtggtcaggttactactgagtctaacctagttgaatttgacgaagattctacaaaaggtattgtaactggtgctgttagcgatcatacaacaattgaagatacgaaagaatatacgactgaaagtaatctgattgaactagtagatgaactacctgaagaacatggtcaagcgcaaggaccaatcgaggaaattactgaaaacaatcatcatatttctcattctggtttaggaactgaaaatggtcacggtaattatggcgtgattgaagaaatcgaagaaaatagccacgtggatattaagagtgaattaggttacgaaggtggccaaaatagcggtaatcagtcatttgaggaagacacagaagaagataaaccgaaatatgaacaaggtggcaatatcgtagatatcgatttcgatagtgtacctcaaattcatggtcaaaataatggtaaccaatcattcgaagaagatacagagaaagacaaacctaagtatgaacaaggtggtaatatcattgatatcgacttcgacagtgtgccacatattcacggattcaataagcacactgaaattattaagaag

SEQ ID NO: 4845 - DNA, 678 bp, Staphylococcus aureus
atgaaatttaaagcgatagcaaaagcaagtttagcattgggaatgttagcaacaggtgtaattacatcgaatgtacaatcagtacaagcgaaagcagaagttaaacaacaaagtgaatcagagttaaaacactattataataaaccaattttagagcgtaaaaatgtgactggatttaaatatactgatgagggtaaacactatttagaagtcacagtagggcaacagcattctcgaatcactttacttggatctgataaagataaatttaaagacggagaaaactcaaatatagatgtgtttatccttagagaaggtgacagtagacaagcaacaaattactcaattggtggcgttacaaaatcaaatagtgtgcagtatattgattatatcaatacgccaattttagaaatcaagaaagataatgaagatgtacttaaagatttttactacatttcaaaagaagacatctcattaaaagaacttgattatagattaagagaacgtgcgattaaacaacacggcttgtattcaaatggtcttaaacaaggtcaaattacaattacaatgaatgatggcacaacacatacaatcgatttaagtcaaaaacttgaaaaagaacgtatgggtgagtcaatcgacggcactaagattaataaaattctagtagaaatgaaa

SEQ ID NO: 4846 - DNA, 981 bp, Staphylococcus aureus
atgaaaatgaaaaaattagtcaaatcatcagttgcttcatcaattgcactgcttttgctatcgaatacagttgatgcagctcaacatatcacacctgtaagcgagaaaaaagtagatgacaaaatcactttatacaaaacaacagcaacatctgataatgataaattgaatatttctcaaattttaacgtttaatttcattaaggataaaagttatgacaaagatacgttagtacttaaggcagccggaaacattaattcaggttataaaaagcctaatccaaaagattacaattactcacagttttattggggcggtaagtataatgtttcggttagttcagaatcaaatgatgctgtaaatgttgttgactatgcacctaaaaatcaaaatgaagaattccaagttcaacaaacattaggttattcttatggcggagatattaatatatctaatggcttatcaggtggattaaatggatcaaaatcattttcagaaacgataaattataaacaagaaagttacagaactacgattgatagaaaaacaaatcataaatcaattggctggggtgttgaggcgcacaaaattatgaataatggttggggaccatatggtagagatagttatgacccaacatatggtaatgaactgtttttaggtggtagacaaagtagttcaaatgctggtcaaaatttcttgccaacacatcaaatgcctttattggcgcgtggtaactttaacccagaatttataagcgtactttctcataaacaaaatgatacaaaaaaatctaaaatcaaagtaacttaccaaagagaaatggatagatatactaatcaatggaatcgactacactgggttggaaataactacaaaaatcaaaatacagtaacgtttacatctacttatgaagttgactggcaaaaccatactgttaaattaatcggtacggattctaaagaaactaatcctggagta

SEQ ID NO: 4847 - DNA, 1579 bp, Staphylococcus aureus
aatttattagaagtcaacagtctgaatgtacaattcaattatgatgaaactacagttcaagcggtaaaaaacgtctctttcgaattacgaaaaaaacatatcctaggtattgttggtgaatcaggatcaggaaaaagtattaccgactgcatctattttagggttaataccagattatccagatcacacattaacaggagaaattatttttaatgggcaatcgttaaataatttatcaacttcagcgttacaacaaattcgaggtaaggatatttcaatgatttttcaagatccactctcttcgttgaatccaagattaacgattggcaaacaaattacagaagtaatatttcaacataaacgtgtatctaaatctgaagcaaagtcgatgacaatagacattttagaaaaagtaggtataaaacatgcaactcgacaatttgatgcttatccacatgaactttctggtggtatgcgtcaacgtgtcatgatagcaatggcattgattttaaagccacaaattttaatcgcagatgaaccaacaacggcattagatgccagtacacaaaatcaattactgcagttaatgaagtccctttatgagtacacagaaacatctattatttttatcactcacgatttaggcgctgtgtatcaattttgcgacgatgtgattgtaatgaaagatggaagtgtcgttgaaagtggcacggttgaaagtatttttaaatcgccacaacatacctatacaaaacgcttaatagatgcgattcctgatattcatcaaacgcgtccgccaagaccgttaaacaatgatattttattaaaattcgatcgcgtgagcgtggattacacatcaccgagtggcagcctataccgagcagttaatgatattaacttggctattagaaaaggcgaaacattaggcattgtcggtgaatcagggtcagggaaatcgacattagctaagacggtcgtcggtctaaaggaagtgtcagaaggctttatttggtataacgaattaccattaagtttatttaaagatgatgaattgaaatctttacgacaagagatacaaatgatttttcaagatccattcgcatctattaatccaagatttaaagtcattgatgtgattaaacgaccactaatcattcatgggaaagtcaaagataatgatgacattattaaaactgtcgtatcgttgttagaaaaggttggcctagatcaaactttcttatatcgctatccacacgaattatctggtgggcaacgtcagcgtgtaagtatcgcgagagcacttgctgttgaacctaaagtgattgtttgcgacgaggcagtgtccgctttagacgtttcaattcaaaaagatatcatcgagttattaaaacaattacagttagacttcggcatcacttatttattcatcacacatgacatgggtgttatcaatgaaatatgtgatcgcgttgcagttatgaaaaatggcgaaatcgttgaactgaataacacagaagatattatcaaacatccgcagtcagactatgcaaagcaacttatttcagaagtagcagttatt

SEQ ID NO: 4848 - DNA, 651 bp, Staphylococcus aureus
gcttatcgtttattagctaaaataatattacgtttaaaagcatttgacgagtttgagtttacaattgatgaaattggaatggatgaacaagagaatgaagactataaaagtaaatatttagctgtgtacgatcaagtaaaaagagcgacggctgagaaaaataaagtatccattttaaatgatattgatttcgaaatagaaatgatgcgtaatgatacgattaatgtgaattatattatgaatatattgagacaaattgatcttgaagacaaagcggaacaacgtcgtaaccaagaacaaattagacgcattttagatcatgcagatgatccgacattgaggttaaaacgagatctaattagagaattcatcgacaatgttgtaccttctttaaataaggatgatgatatcgatcaagaatatgttaatttcgaaagtattaaaaaagaagcggagttcaaaggatttgctggagagagatctatcgatgaacaagccctaaaaacaatttcaaatgactaccagtatagtggtgttgtaaacccacatcaccttaaaaaaatgattggtgatttgccattgaaagaaaagcgtaaagcaagaaaagccattgaatctttcgtggcagaaacaactgaaaaatacggtgtg

SEQ ID NO: 4849 - DNA, 1509 bp, Staphylococcus aureus
atgtcaacgagtacaagtttgtctgactctacaagtttgtcaacatcattaagtgattccacaagtgatagtaagtctgattcattaagtacatcaatgtcgacaagtgattcaatcagtacaagtaaatctgattccattagtacatccacatcattaagtggttctacaagtgaaagtgaatccgactcaacatcatcaagtgaaagtaaatccgattcaacatcaatgagcataagtatgtctcaatcaacatcaggaagtacaagtacgtcaacgagtacaagtttgtctgactcaacgagtacatcattgtcactaagtgcctcaatgaatcaaagcggagtagactcaaactcagcaagccaaagtgcctcaaactcaacaagtacaagcacgagcgaatccgattcacaaagcacatcatcatatacaagtcagtcaacaagccaaagtgaatccacatcgacatcaacgtcactaagcgattcaacaagtatatctaaaagtacgagtcaatcaggttcggtaagcacatcagcgtcattaagtggttcagagagtgaatctgattcacaaagtatctcaacaagtgcaagtgagtcaacatcagaaagtgcgtcaacatcactcagtgactcaacaagtacaagtaactcaggatcagcaagtacgtcaacatcgctcaataactcagcaagcgcaagtgaatccgatttgtcgtcaacatctttaagtgattcaacatctgcgtcaatgcaaagcagtgaatccgattcacaaagcacatcagcatcattaagtgattcgctaagtacatcaacttcaaaccgcatgtcgaccattgcaagtttatctacatcggtaagtacatcagagtctggctcaacatcagaaagtacaagtgaatccgattcaacatcaacatcattaagcgattcacaaagcacatcaagaagtacaagtgcatcaggatcagcaagtacatcaacatcaacaagtgactctcgtagtacatcagcttcaactagtacttcgatgcgtacaagtactagtgattcacaaagtatgtcgctttcgacaagtacatcaacaagtatgagtgattcaacgtcattatctgatagtgttagtgattcaacatcagactcaacaagtgcgagtacatctggttcgatgagtgtgtctatatcgttaagtgattcgacaagtacatcaacatcggctagtgaagtaatgagcgcaagcatatctgattcacaaagtatgtcagaatctgtaaatgattcagaaagtgtaagtgaatctaattctgaaagtgactctaaatcgatgagtggctcaacaagtgtcagtgattctggctcattgagcgtctcaacgtcattaagaaaatcagaaagtgtaagcgagtcaagttcattgagttgctcacaatcgatgagcgattcagtaagcacaaacgattcgtcatcattaagtgtatcgacgttactaagaagtttataa

SEQ ID NO: 4850 - DNA, 747 bp, Staphylococcus aureus
atgcctcaacgtcaacagactagccgacgttcaaatagaattcaaacgcgttcggttgagtcaagagctgcagagcctagatcagtatcagactatcaaaatgcaaattcatcatattatgttgaaaatgctaatgatggttcgggctatcctgttggtacatatatcaatgcttctagtaaaggggcgccatataatttaccaactacaccatggaatacattgaaggcctctgactcaaaggaaattgctcttatgacagcgaaacaaactggagacgggtaccaatgggttattaagtttaataaaggacatgctccacatcaaaatatgatcttttggtttgcattaccagcagaccaagtgccagtaggaagaactgactttgtaacagttaattcagatggaacaaatgtacaatggagtcatggagcaggagcaggtgcaaataaaccacttcaacaaatgtgggaatatggagtaaatgatcctcatcgttcacatgactttaaaataagaaatagaagtggccaagtaatatatgactggccaactgtccatatttattctttagaagatttatctagagcgagtgattattctagtgaagctggagcgacacctgctactaaagcatttggtagacaaaattatgaatatattaatggtcaaaaacctgctgaatcaccgggtgtacctaaagtttatactttcattcggccaagtgatgcaagttatccaatttaa

SEQ ID NO: 4851 - DNA, 798 bp, Staphylococcus aureus
atggctgcttctaaagctaagaaacattcaaatgacgctcaaaacaaaagtaattctggcaaggcgaataactcgactgaggataaagcgtctcaagataagtctaaagatcatcataatggcaaaaaaggtgcagcgatcggtgctggaacagcaggtttggctggaggcgcagcaagtaaaagtgcttctgccgcttcaaaaccacatgcctctaataatgcaagccaaaaccatgatgaacatgacaatcatgacagagataaagaacgtaaaaaaggtggcatggccaaagtattgttaccattaattgcagctgtactaattatcggtgcattagcgatatttggaggcatggcattaaacaatcataataatggtacaaaagaaaataaaatcgcgaatacaaataaaaataatgctgatgaaagtaaagacaaagacacatctaaagacgcttctaaagataaatcaaaatctacagacagtgataaatcaaaagaggatcaagacaaagcgactaaagatgaatctgataatgatcaaaacaacgctaatcaagcgaacaatcaagcacaaaataatcaaaatcaacaacaagctaatcaaaatcaacaacagcaacaacaacgtcaaggtggtggccaaagacatacagtgaatggtcaagaaaacttataccgtatcgcaattcaatactacggttcaggttcaccggaaaatgttgaaaaaattagacgtgccaatggtttaagtggtaacaatattagaaacggtcaacaaatcgttattccataa

SEQ ID NO: 4852 - DNA, 927 bp, Staphylococcus aureus
atgaaaaaattcattggatcagttttagctacgacattaattttagggggatgttccacgatggaaaatgaatcaaaaaaagacacaaaaacagaaacaaaatctgtaccagaagaaatggaagcttcaaaatatgtaggccaaggcttccaaccgcctgcagaaaaaaatgcgattgaatttgcgaagaagcatcgtaaagaatttgaaaaagtaggtgaacaattctttaaagataactttggactaaaagttaaagctacaaatgttgtaggtaaagatgatggtgtagaagtttatgtgcattgtgaagatcatggcattgtatttaatgcaagtctacctttgtacaaagatgccatccatcaaaaaggatcaatgcgtagtaatgacaacggtgatgatatgagtatgatggtgggtacagtgctgagtggctttgaatatcgagcgcaaaaagaaaagtatgataatttatataaatttttaaaagaaaatgaaaagcaatatcaatatacaggttttactaaagaagcaattaacaagacgcaaaacgtcgggtatcaaaatgaatatttttatattacatatttatcaagaaatttaaaagaatatagaaaatattacgaaccattgatacataaaaatgataaagagtttaaagaaggtatgcaacgagctagaaaagagctaaactatactgctaatacaaatactgtagcaacgttgtttagtacgaatgatgaaaggaatagaaaagaaaagataaataatgtaatagatttatccgagaaaattgaaagaacaaaagatatgccaatcaagaatactataactactcaattaggaaataaacttattggcacaaaaaaagctcgttttgatgataagaaagtagtgtcgtttggagcatttgaagatgaataa

SEQ ID NO: 4853 - DNA, 3645 bp, Staphylococcus aureus
atgggtacattgaaacaacaaattcaagcgaacagtcaagtaccacagtcagttgactttacacaagcggatcaagacaaacaacaagcatataacaatgcggctaaccaagcgcaacaaatcgcaaatggcataccaacacctgtattgacgcctgatacagtaacacaagcagtgacaactatgaatcaagcgaaagatgcattaaacggtgatgaaaaattagcacaagcgaaacaagaagctttagcaaatcttgatacgttacgcgatttaaatcaaccacaacgtgatgcattacgtaaccaaatcaatcaagcacaagcgttagctacagttgaacaaactaaacaaaatgcacaaaatgtgaatacagcaatgagtaacttgaaacaaggtattgcaaacaaagatactgtcaaagcaagtgagaactatcatgatgctgatgccgataagcaaacagcatatacaaatgcagtgtctcaagcggaaggtattatcaatcaaacgacaaatccaacgcttaacccagatgaaataacacgtgcattaactcaagtgactgatgctaaaaatggcttaaacggtgaagctaaattggcaactgaaaagcaaaatgctaaagatgccgtaagtgggatgacgcatttaaacgatgctcaaaaacaagcattaaaaggtcaaatcgatcaatcgcctgaaattgctacagtgaaccaagttaaacaaacagcaacgagcctagatcaagcaatggatcaattatcacaagctattaatgataaagctcaaacattagcggacggtaattacttaaatgcagatcctgacaaacaaaatgcgtataaacaggcagtagcaaaagctgaagcattattgaataaacaaagtggtactaatgaagtacaagcacaagttgaaagcatcactaatgaagtgaacgcagcgaaacaagcattaaatggtaatgacaatttggcaaatgcaaaacaacaagcaaaacaacaattggcgaacttaacacacttaaatgatgcacaaaaacaatcatttgaaagtcaaattacacaagcgccacttgttacagatgtcactacgattaatcaaaaagcacaaacgttagatcatgcgatggaattattaagaaatagtgttgcggataatcaaacgacattagcgtctgaagattatcatgatgcaactgcgcaaagacaaaatgactataaccaagctgtaacagctgctaataatataattaatcaaactacatcgcctacgatgaatccagatgatgttaatggtgcaacgacacaagtgaataatacgaaagttgcattagatggtgatgaaaaccttgcagcagctaaacaacaagcaaacaacagacttgatcaattagatcatttgaataatgcgcaaaagcaacagttacaatcacaaattacgcaatcatctgatattgctgcagttaatggtcacaaacaaacagcagaatctttaaatactgcgatgggtaacttaattaatgcgattgcagatcatcaagccgttgaacaacgtggtaacttcatcaatgctgatactgataaacaaactgcttataatacagcggtaaatgaagcagcagcaatgattaacaaacaaactggtcaaaatgcgaaccaaacagaagtagaacaagctattactaaagttcaaacaacacttcaagcgttaaatggagaccataatttacaagttgctaaaacaaatgcgacgcaagcaattgatgctttaacaagcttaaatgatcctcaaaaaacagcattaaaagaccaagttacagctgcaactttagtaactgcagttcatcaaattgaacaaaatgcgaatacgcttaaccaagcaatgcatggtttaagacagagcattcaagataacgcagcaactaaagcaaatagcaaatatatcaacgaagatcaaccagagcaacaaaactatgatcaagctgttcaagccgcaaataatattatcaatgaacaaactgcaacattagataataatgcgattaatcaagcagcgacaactgtgaatacaacgaaagcagcattacatggtgatgtgaagttacaaaatgataaagatcatgctaagcaaacggttagtcaattagcacatctaaacaatgcacaaaaacatatggaagatacgttaattgatagtgaaacaactagaacagcagttaagcaagatttgactgaagcacaagcattagatcaacttatggatgcattacaacaaagtattgctgacaaagatgcaacacgtgcgagcagtgcatatgtcaatgcagaaccgaataaaaaacaatcctatgatgaagcagttcaaaatgctgagtctatcattgcaggattaaataatccaactatcaataaaggtaatgtatcaagtgcgactcaagcagtaatatcatctaaaaatgcattagatggtgttgaacgattagctcaagataagcaaactgctggaaattctctaaatcatttagatcaattaacaccagctcaacaacaagcgctagaaaatcaaattaataatgcaacaactcgtgataaagtggctgaaatcattgcacaagcgcaagcattaaatgaagcgatgaaagcattaaaagaaagtattaaggatcaaccacaaactgaagcaagtagtaaatttattaacgaggatcaagcgcaaaaagatgcttatacgcaagcagtacaacacgcgaaagatttgattaacaaaacaactgatcctacattagctaaatcaatcattgatcaagcgacacaggcagtgacagatgctaaaaacaatttacatggtgatcaaaaactagctcaagataagcaacgtgcaacagaaacgttaaataacttgtctaacttgaatacaccacaacgtcaagcacttgaaaatcaaattaataatgcagcaactcgtggcgaagtagcacaaaaattaactgaagcacaagcacttaaccaagcaatggaagctttacgtaatagcattcaagatcaacagcaaacggtagcgggaagcaagtttatccatgtagataaaccacaaaaagatgcttaccaagcagcagttcaaaatgcaaaagatttaattaatcaaactaacaatccaacgcttgataaagcacaagttgaacaattgacacaagctgttaaccaagctaaagataacctacacggtgatcaaaaacttgcagacgataaacaacatgcggttactgatttaaatcaattaaatggtttgaataatccgcaacgtcaagcacttgaaagccaaataaacaacgcagcaactcgtggcgaagtagcacaaaaattagctgaagcaaaagcgcttgatcaagcaatgcaagcattacgtaatagtattcaagatcaacaacaaacagaatctggtagcaagtttatcaatgaagataaaccgcaaaaagatgcttaccaagcagcagttcaaaatgcaaaagatttaattaaccaaacaggtaatccaacactcgacaaatcacaagtagaacaattgacacaagcagtaacaactgcaaaagataatctacatggtgatcaaaaacttgctcgtgatcaacaacaagca

SEQ ID NO: 4854 - DNA, 804 bp, Staphylococcus aureus
atgaaatcaatcccggaaaaagagagtgatgaaatgataaaacgtgtaaataaattagtgcttggtattagtcttctgtttttagtcattagtatcactgctggttgtggcatgggtaaagaagcggaaataaagaaaagttttgaaaaaacattgagtatgtatccgattaaaaatctagaggatttatacgataaagaaggatatcgtgatgatcaatttgataaaaatgataagggaacatggattgtaaattctcaaatggcaattcaaaataaaggagaagctctaaaaataaaaggcatgcttttgaagatagatagaaatacaagaagtgcaaaaggattttactatactaatgaaataaagacggagaaatacgaagtagctcaggataatcaaaaaaaatatccagttaaaatgattaataataaattcatttctactgaggaagttaaagaagaaaacataaaaaaagaaatcgaaaactttaagttttttgcgcaatatagcaattttaaagatttaatgaattataaagatggagatatatcatataatccagaggtgccgagttattcagctcaatatcaattaactaatgatgattataatgtaaaacaattacgtaaaagatatgacataccaacaaataaagcgccgaagctgttgttgaaaggtacagggaatttaaaaggttcatcagttggatataaaaaaattgaatttacttttttagagaataaaaatgaaaatatttactttactgatagtctacatcttgaaccgagcgaggataaataa

SEQ ID NO: 4855 - DNA, 771 bp, Staphylococcus aureus
atgatgaaacgattaaacaaattagtgttaggcattatttttctgtttttagtcattagtatcactgctggttgtggcataggtaaagaagcgaaaataaagaaaagttttgagaagacattgagtatgtatccgattaaaaatctagaggatttatacgataaagaaggttatcgtgatgacgaatttgataaaaatgataaaggtacatggattattggttctgaaatggcaactcaaaataagggggaagctctgaaagttaaaggtatggtcttgtatatgaatagaaataccaaaacaacaaaaggatattattatgtaaatgcaataaagaatgataaagacggaagaccccaagagaatgaaaaaaggtacccagttaaaatggtcgataataaaatcattccaacaaaagaaattaaagataaaaacataaaaaaagaaatcgaaaactttaagttctttgttcaatatggaaactttaaagatttgtcgaagtataaagacggagatatttcatataatccagaggtgccgagttattcggctaaatatcaattaactaatgatgattacaatgtaaagcaattacgtaaaagatatgacataccaacaaataaagcaccgaagttgttgttgaagggtacagggaatttaaaaggttcatcagttggatataaagacattgaatttacgtttgtagagaaaaaagaagagaacatttactttagtgatgggttaatttttaaaccaagtgaggataaataa

SEQ ID NO: 4856 - DNA, 180 bp, Staphylococcus aureus
atggataaaaatgataaagttaaaaaatctaaaattgctaaagaatcagtagctaatcaagagaaaaaacgagcagaattaccaaaaacaggtttagaaagcacgcaaaaaggtttgatctttagtagtataattggaattgctggattaatgttattggctcgtagaagaaagaattaa

SEQ ID NO: 4857 - DNA, 996 bp, Staphylococcus aureus
atgagcaatcaattcaaaagcgaagaagagcgaagacaatgggaacaattccaagctttccaaaatcaacaaaaccaacagaaccagcaatacggacaaaagaaatctaaaaaaggatggttctggggctgtggtggttgtctagtattatttattttaattatcatcggtatttcagcttgtacagctggtattacaggtaaccttggcggaaatagttctaaagaaacgaacaaaacccataaaatcggtgaaactgttaaaaatggcgaccttgaagtcactgtaaattcagtggaaactatgaaatctgtaggaccatctcttgcaccaacaaacgctaaaggtatatttgtcgttgctgatgtgacgattaaaaacaaaggtaaagaagcgttaacaattgatagttcaatgtttaagctaaaatccggtgataaaacatttgaagcagataatacaggttcaatgtctgctaatcaaagtgacaatggtagtatagaaaattcatttttcttacagcgtataaatccagatagcactgctcaaggtaaaattgttttcgatgtgtcagaaaacatagccaacgcaaaagataaaaaattagaagttatttctagtttatttagcgtcaagaagattacatttgatttatccgatgctaaaaaaacatcaaaagctaaaaaagacaagcaagatacagaagtagctgttgcgagttcaaatagcgataatgtaagttatgaagcttcggctactacacctgctacaacttctagtgcggatactgattctgaagatagcgaaaagtctagtaaagatgaggataagcagaatgcgtctaaaagtgataaatctagtgtagaaaaaagtgaatctaatgaggaaactgctcctgtagagcccatgccccatagcaaacctaccactagtgaagcaccacctagccaaaatattcacaatgaagatagcatgtacgacgcttcaacagaataa

SEQ ID NO: 4858 - DNA, 395 bp, Staphylococcus aureus
atgagctggtttgataaattattcggcgaagataatgattcaaatgatgacttgattcatagaaagaaaaaaagacgtcaagaatcacaaaatatagataacgatcatgactcattactgcctcaaaataatgatatttatagtcgtccgaggggaaaattccgttttcctatgagcgtagcttatgaaaatgaaaatgttgaacaatctgcagatactatttcagatgaaaaagaacaataccatcgagactatcgcaaacaaagccacgattctcgttcacaaaaacgacatcgccgtagaagaaatcaaacaactgaagaacaaaattatagtgaacaacgtgggaattctaaaatatcacagcaaagtatgggaaccgagctcaaacgtca

SEQ ID NO: 4859 - DNA, 276 bp, Staphylococcus aureus
atgactaaagaaacagataataaaaaaacagtagcgacttctgacaacaaagacacacagcaacaaaatcaacctgaagaagatgaacgtcaaggtttgaatggttatcgtaaaacagatcttgatttagaaatcgagcaagagctacgtgaaatgatgaaaacaggagaaaatgaaacgaaaaatgactataaaaagtttaaagtgttttcacttatttcaacacttgtcattgtcattttagcaattataagatttgttcataaaatgatgtaa

SEQ ID NO: 4860 - DNA, 255 bp, Staphylococcus aureus
atgacaagaattcttaaattacaagttgcggatcaagtcagcacgctaaatcgaattacaagtgcttttgttcgcctacaatataatatcgatacattacatgttacacattctgaacaacctgggatttctaacatggaaattcaagtcgatattcaagatgatacatcacttcatatattaattaaaaaattaaaacaacaaattaatgttttaacggttgaatgctacgaccttgttgataacgaagcttaa

SEQ ID NO: 4861 - protein, 283 aa, Enterococcus faecalis
  VARIANT (1)...(283): Xaa = Any Amino Acid
LLVDEPLKNVTFTKTKXPADVLALPKTKKEVEEIVAYCREQGLSWLVLGNASNLIVRDGGIRDVVIMLTEMKEIKVAGTTMIVDAGAKLIDTTYEALAADLTGFEFACGIPGSVGGAVYMNAGAYGGEIKDVFQSAEVLLADGTIQTMTKEDLNFRYRHSEIQELHCIVLQATFALEKGNHAEIKAQMDELTELRELKQPLEYPSCGSVFKRPVGHFTGKLIQDAGLQGLKWGGAQISEKHAGFIVNIDHATATDYVELIAHIQEVIKEKFDVELQTEVRIIG

SEQ ID NO: 4862 - protein, 362 aa, Enterococcus faecalis
KDNWGSEIVGVYEKDTLVASSLVLIKPLPAGFTMLYTPRGPVMDYTNERLVSYFMAELKKFGKKKRALFIKMDPAVHYQDFHLGEEHQPHAEATAIIETLKEAGAKYQGLTMDMGATIQPRFQANIYREDFSEEQLSKSTKKMIKTAEKKGVVVQQGHVDFVDEFEKVIQSTMERQHISLRNSDYFKKLLNIYPEDSFIMLAQVNLKERLDSTRQRYDKNQKDLSNLKENQVKKRHNLEELDASLTRELKELEENIAEAGEIVTVAGALAVTFGPTSEILYAGLDDRYKRYMPTYVTWRDAIQECFNRGCESCNMGGLEGSLNDGLIKFKANFNPTINEFIGEFDLPVNKLLFKASEYAYKL

SEQ ID NO: 4863 - protein, 433 aa, Enterococcus faecalis
MEQIIVHGGNTKLEGTVKIEGAKNAVLPILAATLLAEEGVTTLKNVPILSDVFTMNQVIKHLNVAIDFDEDANEVTIDATQPLGIEANYEYVSKMRASIVVMGPLLARNGHAKVAMPGGCAIGKRPIDLHLKGFQALGAKIIQKNGYIEAIADELIGNTIYLDFPSVGATQNIMMAAVRAKGTTIIENVAREPEIVDLANILNKMGANVIGAGTETMRIEGVDKLHAVEHSIVQDRIEAGTFMVAAAMTEGNVLIEEAISEHNRPLISKLTEMGAIIEEEENGIRVIGPKHLKPTDVKTMPHPGFPTDMQAQMTAIQMFAEGTSIVTETVFENRYQHLEEMRRMNADLKIDGNIAVINGGNELQGAAVEATDLRAAAALILVGLRANGITRVSNLKYLDRGYYEFHKKLQKLGANVERVNDEKIEEKQATTVI

SEQ ID NO: 4864 - protein, 409 aa, Enterococcus faecalis
KRVVITGMGAVTPLGNTVKEFWHNLVDGKLGIGKITKFDSEDTGVALAGEVKEFDPSAVLERKEQKRMDLFSQYGLVAALEAWEMSGLTEATIDPTRLGVIVGSGIGGMTTLQDQVRVMDKKGAKRVTPFFVPMVIANMAAGNISIRLGAKGPSQTIVTACASATNAIGEAFRTIKYGLADMMVTGGTEATVCEIGIAGFAALNALNTTEDATRASIPFDKERKGFVMGEGAGMLVLEELEHAQKRGATIYGEIVGYGSNCDASHMTAPLKDGSGAAAAMEMAIAEAGITPEQIGYINAHGTSTPANDAAETTAIKRVFGERASQIPISSTKSMTGHLLGAAGGIEAIACVQTLQEGKAHPTVGYQVADPDCDLDYVTEGARDITADYTISNSFGFGGHNGVICLKKWE

SEQ ID NO: 4865 - protein, 550 aa, Enterococcus faecalis
IKNNETGVFAIGGLGEIGKNTYGVQFQDEIIIIDAGIKFPEDDLLGIDYVIPDYSYIVQNLHKVKALVITHGHEDHIGGVPYLLRQANIPIYAGPLALALITNKLDEHGLLREAELHEINEDTVIRFRKTAISFFRTTHSIPDALGVVVKTPSGNIVATGDFKFDFTPVGEPANLHRMAKLGEEGVLCLLSDSTNAEIPTFTKSEKTIGTSILKIFEKIDGRIIFASFASNIFRLQQAADAAVKTGRKIAVFGRSMENAIVNGERLGYIKVPKGTFVDAAELNQLPANETMILCTGSQGEPMAALSRIANGTHRQISIQPGDTVVFSSSPIPGNTTSVNRLINLLSEAGAEVIHGKINNIHTSGHGGQEEQKLMLRLMKPKYFMPVHGEFRMLKIHASLAQDTGVPEENCFIMGNGDVLALTADSARPAGHFNANDVYVDGNGVGDIGNVVLRDRRILSEEGLVLAVATVDIKNKEIMAGPDILSRGFVYMRESGDMIHEGQRLLFNALREAMKDKNCTEAKLGEAMTTALQPFLFEQTERHPMILPMIM

SEQ ID NO: 4866 - protein, 363 aa, Enterococcus faecalis
MKILVTGGGTGGHIYPALSFVEHVKKEAPATEFLYVGTENGLESQIVPKAKIPFKTIKIQGFKRSLSPQNFKTIYLFLTSINKAKKIIREFQPDVVIGTGGYVSGAVVYAAHQLKIPTIIHEQNSIPGMTNKFLSRYVDKIAICFSDVASFFPKEKTILTGNPRGQEVVTVEKSAILSEFGLDPAKKTVVLFGGSRGALKINQAFEQAFPLFEEREYQVLYASGERYYQELQESLKLSEKKLTNISVQPYIDKMVEVMANTDLMVGRAGATSIAEFTALGLPAILIPSPYVTNDHQTKNAQSLVKVGAVEMIPDAELTGARLVAAIDDILLNNEKRQQMATASKGEGIPDASDRLYQVVKTLV

SEQ ID NO: 4867 - protein, 156 aa, Enterococcus faecalis
MPRKGPVAKRDVLPDPIYNSKLVTRLINRVMVDGKRGIAANIIYNSFDIIKESTGNDPLEVFEQAMKNVMPVLEVKARRVGGSNYQVPVEVRPERRTTLGLRWVVNYARLRGEHTMEERLAKEIMDAANNTGASVKKREDTHKMADANRAFAHYRW

SEQ ID NO: 4868 - protein, 128 aa, Enterococcus faecalis
AAKKVSRKRRVKKNIESGVAHIHSTFNNTIVMITDTHGNALAWSSAGSLGFKGSKKSTPFAAQMAAEAATKVAMEHGLKTVDVTVKGPGSGREAAIRSLQATGLEVTAIRDVTPVPHNGCRPPKRRRV

SEQ ID NO: 4869 - protein, 285 aa, Enterococcus faecalis
NLQLVIITGMSGAGKTVAVQSFEDMGYFCIDNLPPSLIPKFWELIKESGKVTKIALVIDLRSRTFFREIQDMLVELENTNFIDTTILFLDATDEELVSRYKETRRAHPMAMDGLVTEGIRKERAMLEEIKADAQLVIDTTDLSPRQLRERLNKELATRETHEFRVEMVSFGFKYGLPIDADIVMDVRFLPNPHYIDELRPLTGMDQPVYDYVMGFPETDEFYTKFIDLLRTVLPGYKKEGKSSVTIAIGCTGGQHRSVALTERVGAELKEEDYHVNITHRDRLKR

SEQ ID NO: 4870 - protein, 135 aa, Enterococcus faecalis
MLVPKRVKHRREFRGKMRGEAKGGKEVAFGEWGLQATESHWITNRQIEAARIAMTRYMKRGGKVWIKIFPHKSYTSKAIGVRMGKGKGAPEGWVSPVKRGKIMFEIAGVPEEVAREALRLASHKLPVKTKIVKRE

SEQ ID NO: 4871 - protein, 60 aa, Enterococcus faecalis
MKVKEIRELTTAEMLDKEKQLKEELFNLRFQLATGQLENTARIKEVRQSIARIKTVLREQ

SEQ ID NO: 4872 - protein, 446 aa, Enterococcus faecalis
FVIKGTGFSSKNLQEIKVYEETLFCIDEAGVIQEIIEPDAEAYETVLAEQKEAQRFQELPQDSYLLPGFVDLHVHAPQWAQSGTALDIPLYEWLNTYTFPLESKFADLTFAQQVYDELVTQLLANGTTTALYFATIHYEASRRLAEICAEKGQRGLIGKVVMDDLNENPEYYRDQTTQQALEETERFIQEIQTLAQQTKQGVYPVVTPRFIPSCTEEALKGLGELAAKYQVHVQSHCSESDWEHQFVQERFGKNDTQALNDFGLLTEKAVMAHAGFLEEADMNLFHETGTAVAHCPISNAYFGNAVTPIAKLVHQHQVEVGLGSDLSGGFSPSLFDNLKQAVISSRMLEDGVDATKKPEVRGVKTARITVNEAFYLATAGGGQALSLPIGKLEKGYAWDVQIINTSLSQARIPKNPGESLLDIFQKILYLARPENIREVWVQGEKV

SEQ ID NO: 4873 - protein, 128 aa, Enterococcus faecalis
VMTATEIMEMIPNRYPICYIDYVDEIIPNEKIIATKNVTINEEFFQGHFPGNPTMPGVLIIEALAQVGSILILKMDQFEGETAYIGGINKAKFRQKVVPGDVLKLHFEIVKLRDFVGIGKATAYVEDK

SEQ ID NO: 4874 - protein, 88 aa, Enterococcus faecalis
KTHKITIIEPRVYSEAMSIAKHLFAEEAVLVNFTLVEEDQARRIVDFLTGTVYALDGDIQRVGNEIFLCTPANMEIDSATAQSLANKQ

SEQ ID NO: 4875 - protein, 356 aa, Enterococcus faecalis
MKTKKIVVGLFCSMIILMGCQPDQRTEKMKESTEAEAVQVTSGASAATNATSVKQEEQTNTNDQPKESAAKVSYERNGHTFEVDAVSGATVEANNGQSGISPEEKAQKMYWSGRPEIGEVQGDYYHHEVVFDGGYTALIDVVVKDQQIQLVEFDERGPKNYYSEEWAGVTKRLSGYANFQANNARTDQSLVTVVNTMTFLENQMVAENRLDGAFQTAKGQSNSANNGYLPAARALAKEIKEPSKEHYTSLTEDFGEGLSGRLTVITLKDSGKITDLRYDEYFADTEEEIKDAKLKAYSRQSKYFSKDYAQKSGENFKKEVDDLRKKAIEENKLVSPTNEEAWSENYQSLVKKITSQ

SEQ ID NO: 4876 - protein, 877 aa, Enterococcus faecalis
SEEKNLPTKYQPTEIEAGRYQKWLDQDLFKPSGDKKAKPYSIVIPPPNVTGKLHLGHAWDTTLQDMIIRQKRMQGFDTLWLPGMDHAGIATQAKVEEKLAQQGISRYDLGREKFVDQVWEWKEEYASHIREQWAKMGLSLDYSRERFTLDEGLSEAVRKVFVSLYEKDLIYRGEYIINWDPKAKTALSDIEVIHKDIEGAFYHMSYPLSDGSGVVEIATTRPETMLGDTAIAVHPEDERYQELIGKTVVLPLVDKEIPIIADDYVDMEFGTGVVKITPAHDPNDFEVGNRHDLPRVNVMNEDGTMNELAGKYEGMDRFAARKAIVSDLKELGRLIKIETMNHSVGHSERTGVVVEPRLSTQWFVKMGPLAEKAMKNQETEDAVEFYPPRFNQTFLRWMENVHDWVISRQLWWGHQIPAWYHKETGEMYVGMEAPADSENWVQDSDVLDTWFSSALWPFSTMGWPDEASEDYQRYFPTSTLVTGYDIIFFWVSRMIFQSLEFTGERPFQNVLIHGLIRDEQGRKMSKSLGNGIDPMDVIEKYGADALRWFLSNGSAPGQDVRFSYEKMDASWNFINKIWNASRFVIMNVEGMTAADIDFSGEKTVADRWILTRLNETVARVTELFDRFEFGEAGRQLYNFIWDDFCDWYIEMSKEILYGDNEAAKQTTRSILVYTLDQILRLLHPIMPFVTEEIWEKIPHQGESLVVAEYPVVHEEFNDEAAARGMEVLKEVIRSVRNIRAEVNTPLSKPITLLIKTNDTEVEEFLTANTSYLERFCNPEELVISREIEAPELAMSAVLTGAELFLPLAGLINIEEEIARLEKELDKWTKEVKRVQGKLSNERFVSNAPDEVVEAERAKEKDYLEKQEAVKERIAQLR

SEQ ID NO: 4877 - protein, 454 aa, Enterococcus faecalis
MKLTFWEVAQAVEASNDWQQWPDFPLTGIEFDSRKIVKGNLFVPLQGENDGHRFIESAMANGCQAAFWGQDLVDAPQQLPVLHVTDPLVAMQKLATYYLNKMQPNVIAVTGSNGKTTTKDLIAAVLSEKFVTYKTQGNYNNQIGLPYTILHMPDETEKLILEMGMDHAQEISFLSNLAQPEVAAITMIGEAHVENLGSRAGIAQAKMEIVDGLAKDGSLFVPSDEPLLEPLVEKVTQQVITFGFSQESQLQGIVTNEAKEQTSFKISDTQMTFTIPVPGTYNVTNALIAIGIGRYFQLTDSEIQKGLATAELTKNRTEWLKAANGAEILSDVYNANPTAMGLVLDSFSKMSKVGKRIAVLGDMLELGPDSAAMHQAMAQHLAPDAIEEVFLYGSEMAYLADKLQETYAPANIHSFKKEEKNELIEAVKKVLQPEDMVVLKGSNGMGLREVIDAL

SEQ ID NO: 4878 - protein, 386 aa, Enterococcus faecalis
RHLFTSESVSEGHPDKVADQVSDAILDAILEKDPMARVACETSVTTGLVLVFGEISTTAYVDIQKIVRQTVKDIGYTRAKYGFDGETVAVLVAIDEQSPDIAQGVDAALEVRDQDEKDDIGAGDQGLLFGFAVDETPELMPLPIALSHRLVRRLAELRKEKVLPYLRPDAKSQVTVEYDDQGQPQRVDTIVISTQHDDETTLEQIEKDIKEQVINEVIPHELLDDETKYFINPTGRFVIGGPQGDAGLTGRKIIVDTYGGYARHGGGAFSGKDATKVDRSASYAARYIAKNIVAAGLAKKVEVQLAYAIGVAQPVSISINTFGTSALPESKLIEAVRKNFDLRPAGIIEMLDLRRPIYKQTAAYGHFGRTDIDLPWEQTDKVEALK

SEQ ID NO: 4879 - protein, 801 aa, Enterococcus faecalis
VQELTLEEVMGDRFGRYSKYIIQERALPDIRDGLKPVQRRILFSMNKDGNTFDKGFRKSAKSVGNIMGNYHPHGDSSIYEAMVRLSQDWKLREVLIEMHGNNGSMDGDPPAAMRYTEARLSQLSGELLKDIDKNTVDFVWNFDDTEKEPTVLPAKYPNLLVNGSTGISAGYATEIPTHNLAEIIDGTVYLIDHPNASLEKLMEYIPGPDFPTGGILQGKAEIKKAYETGRGKVILRAKTKIEPLKGGKQQIVISEIPYEVNKATLVKKMDEIRLNKKVDGIAEVRDESDRTGLQIVVELKKDVNAEGILNYLFKNTELQINYNFNMVAIDNMTPQQVGLKRILESYITHRKSVIINRCQFELDKARKREHIVAGLIKALSILDKVIATIRGSKDKKDAKKNLVSDYAFTEEQAEAIVTLQLYRLTNTDITDLQEEAKTLEQQIAELLNILNNEKELFSVMKKELREVKKQYGNPRLTQIEEEIQEIKIETAVLVAQEDVVVTVTHEGYIKRSSIRSYTASKPEEIGMKEGDFLLYAGEVNTLDHLLLVTNKGNMIYRPVHELPDLRWKEIGEHISQTILNLAIDESIIAVYPYKELSPTKTFVFITKAGMIKQTKMADFEPWRTYKSRPTSCMKLKSDQDEITNVYLTNDQDLLDVFLVSNRGFGLRYPLYEVPVVGSKAAGVKSMNLKEDDYVVNGLLVHSEGDTPIVIVTQRGGVKRMLAQELTQLGRAKRGLMVLRELKKNPHRVVFMSESTDLDLLVTTQKGTQEVIQSKNYPISERTSNGSFVIDEQKDGQVMEVH

SEQ ID NO: 4880 - protein, 254 aa, Enterococcus faecalis
MKEITSTKNNQLKEWKKLYKKKYREELNQYIIEGFHLVEEAVKANADVQWILFNQRGQQEWGTWLAEQETEKLIFVSDEVLNSLSELPTSQGILAIVTLETQQEQSLSFKGGWLLLDNIQDPGNVGTMIRTADAAGLAGVILGKGTADIYNTKVLRSMQGSHYHLPVLQRELTEVVQAFKKQGLPVFGTELNEAAIAYYEQEAVENYALILGNEGSGVSPELLAETTKNLYIPMKGQAESLNVAIAAGVLMFYF

SEQ ID NO: 4881 - protein, 436 aa, Enterococcus faecalis
MFLDQVTIDVKAGKGGDGMVAFRREKYVPDGGPAGGDGGRGGDVVLVVEEGLRTLMDFRFNRHFKATPGENGMSKGMHGRGSEDLLVKVPPGTTVRDAETGALIGDLIENGQTLVVAKGGRGGRGNIRFASPRNPAPEIAENGEPGQERKIELELKVLADVGLVGFPSVGKSTLLSVISSARPKIGAYHFTTLVPNLGMVTTSDGRSFAAADLPGLIEGASQGVGLGTQFLRHIERTRVILHVIDMSGMEGRDPYEDYLAINKELASHNLRLMERPQIIVANKMDMPEAEENLAKFKEQLAKERTDEYADELPIFPISGVTRKGIEPLLNATADLLEVTPEFPLYEDEVVEEETVRYGFQPEGPEFTIDREPDASWVLSGEKLEKLFEMTNFDHDETVMRFARQLRGMGVDEALRARGAKDGDIVRIGNFEFEFVE

SEQ ID NO: 4882 - protein, 797 aa, Enterococcus faecalis
MGKKRIYELAKEMNKASKDVVDKAHQLGMDVKNHMGAISSEQETKLRQAFGGGSTVNTQSKATNNQKQQTTQNKPANKKPMNNKPGEQRNNQNRPNNQSTNGQQRNNNNQNRHGQSNTQNRSNQTNTNNQNRNTQNNNGSTTNQNRTSQNNNGGNNQNRGGQNRNNNFGGGQNRNNRNNFNNQNRNRFNKKGKKGKHQQESAKPAVPARKFRELPDVLEYTEGMNVADIAKKIHREPAEIIKKLFMMGVMVNQNQALDKDTIELLAVDYGMEPQEKVQVDIADIDKFFEPEAVVEENLTTRPPVVTIMGHVDHGKTTLLDTLRHSRVTSGEAGGITQHIGAYQLDIDGKPITFLDTPGHAAFTSMRARGASITDITILVVAADDGVMPQTIEAINHAKAAKVPIIVAVNKIDKPGANPDHVKQELSEHELIPEEWGGDTIFVNISAKFNQNIDELLENILLIAEVEDLKADPTQKAIGTVIEARLDKGKGPVATLLVQQGTLHVGDPIVVGNTYGRVRVMTNDMGRRDKEAGPATPVEITGLNDVPQAGDRFVVFEDEKTARQAGEERAKRALLEQRSASSRVTLDNLFESLKEGELKEVNIIVKADVQGSAEAVSASLQKIDVEGVRVKIVHAAVGAINESDVTLAAASNAIIIGFNVRPTPQAKQQAEQEEVDIRLHRIIYKALEEIETAMKGLLDPEFEEKITGQMTVRELYKVSKVGTIAGCYVTEGFIRRDSGVRVIRDGIVIYEGKLASLKRFKDDVKEVKLGFECGAMIENFNDLRVDDAIEGFIMEEIK

SEQ ID NO: 4883 - protein, 296 aa, Enterococcus faecalis
MKKARVIYNPTSGKELIKKNLADILSILEECGYEASAFATTPEENSARNEAHRAARAGFDLLVAAGGDGTINEVVNGIAPLKRRPKMAIIPAGTTNDYARALKIPRDNIVKAAEVIKKNQTVKMDIGQAGKNYFINIAAGGHLTELTYEVPSELKSIFGYLAYLAKGAEMLPRVKPIKMRMTYDEGVYEGNASMFFLGLTNSVGGFEQIVPDAKLDDGKFSLIIVKTANIFEILHLVALMLNGGKHVEDHRLIYTKTSYLHAETLEKNNKMMINLDGEYGGDAPMTFKNMHQHIEI

SEQ ID NO: 4884 - protein, 476 aa, Enterococcus faecalis
MNFETVIGLEVHVELKTNSKIFSSAPAHFGAEPNSNTNVVDWSYPGVLPVMNKGALEFGMKAALALNCEISKETHFDRKNYFYPDNPKAYQISQFDQPIGHDGWIEIEVEGKKKKIRIERVHLEEDAGKNIHGTDGYSYVDLNRQGTPLIEIVSEADMRSPEEAYAYLEALRSIIQFTEVSDVKMEEGSMRCDANISLRPYGQEEFGTKAELKNLNSMNFVKKGLAYEEKRQAKVLLSGGEIQQETRRFDEATSTTLLMRVKEGSSDYRYFPEPDVPRFSIDDEWIEKVRASLPEMPASRRARYISELGLPEYDAMVLTLTKEMSDFFEATLANGADAKQASNWLMGEVSAYLNSEKVELADTKLTPENLAGMITLINDGTISSKIAKKVFKELIENGGDAKEVVEAKGLVQLSDPAQLLPMINEVLDNNQQSIDDFKNGKDRAVGFLVGQIMKATRGQANPGVVNKLLQEELSKR

SEQ ID NO: 4885 - protein, 396 aa, Enterococcus faecalis
LSMAFYDYPQNKLKLIGFTGTKGKTTAAYFTKYILDVATQQKTALLSTMNSTLDGKTFFKSALTTPESLDLYRMMATAVANGMTHFIMEVSSQAYKTNRVYKLFFDVGIFLNITPDHISPIEHPTFDDYFYCKRQLITHSKVIVLNHEADYFPLLKETAQQQKVPAIVYGSQPAPEVDYSFAVSSEDSLRFIVESPADALGLAGSYHLRLGGDFNKGNALSAAIASVLVGASKEECQQGIAATTVPGRMESLTNTNGATVYVDYAHNYDSLKNLLTFVREEHPDGRLIVLVGSTGDKAISRRKDFGTVLSELADVAVLTTDDPASEDPAKICQEIQAHITKEMPVYTVLDRGEAIAHALSLSTTADDAIVLAGKGADLYQKVNGVDEPYAGDFALA

SEQ ID NO: 4886 - protein, 1247 aa, Enterococcus faecalis
RPANEQFTDSQWQAVFDGDENILVSASAGSGKTTVLVRRVIEKVKSGVDIDRLLIVTYTEAAAREMKERIQVALQKAMNEEQDPERRRHFSRQIALLPTANISTLHAFCLTVIRRFYYLIDIDPVFRMLTDETETLLLKEDVWDALREQFYAENQEAFYQLTANFSNDRSDDGLTNLIFSFYEFAKANPDPEAWINGLTQAYEVGDQLGESTLFQTYLKPLAVETLQRTLQRYEEMVTLTEGEEKLQKIWYLAQNEKEQTKQFLQFLERNDLESAYNLTELLSFDRYPTVRAEELKPTAEQAKQLREQNKKALNDLKKQLFTLSPDAMKQVLKEATPIVQEMAHVGKQFMEAYGAEKRLKNLVDFNDLEHYTLAILAKNQADGWHASEASVYYREKFDEVLVDEYQDINQLQESILYWLRRPLSTEGNLFMVGDVKQSIYSFRLADPTLFIEKYNQYGQGKEGKRIILAENFRSRKDVLDFTNLVFSQLMDERVGQIAYDESAALVHGFDQFSEAADYSTELLIYEKKATESVEFPELQSPELLIEDKTEGELYVTALKIRELIDQNFLIYDKKLKTDRPITYQDIVLLTPTKKNNLTILDVFKSLEIPVQVNDAQNYFQATEIRTMIALLQLIDNPYQDIPLAAVLRSPIVGLKENELVLIRLANKETSYYEAFLTFNQKMEPTMEEAVVQEKTIRFAESLEKWREQARRNQISTLLWTIYRETAYLDYVGGLPVGKQRQANLYALVDRAAAYEKTTFRGLFQFVRFIEKMQEKDKDLAEPVVLSEENAVRVMTIHASKGLEFPVVFVLDMTKEFNVSDLNERYIFEENLGVGIRYLQPEERVMYDTLPFLAIKQVRLRKLLSEEMRKLYVALTRAEQKLFLVGSYKDQAAMWKEWLKVGDVETLVLPAENRLQSKSSLMNWVGMTLVRHQKADEYQQEVVVSNVPQVKKHPANFHIQWFNEEQLRAAIQQLQLPERQAEDLAEKAQLSADKINRGLARLSFNYPFEVATRTTSYQSVSEIKRVFDDPDNKEIGKIEVREDNTIQAQPLIVNRMIEGDLSKPKFLDTVQAPSAAEIGTATHYLLQLIDLSKQPSYEEVRAVQERLVENKLILPAIAEKMNLEQIVAFFDTALGKQLIQHHQTVRREQPFSMLIEAEELIQNYPETTQDDLLIHGIIDGYIELDNQCILYDYKTDHVKSTSPQAISEIVERYRGQMNLYRRALQEATHKEVSHVYLILLNGGVIIDM

SEQ ID NO: 4887 - protein, 395 aa, Enterococcus faecalis
MAKEKFDRSKSHVNIGTIGHVDHGKTTLTAAIATVLSKHGGGEAQSYDSIDNAPEEKERGITINTSHIEYETETRHYAHVDCPGHADYVKNMITGAAQMDGAILVVSAADGPMPQTREHILLSRNVGVPYIVVFLNKMDMVDDEELLELVEMEVRDLLSEYDFPGDDVPVIAGSALKALEGDESYEEKILELMAAVDEYIPTPERDTDKPFMMPVEDVFSITGRGTVATGRVERGEVRVGDEVEIVGIKDETSKTTVTGVEMFRKLLDYAEAGDNIGALLRGVAREDIERGQVLAKPATITPHTKFKAEVYVLSKEEGGRHTPFFTNYRPQFYFRTTDVTGVVELPEGTEMVMPGDNVAMDVELIHPIAIEDGTRFSIREGGRTVGSGVVTEIVK

SEQ ID NO: 4888 - protein, 72 aa, Enterococcus faecalis
VAKEDMIEVEGTVVETLPNAMFKVELENGHQVLATVSGKIRMHYIRILPGDKVTVELSPYDLTRGRITYRFK

SEQ ID NO: 4889 - protein, 213 aa, Enterococcus faecalis
MNLILMGLPGAGKGTQAEKIIDTYGIPHISTGDMFRAAMKNETALGLEAKSYIDKGELVPDEVTNGIVKERLAEPDTDKGFLLDGFPRTLDQAKALDTMLKELNKKIDAVIDIHVEEDVLIERLAGRFICRTCGATYHKLFNPPKVEGTCDRCGGHEFYQREDDKPETVKNRLAVNIESSAPILAFYKEQGLMHTIDGNREIDTVFSDVKKII

SEQ ID NO: 4890 - protein, 431 aa, Enterococcus faecalis
LFKLLKNAFKVKDIRSKILFTVLILFVFRLGAHITVPGVNAKGLSDLSSLPFLNMLNMVSGSAMQNFSIFSMGVSPYITASIIIQLLQMDIVPRFVEWSKQGEVGRKKLNQATRYLTIVLGVAQSMGITAGFNSLSQTGIVNNPTLGTFVMIAVILTAGTMFVTWMGEQITEKGIGNGVSMIIFAGIISRLPGAVKEIYEDYFVNIESSRIWQSVIFIAILVIAILVIVTVVTFFQQAERKIPIQYTKRVSGAPTSSYLPLKVNAAGVIPVIFASSLIATPNAILQAFSSKFAGENWYDIMTKIFSYNTVPGAIIYTVLIVAFTFFYAFVQVNPEKLAENLQKQGSYIPSVRPGKGTEEYVSGVLMRLSVVGSIFLGLVALLPIIAQMVWNLPQSIGLGGTSLLIVIGVALETTKQLEGLMMKRQYVGFIN

SEQ ID NO: 4891 - protein, 146 aa, Enterococcus faecalis
MKLHELKPAEGSRQVRNRVGRGTSSGNGKTAGRGQKGQKARSGGGVRLGFEGGQTPLFRRLPKRGFTNINRKDYAVVNLDTLNRFEDGTEVTPVVLKEAGIVKNEKAGIKVLADGELTKKLTVKAAKFSKSAQEAIEAAGGSIEVI

SEQ ID NO: 4892 - protein, 296 aa, Enterococcus faecalis
MEEQLVDYLHYLQIERGLSNNTRRSYERDLKKYVAFLQEQGLHSWDEVDRYMITEFLQSLHEEQQASASVIRMISSLRGFHQFLRQERLSEHNPMQHIDSPKKVQKLPSTLSVDEVTRLIETPDTSKPLGMRNRAILEVMYATGLRVSELIEIKLGDLHLSIGLLQTIGKGDKERIIPLGDYAIQWIERYMNEARPQLIKNHPNETHLFVNHHGEPLSRQGIWKNLKQIVREAQIEKNITPHTLRHSFATHLLENGADLRIVQELLGHADISTTQIYTHITKQRMADVYKEHFPRA

SEQ ID NO: 4893 - protein, 782 aa, Enterococcus faecalis
KKKTKKQQQQQERLNYMFLGLIFILFGVFGLFRLGFLGTLLANCLRLVVGNTFPFAAILLILYGLLVMIYGKDFPLKRGRPIFGAVLIYISVLLFFHAFMFRNVSGSQPDILGNTWEFLQSDLKANQVTQNVGGGMIGALLYQGTYFLVAQFGSYLIATLLLLAGIFLMSMWDFQQIVDHFQSIQDRLSHVSAKSQARQEEKEAKRAAKKEAKAAERQAKIEAAAQQKLQERERMEQAAADRLTKTPVETHQPMVEEPAAPTPVQIDSFQQQNQAMPVPPIAATKPQREQEEEAADEAGVLEFEISEEAEDRDYQLPPTDLLDTIQATDQSGEYEKIEKNIGVLEQTFKSFGVDAKVVKASLGPSVTKFEVQPAVGVKVSKIVNLTDDIALALAAKDVRMEAPIPGKSLIGIEVPNSAISTVSFRDIVEAQPSHPDKLLEVPLGRDISGMVQTADLSKMPHLLIAGSTGSGKSVAINGIITGILMQAKPHEVKLMMIDPKMVELNVYNGIPHLLTPVVTNPRKAAQALQKVVQEMEFRYEKFAATGVRNITGYNQLIQQKNAEDGENRPILPFIVVIVDELADLMMVASNEVEDAIIRLAQMARAAGIHMILATQRPSVDVITGIIKANVPSRMAFAVSSGTDSRTIIDTNGAEKLLGRGDMLFLPMGENKPIRIQGAFISDQEVERVVAFVTDQQEAEYQESMMPTDEPTTSGGGELPQDELFEEAKNLVVEMQTASISLLQRRFRIGYNRAARLVDELEAHGVIGPSEGSKPRKVFLQAE

SEQ ID NO: 4894 - protein, 777 aa, Enterococcus faecalis
WHLDYYGYVPGKNEYAVESLLTVGNGFLGLRGTTPEMTISDDHYPATYIAGLYNTAASEVAGQVVENEDFVNAPDNQHIALKIGDATDWLTISPDTLQQLHRQLNLKTGLFVAEMILKDADNQQIKLTTKKIANMAQPNDYHLQYTFEPLNFSAPITLKTVTDGSVYNYNVARYRNLTAKHFQVTALSAQENKTVIEVCTNQSNLSVRETALITGDFFEKEAITIQEEAEKIAQVVTVMAHQGTRYTLEKQVFVQASHAEQSWQVPFTPKDSFAAAAQESARAWQTLWQQANITVTGDLMSQKLLRIHSYHLLASASPFSNQAQALDVSITARGLHGEAYRGHIFWDEIFILPFYIQHYPDTAKQLLLYRYHRLEKAKENAAASQYRGAMYPWQSGRDGRETTQKLHLNPLNGHWGEDHSILQRHVSLAIAYNAWLYWHSTQDHEFMKQYGGEMLLEIAQFWNSAATLDDATGRFFIDKVMGPDEFHEGYPDQAESGLKNNAYTNLMVVWLFEELTNILALFSEEEQAQLFAKTQTSSADLARMQQIQNSLEIEVNSDGIIAQYEGYFGLKEIDWAAMKEKYGNIYRMDRILKAEGESPDDYKVAKQADTLMLFYNLDKTRVDQILEDLGYQLPADYLEKNLLYYLKRTSHGSTLSRIVHAQLAEMAQFHELSWQLYQEALYSDYRDIQGGTTAEGIHTGVMAATIHVTLATYAGVDTRQNELSICPNLPEHWQALAFQFIHQGVTYQFSLTQTSVTITADKDTQLLVQGALIPLTA

SEQ ID NO: 4895 - protein, 327 aa, Enterococcus faecalis
VSMKVFDYEDVQLIPNKCIVNSRSECDTTVTLGKHSFKMPVVPANMQTIIDETIAETLAENGYFYIMHRFDEEARVPFIKKMQQKGLITSISVGVKEGEYAFVETLAREGLVPDYVTIDIAHGHSNAVINMIQHLKKFLPETFVIAGNVGTPEAVRELENAGADATKVGIGPGKVCITKIKTGFGTGGWQLAALRWCAKAARKPIIADGGIRTHGDIAKSVRFGATMVMIGSLFAGHEESPGETKVEDGVVYKEYFGSASEFQKGEKKNVEGKKIWLRHKGKLADTLVEMQQDLQSSISYAGGRDLEAIRKVDYVIVKNSIFNGDTI

SEQ ID NO: 4896 - protein, 76 aa, Enterococcus faecalis
VKELILTIVRPLVSQPEAVSLEIEESTDFLEYNLTVAKEDIGRIIGKQGRVAKAIRTIVYSVRIDGPKKVRLNILD

SEQ ID NO: 4897 - protein, 989 aa, Enterococcus faecalis
  VARIANT (1)...(989): Xaa = Any Amino Acid
TVQEMILTLQKFWSSNGCMLMQAYDTEKGAGTMSPYTFLRAIGPEPWNAAYVEPSRRPADGRYGENPNRLYQHHQFQVVMKPSPENIQELYLESLKLLGIDPLEHDIRFVEDNWENPSMGCAGLGWEVWLDGMEITQFTYFQQVGGLQCHPVTSEITYGLERLASYIQEVESVYDLEWTQGVKYGEIFVQPEYEHSKYSFEISNQEMLLENFDKFEKEAKRCIEESLVHPAYDYILKCSHTFNLLDARGAVSVTERAGYLARIRNMARSVAKIFVAEREKLGFPLLNKDQHVSKEAEXHGKRFIIEIGLEEMPAHVVTPSRIQLEEKVIKFLDEHHLDYETVQSFATPRRLAVKVTAIPEKQADVEEEVKGPAKKIALDAEGNWSKAAQGFVRGQGVTTEDIVFKELNGVEYVYVTKFTKGQSAKEVLTKLNDVITSLTFPVTMHWANYDFEYIRPIHWIVALLDDEVIPFNVLDVTTGQTSRGHRFLGDDVTFQHANEYETKLKEQFVVVQPNERKQMIVDQANALAAEKNWQLALDEELLEEVTNLVEYPTAFVGSFDEKYLSVPDEVLVTSMKEHQRYFEVRNDQGLLMPHFIAVRNGDNVHLENVIKGNEKVLIARLEDAEFFYNEDKKLTIEACVEKLKNVTFHEKIGSIYEKMQRVALIAQIIGRKVGLSEDELEDLKRASEIYKFDLVTNMVGEFPELQGIMGEKYALLQGEKPAVATAIREHYLPTSSEGELPETAIGAVLALADKLDSVFSFFSVGMIPTGSNDPYALRRQTYGVIRIIEDKGWTFPLVQLQTEVDEAVNQDVEKYGVLLNEGQAEVVEFVKARLRQLLMTKNVRHDIIDAVVSAEQADLSKLFASANILKSRFEDQDFKPSMEALTRVINLAKKGQELLGDTEEGIDPSLFENKAEKELYQAVNDLSEAFATRTIAENYEALVNLRPLIDAYFNETMVMVEDEKVKQNRLKQLMQIAKMALSIASLDLL

SEQ ID NO: 4898 - protein, 264 aa, Enterococcus faecalis
MMNKLIFGRYIPGDSFIHRLDPRAKLLASFYFIGIIFLANNWQSYVLIAAFTAFAISLSKISARFFIRGVRPLLWLILFTVALQTLFTQGGEVYFQWGIISITQFGVTNGLFIFCRFVLIIFMSTLLTLTTAPLELSDAIEYLLRPLRVVKFPVHEVSLMLSIALRFVPTLMDETEKIMNAQRARGVDFGEGNLLQKMKAIVPLLIPLFVSSFNRAEDLATAMEARGYQGGEGRTKYRILHWHLRDTIVMFGFVLLTIGLFVLR

SEQ ID NO: 4899 - protein, 150 aa, Enterococcus faecalis
VYRMQGVEIGDKHIEVMVRQMLRKIRVMDPGDTEILPGTLMDIAEFKDRNYDTLVAGGVPATSRPVLLGITKASLETNSFLSAASFQETTRVLTDAAIRGKKDPLLGLKENVIIGKIIPAGTGMARYRNMEPKEVGVASENVYSISDIEA

SEQ ID NO: 4900 - protein, 602 aa, Enterococcus faecalis
MCGIVGMIGKENVTESLIQGLTKLEYRGYDSAGICVNDQSQQPHVVKAVGGIADLAAKLTPEIDGTVGIGHTRWATHGEPTVANAHPHVSSDQRFALVHNGVIENFEELKEQFLSGAHLIGDTDTEIVVQLIAHFAENGFSTKDAFKAALAEIKGSYAFALMDKMDPNTIYVAKNKSPLLIGLGEGFNVICSDAMAMIKETNQFVEIVDGEIVTVTADKVGIETPEGQVINREPFEAQLDLNDIEKGTYPFYMLKEIDEQPAVMRKIVQAYTQGEKVTLDEALLEKINQCDRIYIIACGTSYNAGWVGKSLIETIASIPVEVHLSSEFGYNMPILSEKPFFIFLSQSGETADSRQVLVQVNELGHPSLTLTNVAGSTLSREADDTLLLHAGPEIAVASTKAYTAQIAVLAILAKAIGEERQTLAAVSFDVAHELSVVAAVMETLIDEKQQMKALVEDYLTYTRNAFYIGRGVDYYVSMEAALKLKEISYIQAEGFAAGELKHGTIALIEEGTPVIGIVTDAKVAAHTRGNLKEVESRGARNIVIALESLAKPQDQLIIPDVHPLLSALVSIVPGQLLAYYATLQRGYDVDKPRNLAKSVTVE

SEQ ID NO: 4901 - protein, 877 aa, Enterococcus faecalis
MKELTSSQVRQMYLDFFKSKGHSVEPSASLVPVNDPTLLWINSGVATLKKYFDGSVVPENPRITNAQKSIRTNDIENVGKTARHHTMFEMLGNFSIGDYFKNEAIHWAWEFLTGAEWLAFDPEKLYVTVYPKDTEAKRIWRDEVGLSEDHIIDVEDNFWDIGAGPSGPDTEIFYDRGEEFLDIPEDDPENYPGGENERYLEIWNLVFSEFNHTPEDTYEPLPHKNIDTGMGLERVVSIIQDAPTNFETDLFMPIIHAVEALGTNVKYGDAPQTDVSFKVIADHIRALSFAIGDGALPSNEGRGYVLRRLLRRAVMHGKKLGINEAFLYKLVPVVGEIMVSYYPEVLQQKDFIEKVVRTEEERFHETINEGLSMLNEVIKEVKDAKGDTLDGKIIFKLYDTFGFPVELTEEVAEDEGLKVDHAGFETEMEAQRERARSARSKETSMGVQSALLTDIKVESKFVGYTELTHDSELFVIIQGDALVNEASAGTAELIFAETPFYAEMGGQIADRGYVKNTAGEVVANVVDVKKAPNGQFLHKVEVLAPLAEGQIYQLQVDERMRTRILKNHTATHLLHRALKDVLGEHANQAGSLVAPGHLRFDFTHFGQVTSEELARMEAIVNEKIWEAIPVVTIETDIDTAKNMGAMALFGEKYGKEVRVVNIGDYSIELCGGTHVANTEDIGIFKIVSESGIGAGVRRIEAVTSKEAYQLLQEEERQLKEIATLVKSPQLKEVVTKTEQLQQQLRDLQKENEQLAGKLANQQAGDIFKDVKDINGVRYIAAQVNVKDMNQLRQLADQWKQKELSDVLVLATAQDEKVSLLAAMTKDMNGKGLKAGDLIKAIAPKVGGGGGGRPDMAQAGGKNPAGIADALAEVENWL

SEQ ID NO: 4902 - protein, 126 aa, Enterococcus faecalis
VSYRKLGRTSSQRKAMLRDITTDLIINERIVTTEARAKEVRSTVEKMITLGKRGDLHARRQAATFVRNEVASVREEDESIVVESALQKLFNDLGPRFAERQGGYTRILKTEPRRGDAAPMVVIEFV

SEQ ID NO: 4903 - protein, 1300 aa, Enterococcus faecalis
MKRINWQRLATIGLCSSLVINAFSGVTAIAETVMSESSPTVANSIKEATPASSARQESTESSQKTTETSQEEVTQETAKQAETKAPLETPEIKTNTTAQPAENSSENDRQTSISPRWVPNNQVIYPRITLAFTNESGQVFTDENLTLSGTYTKFGYENATSLWRSYAVNYPITSSNAEGGQYRVAVNATVPLPYDFFTDLPANYRMNIYAVEQLKIDNTLKYVDSIVAVPNSTLRMTRYSAQQTTELPQFGNHMTPFVLRTRDSVFSKSSENVFSLNTDGNEFLRILSVAPIGTPVEPVLYGFDGTATYRETLNYVVTRKQVTEKFVDANGVAITPPTGFTQNKKTPMTSNDFTFKQASTLPDTYQADGKTYKFKGWYKGKTKPNTLTTTKAPSYAVTYDWNDDLTVVYEAIQNPVTFQEGKGMSSVQVMNKAIQNPVTLPDRMYRVLFINETGGLTFADRYGFTGELVEVADGKVTPIGPVPTNNNSAVKEITIPGRVFDTERPTPLQYGVRNATFTLPKMYKTVTYQPGPNYTGTAYSIPETYRLSLRSGVKSDIDTTGWRIGLDPTTDPQKFTMSGIYWSSMPTNVRLATLLSATITGKGVEPSVYTLDENARMYLYLENRRVTENFVDTNGTKITAPSGFAQGKKTVITSDSYTFKQSGDLPDTYKVGTKTYQFKGWYKGKNKPDTLTTTKAPSYPVTYNDDDDLTVVYEEVVMKTYNLPAKDVYFGYVDEAGNLLNTAGFSVEAELGESDETESTVLGKIQGTDEVMSKLKKLSIPGKSYDFPIDKLKTYGARSVNHTIPKQYKTMSITPLATYTGDKTKYPMTKEIRKNIEAPYTVVSQADGVEAFKLTNAGTFFRTRRAFWTWDPNNTLYAMGIYSGTVGKNYNLASPEGTIYYYLENRRVTENFVDPSGAKITPPTGFTQGKQTVIDSDNFTYASTKALPDTYTTGDKSYKFKGWYKGKTKPGTLTTTKTPSYAVTYDDKDDMTAVYEEVQPTAEMTVSRLLEVIPNEASMMWIVKLKNTSEVPLTNVKLAPTAKWAAGISPPTQLAVRIGNTPNKIIPVTAEQWQAGVNLDIEIPVNGEALVTVNTAKITGEPRQLLTAEMTASGNFSAVTASNFVRIQGEDQTITPTPVEEGFISTPTFDFGKITINSSTKQYGLKKAADYYGNGTRNPYLRIKTSQPNWQLTAQLSQLTASADSLPTSTRLLLGSADVIAIENYNQVTELTNKVGVTKALTLTSDGTSTPVILNNQFTGNDVYQLDFDFANVKLEVPANQGKINEKYQGTVTWNLVTGP

SEQ ID NO: 4904 - protein, 312 aa, Enterococcus faecalis
MIEFEKPRIEKIDENRDYGKFVVEPLERGYGTTLGNSLRRILLSSLPGAAITNIQIDGVLHEFSTIPGVREDVTQIILNIKGLALKLYAEEEKTLEIDITGPATVTAGDIIVDSDVEILNKDLVICSVAEGATFHARLTVKPGRGYVQADENKKEDMPIGVLPVDSIYTPVRRVNYQVENTRVGRRDDFDKLTMEIWTDGSIIPQEALSLAAKIMTEHLDIFVNLTDEAKNAEIMVEKEETQKEKMLEMTIEELDLSVRSYNCLKRAGINTVQELTNKSEPEMIKVRNLGRKSLEEVKLKLHDLGLGLRKDD

SEQ ID NO: 4905 - protein, 69 aa, Enterococcus faecalis
MRLDKFLADVGIGSRKEIKQLLKKKVVTVNGDVVKEAKTQVNEETDQIALMGEILTYQKFFYYMLHKPQ

SEQ ID NO: 4906 - protein, 115 aa, Enterococcus faecalis
MNPLIQELTQEQLRTDIPAFRPGDTVRVHAKVVEGTRERIQLFEGVVIKRRGAGISETYTVRKVSNGVGVERTFPLHTPRVAQIEVVRYGKVRRAKLYYLRALHGKAARIKEIRR

SEQ ID NO: 4907 - protein, 233 aa, Enterococcus faecalis
LDAYEIIQYIGDAKKQTPVKVTLKGQLKEVTFPETIKVFNNCKTGTLFGDWADVKPFLEANKEKIEDYVVENDARNSAIPFLDLKDINARIEPGALIREKVEIGDQAVIMMGAILNIGAVVGAGTMIDMGAVLGGRATVGKHCHIGAGTVLAGVIEPPSAAPVVIENEVVIGANAVVLEGVRVGEGAVVAAGAVVVEDVPAHTVVAGVPAKVIKQIDDKTKSKTEILEELRKL

SEQ ID NO: 4908 - protein, 413 aa, Enterococcus faecalis
MNIIGVGNAKSDGLNRGIVVDIDQTVQAIQRAVRQAEEKAGIQIKSVNVGLPANLLEVESCQGMIAVSSESKEITDEDVRNVASAALVRSTPPERQIVAILPQDFTVDGFEGIKDPRGMLGVRMEMFGVVYTGPKTIIHNIRKCVEKAGLGINELVITPLALTETILTDGEKDFGTIVIDMGGGQTTTSVIHDKQLKFTHVNQEGGEFITKDISIVLNTSFNNAEALKINYGDAYPERTSANEEFPVDVIGKSEPVRVDERYLSEIIEARVEQILRKSKEVLDEIDAFELPGGVVLTGGAASMARYCRFGRKKFLKPNVKLYVPNHMGLRNPVFANVISIVEYSAQLNDIYHIAKYAIPGEKSKPAQSVAVQQEVRYDTYAEQPQEEYEEFNERESGEKVTGKIKDFFSNIFD

SEQ ID NO: 4909 - protein, 411 aa, Enterococcus faecalis
  VARIANT (1)...(411): Xaa = Any Amino Acid
MEFSLDNNINNGAVIKVIGVGGGGGNAVNRMIEENVKGVEFITANTDVQALKHSKAETVIQLGPKYTRGLGAGSQPEVGQKAAEESEQVISESLQGADMIFITAGMGGGTGTGAAPVVAKIAKELGALTVGVVTRPFSFEGPKRGRFAAEGIALLKENVDTLLIISNNRLLEVVDKKTPMLEAFREADNVLRQGVQGISDLITAPGYVNLDFADVKTVMENQGTALMGIGVASGEERVIEATKKAISSPLLETSIDGAEQVLLNITGGLDMTLFEAQDASDIVTNAASGDVNIILGTSINEDLGDEIRVTVIATGIDESKKDRKPAPSNKTSGSTQCNKQLNLWKWINQNHKKKQVLLAIGIFAENKIHVQKLMNLHXEQVDKKEFDTFHREEPNHNDDELSTPPFFRRKR

SEQ ID NO: 4910 - protein, 347 aa, Enterococcus faecalis
MSKEMLNALDVLEAEKGIPKDTVIEALQAALVSAYKRHYGQASNVEVEFEPKKGNIHVYAVKEVTEEVFDSQLEVSLKDAVALNGAYEIGDKIRFEVTPKDFGRIAAQTAKQVILQRVREAERTIIYNEFSEYENDIMQGIVERQDRRYIYVNLGKIEAVLSKQDQMPNEFYQPHDRIKVYVSRVENTSKGPQVFVSRSHPDLLKRLFEQEIPEVYDGIVEIVSVAREAGDRSKVAVRSTDPNIDPVGTCVGPKGQRVQAIVNELKGENMDIVEWNEDPAIYISNALNPAQVLDVIFDPENSKACTVVVPDYQLSLAIGKRGQNARLAAKLTGHKIDIKSESDMAEF

SEQ ID NO: 4911 - protein, 263 aa, Enterococcus faecalis
MGKHMIKIIVAGFKGRMGSTATQMVLETADFELVGVYDPHEAQETVSFNDETAIPVFQRLEEVLAVKPDVWIDFTVPEAAYPNTRFALEHGMAPVVGTTGFTEEQINELTNLSREKAIGGLIAPNFAIGAVLMMQFAQKAAQYFPDVEIIELHHDNKLDAPSGTAIKTAEMIQEVRPAKKQGNPQEVESIPGARGADFEGLRIHSVRLPGLVAHQQVQFGSVGEGLTIRHDSYDRRSFMTGVALACRQVVQRTELLYGLEQML

SEQ ID NO: 4912 - protein, 381 aa, Enterococcus faecalis
FKEAAPVIREINAQGFEAYFVGGSVRDALLNKPIHDVDIATSAYPEEIKQIFKRTVDVGIEHGTVLVLMEDQQYEVTTFRTESTYQDFRRPDEVTFVRSLKEDLKRRDFTINALALDSTGEIIDLFDGIEDLTNQTIRAVGNPHERFHEDALRMMRGLRFASQLDFKIEEKTLAAIAEFHPLLEKISVERITIEFVKMLLGVNRQGGLAPFIETECYQYCPKLREQGAGLFRLMDLPARQIETEAEAWTLLIQSLNLPEAEIRSFLKAWKLSNQLIQNVSQLVRGLRFRLSNDWQPMMLYELGEESAVLVERLLYYYQQESQVQVTKELVKALPIHQRHELAITGKDLLAVLEETPGKWLGELIAEIEQHVVKGNLENKQE

SEQ ID NO: 4913 - protein, 233 aa, Enterococcus faecalis
KKILVVDDEKPISEIVKYNLVKEGYEVFTAYDGEEALEKVEEVEPDLIILDLMLPKMDGLEVAREVRKTHDMPIIMVTAKDSEIDKVLGLELGADDYVTKPFSNRELVARVKANLRRGATNAKEAEVTTQSELTIGDLTIHPDAYMVSKRGEKIELTHREFELLYYLAKHIGQVMTREHLLQTVWGYDYFGDVRTVDVTVRRLREKIEDSPSHPTYLVTRRGVGYYLRNPEQE

SEQ ID NO: 4914 - protein, 161 aa, Enterococcus faecalis
AAIAKKETLVQAAAEKFESAASVVIVDYRGLTVEEVTNLRKQLRDAGVEMKVIKNSILSRAAKKVGLDGLDEVFTGPTAVAFSNDDVVAPAKIIDEFAKDAKALEIKGGVIEGKVSSVEQITALAKLPNREGLLSMLLSVLQAPVRNVAYAVKAVAEKNEE

SEQ ID NO: 4915 - protein, 807 aa, Enterococcus faecalis
MLVSYKWLNEYVNLSNVTPQELADKMSVTGIEVEGVAVPEEGLKKIVVGEVKECVPHPNSDHLSICQVDIGEEELSQIVCGAPNVKAGIKVIVALPGSRIAGNQKIKKGKMRGEVSNGMICSLEELGYSDNVVPKAYAEGIYYLPQEAVNGTPVFPYLDMDDAIIELSITPNRADALSMRGVAYEVGAIYRQTPQFNDPELKEDASDNVGNYVTVTVEDSQDAPAYQIRVIKDVTIAESPQWLQNRLMNEGIRPINNVVDVTNYILLLFGQPLHAFDYQKLDSKEILVRRATAAEELITLDGETRQLTEENIVITNGKTPVGLAGVMGGANSEISQETTTVALEAALFNPLSIRKTSKQFNLRSESSSRFEKGINQATVGLACDVAAAMIAELADGTVVSGTAVGSEVAVKEAQVAVTLERINQYLGTALDEATVNEIFEALGFAYEVNQGAYEITIPPRRWDIAIEADIIEEVARIYGYDHLPSTLPSGETVAGSLTKAQHVTRQLKSLLEGHGTSEAISYALTTEEKSRQFMMKESQTTRLQWPMSEERSVLRMNLISGLLDDVAYNVARKNNNIAFYEVGRVFYQTEDPTKNLPTEENHLALALTGNTMVKDWQTKATAVDFYTVKGLVESIVAVLGLTEKISYQATTAIPEMHPGRTAWIYLKDEVVGFVGQVHPTTAKAYDIPETYVAELNLQQLVATEAGGVTYEAVSKFPAVSRDIALLVDETVTNQELVKTISDNAGKYLKEIHLFDVYQGEKLGAGKKSMAYSLTFVNAEATLVDEEINRSMEKVEKALIEKHQVEVR

SEQ ID NO: 4916 - protein, 210 aa, Enterococcus faecalis
  VARIANT (1)...(210): Xaa = Any Amino Acid
MTKGFXGKKVGNAPNKSHVWVNXFPVPENEATPNVILQVKTVETDGYEAIQVGYQDKREVLSNKPAKGHVAKANTAPKRFIKEFKNVELGEYEVGKEIKVDVFQAGDVVDVTGTTKGKGFQGAIKRHGQSRGPMSHGSRYHRRPGSMGPVAPNRVFKNKRLAGRMGGDRVTIQNLEVVKVDVERNVILIKGNIPGAKKSLITIKSAVKAK

SEQ ID NO: 4917 - protein, 207 aa, Enterococcus faecalis
MPNVALFKQDGTQNGEITLNEEIFGIEPNESVVYDAIIMQRASLRQGTHAVKNRSAVRGGGRKPWRQKGTGRARQGSIRSPQWRGGGVVFGPTPRSYSYKLPKKVRRLAMKSVLSDKVAENNLVAVEGLSFDAPKTKEFKQVLANLSIDTKVLVVLENGNDFAALSARNLPNVSVVTSDNVSVLDVVSANKVLATQTALTQIEEVLA

SEQ ID NO: 4918 - protein, 89 aa, Enterococcus faecalis
DVIKRPVITEKSMLAMDEKKYTFEVDTRANKTLVKQAVESAFDVKVANVNILNVRPKFKRMGKYAGYTKKRRKAIVTLTEDSKEIQLFE

SEQ ID NO: 4919 - protein, 274 aa, Enterococcus faecalis
VAIKKYKPTTNGRRNMTSSDFAEITTSTPEKSLLQPLKNNAGRNNNGRITVRHQGGGHKRQYRVIDFKRNKDNVAAVVKTIEYDPNRSANIALVHYEDGVKAYILAPKGLEVGMRLVSGPEADIKVGNALPLENIPVGTVIHNIEMKPGKGGQLIRSAGTSAQVLGKEGKYVLIRLNSGEVRMILATCRATIGSVGNEQHELINIGKAGRSRWMRKRPTVRGSVMNPNDHPHGGGEGKTPIGRKAPVSPWGQPAIGYKTRNKKAKSDKLIVRRR

SEQ ID NO: 4920 - protein, 92 aa, Enterococcus faecalis
MGRSLKKGPFVDDHLMKKVEAQQGAEKKKVIKTWSRRSTIFPSFVGFTIAVYDGRKHVPVYIQEDMVGHKLGEFAPTRTYRGHVADDKKTKR

SEQ ID NO: 4921 - protein, 112 aa, Enterococcus faecalis
QITSAKATAKTVRTSPRKARLVIDLIRGKSVADAISILKFTPNKSAGIIEKVLMSAVANAENNFDLDVESLVVSEAFVNEGPTMKRFRPRAKGSASPINKRTSHITVVVTEK

SEQ ID NO: 4922 - protein, 209 aa, Enterococcus faecalis
MRVGIIRDWDAKWYAEKEYAEFLHEDLRIRKFIATKLADAAVSTIEIERAANRVNISIHTAKPGMVIGKGGSEVENLRKELNKLTGKRVHINIVEIKKPDLDAKLVGEGIARQLENRVAFRRAQKQAIQRAMRAGAKGIKTQVSGRLNGADIARSEGYSEGTVPLHTLRADIDYAWEEADTTYGKLGVKVWIYRGEILPTKKNTEKGGK

SEQ ID NO: 4923 - protein, 404 aa, Enterococcus faecalis
IKMNKKHVVILGAGYAGLKTLRELQKGAKDVEITLVDRNNYHYEATDLHEVAAGTQPAEKITYNIMDVVDEKMTTFIQGTVKTIDAATQTVALEDGQTINYDYLVVSLGFESESFGIPGVQEHALQMVDVKTALNVYEHIQEQMRQYKATQNEEFLKIVVCGAGFTGIELLGSLVENKPKFAEIAGVSADQIQIYCVEAVTRLLPMFNEKLANYGVQLLKDSAIHLLLGKPIKEIKPGTVVYQDNEAGDLAELSAKTIIWTTGVSGSHVVGDSGFEARRGRVMVQPDLTDANHSNVYIIGDCSAVMDTETNRPYPTTAQIALKMGAHAAKNIQAQLKGEATKPFSFKSQGSVCSVGNTRALGIVGKTDIKGYPASFMKKIIMNKALFETGGTKEMMAKGRFDLY

SEQ ID NO: 4924 - protein, 342 aa, Enterococcus faecalis
  VARIANT (1)...(342): Xaa = Any Amino Acid
QKVAVLGPGSWGTALAQVLAENGHEVCIWGNKPEQIDEINTKHTNKHYLPELILPTSIQATTDLATALVDVDAVLFVVPTKAIRSVAQEVAQHLKTKPIIIHASKGLEQGTHKRISEVIAEEIPAEKRQGIVVLSGPSHAEEVAVHDITTITAASENLADAVYVQELFMNDYFRIYTNDDVIGVETGAALKNIIALGAGAIHGLGFGDNAKAAIMTRGLAEISRLGVAMGANPLTFIGLSGVGDLIVTCTSVHSRNWRAGNLLGKGHKLDEVLENMGMIVEGVSTTKAAYELAQQLEVEMPITETIYNVLYNDEDVQQAAKEIMLRDGKTENEFTLDFXEEK

SEQ ID NO: 4925 - protein, 314 aa, Enterococcus faecalis
RISCTSRYVPENCVTNHQLSEMMDTSDEWIHSRTGISERRIVTQENTSDLCHQVAKQLLEKSGKQASEIDFILVATVTPDFNMPSVACQVQGAIGATEAFAFDISAACSGFVYALSMAEKLVLSGRYQTGLVIGGETFSKMLDWTDRSTAVLFGDGAAGVLIEAAETPHFLNEKLQADGQRWAALTSGYTINESPFYQGHKQASKTLQMEGRSIFDFAIKDVSQNILSLVTDETVDYLLLHQANVRIIDKIARKTKISREKFLTNMDKYGNTSAASIPILLDEAVENGTLILGSQQRVVLTGFGGGLTWGSLLL

SEQ ID NO: 4926 - protein, 71 aa, Enterococcus faecalis
EKIQAIIVEELGKDAEEVQLTTNIQEELDADSLDLFQIINEIEDEFDVKIETEDGIQTVQDLVTYVEKQQA

SEQ ID NO: 4927 - protein, 204 aa, Enterococcus faecalis
EREWELFLAPYEQAVSELKVKLRGIRKQFREQDKHIPIEFVTGRVKPVDSILTKTAIRHIPLNRIEEEMQDIAGLRIMCQFVEDIYQVVALLRNRKDLKIVEERDYIENKKESGYRSYHVVVEYPVQLVTGEKIILAEIQIRTLSMNFWATIEHSLNYKYQGVFPEEMKERLQRAAEAAYLLDEEMSSIREEIQEAQHYFSHGR

SEQ ID NO: 4928 - protein, 515 aa, Enterococcus faecalis
YPENELLGIDVVIPDFTYLEENSERIAGVFLTHGHADAIGALPYLLSKIQVPVFGTELTIELAKLSVNSHAETKKFKDFHVIDPHTEIDFGQATVSFFKTTHTIPDSIGVSIKTKEGNIVYTGDFKFDQSAIEMYQTDYGRLAEIGKEGVLALLSDSSNAENPAQVASEAQIADEVFDTIRYWEGRIIVACVASNLQRVQQVLNAADRSGRKVVLTGQDFERIIRTAMKLEKLQLPSEDLLVKPKEMKKYAPEQLLILETGRMGEPIKSLQKMANNTHGVVRIEEGDLVYITTTPTTAMETTVAKTEDIVYRAGATVKQISDNLRVSGHANPNDLQLMLNLMKPKYFIPVQGEYRQLAAHADLAHEIGMPYKDIFITGRGDILEYTKGRMSVAGSTTAENIMIDGIGVGDIGNIVLRDRRILSEDGIFVAVVTINRREKRIVSPAKITSRGFVYVKTSKDLMKESSNIVTEIVEKHLESDDFEWSKLKQEIRENLSRYLFEQTKRRPVILPVIME

SEQ ID NO: 4929 - protein, 449 aa, Enterococcus faecalis
EEIVLFHTNDLHSHFENWPKIRRLVKAKRSLYQKEGKTVVTIDLGDFSDRCHPLTEATDGRANVAIMNTLAYDLVTIGNNEGIGNSKKQLEHLYDQATFEVVLANLEDPKTQTLPDFCQAYKIMTTKEGTKLGFIGLTAPFPLTYNPNGWTIKQVEAVLPQLITEVAPQCDVLILLSHLGIDTDFMIAANYPEIQVILGSHTHHLFKDGEKINHVQLAAAGKYGQYIGEVHLFVDADTKQVTSYAKTIETASLEEQATDAKEIAGYLTEGHRTIASAQIAQIPETLSTDLRQPHAFITVALKALKEAGQTEAAVLNNGLFLADLPEGIINADQLHEALPHPMHLIKVTLKGSDMSRLIREMEKSHQFLRKFPICGMGFRGKIFGELCYDGIRFERNSQTVFWQGKPIQPEQKYTLTTVDHFQFVPFFPTIELVGEVEFLFPDVLRTVVA

SEQ ID NO: 4930 - protein, 1109 aa, Enterococcus faecalis
MSFPQLHTVTSYSLLSSTVRIRSYVKQAKALGYQTLAITDINVLHGAVEFYEACQEAGIQPIIGLRLEYTPAEKEGHSELLLFAKNLKGYQQLMQLSSSKMTTEGPFYLAEHQSLLSDLFAVTLSAKGEVAQTFFEDEQQAVHAFQQLASYFDPQSLFVEHSFSMNQQRNPALFSFYQREQLPGVALQEVRHLTREEGFAVTVLESIKENNQLNITSQTPEIEGLNYLREAETTMEQMLQIAGSEVVQNTIQLAENCRVDIPLHQKLLPHFPVPDNQTAGSYLRSLCLEKLPERVPHLNEVYQKRLEKELTIIHNMGFDDYFLIVWDVMDFCHNNQIVTGAGRGSAAGSLVSYVLSITDVDPIKYDLLFERFLNPERYTMPDIDLDIPDNRREEVLAYVSQKYGHYHMAQIATFGTMAAKMVLRDVARVFGLSQSEANRWSAAVPNKLKITLEEAYQESKRMQELVNFSPNNQLLYKTAVQLEGLPRHVSTHAAGVVISDENLLNLVPLQPGSNEILLTQFTMNDVEKIGLLKMDFLGLRNLSIIDDTLTAVKRVYNRTIRLNQIPLDDETTLALFRKGETSGVFQFESAGIRNVLRKLGPTSIEDIAAVNALYRPGPMQNIDVFIRRKKGLEQISYPEPSLAPILENTYGIIVYQEQIMQVAAKMAGFSLGQADILRRAISKKKKDVLDEERNHFVNGALQQGYPQETANQVYDYIERFANYGFNRSHAFAYSFIGFQMAYLKVHYPSAFYVALLHSVRHNPTKIKEYIGEARKNKQTILQPSINQSHYSFYLNQQQQILFGFSSLKGIRRDFIQNILNERRENGPYKTFDEFLLRIDRKWLKVENIEPLIAIGAFDEIAPNRRQLAVGLESNIQSILLSGGSMDLLETLKPKEEEIADYPLEERLEQEEQYLGVYLSGHPTEEFKKTRLAKQTQLVHELVENQPTKLLIYVKNIRTIRTKKGEQMAFVDGDDTTGSISLTLFPTVFRQLRQSVEKGQVYYVEGKVERSTYNQELQILVQRIEKAQQVETSISDETCFIRITKDVEQTDVFQKMKEVLSRHAGHIPVIVYFEKTGKKIVLNEENWVAHTSASQQQLAYVLGEQNVIFK

SEQ ID NO: 4931 - protein, 158 aa, Enterococcus faecalis
EVMQGKDRILLVRRLDEAATKKAMKPLFQIEHEWEFSRESSGTQTKDGVANAVSGLEVTLSLSGLASRDDENLYMKDAVEDGILMEFWDVDLKGEKNAEGKYPAIYAQGYVNSWSLPANVEELVEIETEASINGKPQDGFATVEADIIAEAQYAFQDT

SEQ ID NO: 4932 - protein, 456 aa, Enterococcus faecalis
SIFRKKEITVPVNDSGGMKKNLKTMDLIFLGIGAVVGTGIFVVTGVAAERYAGPGLVLSFLVAAAAIILSGLCYAEFASRIPVIGGPYAYMYVVFGEIVAWMTGWMIICEFFLAVSSVASGWSGYVHGFLDSLGFSLPQALSGAYNPTNGTYIDLIAMLVVVAVTFWVSLEAKTALRLNNLMVFVKFGIILLFVLVGIFYVKPTNWQPFIPYGFSGVFSGAALVFFAFLGFDAVSMAAEEVKNPKKDIPKGIIGSIIISTLLYIVVTLVLTGIVPFTDLGVKDPVAFAMRFINHGAIATIISVGAILTLLTVTIAMMYSLARVIYAISKDGLLPQFMSKIDEKRHTPKNATYVAGFLAMVFAGIVPMEMLAELTNIVTLFYLMFLALGIIKLRTMKGEPQAGEFKVPLVPVLPLISIVVCAALMFQLSLATWQVFGIAVVIGLAIYFFYGRHHSIV

SEQ ID NO: 4933 - protein, 666 aa, Enterococcus faecalis
QKETFYITTPIYYPSGKLHIGNSYTTIACDAMARYKRLMGFDVFYLTGVDEHGQKIEKKAAELNVTPKEYVDKMAADVQKLWKTLDISYDKFIRTTDDYHMAAVQQIFDRLVEQGDIYLGEYEGWYSVSDEEFFTETQLAEVYRDDEGNVIGGKAPSGHEVELVKEESYFFRMSKYADRLVQYYEEHPEFIQPESRKNEMLNNFIKPGLEDLAVSRTTFSWGIPLKNDPKHVVYVWIDALSNYITALGYGSEDDSLFQKYWPANVQMVGKEIVRFHTIYWPIMLMALDLPLPKKVFGHGWLLMKDGKMSKSKGNVVYPEMLVERYGLDALRYYLLRAIPFGSDGVFTPEDFVSRLNYDLANDLGNLLNRTIAMINKYCDGKVPAYASKVTPFDSELSTTAANVIGKYHEAMEKMEFNTAIAEIWTLVSRANKYIDETAPWVLAKEEEKRNELESVMIHLAESLRIVAILLQPVMTETPGKIFEQLGLDPETMNMENIHFGEFPTDVTVTSKGTPIFPRLEIETEVTYIQKKMSQSESATEEDIKWNPEETTLVSTKEKQIKYDDFDKVELKVAEVIDCKKVKGADKLLQFRLDAGDENHRQILSGIAEFYPDPAALIGKKVVIVANLKPRKMRGQISQGMILSAESPEGKLQIVEAPKEMPNGAGI

SEQ ID NO: 4934 - protein, 85 aa, Enterococcus faecalis
ERNQRKVYQGRVVSDKMDKTITVVVETKKNHPIYGKRMKYSKKYKAHDENNTAKVGDIVKIMETRPLSATKRFRLLEVVEEAVII

SEQ ID NO: 4935 - protein, 122 aa, Enterococcus faecalis
VIQQESRLRVADNSGAREILTIKVLGGSGRKTANIGDVIVATVKQATPGGVVKKGEVVKAVIVRTKSGARRADGSYIKFDENAAVIIRDDKSPRGTRIFGPVARELRENNFMKIVSLAPEVL

SEQ ID NO: 4936 - protein, 103 aa, Enterococcus faecalis
MFVKKGDKVKVITGKDKNKEGVVLAAFPKQDKVIVEGVNVVKKHQKPNQAAPQGGILEVEAPIHVSNVMVIDPSNGEATKVAFKEVDGKKVRVSKKTGEVLDK

SEQ ID NO: 4937 - protein, 179 aa, Enterococcus faecalis
MNRLKEKYIKEVTPSLVEKFNYSSVMQTPKVDKIVINMGVGDAVSNAKNLDKAVEELALITGQKPLITKAKKSIAGFRLREGMPIGAKVTLRGERMYEFLDKLVTVSLPRVRDFHGVSKKAFDGRGNYTLGIKEQLIFPEVDYDLVDKVRGMDIVIVTTANTDEESRELLAQLGMPFQK

SEQ ID NO: 4938 - protein, 61 aa, Enterococcus faecalis
VAKKSMIAKNKRPAKHSTQAYTRCERCGRPHSVYRKFHLCRICFRELAYKGQIPGVKKASW

SEQ ID NO: 4939 - protein, 132 aa, Enterococcus faecalis
MVMTDPIADFLTRIRNANMVKHETLEVPASKIKRDIAEILKREGFIRDVEYIEDDKQGVIRVFLKYGKNEERVITNLKRISKPGLRAYVKADEVPKVLNGLGIAIISTSEGVITDKEARAKNIGGEVIAYVW

SEQ ID NO: 4940 - protein, 176 aa, Enterococcus faecalis
RIGNKVVVLPAGVEIKQDGNNITVKGPKGELTREFSSDIKMNIEGNEVTFTRPNDSKEMKTIHGTTRANFNNMVVGVSEGFQKALELIGVGYRAQVQGNKLTLNVGYSHPVEMTAPEGVTFEVPANTQVIVKGINKEVVGELAANIRGVRPPEPYKGKGIRYVGEFVRRKEGKTGK

SEQ ID NO: 4941 - protein, 118 aa, Enterococcus faecalis
VITKPDKNKTRQKRHRRVRNKISGTAECPRLNIFRSNKNIYAQVIDDVAGVTLASASALDKEISGGTKTETAAAVGKLVAERAAEKGIKKVVFDRGGYLYHGRVQALAEAARENGLEF

SEQ ID NO: 4942 - protein, 166 aa, Enterococcus faecalis
MVYIDPKHLELEDRVVAINRVTKVVKGGRRLRFAALVVVGDKNGHVGFGTGKAQEVPEAIRKAIEDAKKNLVEVPMVGSTIPHEVIGVFGGGRILMKPAVEGSGVAAGGPVRAVLELAGVADITSKSLGSNTPINVVRATVEGLKQLKRAEEVAALRGKSVEEIIG

SEQ ID NO: 4943 - protein, 88 aa, Enterococcus faecalis
MEKKEFHIVAETGIHARPATLLVQTASKFNSDINLEYKGKSVNLKSIMGVMSLGVGQGSDVTITVDGADEAEGMAAIVETLQKEGLAE

SEQ ID NO: 4944 - protein, 573 aa, Enterococcus faecalis
MSEMLKGIAASDGVAVAKAYLLVQPDLSFNKTSVEDTDAEATRLDDALAKSTEELQAIRDKAAQSLGEAEAQVFDAHLMVLSDPEMVGQIKQNIQDNKVNAEAALKEVTDMYIGMFEAMDDNAYMQERAADIRDVAKRILAHLLGVTLPNPSMINEEVIVVAHDLTPSDTAQLDRTYVKAFVTDIGGRTSHSAIMARSLEIPAIVGTKEITDKVKAGDILAVNGIIGDVIIDPTDAEKSEFEAEAKAYADQKAEWDKLKNAETVTADGKHVELAANIGTPKDLEGVHKNGGEAVGLYRTEFLYMDSSDFPTEEDQYQAYKAVLEGMEGKPVVVRTMDIGGDKELPYLTLPHEMNPFLGYRALRISLSELGDGMFRTQMRALLRASVHGNLRIMFPMVATLKEFRAAKAIFEDEKQKLVNEGVEVSNDIQVGIMIEIPAAAVLADKFAKEVDFFSVGTNDLIQYTMAADRMNERVSYLYQPYNPSILRLIKNVIDAAHAEGKWAGMCGEMAGDQTAVPLLLGMGLDEFSMSATSILKTRSLMKRLDTTKMAELADRALKECDTMEEVVALVEEY

SEQ ID NO: 4945 - protein, 472 aa, Enterococcus faecalis
MAFESLTNRLQQAMSKIRRKGKVSEADVKEMMREIRLALLEADVNLQVVKDFTKRVRERAVGVEVLESLSPAQQIVKIVDEELTKTLGSETVELNKSPKIPTVIMMTGLQGAGKTTFTGKLAKHLMKTENARPLLIAGDVYRPAAIDQLKVLGQQLEVPVFDMGTDANPVEIVRQGLALAKEKKNDYVLIDTAGRLHIDEALMDELKQIKELANPNEILLVVDAMTGQDAVNVADSFNEQLGITGVVITKMDGDTRGGAALSIRAVTGAPIKFVGSGEKLTDLEIFHPDRMSSRILGMGDMLTLIEKAQQDYDEKKAEELAQKMKENSFDFNDFIEQLDQVMGMGPIEDLLKMIPGMSNMPGIENVKVDPKDVARKRAMVLSMTPAERENPDLLNPSRRRRIAAGSGNSVVEVNRMIKQFKESKKMMQQMSKGDMNIPGMDQMLGGGVKGKLGKMAMNRMMKKNKKKKKKKR

SEQ ID NO: 4946 - protein, 679 aa, Enterococcus faecalis
RVDSVEKTLGTGIYVDDIDIEGMLHASALRSAYPRAKVLSIDSTQALAHPDCVAVFTAKDVPGNNKIGHLEFISDWDVMIPEGEITRYVGDAVALVVSKRKETLPEIKNLVEVDYEEMIPLTSCEAALAEGAPAIHEKGNILSHEHLVRGNTDEVLANSAFVVTEHYSVPINEHAFMEPECAIAQPEGEGILLFSAGQSIYDEQREVARMLGLDKEKIHVQSKLVGGGFGGKEDMSVQHHASLAAWLLKKPVKVLLSREESLMVHPKRHGMEMDFTTGCDEEGNLTAMKAVIYADTGAYASLGGPVLQRACTHAAGPYKYQTIDVEGFAVYTNNPPAGAFRGFGVCQTAFAIESNLNLLAEKVGLSPWEIRFKNAVAPGDTLPNGQLVSKNAALKEALLAVKDVYEQAEVAGISSFFKNSGVGVGLPDTGRCIISVEEGKIHVRTSAACIGQGMATVTTQIACETLNLPPEMIVAEAPDTRRTPNSGTTTASRQSLFTGEATRRAAMQLRYELDMGRALSDLEGEEFYGEYSAKTDPLINDKKSPVSHAGYGYAAEVAILDDKGKVAKFVAAYDMGQVVNPRAAEGQIEGGIAMGMGYALTEKFALEEGYVKAKYATLGLVNATQVPPIETILVHADNLHEGLAYGIKGVGELATIPTAPALAGAYFALDGQLRPSLPL

SEQ ID NO: 4947 - protein, 258 aa, Enterococcus faecalis
MAVISMKQFLEAGVHFGHQTRRWNPKMKKYIFTERNGIYIIDLQKTVKLVDAAYDYMKNVAEEGGVALFVGTKKQAQEAIKDEAIRAGQYYVNHRWLGGTLTNWDTIQKRIARLKKINAMEEDGTFEVLPKKEVAGLNKERERLEKFLGGIADMPRIPDVMYIVDPRKERIAVQEAHKLNIPIVAMVDTNCDPDEIDVVIPSNDDAIRAVKLITAKMADAFIEGNQGEDQATEELFVEETPEATSIEEIVDVVEGNNE

SEQ ID NO: 4948 - protein, 289 aa, Enterococcus faecalis
VTAKMVKELRDMTGVGMMDAKKALVKVEGDMEKAVDFLRENGMAKAAKKNDRIAAEGLANVATVGNVAAIVEVNSETDFVSKNEMFQDLVKDIATKVAENKPATMEEAMAIKTEKGTIESDLIEATTVIGEKISFRRFEVVEKADNAAFGAYLHMGGRIAVLTVIDGTTDEEVAKDVAMHIAAINPRYVNESQIPQEELEHEKAVLTEQALNEGKPANIVEKMVVGRLQKFKAEIALVDQPFVKDPDMTVEKFVASKGGEVKSFVRFEVGEGIEKREDNFADEVMSQMK

SEQ ID NO: 4949 - protein, 764 aa, Enterococcus faecalis
MKRSKWKELIVTGICHILVFPILIQTTVFAETLPSTKQVREGTNHSLTAEKAKSEQPQTKDKLHDEEPLALPKSELIDNEANVTSQTIRERIETPNLTYRYGFINEEGQPVNANEILLQYHSWQGNSPNGINVWEGESQPVTASTVANLKEVVIPSEKVAVYSDMSTVLAASNQTFFLPRYYTSLSLYNKKGEIDPNFPLPTISDASGNQYPTTISQFELEKMSAQQYSQKTGVTFNIRESQKLIVPLYNQVKVDSSNQSGLLNYFKFSGPVYYHVTNRIVTEHFVDTQGKPIPPPPGFRQGKQTLIERDPYAFKQKDLLPSSYEIDSKTYQFQGWYKGKTKPENLEKSVTPSYDITYDDNDDLTVVYKEIPQKNYTFEDVNGVEIAPPSDFIQDHQQPITTDGFRYLAGKKLPQQYSVNGKTYLYQGWYQDKTKQESLEKTKRPINSPVFNEMNAITAVYKEITAKAEMQIEGLVKVMPSGYIQIWQIMLTNVGEVPLKKINLKPASGWSPGLARPIQVTIRVGSEPNKIVPITDENWRVGIALNTEVPIGQTATIMMTTIATGEPDQVLQAAVEMNGNFSAVHAADTVRIQPKNQEIVAPDEEGFISTPTFDFGKVAISSNTQQHGLKQAADYYENGQENPYLRLKKSQPNWALTAELSPFEGRVDQLSSMTKLLLGTTNVSGFIQYNQPTETKVALGKTTAIQLVANGVASHIVANGQFDESDVYQFDFSFDQIKLEIPANQGRKDQTYQAMVTWNLVTGP

SEQ ID NO: 4950 - protein, 706 aa, Enterococcus faecalis
MNEDIKVIFDSIYRDKATNNLTITGWALDTITKESPTFTINNENQVSAYNIQRVLREDVNQIYQTEPAIEAGFVVTLEGIKQKKVLPFHFQSSAHVVTVDFPLNKKYPVIPGTEDKVTRLWIKAKKGFKYMAKNGISHTIQRAKIEKLRNQASYLNWLARNEVLDIEAMTQEIATFHYQPKISIAMPVYNVEEKWLRLCIDSILNQVYTNWELCMADDASTDPNVKKILTEYQQLDERIRVVFREQNGHISEATNSALAIATGEFVALLDNDDELAINAFYEVVKVLNENPELDLIYSDEDKIDMDGNRSDPAFKPDWSPDLLLGTNYISHLGVYRRSILEEIGGFRKGYEGSQDYDLVLRFTEKTTKERITHIPKVLYYWRMLPTSTAVDQGSKGYAFEAGLRAVQDALVRRGINGHATHGAANGLYDVYYDIESEKLVSIIIPTKNGYKDVQRCVSSIIEKTTYQNYEIIMADNGSTDPKMHELYAKFEQQLPGRFFVESIDIPFNFSTINNRAAKKAHGEYLLFLNNDTEVITENWLTLMVSFAQQERIGCVGAKLLYPNNTVQHAGVILGLGGVAGHGHYGYPHGDLGYFGRLAINVNYSAVTAACLLMKKADFDAVGGFEEAFTVAFNDVDLCLKVQALGRDNVWLHEAELYHFESQTRGYDDKGKKKKRFEQEKVMMEEKWGPLIENDPFYNPNLTRDIP

SEQ ID NO: 4951 - protein, 661 aa, Enterococcus faecalis
ATTRAQELRKQLNQYSHEYYVKDQPSVEDYVYDRLYKELVDIETEFPDLITPDSPTQRVGGKVLSGFEKAPHDIPMYSLNDGFSKEDIFAFDERVRKAIGKPVAYCCELKIDGLAISLRYENGVFVRGATRGDGTVGENITENLRTVRSVPMRLTEPISVEVRGECYMPKQSFVALNEEREENGQDIFANPRNAAAGSLRQLDTKIVAKRNLNTFLYTVADFGPMKAKTQFEALEELSAIGFRTNPERQLCQSIDEVWAYIEEYHEKRSTLPYEIDGIVIKVNEFVLQDELGFTVKAPRWAIAYKFPPEEAETVVEDIEWTIGRTGVVTPTAVMAPVRVAGTTVSRASLHNADFIQMKDIRLNDHVIIYKAGDIIPEVAQVLVEKRAADSQPYEMPTHCPICHSELVHLDEEVALRCINPKCPAQIKEGLNHFVSRNAMNIDGLGPRVLAQMYDKGLVKDVADLYFLTEEQLMTLDKIKEKSANNIYTAIQGSKENSVERLIFGLGIRHVGAKAAKILAEHFGDLPTLSRATAEEIVALDSIGETIADSVVTYFENEEVHELMAELEKAQVNLTYKGLRTEQLAEVESPFKDKTVVLTGKLTQYTREEAKEKIENLGGKVTGSVSKKTDIVVAGEDAGSKLTKAESLGVSVWNEQEMVDAL

SEQ ID NO: 4952 - protein, 481 aa, Enterococcus faecalis
LYDKSLTELHDLLVSKEITAVDLTEETLNRIQDTEEQLGSFITVSEEKAMALAKAIDLKGITESNPLAGIPIGIKDNIVTKDILTTAGSKMLHNFDPIYDATVMDKVYQADMIPVGKLNMDEFAMGGSTETSYFKKTKNAWDQTKVPGGSSGGSASAVAAGQVPVSLGSDTGGSIRQPAAFNGIVGLKPTYGRVSRFGLIAFASSLDQIGPLTRNVKDNALALNAISGYDEKDGTSAGVSVPDFTADLTGDIKGMKIALPKEYLGEGVQPDVREAVLKAAETFKSLGATVEEVSLPHSKYGVAVYYIIASSEASSNLQRFDGIRYGYRSDNVQNLEDVYVNSRSEGFGTEVKRRIMLGTFSLSAGYYDAHFKKAGQVRTLIKQDFENVFADYDLIIGPSTPTVAFGLGENINDPITMYMNDILTIPVNLAGLPGMSIPAGFSEGLPVGLQIIGKHFDEHTMYKAAYAFEQATDFHTKKPVI

SEQ ID NO: 4953 - protein, 482 aa, Enterococcus faecalis
KVRVRYAPSPTGHLHIGNARTALFNYLFARHNDGEFIIRIEDTDQKRNIEDGEKSQLENLAWLGMEWDESPAHPGEYGPYRQSERKEIYQPLIDQLLSSNRAYKCYCTPEELEAEREAQQARGEMPHYAGTCANLTPSEQAAKEAAGLEPVIRFRVPRNTEYKFDDIVKGEITFESDNIGGDFVIQKRDGMPTYNFAVAVDDHLMKISHVLRGDDHIANTPKQLMIYEAFEWTPPVFGHMTLIINSETGKKLSKRDETILQFIEQYRELGYLPEAMFNFIALLGWSPVGEEEIFSQEDLIKLFDEQRLSKSPAAFDAKKLEWINNQYMKQMDLGELTDMCIPYLVADGRVEENPSPEKIEWLKQLVSLYQPQMSYAAEIVELSNLFFNEHPVLDDAAKEFLQGETVPTVLHAFKEQLEALDVFDVPSIKAAIKAVQKETGVKGKNLFMPIRIAVSGQMHGPELGETIELLGKEKALDHLNKV

SEQ ID NO: 4954 - protein, 406 aa, Enterococcus faecalis
KRPEVLAPAGTLEKLKVAIRYGADAVYIGGNAYGLRSRAGNFTPEEMAEGVAFAREHNAKVYVAANMVTHEGNQEGAGAFFRELRDIGISAVIVSDPALIEICATEAPGLPIHLSTQASATNYETLEFWKNEGLERVVLAREVSMEEVAAIRKNTDIEIEAFIHGAMCISYSGRCTLSNHMSMRDANRGGCSQSCRWKYELFDMPFGTERRSKTSEGEVEEEFSMSAVDMSMIEHIPELIENGVDSFKIEGRMKSIHYVSTVANVYKKAVDSYMEDPENYVCQQEWIDELWKVAQRELATGFYYNTPSENEQLFGERRKIPQYKFVGEVIAYNEKTQVATIRQRNLFSVGDEIEFYGPGFTHFHQTVKEMYNEDGEAIDRAPNPMMLLTMEVTQPVAVGDMIRKKK

SEQ ID NO: 4955 - protein, 302 aa, Enterococcus faecalis
IYTCTLNLAIDLFIETEELVPFVVNRTKEDDIQANGKGVNVSLILKMLGIDNTALGVKAGFTGNYVEDYLKEKEITTDFIEVAGTTRINVFTKVTQDQKEYKLVNKGPKLSEEHVQRFLKKISELRKGDYLCVSGSLPQGVSPSILIEISRICFEKQVFLILDSSYEEILDCLPYQPFLLKPNEEELQEWFHTEVQTKDDYIFYGQELLKRGAKNILLSLGSEGALFMNNEKVLSGNSPTGMVVNTACSGDAMLGTFLAGWHQGLSLEKNLKRSIAAGSSTAFRKGLTDFSDVQELEQQIKI

SEQ ID NO: 4956 - protein, 455 aa, Enterococcus faecalis
QLIAATGCPTGIAHTYMAQEALEQAAKRKGITIKVETHGQIGIENELTPAEIQGAEAIIIAADKDVQAERFAGKRIIDVPVSVGIKEADRLIEEALAGKGSIAAENQAVDELEQETQISSGNVGHSIYKNLMNGVSHMLPFVVAGGILIALSFAIWGIYSFDPESSQYNATAAMLKSIGDASMGMMVPILSAYIAEGIAKRPGLVVGFVGGLIANTGGTGFLGGILSGFLAGYFILLLQRVFKGLPKSLDGLKAIFLYPVIGVAVIGITMSLLADPMKAVNEGMMSFLASFQNSSPLVLGIIVGCMCAFDMGGPVNKAAYVTGTALLAQGNTSFMAGVSAACIAPPLITGFATLFFGKYFDTNERNAGLVNFILGSTHITEGAIPFAAKDPLKVLPIMMLGSSIAAVLTYMFGVQVPAPHGGFLVLPVVTHAVQWVLAILAGSLVGGLLLGFVQK

SEQ ID NO: 4957 - protein, 1024 aa, Enterococcus faecalis
GTRQLITGLSGSAKTLLMAGALQKTHQKIVIAVPNLYYANQLVDDFLNILPSEQVHLFPVDEVLSAEMAFSSPEARADRVSALNFLMTANAGIVVVPVAGLRKYLPTKETWQNAQLHWEIGTEVEPEILAQRLVLMGYERQSMVGKPGEFSIRGSIVDVYPLNAEYPVRVELFDVEIDSIRYFEADTQRSLENLEEVTISPMTDLVFSKADMNHGMMRLQDALEKRLATAKDQTETDFLEEYFGQLLSSWEQGIPTENAHYYTDFLYQQKTTLLDYLPENSLLFVDDYSRMMETEREIAREEAEWQTLKIEEMRVFSEQTFGVDFHDQLRKTARNTTFFSLFQKGMGNLRFQEVHNFQYRSMQQFFGQMPLLKAEVDRWQKQNQTVVVFVPTKERIQKVEELFQDFDIPSVVSNWDQLLDWHVQIVQGALQTGFELPKNKLVAITEKEIFHTTTKKRARRQTISNAERLKSYSDLKTGDYVVHANHGIGKYIGMETLEVDGVHQDYMTILYQNDDKLFIPVTQLNLIQKFVASESKTPKINKLGGSEWTKTKRKVASKIEDIADDLILLYATRESEKGYAFPPDDAYQKEFEEAFPYSETDDQLRSAAEIKHDMEKSRPMDRLLVGDVGFGKTEVALRAAFKAVSNNKQVAFLVPTTILAQQHYETIQERFEGFPVEIGLLSRFRTKKQQNETIEKIKHGQVDIVIGTHRLLSQDINFSDLGLLIIDEEQRFGVKHKERLKQLRSQVDVLTLTATPIPRTLHMSMLGVRDLSVIETPPENRYPIQTYVMENNPGAIREAIEREMARDGQVFYLYNRVDTIERKVEELQALVPDARIAYAHGQMTEVQLENTLFDFIEGQYDILVTTTIIETGVDIPNANTLFVENADYMGLSTLYQLRGRVGRSNRVAYAYFMYEQQKILNEVSEKRLEAIKDFTELGSGFKIAMRDLSIRGAGNLLGAQQHGFIDSVGFDMYSQMLSEAVARKQGKNIQDQKTSVEIDLGIDAYIPGTYITDERQKIEIYKRI

SEQ ID NO: 4958 - protein, 307 aa, Enterococcus faecalis
QQLQQMQPLLYKQLQKSFEHGRLAHAYLFEGDTGTGKQEFGLWMAKHVFCTNLVNQQPCNECHNCVRINENEHPDVLRIAPDGQTIKVNQIRELKAEFSKSGVETAKKVFLIQEADKMSTGAANSLLKFLEEPEGQILAILETTSLSRILPTIQSRCQTLHFQPLVKKTLIDRLIKQGIGEKTATLLAELTNSFEKAVEISQDEWFNEAKEIILQWFNYLKSNDLQAFIYVQKKMVKVFKEKEQQALSFDLLMVYYRQLLEESVATQQAKKVTEEQAERLALILKARQKWTANVSWQNVCEQLVIQM

SEQ ID NO: 4959 - protein, 580 aa, Enterococcus faecalis
QELLKDTFGYDDFRSGQETIIRHVLRQENVLGIMPTGGGKSICYQLPALLLDNLTLVISPLISLMKDQVDALNLMGIPATYINSTISYQEMNQRIQLAVNKEVKLLYVAPERLESYDFQQMLTHVPIDLLAVDEAHCISQWGHDFRPSYLRLAEIIDQFQQQPTVIALTATATPQVAEDIVKQLRIPSENEIKTGFARENLSFQVVKDQNRDVFLLEYLKMNTGQSGIIYASTRKEVERIYHLLESKKIAAGMYHGGMSEQLRSENQEAFLYDQVQVMVATNAFGMGINKSNVRFVIHAQVPGNIESYYQEAGRAGRDGLPSDAVLMFAPQDLQIQQYFIEQSEMTIDYKQKEYLKLREMSQYANAQMCLQKYILRYFGEEGTDCGRCSNCLDNRELVDITVDAQKVLSCVKRMGERFGKGLVGKVLTGSKDQKIDQWHFDRLPTYGLMKGRTQKEVTQLIDYLTAERYLIPSDGQFPLLSVSTEGVQVLLGERKVFRKEDQKVRKVAVDDALFERLRELRMDMAQEAGVPPYVVFSDSTLKEMCEKLPQTTIQLLQIKGVGQNKLDKYGTAFLEVIKEY

SEQ ID NO: 4960 - protein, 78 aa, Enterococcus faecalis
KKFAIQLLEDDAERIKMLIRNQKNSLCISQCKAFEEVVDTQMYGFSRQVTYATRLGILTNDEGHRLLSDLERELNQLY

SEQ ID NO: 4961 - protein, 400 aa, Enterococcus faecalis
  VARIANT (1)...(400): Xaa = Any Amino Acid
KRHLLDYSIFIPYLILSIVGLIMVYSSTSALQVMKGFSPTSFVINQVAFWVVGLVAMFFIYKMKTSVFQNRSFIMFAIAVITVMVLAVRIPGIGKEINGARGWIEIGGFSMQPAEYLKIMVVWYLSYILARRQKTINGGMDQFKQAAGRPLMLVFVLIALVAIQPDFGNAAILTLITIVMVLASGINYMYTYLVGGLGILGSITAIQLLIMSKGKIFPARYQYIYNRFAVFKNPFLDERNLGHQLANSYYAISNGGWFGKGLGNSVQKKGFLPEAHTDFIFAITLEELGIIGGLAILGLLMFMIARIILVGVRSKKPFNSLMCIGIGTMLLIQVFINVGGITGIIPLTGITFPFLSQGGNSLLIISIAVAFVLNISADETRQKLENEYYLSLEQNQXIXR

SEQ ID NO: 4962 - protein, 160 aa, Enterococcus faecalis
INMQLEEVKALLTQFDQSTLTEFDLREGSFELYMNKNTVSGRSAVEPVVQPQETPVAASGVSVPVETVSVVEETPTNTPTANEKTEEITSPIVGIVYLQPAPDKENFVKVGDTVKTGDVVCIVEAMKLMNEITATVDGVITEILVNNEDVVEFGQPLFRV

SEQ ID NO: 4963 - protein, 443 aa, Enterococcus faecalis
MFSKVLIANRGEIAVRIIRACRELGVQTVAVYSEADQEALHTQLADEAICIGPAKATDSYLNVQAVLSAAIVTNAEAIHPGFGFLSENSQFASMCEECNITFIGPKAETIDAMGNKINARQLMQKAKVPVIPGSDGVIDSVEEALTIAEEIGYPVMLKAAAGGGGKGIRKVLSKEELPKHFTSAQQEAKAAFGNDDMYLEKIIYPARHIEVQILGDQYGHVIHLGERDCSLQRNNQKVLEESPSIAISEEKRQMLGETTVRAAQAVHYENAGTIEFLMDPAGDFYFMEMNTRIQVEHPVTEMVTGIDLVKAQLEIASGEPLGYTQEDVILTGHAIECRINAENPAFNFAPSPGKIQNLLLPSGGMGLRVDSAMYSGYSIPPYYDSMIAKVIVHGENRFDALMKMQRALNEIVTEGIITNAEFQLDLITHDNVLTGDYDTSFLQ

SEQ ID NO: 4964 - protein, 266 aa, Enterococcus faecalis
  VARIANT (1)...(266): Xaa = Any Amino Acid
DVVTLARDQDRLTTLEYIEAIFEDFLEFHGDRYFADDLAVVGGVATLQGKPVTVIGIQKGRNLPENIERNFGSPNPEGYRKALRLMKQAEKFNRPVITFVNTAGAYCGIGAEERGEGEAIAQNLLEMSDLKVPIISVIIGEGGSGGALALAVADEVWMLEHTIYAVLSPEGFASILWKDGSRAKEAAELMKITATELKELAIVDKVIPEVMNGQPLEQAKINRMLQKAFISKLTELAKLDTETLLEKRYQRFRKYXKLLLINELFR

SEQ ID NO: 4965 - protein, 256 aa, Enterococcus faecalis
MSNQEAIGLIDSGVGGLTVLKEALKQLPNERLIYLGDTARCPYGPRPAEQVVQFTWEMADFLLKKRIKMLVIACNTATAVALEEIKAALPIPVVGVILPGARAAVKVTKNNKIGVIGTLGTIKSASYEIAIKSKAPAIEVTSLACPKFVPIVESNQYRSSVAKKIVAETLQALQLKGLDTLILGCTHYPLLRPVIQNVMGSHVTLIDSGAETVGEVSMLLDYFDIAHTPEAPTQPHEFYTTGSAKMFEEIASSWLG

SEQ ID NO: 4966 - protein, 233 aa, Enterococcus faecalis
MNQRTIYYGSIGTALFLSSGMLIASVNSYANEATTPGKYTVTYEVDGKIETATITVKENQTELKLKDTFLGVNQAWSPLDNVVFLKDKEGRPLNLENVIIENNVNTQKVGLYFVTFRYESYLSIAKVYVNPTNFAAEGNMLAELPYSQAMIGPERPIIASRQDKEQQTKQEKKKNKIEQERVNKKVLLNDELLKKIDTIAPVEITGGAASGSSQFGTTLSFLSGSLLYGTRRV

SEQ ID NO: 4967 - protein, 56 aa, Enterococcus faecalis
MSKTVVRKNESLDDALRRFKRSVSKAGTLQESRKREFYEKPSVKRKKKSEAARKRK

SEQ ID NO: 4968 - protein, 146 aa, Enterococcus faecalis
MSLLTTLNDDIKTAMKAKDKETLAVLRMLKTAIQNDQIKAGRELNGEEELTVLSREMKQRKDSLSEFEKAGRDDLVEKVKVEIAIVEKYMPQQLTEEEIRQLVQEVMTQTGATSPKDFGKVMGAMMPKVKGKADGNQVNAIVKELL

SEQ ID NO: 4969 - protein, 91 aa, Enterococcus faecalis
VLKPLGDRVVIRVAKEEEKTVGGIVLASVAKEKPQTGEVIAVGEGRVLENGTKVPMEVKIGDTVMFEKYSGTEVKYEGVEYLIVSAKDIIA

SEQ ID NO: 4970 - protein, 517 aa, Enterococcus faecalis
VLNILLAIVGLIVGLGLGFVIAKSRHDKAINGAKISASSILENARKESETLKKEALLEAKEENQKYRSEIESELKESRLELKSQENRLIQREQTLDRKDDSLEKREGSLEEKEEKLGARQQLIDEREKEVENLINQQHQELERIASLSKEEAKSIIMKSTEEELNHELTLMVKESEQRAKEESDRKAKNLLSLAIQRCAADSVSETTVSVVTLPNDEMKGRIIGREGRNIRTLETLTGIDLIIDDTPEAVVLSGFDPIRREIARMTLEKLIQDGRIHPARIEEMVEKSRKEMDERIREYGEQAAFEVGAHTLHPDLIKILGRLRFRTSYGQNVLNHSIEVAKLAGVLAAELGEDVQLAKRAGLLHDIGKALDHEIEGSHVEIGAELAAKYKENSVVINAIASHHGDVEATSVISVLVAAADALSAARPGARSESLENYIRRLENLENISNSFEGVDSSFAVQAGREVRVMVKPEEISDLESVRLVRDIRKKIEDDLDYPGHIKVTVIRETRAVDYAK

SEQ ID NO: 4971 - protein, 265 aa, Enterococcus faecalis
LRILFIGDVVGSLGREALATYVPKLKKKYRPQVTIANGENAASGRGITGKIYKKFLQDGVDVVTMGNHTWDNKDIFEFIDDAKKMVRPANFPEDVPGQGMVFVKVNQLELAVINLQARTFMVPLEDPFKKAAELVAIARKRTPLIFVDFHGETTSEKQAMSWFLDGQVSAVVGTHTHVQTNDARILPKGTAFLSDVGMTGPYDGILGMKREPIIEKFMTALPKRFEVVETGRTILSACILEIDDQTGQAKMIEPIQISEDRPFQE

SEQ ID NO: 4972 - protein, 845 aa, Enterococcus faecalis
MANFLKKMIENDKKELRRLEKIADKIDAHASAMEQLSDEQLREKTDEFKARYQKGETLDELLPEAFAVVREAAKRVLGLFPYRVQLMGGIVLHDGNIPEMRTGEGKTLTATMPVYLNALSGEGVHVVTVNEYLATRDSNEMGELYNFLGLSVGLNINSKSSDEKREAYNCDITYSTNNELGFDYLRDNMVVYRSQMVQRPLNYAIVDEVDSILIDEARTPLIISGQAEKSTALYTRADNFVKRLKEDEDYKIDIQSKTIGLTEAGIEKAEQTFGLDNLYDIENTALTHHLDQALRANYIMLLDIDYVVQDNKVLIVDQFTGRIMDGRRYSDGLHQAIEAKEGVEIEDETKTMATITFQNYFRMYKKLAGMTGTAKTEEEEFREIYNIQVIQIPTNRPIIRDDRPDLLYPTLESKFNAVVEDIKERYHKGQPVLVGTVAVETSELLSDKLNAAKIPHEVLNAKNHFKEAEIIMNAGQKGAVTIATNMAGRGTDIKLGLGVLELGGLAVIGTERHESRRIDNQLRGRAGRQGDPGVSQFYLSLEDDLMKRFGSERIKTFLERMNVQEEDAVIQSKMFTRQVESAQKRVEGNNYDTRKNVLQYDDVMREQREVIYAQRQEVIMEENDLSDVLMGMVKRTIGRVVDSHTQLEKEEWNLDGIVDFAASTLVHEDTISKKDLENKSAEEIKDYLVARAQEVFEEKSQQLNGQEQLLEFEKVVILRVVDTKWTDHIDAMDQLRQSVGLRAYGQNNPLVEYQTEGYSMYNNMVGSIEYEVTRLFMKSEIRQNVQREQVAQGQAEHPETEQDAAAQSNTSAKRQPVRVDKKVGRNDLCPCGSGKKFKNCHGRNA

SEQ ID NO: 4973 - protein, 585 aa, Enterococcus faecalis
MAYQALYRVWRSQRFDDVVGQKAITQTLKNAIVQKKTSHAYLFTGPRGTGKTSAAKIFAKAINCKHSQDGEPCNVCETCVAITEGRLNDVIEIDAASNNGVEEIRDIRDKAKYAPTQAEYKVYIIDEVHMLSTGAFNALLKTLEEPPQNVIFILATTEPHKIPLTIISRTQRFDFKRISTQDIVDHMAHIMQEMALDYEEQALYVIGRAAEGGMRDALSILDQTISFSDEKVTLEDAMQVTGSLTYEMMDHYIQCCVAGDVERALEGLESILGEGKEARRFLEDLLLYCRDLLMYQQAPKLLAEKAGTLTEAFKELATQTPAEKIYQLIQILSDTQNEIRFTNNANIYLEVATVKLAKTVQPNKHNTPETANQDGSAEGNPELADLQNQIGQLKKELAELKKHGVAAKEADAPRQQARPQAPKSSFRVPTERVYQVLNEATRTHLMNVKNVWEDLLQTLSVTQRAMLKASEPVAASPKGIVVAFDYEIVCARATDDEEMQLAFNNNLSRLMDYTPEMVCITRESWPKLRQSFINQNQGSLNHSEPENEMARLADEPPVTNEHSQENPVVDEAIAMFGEELVEVLD

SEQ ID NO: 4974 - protein, 89 aa, Enterococcus faecalis
MAISQERKNEIIKEYARHEGDTGSPEVQIAVLTEDINQLNEHARTHKKDHHSYRGLMKKIGHRRNLLAYLRKTDIQRYRELIQRLGLRR

SEQ ID NO: 4975 - protein, 702 aa, Enterococcus faecalis
EKQVFKTTWGGRPLEVEIGQLAKQANGAVLVRYGDTVVLSAAVASKEAKDVDFFPLTVNYEEKMYAVGKIPGGFIKREGRPSERATLTARLIDRPIRPMFSEGFRNEVQITNIVMSVEQDCTPEMAAMFGSSLALAISDIPFDGPIAGVDVGRINGEYVLNPTVEQAEQTDIELTVAGTKEAINMVESGAKEVSEEDMLGALLFGFDAIKELVAFQEEIVAAVGKPKMDVDLLQVDADLKKEIFDAYYNTMKTAVMTEEKLAREVEIDKVKDTVKEVYAEKFAEHEEEAQLLKEVKQIAEDLEKDVVRELITIDKIRPDGRKLDEIRHLSSEVSILPRVHGSGLFTRGQTQALSVCTLAPLGEHQIIDGLGVQDSKRFIHHYNFPQFSVGSTGRAGSPGRREIGHGALGERALAQIIPSEEDFPYTIRLVAEVLESNGSSSQASICAGTLALMDAGVPIKAPVAGIAMGLVSDGENYTILTDIQGLEDHLGDMDFKVAGTKDGITALQMDIKIQGITEQILTEALDQAKKARMEILEELTTTIAAPREELSQYAPKIEMIQIKPAKIKDVIGKGGETINSIIDETGVKIDIDQDGNVSIASSDAEMIKKAIKIIEELTKEVEVGQVYLAKVVRIEKFGAFVNLIKGKDGLIHISQLANERVNNVEDVVKLGDEVLVKVTEIDKQGRVNVSRKALLNEENKEK

SEQ ID NO: 4976 - protein, 72 aa, Enterococcus faecalis
LTARPTSRAGTKVGLSDPVVPHGRAIAQRIKATLGITGLSPPRVHIDGEVWHLDVGSSHPGAVVGPKGWAVR

SEQ ID NO: 4977 - protein, 691 aa, Enterococcus faecalis
MAREFSLEKTRNIGIMAHVDAGKTTTTERILYYTGKIHKIGETHEGASQMDWMEQEQERGITITSAATTAQWKGYRVNIIDTPGHVDFTIEVQRSLRVLDGAVTVLDSQSGVEPQTETVWRQATEYKVPRIVFCNKMDKIGADFFYSVESLHDRLQANAHPIQIPIGAEEDFTGIIDLIKMKAEIYTNDLGTDIQETDIPEDYLEKAQEWREKLVEAVAETDEDLMMKYLEGEEITEEELVAGIRQATINVEFFPVLAGSAFKNKGVQLMLDAVLDYLPSPLDIDAIKGIDTKTDEETTRPADDEAPFASLAFKVMTDPFVGRLTFFRVYSGVLESGSYVLNASKGKKERIGRILQMHANTRQEIDKVYSGDIAAAVGLKDTTTGDTLCALDAPVILESIEFPDPVIQVAVEPKSKADQDKMGVALQKLAEEDPSFRVETNVETGETVISGMGELHLDVLVDRMKREFKVEANVGAPQVSYRETFRAATKAEGKFVRQSGGKGQYGHVWVEFTPNEEVKGFEFENAIVGGVVPREYIPAVEKGLEDSMNNGVLAGYPLVDIKAKLYDGSYHDVDSNETAFRVAASMALKAAAKNANPVILEPMMKVTITVPEDYLGDIMGHVTSRRGRVEGMEAHGNSQIVNAMVPLAEMFGYATTLRSATQGRGTFMMVFDHYEDVPKSVQEEIIKKNGG

SEQ ID NO: 4978 - protein, 536 aa, Enterococcus faecalis
LENPKSVDHGDVAFPAFSLAKIYRKAPQQIAAELAEKIDGTNFEKIEVVGPYLNFFMNKEAVSQAVIGAVVKEKNNYGNSTFGNNGNVPIDMSSPNIAKPISMGHLRSTVIGNSIAFILEKIGYQPIRINHLGDWGTQFGKLIVAYKKWGSEEAVRQQPINELLRLYVQFHEEAEEKPELEDEARAWFKKLEEGDQEANELWKWFRSESLKEFDKIYSMLEVEFDSYNGEAFYNDKMDEIVTLLEEKHLLTENQGAEIVDLTEYNLNPALIRKSDGATLYITRDLAAALYRKRTYDFAKSLYVVGNEQSNHFKQLKAVLKELGFEWSDDMEHIPFGLITQGGKKLSTRKGKIVLLEEVLNEAVTLAGNQINEKNPDLANREEVAKQVGVGAVIFHDLKNDRLNNFDFVLDEVVRFEGETGPYVQYTHARAMSILRKANFTPDATQRYALNDKDSWEVVKLLQKFPETVMQAAEKYEPSVIAKHSIHLAQAFNKYYAHVRILDEDAQKEARLALVYAVATVLKEDLRLLGLHAPEEM

SEQ ID NO: 4979 - protein, 649 aa, Enterococcus faecalis
MTEEEKNMRERAQEYDASQIQVLEGLEAVRKRPGMYIGSTSGEGLHHLVWEIVDNSIDEALAGFAKSIQVIIEPDDSITVIDDGRGIPVGIQAKTGRPAVETVFTVLHAGGKFGGGGYKVSGGLHGVGSSVVNALSTSLDVRVYKDGKVYYQEYRRGAVVDDLKVIEETDRHGTTVHFIPDPEIFTETTVYDFDKLATRVRELAFLNRGLHISIEDRREGQEDKKEYHYEGGIKSYVEHLNANKDVIFPEPIFIEGEQQDITVEVSMQYTDGYHSNILSFANNIHTYEGGTHESGFKTSLTRVINDYARKQKLMKENDEKLTGEDVREGLTAVVSIKHPDPQFEGQTKTKLGNSEVRTVTDRLFSEYFTKFLMENPTVGKQIVEKGMLASKARLAAKRAREVTRRKGALEISNLPGKLADCSSKDPEKCELFIVEGDSAGGSAKQGRSREFQAILPIRGKILNVEKASMDKILANEEIRSLFTAMGTGFGEDFDVSKARYHKLVIMTDADVDGAHIRTLLLTLFYRFMRPIVEAGYVYIAQPPLYGVKQGKNITYVQPGKHAEEELAKVLEELPASPKPSVQRYKGLGEMDDHQLWETTMDPEKRLMARVSVDDAIEADQIFEMLMGDRVEPRRAFIEENAHYVKNLDI

SEQ ID NO: 4980 - protein, 94 aa, Enterococcus faecalis
KYEIMYIIRPNIDEEAKTALVERFDTILKDNGAEVIESKDWEKRRLAYEMNGFREGIYHIVNVTSPSTAGAINEFDRLAKINDDIIRHMIVKVE

SEQ ID NO: 4981 - protein, 188 aa, Enterococcus faecalis
MINNVVLVGRLTKDPDLRYTASGSAVATFTLAVNRNFTNQNGDREADFINCVIWRKPAETMANYARKGTLLGVVGRIQTRNYENQQGQRVYVTEVVCENFQLLESRSASEQRGTGGGSFNNNENGYQSQNRSFGNNNAGSGFNNNNNSFNPSSSQSQNNNGMPDFDKDSDPFGGSGSSIDISDDDLPF

SEQ ID NO: 4982 - protein, 804 aa, Enterococcus faecalis
  VARIANT (1)...(804): Xaa = Any Amino Acid
MSYNHKEIEKKWQKYWAKNNCFNTLDDPNKEKFYALDMFPYPSGQGLHVGHPEGYTATDILSRMKRAQGYNVLHPMGWDAFGLPAEQYALDTGNDPAEFTKKNIETFRRQINSLGFSYDWNREINTTDPEYYKWTQWIFTKLYEKGLAYEAEVAVNWVPELGTVISNEEVIDGKSERGGYDVVRRPMRQWMLKITAYADRLLEDLELVDWPESIKDMQRNWIGRSEGANVTFKVAGTEESFTVFTTRPIPCSVQPILFXLLNXNXXKKLRHLNKQQLXKHILKKTSKKSDLNRTDLAKEKTGVFTGAYAINPVNGQEIPIWIGDYVLASYGTGAIMAVPAHDERDYEFAKTFGIDILPVIAGGDITTEAYTGDGPHINSDFLNGLNKAEAIAKMNEWLEENHVGKKEVSYRLRDWLFSRQRYWGEPIPVIHWEDGTTTTVPESELPLRLPVTSDIRPSGTGESPLANIDEWVNVVDPETGMKGKRETNTMPQWAGSSWYYLRFIDPHNKNEIADFEKLKRWLPVDIYIGGAEHAVLHLLYARFWHKFLYDIGVVPTKEPFQKLYNQGMILGENNEKMSKSRGNVVNPDDVVAKYGADTLRLYEMFMGPLDASIAWNENGLEGSRKFLDRVWRLIVDEEGKMRDRITTINDGRLTKVYHQTVKKVTEDMANLHFNTAISQLMVFVNEANKVDALPYEYVEGFVQLLAPIAPHIGEELWQILGNEESLTYVPWPTYDEAALVEDEVEVVFQVNGKLRGKQNVARGLIKEELEQIAMNHEAVKEFIEGKTVRKVIAVPDKLVNIVAN

SEQ ID NO: 4983 - protein, 193 aa, Enterococcus faecalis
GSCFLLVFMFLGYVVRFYPTWLKGFDQTITSFVRRPFPQLNNFFIWYTKFANSLTIIILAIVVIALFIVWKYYAEALWLFINTALIAGVGNSLLKLFFMRQRPTLEHLVTEHTYSFPSGHAVGSTLFYGTILLILPIFIKNKTVRLCVQILLGIGIFMIGVSRIYLGVHFPSDILGGFCLGLAWLLLSYPIYL

SEQ ID NO: 4984 - protein, 536 aa, Enterococcus faecalis
MTKYIFVTGGVVSSIGKGIVAASLGRLLKNRGLKVTIQKFDPYINVDPGTMSPYQHGEVFVTDDGAETDLDLGHYERFIDINLNKYSNVTTGKIYSEVLRKERKGEYLGATVQVIPHITNEIKEKIMRAAKMTDADVIITEVGGTVGDIESLPFLEALRQMKADMGSDNVMYIHTTLIPYLKAAGEMKTKPTQHSVKELRSLGIQPNILVVRTELPVSQNTKNKLAQFCDVNPEAVIESRDVETLYSIPLALQAQNMDQIVCDHLKLDAPAADMTEWRALEEKVLNLKKKTKIALVGKYVELPDAYISVVEALKHAGFDFDSDIEIDWVDSQELTAENVAERIGSADGILVPGGFGDRGIEGKIEAIRFARENDVPFLGICLGMQMACVEFGRNVVGLEDAGSAETNPDVTNNIIDLMADQENIENLGGTLRLGLYPCKLKKGTKTAAAYGNEDVVQERHRHRYEFNNKYRQLFEENGLVFSGVSPDNRLVEIVEIPEKQFFVACQFHPELISRPNRPQRLIKGFVGAALANKESK

SEQ ID NO: 4985 - protein, 98 aa, Enterococcus faecalis
SPKDILQKEFKTKMMNGYDPIEVDEFLDNVIKDYEAYNKELLSLQEENSRLMAKLDQLSKAQPTPRVAQEVPKSAAVTNFDILKRLSNLEREVFGKKL

SEQ ID NO: 4986 - protein, 441 aa, Enterococcus faecalis
KKVILYTCCMSLFVVTMDVTVVNVALPSIQSDFHTNLSTLQWVTDGYTLMVASLLLLSGSTADRIGRKRVLQLGLACFGLASFLCGISQTPGQLIAFRMLQGIGGSMLNPVAMSIITQVFTEKLERAKAIGLWGSVTGISLGMGPIIGGLIVSYFSWRYVFFVNVPIIAAAIILTQKFVPESKVEKTAKNDFVGQALMILFLFSSIYSIIGLPRKGLFAPDILSTGIIGCLAIVIFFIYEYNIDNPLINPRFFLSIPFTSASFLAIFGFIIYNGYLFLNTLYLQEMRGFSPLEAGLSTIPLAFVSFLVAPRAGEMVGRIGTKRPIMLCGISMLAVSFLQLFVTKTTPMIILFIIYIFLGIGFGMLNSPITITAIEGMPLSQSGTAAAIAVTCKQIGNSLGVALPSLLITKPITSSLTRTPFTNVWLLFGCCAIAIIFLSYL

SEQ ID NO: 4987 - protein, 434 aa, Enterococcus faecalis
YLTVTALTKYLKRKFDADPYLGRVYLTGEISNFRFRANAHQYFSLKDDHAKISAIMFKSAFQKLKFQPKEGMKVMVVGRISLYENSGSYQIYIEHMEPDGVGALYQALAELREKLGKEGLFEGPKQQLPRYPKRIAVVTSPSGAVIRDIITTVKRRYPIAQLVLFPTLVQGEQAADDIVRNIQRADAQGDFDTMIIGRGGGSIEDLWPFNEEKVARAIHAATTPIISSVGHETDVTIADMVADVRAATPTAAAELAVPVLNEELLRISERRSRLEQSFLYLLQQRTERFQRLQNSYVFKQPERLYEGQTIKLDRMTQRLFQAMTTIHHQKQRQAQGIIAQLQQQTPKGQLRESQQQLAFLQRNLQTQMTQLFLNKQKQFTSAVQQLDLLSPLKIMGRGYSYTTKEDRVVKTVTELQPADQLTIHYADGTVQANV

SEQ ID NO: 4988 - protein, 135 aa, Enterococcus faecalis
MAELKKVNDFHYEAPEMDQPTVATEQDRKMQEETLPVPTLLPKKKLKNVSLLEKLIGVVLVCATIGIAIATIQVRTTIVQTMNDITETQAVIKEKEDNALKLEQERSELSKSDRIKDVAKKQGLENNGDNVRTVK

SEQ ID NO: 4989 - protein, 742 aa, Enterococcus faecalis
MSKRHKFKQFMKKKNLNPMNNRKKVGIILFATSIGLFFLFAFRTTYIVATGKVAGVSLKEKTASLYEGSQVVKAKRGSILDRYGNPIAEDATSYSLYVVLSKKYTGQNNEKLYAEKKDFDDIAEILAKYTKLDKKTALKYLNNGIHEDGSTQYQVEFGTGGQNITLETRQKIEADLKKKKISGVYFNEHPARLYPNGQFASHFIGYTKAANPDDDKEGLVGAMGLEQTYNDILSGTDGRVYFEKDIYGNALPGTVAEEKKAVDGQDIYTTLDSRLQNTLEDLMTQVNEKYEPVSMTAMLMEAKTGEIVAMSQRPTFNPETKQGLDDNGTWQNLLVESPYEPGSTIKLFTTAASMEQGQFNPNELFNRVGGIQVGDVTVNDHDYTRLNGKEYLNYRQAISWSSNIGMVKLEQKMGDEKWMEYLKKFGFGTSTHSGLSGESAGKLPGTNFVDRAMSAFGQAITVTNFQMMKGFSAIANDGSMLQPHYISKIVDKNTGKETITEPQIVGTPIKAQTAQQIRTYMIDTVEDPTYGIAYDIYKVPGYHVAAKTGTAQISDGKGYVDGASQVLSSVVEMVPADNPEYVLYITLRQAKTGSPSEAMAAIANPLMKLALDIKETDPETTKVASDKVTVADYKNMTPAEALANAKVNGVDPVIIGDGEKIKKQSTPAGQTLMPNQKLILITNGTNYMPDLTGWSKSDVTKFGDLLGLTVEFKGEGYVTKQSIAAETEITEKKLTVTLEGTE

SEQ ID NO: 4990 - protein, 321 aa, Enterococcus faecalis
MEWTQIFIPIVVSFAITVSVMPLFIGYFQMKKQGQVTREDGPTWHSVKTGTPTMGGVVFLVASLITSLAMGLFFHQFTPSLLIILFILVLYGLLGYLDDFIKVFKKRNMGLNSRQKLIGQIFGGLVFYFVYRSEGFSDTLDLFGVAEVPLGIFYGVFIIFWLVGFSNAVNLTDGIDGLVAGLGTISFGTYAIIAWKQQQFDVVIICLSVIGGLIGFFPYNRKPAKIFMGDVGSLALGGLLAAISIILHQEWTLLLIGLVYVCETASVILQVASFKLFGRRIFKMSPIHHHFEMCGWSEWKIDFVFWSVGLICSGITLWILF

SEQ ID NO: 4991 - protein, 456 aa, Enterococcus faecalis
MKKITTYQNKKVLVLGLAKSGVSAAKLLHELGALVTVNDAKQFDQNPDAQDLLTLGIRVVTGGHPIELLDEEFELIVKNPGIPYTNPLVAEALTRKIPIITEVELAGQIAECPIVGITGTNGKTTTTTMIGLLLNADRTAGEARLAGNIGFPASTVAQEATAKDDLVMELSSFQLMGIETFHPQIAVITNIFEAHLDYHGSRKEYVAAKWAIQKNMTVEDTLILNWNQVELQTLAKTTAANVLPFSTKEAVEGAYLLDGKLYFNEEYIMPADELGIPGSHNIENALAAICVAKLKNVSNVQIRQTLKNFSGVPHRTQFVGEVQQRRFYNDSKATNILATEMALSGFDNQKLLLLAGGLDRGNSFDELVPALLGLKAIVLFGETKEKLAEAAKKANIETILFAENVQTAVTIAFDYSEKDDTILLSPACASWDQYPNFEVRGEAFMQAVQQLKESEM

SEQ ID NO: 4992 - protein, 313 aa, Enterococcus faecalis
KEEQVQEKYEKGLEKTRKTFGQRLNELFANFRSVDEDFFEELEETLIGADVGFDTSLKITEALRQEVKLRNVKKPAQVQNTIIEKMVDLYEEAGINENNAINLQPNGLTVILFVGVNGVGKTTSIGKLAHQYKLEGKKVLMAAADTFRAGAIDQLVVWGERASVEVVRGNAGGDPAAVVFDAVERAKAEQADVLLVDTAGRLQNKVNLMKELEKIKRVIQREIPDAPHEVLLVVDATTGQNAMTQAKQFKETTDVTGLVLTKLDGTAKGGIVIAIRNELHLPVKLVGLGEGINDLEPFNANDFAMGLFKGLLK

SEQ ID NO: 4993 - protein, 175 aa, Enterococcus faecalis
MINQVVLVGRLTKDIDLRYTASGSAVGSFTLAVNRNFTNQNGEREADFINCVIWRKPAETMANYARKGTLLGVVGRIQTRNYDNQQGQRVYVTEVICESFQLLEPKSANENRNSIQTSQNDGTSVQNNFESNYATNQNKGLNQQNNSQQMSFGGDVDPFAGAGNSIDISDDDLPF

SEQ ID NO: 4994 - protein, 1158 aa, Enterococcus faecalis
LAGHVVKYGKHRERRSFARISEVLELPNLIEIQTDSYQWFLDEGLREMFEDILPIDDFQGNLSLEFVDYELKEPKYTVEEARAHDANYSAPLHVTLRLTNRETGEIKSQEVFFGDFPLMTEMGTFIINGAERVIVSQLVRSPGVYFHGKVDKNGKEGFGSTVIPNRGAWLEMETDAKDISYVRIDRTRKIPLTVLVRALGFGSDDTIFEIFGDSESLRNTIEKDLHKNASDSRTEEGLKDIYERLRPGEPKTADSSRSLLTARFFDPKRYDLANVGRYKVNKKLDLKTRLLNLTLAETLVDPETGEIIVEKGTVLTHQIMETLGEYIDNGLNSVTYYPSEDAVVTEPMTIQVIQVLSPKDPERIVNVIGNGYPDDSVKTVRPADIVASMSYFFNLMEDIGNVDDIDHLGNRRIRSVGELLQNQFRIGLARMERVVRERMSIQDTETLTPQQLINIRPVVASIKEFFGSSQLSQFMDQTNPLGELTHKRRLSALGPGGLTRDRAGYEVRDVHYSHYGRMCPIETPEGPNIGLINSLSSYAKVNKFGFIETPYRRVDRATGRVTDQVDYLTADIEDHYIVAQANSLLNEDGTFANDVVMARLQSENLEVAVDKVDYMDVSPKQVVAVATACIPFLENDDSNRALMGANMQRQAVPLIQPRSPWVGTGMEYKSAHDSGAALLCKHDGVVEFVDAKEIRVRRDNGALDKYMVTKFRRSNSGTSYNQRPIVHLGEKVEKGDTLADGPSMEEGEMALGQNVLVAFMTWEGYNYEDAIIMSRRLVKDDVYTSVHIEEYESEARDTKLGPEEITREIPNVGEDALKDLDEMGIIRIGAEVQDGDLLVGKVTPKGVTELSAEERLLHAIFGEKAREVRDTSLRVPHGGGGIVHDVKIFTREAGDELSPGVNMLVRVYIVQKRKIHEGDKMAGRHGNKGVVSRIMPEEDMPFLPDGTPVDIMLNPLGVPSRMNIGQVLELHLGMAARQLGIHVATPVFDGATDEDVWETVREAGMASDAKTVLYDGRTGEPFDNRISVGVMYMIKLAHMVDDKLHARSIGPYSLVTQQPLGGKAQFGGQRFGEMEVWALEAYGAAYTLQEILTYKSDDVVGRVKTYEAIVKGEPIPKPGVPESFRVLVKELQSLGLDMRVLDIEEAEIELRDMDDDDD

SEQ ID NO: 4995 - protein, 1054 aa, Enterococcus faecalis
LIDVNKFESMQIGLASPEKIRSWSYGEVKKPETINYRTLKPEREGLFCERIFGPTKDWECACGKYKRIRYKGIVCDRCGVEVTRSKVRRERMGHIELAAPVSHIWYFKGIPSRMGLVLDMSPRALEEVIYFASYVVIEPGDTTLEKKQLLTEREYREKREQYGQAFKAAMGAEAVKQLLDNVDLDGEVAQLKEELKTASGQKRTRAIRRLDILEAFRASGNQPSWMVMDVIPVIPPDLRPMVQLEGGRFATSDLNDLYRRVINRNNRLKRLLDLNAPSIIVQNEKRMLQEAVDALIDNGRRGRPVTGPGNRPLKSLSHMLKGKQGRFRQNLLGKRVDYSGRSVIVVGPFLKMYQCGLPKEMAIELFKPFVMRELVQREIATNIKNAKRKIERGEDEVWDILEEVIQEHPVLLNRAPTLHRLGIQAFEPVLVEGRAIRLHPLVCEAYNADFDGDQMAVHVPLNEEAQAEARMLMLAAQNILNPKDGKPVVTPSQDMVLGNYYLTMEEEGREGEGMIFRDMNEAVLAWQNGYVHLHSRIGVQTTLLGDKPFTDWQKERILITTVGKIIFNEIMPVEFPYLNEPTDYNLTVQTPDKYFVEAGTDIPAHIKEQELVLPFKKKNLGNIIAEVFKRFHITETSKMLDRMKDLGYKHSTYAGMTVGIADIMVLHEKQAIIDAAHKQVETITKQFRRGLITDDERYERVIGVWNGAKDEIQQKLIESMEARNPIFMMSDSGARGNISNFTQLAGMRGLMAAPNGRIMELPIISNFREGLSVLEMFISTHGARKGMTDTALKTADSGYLTRRLVDVAQDVIIREDDCGTDRGLEIEAIREGNEIIEPLDERLLGRYTRKSVVHPETGAIIIGADQLITEDLAREIVDAGIEKVTIRSVFTCNTKHGVCKHCYGRNLATGSDVEVGEAVGTIAAQSIGEPGTQLTMRTFHTGGVAGDDITQGLPRIQEIFEARNPKGQAVITEVTGEVIDISEDPATRQKEVTIKGKTDTRTYTVPYTARMKVAEGDIIHRGAPLTEGSIDPKQLLQVRDVLSVENYLLREVQR

SEQ ID NO: 4996 - protein, 914 aa, Enterococcus faecalis
MKMKETLQLGKTAFPMRGNLPNREAEWQKDWEEKGLYEQRQKLNEGKPTFVLHDGPPYANGNIHLGHSLNKISKDIIIRSKSMSGFRSPYVPGWDTHGLPIEQVLTNKGVKRKEMTVAEYREKCKEYALSQVDKQRNDFKRLGVSGDWEHPYITLDPEYEAAEIRVFGKMAEKGYIYKGLKPIYWSPSSESSLAEAEIEYKDVKSPSIYVAFNVADGKGLLDNETAFVIWTTTPWTLPANLGISVNPDFTYVEVKADGRKFVIAKDLLTTVKEAIGWEEVEVLREFSGEKLDRMTAQHPFYDRTSLVMLGDHVTLDAGTGLVHTAPGHGEDDYIVSRKYDLPVISPVDSRGVFTDEAPGFEGIFYDKANPMITELLEEKGALLKLDFFTHSYPHDWRTKKPVIYRATPQWFASISKFRQDILDEVEKVDWLIPWGKTRLYNMIRDRGDWVISRQRAWGVPLPIFYAENGEAIITPETIEHVANLFAEHGSNIWFMREAKELLPAGFTHPGSPNGEFTKETDIMDVWFDSGSSHEGVLREREELTFPADMYLEGSDQYRGWFNSSITTSVAINGVAPYKSIISQGMVLDGEGRKMSKSLGNTILPEKVINQMGADILRLWVSSVDAEADVRVSMDILNQVSEVYRKIRNTMRFLLANTSDFNPAEHTVAYADLRSVDKYMTVRLNQVIQEIRENGYEKYNFMHIYRTVMNFLTVDLSSFYLDFAKDVVYIEAENDYQRRCMQTVFYQTLVSLTKLLTPIIPHTAEEIWSFLQEEEEYVQLAEFPGYETFTNEEELMDTWAAFMDFRDNVLKALEEARHSKLIGKSLEAKVTVYPNEQIRQLMTAVDADIAQLLIVSDFEVSKEVAPSEAVQFEDMAILVEKAEGETCDRCRSVRQDVGSDEKLPTLCGRCAHIVE

SEQ ID NO: 4997 - protein, 467 aa, Enterococcus faecalis
ANNMKYQFPENFWWGSAASGPQTEGVFEGDGKGQNIWDFWYQEAPEKFFQQVGPDKTSQFYKKYQEDIQLMKETGHNSFRTSIQWSRLIPDPTTGKVNQTAVDFYNQVIDDLLEHGIEPFMNLYHFDMPMVLQEKGGWESREVVDLYVDFAKTCFELFGDRVKKWFTHNEPIVPVEGGYLYGWHYPDKVNLKEGIQVLYHEALASAKAIAVYHSMNLSGEIGIILNLTPTYPRDEHNEADVNAAKFVDGFFNRSFLDPAVKGHFPEDMVAWAKANDLLPETTPEDLAIIAENTVDLLGVNYYQPRRAKAKETPVETRPEGLLPEDFYDVYDMPGKKMNPYRGWEIYEKGIYDTLMNLKENYGNIRCYISENGMGVEGEERFVNEQGVIEDDYRIEFVQDHLKWVHQAIQEGSNVQGYHMWTCMDNWSWLNAYKNRYGFIAVDLDDDAKRTIKKSGRWFKEMTANNGF

SEQ ID NO: 4998 - protein, 139 aa, Enterococcus faecalis
VRTTYMAKAGEVERKWYVVDATDVPLGRLSAVVASVLRGKNKPTFTPHVDTGDFVIVINADKVKLTGKKATDKIYYRHSMYPGGLKSVTAGELRDKNSRRLIETSVKGMLPKNTLGRKQFTKLNVYGGAEHPHAAQQPE

SEQ ID NO: 4999 - protein, 130 aa, Enterococcus faecalis
LAQVQYSGTGRRKNAVARVRLVPGTGKITVNKKDVEEYIPHADLREVINQPFGVTETKGAYDVIVNVNGGGYAGQSGAIRHGIARALLQVDPDFRSALKRAGLLTRDARMVERKKPGLKKARKASQFSKR

SEQ ID NO: 5000 - protein, 38 aa, Enterococcus faecalis
MKVRPSVKPMCEHCKVIRRKGRVMVICPANPKHKQRQG

SEQ ID NO: 5001 - protein, 121 aa, Enterococcus faecalis
MARIAGVDIPRDKRVVVSLTYIYGIGNTTAKKVLANVGVSEDVRVRDLTNEQTDAIRAEIDKLKVEGDLRREVNLNIKRLMEIGSYRGIRHRRGLPTRGQNTKNNARTRKGPTKTVAGKKK

SEQ ID NO: 5002 - protein, 58 aa, Enterococcus faecalis
MAELKITLKRSVIGRPQNQRATVKALGLGKVNSTVTKPANEAIKGMVNTISHLVDVEE

SEQ ID NO: 5003 - protein, 562 aa, Enterococcus faecalis
MKQSKMLIPTLREVPNDAEVLSHQILLRAGYIRQVAAGIYSYLPLANRVLEKLKTIMREEFEKIDAVEMLMPALLPAELWKESGRYETYGPNLYRLKDRNDRDYILGPTHEETFTELIRDEINSYKRLPLNLYQIQTKYRDEKRPRSGLLRGREFIMKDGYSFHADEASLDQSYRDYEKAYSRIFERCGLEFRAIIGDGGAMGGKDSKEFMAISEIGEDTICYSTESDYAANLEMATSLYTPKKSHETQLDLEKIATPEVGTIAEVANFFEVEPQRIIKSVLFIADEEPVMVLVRGDHDVNDVKLKNFLGADFLDEATEEDARRVLGAGFGSIGPVNVSEDVKIYADLAVQDLANAIVGANEDGYHLTNVNPDRDFQPISYEDLRFVQEGDPSPDGNGVLAFTKGIEIGHIFKLGTRYSDAMGATVLDENGREKSVIMGCYGIGVSRLLSAIVEQNADERGINWPTGIAPFDLHVVQMNVKDEYQTKLSQEVEAMMTEAGYEVLVDDRNERAGVKFADADLIGCPIRITVGKKAVDGVVEVKIKRTGEMLEVRKEELESTLS

SEQ ID NO: 5004 - protein, 1443 aa, Enterococcus faecalis
RDLFDKLMTQIQLDDTAKEHPLIQNGRIDKVIVHQQSRLWEFHLSFDELMPVMLYQTFMQQLELAFQQIAQVSVQITTNQTTFTEEQLTDYWQLALLNSQCNTPLVQKVLKTQTPQFEDRKIILPVDNEAVIPYLKQQYLPIIEELYFSYGFPKFHIEPKMDQQQAAEVLKKFEEQKLEQAAAFQQQAAESLVKHEQMKKEKQQQAPAFDGPIRLGRNIPNDEPIMPMGNILEEERRITIEGFIFDKEVRELRSKRKILILKITDYTSSFVVKKFSNGEKDEQVFDAIQPQSWIRVRGSVQEDTFMRDLVMNAQDLMEVAHAPRKDYAPEGEKRVELHMHSNMSTMDATNKVGDLVAQAGKWGHKAIAITDHGGAQAFPDAHAAGKKAGVKILYGVEANIVDDGVPIAYNEEHIELTDATYVVFDVETTGLSAVYDTIIELAAVKMHKGNVIETFEQFIDPGHPLSQTTINLTGITDEMVRGSKSEEEVLRMFKEFSEGTILVAHNASFDMGFLNTSYGKHGIPEAANPVIDTLELSRFLYPHFKSHRLNTLSKKFGVNLEQHHRAIYDSESTGHLCWIFLKEAKENHDMHFHDDLNRHIGEGDSYKRARPFHATILATTQAGLKNLFKLISMSNVDYFFRVPRIPRSQLSKLREGLLIGSACSNGEIFEAMMQKGVEEAKNRAKFYDYIEVMPKPVYAPLIEQELVKNEADLEEIISNLVKIGDELGKLVVATGNVHYLNEEDAIYRKILVGSMGGANPLNRHSLPKVHFRTTDEMLTEFQFLGQDVAKRIVVENPNKVADLCEEVIPVKDDLYTPKIPGSEQEITDLSYNRARELYGDPLPEIVEKRLEKELNSINGNGFSVIYLISQKLVHKSNEDGYLVGSRGSVGSSFVATMTGITEVNPLAPHYYCPECQYSEFYEDGSYGSGFDMPEKACPKCGARLFKDGHDIPFETFLGFHGDKVPDIDLNFSGDYQAEAHNYTKVLFGEEYVYRAGTIGTVADKTAYGFVKGYERDHNLHLRGAEIDRLAKGSTGVKRTTGQHPGGIIVIPDYMDVYDFTPIQYPADDQEAEWKTTHFDFHSIHDNILKLDILGHDDPTVIRMLQDLSGIEPKTIPTDDPEVMRIFEGPDVLGVDAEQIYSKTGTLGIPEFGTRFVRGMLEQTHPSTFAELLQISGLSHGTDVWLGNAEELIRRGEANLAEVIGCRDDIMVYLIHAGLDSGMAFKIMETVRKGQWNKIPDELRDTYLNAMKENNVPDWYIDSCSKIKYMFPKAHAAAYVLMALRVAYFKVYFPILYYCAFFSVRADDFDLVAMSQGKEAVKARMKEITDKGMDASTKEKNLLTVLELCNEMLERGYKFGMIDLYKSDAENFVIEGDTLIAPFRAVPSLGLNVAKAIVAAREEQPFLSKEDLATRGKVSKTLIEYMNENGVLKDLPDENQLSLF

SEQ ID NO: 5005 - protein, 292 aa, Enterococcus faecalis
ERLRRTMMFVPGANAAMLRDAPLYGADSIMFDLEDAVSLKEKDSARVLVHSALKTFDYGNIEIVVRINALDAGGAEDIEAMVLAGVDVIRLPKTETAQDIIDVEAVITEVEQQNDIPVGTTKMMAAIESAEGVLNAPAIAKSSTRLIGIALGAEDYVTNMKTRRHPDGQELFFARSMILHAARAAGIAAIDTVYSDVDNTEGFEAEVRLIKQLGFDGKSVINPRQIPLVNNIYAPTEKEIQNAKEVIWGIREAEAKGSGVISVNGKMVDKPIVERAERVIALALAAKLITEE

SEQ ID NO: 5006 - protein, 78 aa, Enterococcus faecalis
MAQQRRGGRKRRKVDYIAANHIEYIDYKDTELLKRFISERGKILPRRVTGTGAKNQRKLTIAIKRARIMGLLPFVSDE

SEQ ID NO: 5007 - protein, 500 aa, Enterococcus faecalis
  VARIANT (1)...(500): Xaa = Any Amino Acid
VAEEQQAHLEDLNDQMLVRREKMEALREEGIDPFGKRFDRTHNSAELHEQYDNHTKEELSEMNTEVSVAGRMMTKRGKGKAGFAHLQDREGQIQIYVRKDQVGDEAYELFKHADLGDFFGVTGQIMKTNTGEVTVKAQTITLLTKALRPLPDKYHGLTNVEQRYRQRYLDLISNKESFDRFMKRSQIISEIRRYLDGNGYVEVETLVLHNEAGGAAARPFITHHNALDMDLYLRIALELHLKRLIVGGMEKVYEIGRVFRNEGIDTTHNPEFTMLEAYTAYTDYQDVMDLTEGIIRNAAEKVLGTTDITYDGQAVDLGSPFKRLHMVDAVKEQTGVDFWQEMTIEEACALAKEHNVEITDAMTVGHIINEFFETFVEDTLQQPTFIYGHPVAVSPLAKKNPEDGRFTDRFELFIIGKEFANAFTELNDPIDQRERFEEQEKEREQGNDEAHGVDEDFIEALEYGLPPTGGLGIGIDRLVMLLTDAQSIRDVLLFPTMRXK

SEQ ID NO: 5008 - protein, 473 aa, Enterococcus faecalis
MTKQQFGVVGMAVMGKNLALNIESRGYTVALYNRTGSKTTEVVEEHPDKNFQATYSIEEFVNAIEKPRRIMLMVKAGPATDATIQELLPHLDKGDILIDGGNTFFKDTMRRNEELANSGINFIGTGVSGGEEGALKGPSIMPGGQKEAYELVAPILEKISAKAEDGEPCVTYIGPNGAGHYVKMVHNGIEYGDMQLIAESYDLMKQILGLSVDEMAEIFKEWNEGELDSYLIEITADILTRKDDEGTDQPIVDVILDAAGNKGTGKWTSQSALDLGVPLPLITESVFARFISAYKEERVKASGILSKPAAFNFAGDKKELIEKIREALYFSKLMSYAQGFAQLRTASEEYGWDLPFGEIAKIWRAGCIIRAQFLQKITDAYEKNPALENLLLDEYFVEITKKYQQAVREVVAIAVQAGVPVPTFSSAIAYYDSYRSDRLPANLIQAQRDYFGAHTYERTDKEGIYHYSWYNEE

SEQ ID NO: 5009 - protein, 319 aa, Enterococcus faecalis
MSKHYFDPRLKIFSLNSNRPLAEKIADAVGVELGKCSVTQFSDGEIQVNIEESIRGAHVYVIQSTSSPVNDNLMELLIMIDALKRASAKTINVVMPYYGYARQDRKARAREPITAKLVANMIEKAGATRMLTLDLHAVQIQGFFDIPVDHLMGAPLIADYFIEHGIQGDDVVVVSPDHGGVTRARKLAEFLKAPIAIIDKRRPKANVAEVMNIIGHVEGKTCVLIDDMIDTAGTISLAANALKEAGAKDVYASCTHPVLSGPALQRIEDSAIERLVVTDSIYLSDDRKIAKIDEVSVGELIGDAIKRIHENKPVSPLFE

SEQ ID NO: 5010 - protein, 445 aa, Enterococcus faecalis
MPDVESFWHSLEEAYQAILSAPSFDAWIKTTRPLKLDNNQLWLEVPSAVHRDYWEKNLSAKIVETGFKLTGAEVMPHFVVADEKDAALAQELEEPAEEEVVFSEQSKKAMLNPKYTFDTFVIGKGNQMAHAAALVVAEDPGSIYNPLFFYGGVGLGKTHLMHAIGHQMLVNQPDAKVKYVSSETFTNEFINSIQTKTSEQFRKEYRNVDLLLVDDIQFLAEKEATLEEFFHTFNDLYNENKQIVLTSDRPPNDIPKLPERLVSRFAWGLSVDITPPDLETRIAILRKKADAERLEIPDDTLSYIAGQIDSNIRELEGALVRVQAFATINGEDITTSLAADALKSLKSVGSKNQLSILQIQEEVSKYYHVPLKDLKGKKRVKTIVVPRQISMYLAREMTDNSLPKIGAEFGGKDHTTVIHAHEKIQQLLEKDPAIQKEVSEIKNLL

SEQ ID NO: 5011 - protein, 119 aa, Enterococcus faecalis
MARVKGGTITRKRRKKVLKLAKGYYGSKHTLFKSAKEQVMNSYYYAFRDRRQKKRDFRKLWIARINAAARMNGLSYSKLMHGLKLAEIDINRKMLANLAVNDAAAFTALSEQAKDALSK

SEQ ID NO: 5012 - protein, 429 aa, Enterococcus faecalis
MSIITDIYAREVLDSRGNPTIEVEVYTESGAFGRGMVPSGASTGEYEAVELRDGDKARYLGKGVTKAVDNVNNIIAEAIIGYDVRDQMAIDKAMIDLDGTPNKGKLGANAILGVSIAVARAAADYLEVPLYHYLGGFNTKVLPTPMMNIINGGSHADNSIDFQEFMIMPVGAPTFKEALRMGAEVFHALASILKGRGLATSVGDEGGFAPNLGSNEEGFEVIIEAIEKAGYVPGKDVVLAMDAASSEFYDKEKGVYVLADSGEGEKTTEEMIAFYEELVSKYPIISIEDGLDENDWDGFKKLTEVLGDKVQLVGDDLFVTNTTKLAEGIEKGIANSILIKVNQIGTLTETFEAIEMAKEAGYTAVVSHRSGETEDSTISDIAVATNAGQIKTGSLSRTDRIAKYNQLLRIEDQLGDVAEYKGLKSFYNL

SEQ ID NO: 5013 - protein, 584 aa, Enterococcus faecalis
MAKRTTYCGNVSAEFIEKEVVLKGWVQKRRDLGGVIFIDLRDREGIVQVVFNPEKSKEAWEIADKCRSEYVIEVKGQVVYRDKEAINPKMKTGEFEVMATDITILNTAKTTPFTIEDDNNVNDELRMKYRYLDLRRPSMTNNIKLRHQVTKTIRHYLDNHDFLDIETPYLGKSTPEGARDYLVPSRVHAGHFYALPQSPQLFKQLLMGAGFDRYYQIVRCFRDEDLRGDRQPEFTQIDIETTFLTPEEIQTYTENMLAEVMKETKGIEISVPFPRMSYDEAMARYGSDKPDTRFAMELIDVADVVKDVDFKVFQAALENGGHVKALNAKGAADKYSRKDMDNLGKYVSQFGAKGLAWLKVEEDGLKGPIAKFLTEVSDELIAATNAEVGDILMFGADKPEIVAAALGAVRTRLGKELGLIDESKFNFLWIVDWPLFEYDEEAGRYVSAHHPFTQPKAEDVARLATDPASVYAEAYDVVLNGYELGGGSLRIHTRELQEKMFETLGFTKEEAQDQFGFLLDALDYGFPPHGGIALGLDRLAMLLAGEENIREVIAFPKNGKAIDPMNNAPSLVSPLQLFELNIDV

SEQ ID NO: 5014 - protein, 223 aa, Enterococcus faecalis
IAENLTNINNQLQLACKSSQRSVADVTMIGVTKSVGIEEAAELVQLGVQNLAENRVDKLLEKKAGLEKFNDIQWHLIGNLQRRKVKLIINEIDYFHALDSLSLAKEIQKRATKVIRCFVEVNITGEESKHGFRKEDVLPFIQELADLDKIQIVGLMTMAPFGASEEVLHATFRELKELQMTVNEKHLSFAPCTELSMGMSNDFPIAVEEGATFIRIGTALFRD

SEQ ID NO: 5015 - protein, 140 aa, Enterococcus faecalis
VAKKVEKIVKLQIPAGKATPAPPVGPALGQAGINIMGFTKEFNARTADQAGLIIPVVISVYEDRSFTFITKTPPAAVLLKKAAKIEKGSGEPNKTKVATVSSDQVKEIAELKMADLNAADVEAAMRMVAGTARSMGIIVE

SEQ ID NO: 5016 - protein, 159 aa, Enterococcus faecalis
VIDLLTDQDYRADLFPVGRLDKDTEGLLLLTNDGQLAHQLLSPKKHVDKEYLAEVEGLVTVEDCQLFAQGFALKDGEMVKPSRLVIETINEEEGTSVVRLVIQEGKFHQVKRMLATVGKPVTYLKRLRMGELWLDETLELGEYRPLTEAELQQLQPKQS

SEQ ID NO: 5017 - protein, 229 aa, Enterococcus faecalis
MAKKSKKMQEALKKVDATKAYSVEEAVALAKDTNIAKFDATVEVAYKLNVDPKKADQQIRGAVVLPNGTGKTQTVLVFAKGEKAKEAEAAGADFVGDDDMVAKIQGGWFDFDVVVATPDMMATVGKLGRVLGPKGLMPNPKTGTVTMDVTKAVEEVKAGKVTYRVDKAGNIHVPIGKVSFDNEKLVENFNTINDVLLKAKPSTAKGQYIKNISVTTTFGPGIHVDQASF

SEQ ID NO: 5018 - protein, 669 aa, Enterococcus faecalis
  VARIANT (1)...(669): Xaa = Any Amino Acid
MAKKTIKDVDLKDKKVLVRVDFNVPLKDGVITNDNRIVAALPTIKYVIENGGKAILFSHLGRVKTEEDKAGKSLKPVAERLSELLGQPVTFVPETRGKELEDAVNNMKDGDVLVFENTRFEDVDGKKESGNDAELGKYWASLGDVFVNDAFGTAHRAHASNVGIASTGIPTVAGFLMEKEIKFIGEAVENPKRPFVAILGGAKVSDKIAVIENLIEKADKILIGGGMAYTFMKAQGYSVGLSLLEEDKVDLAKSLMEKAGDKLVLPVDTVVSKEFSNDAPFHTVPSTEIPDDEEGLDIGEKTIELFANELQGAKTVVWNGPMGVFEMSNFAKGTIGVCEAIANLEDATTIIGGGDSAAAAIQLGYENKFSHISTGGGASLELLEGKTLPGLASINDKXLVXKTIFLKKEKDVLFMRKPIIAGNWKMNKTLSEAQSFAEAVKNAVPSNDVVDAVIGSPALFLAPLAWNLKDSEVKLAAQNCYWENAGAFTGENSPAAIADLGVNYVIIGHSERREYFHETDEDINKKAKAIFANGMIPIFCCGETLETYEAGKTAEWIEGQITNGLVGLSNEQVASMVIAYEPIWAIGTGKSADANIADEICGVVRSTVEKLYGKEVSEAVRIQYGGSVKPENIAEYMAKENVDGALVGGASLEADSFLALLDAVKXEIT

SEQ ID NO: 5019 - protein, 122 aa, Enterococcus faecalis
MALNIENIVAELETATILELSELVKAIEEKFDVSAAAPVAVAGPAAGGAAEEQTEFTVELTAAGDQKVKVIKAVREATGLGLKEAKAVVDGAPAPVKEAVSKEEAEALKAALEEVGASVTVK

SEQ ID NO: 5020 - protein, 90 aa, Enterococcus faecalis
  VARIANT (1)...(90): Xaa = Any Amino Acid
MARXIRLKRMGSKKKSFYRIVSAESRSSREGRFIETVGTYNPLEDPAQIDLKEDLVLDWLSKGAQPSDTVRNILSKEGVMKKHHEAKNVK

SEQ ID NO: 5021 - protein, 225 aa, Enterococcus faecalis
AVDTYFESEEGQKFLMIDTSGMRKRGKVYVSTETYSVMRAMRSIERSDIVLMVLNAEEGIREQDKRVSGYAHEAGRGIIIVVNKWDTVKKDTNTMRDFEAEIRDEFQYLDYAPIIFVSALTKQRLNKLPELIETVSMNQNLRIPSALLNDVVMDAVAINPTPTDKGKRLKIFYATQVAVKPPTFVIFVNEEELMHFSYARFLENQIRKAFTFEGTPIKIIPRRRK

SEQ ID NO: 5022 - protein, 91 aa, Enterococcus faecalis
MANKAELIENVASSTGLTKKDATAAVDAVFSTIQETLAKGEKVQLIGFGNFEVRERAARKGRNPQTGQEIRIAASKVPAFKPGKALKDAVK

SEQ ID NO: 5023 - protein, 137 aa, Enterococcus faecalis
MPTFNLLVRKPRKSKVEKSDSPALNKGYNSFKKTQTNVNSPQKRGVCTRVGTMTPKKPNSALRKYARVRLSNLIEVTAYIPGIGHNLQEHSVVLLRGGRVKDLPGVRYHIVRGALDTAGVNDRKQSRSKYGTKRPKA

SEQ ID NO: 5024 - protein, 93 aa, Enterococcus faecalis
LLTMNFNYVAHKKGGGSTSNGRDSESKRLGAKSADGQTVTGGSILYRQRGTKIYPGVNVGIGGDDTLFAKVDGVVRFERKGRDKNQVSVYPVA

SEQ ID NO: 5025 - protein, 230 aa, Enterococcus faecalis
  VARIANT (1)...(230): Xaa = Any Amino Acid
MRIDVLTLFPRMFEGPMGESIIGKAREKQLLELNVSNFRDFSDNKHQTVDDYPYGGCAGMLLKVQPIYDNLKAIEEETNQQPKRVILLDPAGKPFNQKMAEEFSQEEHLVFICGHYEGYDERIRTMVTDEVSLGDYVLTGGELGAMVMIDATVRLLPDVLGNNLSAQTDSHSTGLLEHPQYTRPAIFNDMEVPAVLTNGNHKLIAEWQLKESLRRTFLRRPDMLNQXKXR

SEQ ID NO: 5026 - protein, 92 aa, Enterococcus faecalis
KAYEHRILDQSADKICEPAKRLEANVSGPIPLPPERSLYTVIRATHKSKDSRKQFEMRTHKRLIDIVNPTPKTVDALMKLALRSGVNIEIKL

SEQ ID NO: 5027 - protein, 66 aa, Enterococcus faecalis
MPKQKTHRGLAKRVKRTGGSGLKRGRAFTSHRFHGKTKKQRRQLRKASMVAKGDYKRIRQQLARMK

SEQ ID NO: 5028 - protein, 102 aa, Enterococcus faecalis
MYAIIKTGGKQVKVEVGQAIYVEKLNVEAGEKVVFDEVILVGGESTKVGAPTVAGATVEGTVEKHGKQKKVVTFQYKPKKHSHRKQGHRQPYTKVMIEAINA

SEQ ID NO: 5029 - protein, 110 aa, Enterococcus faecalis
  VARIANT (1)...(110): Xaa = Any Amino Acid
MIKGSFKRTGSGRIVSFELTGHAEAGPYGSDVVCAAVTALKFTKXKGIDPXEGLNPIVEIDDVEGGYLYVEMLTTVNQEQKNIAQILLENLLLGLQSIENENTEFIQITT

SEQ ID NO: 5030 - protein, 201 aa, Enterococcus faecalis
MSRYTGPSWKVSRRLGISLSGTGKELARRPYKPGQHGPNSRGKVSEYGMQLTEKQKLRHMYGMNERQFRTLFIKASKIKEGKHGVNFMVLLEQRLDNVVYRLGLATTRRQARQLVNHGHITVDGKRVDIPSYHVEVGQVIGVREKSQNISTIKEAVEATVGRPAFVSFDTEKLEGSFTRLPERDELYPEIDEALVVEYYNQ

SEQ ID NO: 5031 - protein, 158 aa, Enterococcus faecalis
MKKVLVANRGEIAIRIFRACTELDIRTVAIYAAEDEYSVHRFKADEAYLVGKEKKPIEAYLDIENIIQIAKKSGADAIHPGYGFLSENLRFAERCEEEGIIFVGPKTHHLDIFGDKIKAKEAAVAAGIASIPGSDGPVATVEEVVAFGETHGFPIMIK

SEQ ID NO: 5032 - protein, 116 aa, Klebsiella pneumoniae
LGVVSQNFRPEFINRIDEVVVFHPLGEKHIASIAQIQLQRLYKRLEERGYEVQMSDEALKLLSANGYDPVYGARPLKRAIQQQIENPLAQQILSGELVPGKTIELVVKDDRIVAVQ

SEQ ID NO: 5033 - protein, 219 aa, Klebsiella pneumoniae
LQWIISGFLTTVWVSVAGILLATLLAVLLLALRLGGGRAGRGLVAAWVSLFRNTPLLVQLLFWYFAAWNLLPLAVKEVVNDEHAWSILPGNVWWLTPEFLCSMWGLGVFTSAFLVEEIASGLRAVSHGQREAALSQGFTPWQELRFILLPQGWPTAWQPIVGQYLNLMKLSSLASGIGFAELTYQVRQIESYNAHALEAFAVGTALYLALGVAMGVALT

SEQ ID NO: 5034 - protein, 222 aa, Klebsiella pneumoniae
ALAEAIVGVANGAGVRTTALLTDMNQVLASSAGNAVEVREGCQFLTGEYRNPRLFDVTMALCVEMLISGKLAADDAEARANCQAVLDNGKAAEVFGRMVAAQKGPSDFIENYANYLPTAMLSKAVYADTEGFISAMDTRALGMAVVSMGGGRRQASDTIDYSVGFTEMARLGDRVDGQRPLAVIHAKDENSWQEAAKAVKAAIKLDDKAPEITPTVYRRITE

SEQ ID NO: 5035 - protein, 242 aa, Klebsiella pneumoniae
TTFNDIDAVIHLAGDPIADKRWTAEQKQRLCHSRWDLTQRLVGLIHASDPPPSVLISGSAIGYYGDLGEVVVTEEEPPHNEFTHKLCARWEQIACEAQSERTRVCLLRTGVVLAPRGGILGKMTPAFKLGLGGPIGNGRQYLAWIHIDDMVNGILWLLDNDLRGPFNMVSPYPVHNEQFAHALGHALHRPAIFRVPAAAIRLLMGESAVLVLGGQRALPKRLEAAGFAFRWYDLDEALKDVL

SEQ ID NO: 5036 - protein, 56 aa, Klebsiella pneumoniae
INKTDLAPYVGASLEVMASDTQRMRGDRPWTFTNLKQGDGLSTIIAFLEDKGMLGK

SEQ ID NO: 5037 - protein, 207 aa, Klebsiella pneumoniae
IPVAIRTTIARLIIFFIGTVFVLAALIPMQQAGVEKSPFVLVFEKVGIPYAADMFNFVILTAILSAANSGLYASGRMLWSLSNEKTLPACFAKVNKRGVPVTALSVSMLGGVLALFSSVVAPDTVFVALSAISGFAVVAVWLSICASHFMFRRRHLQQGKALSDLQYRAPWYPVVPVLGFVLCLVACVGLAFDPSQRIALWCGIPFV

SEQ ID NO: 5038 - protein, 187 aa, Klebsiella pneumoniae
VYVTGNITVDETWSIPDIPKKGASIHGVKVSQDIGGKGANQAIILSRCGIETRLIAATGNDSNGAWIRQQIKNEPLMLLPDGHFNQHSDTSIILNSADGDNAIITTTAAADTFSLDEMIPHMADAVAGDILLQQGNFSLDKTRALFQYARSRGMTTVFNPSPVNPDFCHLWPLIDIAVVNESEAELL

SEQ ID NO: 5039 - protein, 419 aa, Klebsiella pneumoniae
TFQLAKEDAQMALFSPYDVERLYGKPFADCAIGTSYPQLVADERVRKRWIRARDLFQRLAEIQFESGYPYIMFEDTVNRASPVAGRVTMSNLCSEILQVSTPSAYNEDLSYAHIGEDISCNLGSLNIAHTMDSPDFGRTIATAVRALTAVSDMSDIQSVPSVAAGNAASHAIGLGQMNLHGYLAREGIAYGSPEGLDFTNIYFYTVTWHALHTSMQLARERGQRFAGFEQSRYASGAYFDKYLQEEWQPKTERVRTLFARAGISLPDRESWRPLRDDVMRYGIYNRYLQAVPPTGSISYINHATSSIHPLVSKIEIRKEGKTGRVYYPAPFMNNDNLALYQDAYEIGPEKIIDTYAEATRHVDQGLSLTLFFPDTATTRDINKAQIYAWKKGIKTLYYIRLRHWRLEGTEIEGCVSCAL

SEQ ID NO: 5040 - protein, 495 aa, Klebsiella pneumoniae
MNKEILAVVEAVSNEKALPREKIFEALESALATATKKKYEQEIDVRVEIDRKSGDFDTFRRWLVVEEVTQPTREITLEAARFEDESMNVGDYVEDQIESVTFDRITTQTAKQVIVQKVREAERAMVVDQFREHEGEIITGVVKKVNRDNITLDLGNNAEAVILREDMLPRENFRPGDRIRGVLYAVRPEARGAQLFVTRSKPEMLIELFRIEVPEIGEEVLEIKAAARDPGSRAKIAVKTNDKRIDPVGACVGMRGARVQAVSTELGGERIDIVLWDDNPAQFVINAMAPADVASIVVDEDKHTMDIAVEAGNLAQAIGRNGQNVRLASQLSGWELNVMTVDDLQAKHQAEAHAAIDTFTKYLDIDEDFATVLVEEGFSSLEELAYVPMKELLEIDGLDEATVEALRERAKNALTTLALAQEESLGDNKPADDLLNLEGLDRALAFKLAARGVCTLEDLAEQGVDDLADIEGMTDEKAGELIMAARNICWFGDEA

SEQ ID NO: 5041 - protein, 89 aa, Klebsiella pneumoniae
MKFELDTTDGRARRGRLVFERGVVETPAFMPVGTYGTVKGMTPEEVEATGAQIILGNTFHLWLRPGQEIMKLHGDLHGFMQWKGPILTD

SEQ ID NO: 5042 - protein, 163 aa, Klebsiella pneumoniae
MRRILSVLLENESGALSRVIGLFSQRGYNIESLTVAPTDDPTLSRMTIQTVGDEKAIEQIEKQLHKLVDVLRVSELGQGAHVEREIMLVKVQASGYGREEVKRNTEIFRGQIIDVTPSIYTVQLAGTSDKLDAFLASLRDVARIVEVARSGVVGLSRGDKIMR

SEQ ID NO: 5043 - protein, 153 aa, Klebsiella pneumoniae
LPDEGYCGPGAVDPQCTFLPMSCLFLHMAGEFVAACAQCTGEETSGETVAMQHAEICRTLTEKINLLKDKHEMLSSLLPDVRLLYGTQPGPRTPVMYQPGIVFLFSGHKIGYINERTFRYDTNEYLLLTVPLPFECETLSTPEVPLAGMRLNV

SEQ ID NO: 5044 - protein, 340 aa, Klebsiella pneumoniae
MMPRSLSQTGPEKRRFTWPKGTPQIIALLLVLLVDSLVAPHFYQVVLQDGRLFGSPIDILNRAAPVALLAIGMTLVIATSGIDLSVGAVMAIAGATAASMTVAGHSLPVVLLAALAAGALAGLWNGILVAVLKIQPFVATLILMVAGRGVAQLITAGQIVTFDSPALAWLGSGSFLLFPTPVIVAAATLLLFWLFTRKTALGMFIEAVGINIRAAKNAGVNTRIVVMLAYVLSGVCTAIAGIIVAADIRGADANNAGLWLELDAILAVVIGGASLMGGRFNLLLSVVGALIIQGMNTGILLSGFPPELNQVVKAVVVLCVLIVQSPRFIGLLKGVRGHDK

SEQ ID NO: 5045 - protein, 506 aa, Klebsiella pneumoniae
MVSNNSERSGEYLLEMSNINKSFPGVKALDNVNLKVRPHSIHALMGENGAGKSTLLKCLFGIYQKDSGSILFQGKEIDFHSAKEALENGISMVHQELNLVLQRSVMDNMWLGRYPTKGMFVDQDKMYRDTKAIFDELDIDIDPRARVGTLSVSQMQMIEIAKAFSYDAKIVIMDEPTSSLTEKEVNHLFKIIRKLKDRGCGIVYISHKMEEIFQLCDEITILRDGQWIATQPLEGLDMDKIIAMMVGRSLNQRFPDRENTPGEVILQVRNLTSLRQPSIRDVSFDLHKGEILGIAGLVGAKRTDIVETLFGIREKASGTITLHGKKINNHSANEAINHGFALVTEERRSTGIYAYLDIGFNSLISNIKKYKNSVGLLDNSRMKSDTQWVIDSMRVKTPGQHTQIGSLSGGNQQKVIIGRWLLTQPEILMLDEPTRGIDVGAKFEIYQLIAELAKKDKGIIIISSEMPELLGITDRILVMSNGLVAGIVETKTTTQNEILRLASLHL

SEQ ID NO: 5046 - protein, 78 aa, Klebsiella pneumoniae
VKLSLNTSGLPLQDLVFGASVYFPPLFKAVLLGFFIWLFLHRQLRDWMYAGDIWHPLLMDLSLFALLVCLALVLLIAW

SEQ ID NO: 5047 - protein, 193 aa, Klebsiella pneumoniae
FWNIANRFGSGVNGSFPGSPDTGPGLTAAGIDLIKQANALKMQMDVSHMNEKAFWDTAHHSTSPLVATHSNAHALCPQPRNLTDQQLRAIRDSGGVVGVNFGNAFLRADGRRDSDTPLTTIVRHIDYLINIMGEDHVALGSDFDGITLPDELGDVAGLPRLINTLRATGYDQLVLDKLLWRNWLRVLKNVWQQ

SEQ ID NO: 5048 - protein, 62 aa, Klebsiella pneumoniae
QALQLRTRLRDFEIPEDVCRFLLKRLDREMRSLFMTLDQLDHTSITAQRKLTIPFVKEILKL

SEQ ID NO: 5049 - protein, 137 aa, Klebsiella pneumoniae
VDSIEEHTMHSEYAEVPQEVVDAVLAAKRRGNRVIAVGTTSVRSLESAAQAAKDALIAPFFDDTQIFIYPGYQYQVIDALVTNFHLPESTLIMLVSAFAGYQHTMNAYKVAVEQKYRFFSYGDAMFITYNPQAISER

SEQ ID NO: 5050 - protein, 203 aa, Klebsiella pneumoniae
RFDFLKMFMRENLCSCSRLRPATIAHYITTQSRKTPTLNEEAVMAQRVQLTATVTENQLGQRLDQALAELFPDYSRSRIKEWILDQRVLVNGTIGDKPKEKVLGGERIAIDVEIEEEARFQPQDIPLNIVYEDDDIIVINKPRDLVVHPGAGNPDGTVLNALLHYYPPIADVPRAGIVHRLDKDTTGLMVVAKTIPAQTRLVE

SEQ ID NO: 5051 - protein, 88 aa, Klebsiella pneumoniae
VMRNVIAAVMASTLALSAYSQAAEVVTSVNWLPGDEGGQRGSQSHMFDGISLTEQQRQQLRDLMQRARHDRLPVNVSEMETMHRLVTA

SEQ ID NO: 5052 - protein, 130 aa, Klebsiella pneumoniae
  VARIANT (1)...(130): Xaa = Any Amino Acid
DRVLTALREAAKLDNTVVIITGGHGKPLNAKHDAFDWSRDQLQVPLVIHWPGTPAQEIATLTGNKDVMTTLMQRLLHVSTPANEYSQGEDLFSAARRAXLGVTAANGDTLAITTPTITVVLNHNGTYTTW

SEQ ID NO: 5053 - protein, 200 aa, Pseudomonas aeruginosa
MKRWLGVALGCSGLAIALACAGVLLAPADMAASSSSPSPARTVAALPAVDDRPPPPAPVRSQAAAPAYEAEPPVAELDREQAIQFMQMLRDEGDPRSPPLGGLQPRQGATAQELADPKQYQAFEERQTRELVQAYTSGVQQIPEIRARIEAAEQGGERSAEEIDEARAALGQLEMMRDKLQRESPQLLPGDSAPTSPAAP

SEQ ID NO: 5054 - protein, 228 aa, Pseudomonas aeruginosa
MFSSSKLVNAVAQRLLDTIEQGRWVAGQMLPGQRELAEQMEISRPSLREAIMVLETLGVVRSLPGKGVMVLERSEPLREVAAPGEATMEDVLQLRYALEPFIVGIVAQSAGAAEISELRLLLLDLREAVEDGDPQALVEAYTAFHRRLVKLTSNPIFLSVSEQIGSALERSDNLVRRQPEYAEEILQEHDAILRAIRQHDSERASQAMRQHILNEGARLNIDLRLPQV

SEQ ID NO: 5055 - protein, 475 aa, Pseudomonas aeruginosa
MSKVVLASQLPNKRNASLAPGLKQRHVTMLSIAGVIGAGLFVGSGHAIAAAGPAALLAYLIAGTLVVLVMRMLGEMAVASPDTGSFSTYADRSIGRWAGFTIGWLYWWFWVLVIPLEAIAAAAILNAWFPAIDTWIFALAVTFLLTVTNLFSVARYGEFEFWFALLKVIAIIAFIVLGAVAIVGGLPEREVSGLSSLMASHGGFVPNGYGAVLGALLTTMFSFMGTEIVTIAAAESKDPAKQITRATNSVIWRIGLFYLVSIFIVISIVPWNDPLLIQVGSYQRALELLDIPHAKLIVDLVVLVAVASCLNSAIYTSSRMVFSLAKRGDAPSVLKLTNTAHVPRPAVLASTAVGFLTTIVNYFAPEKVFTFLLASSGAVALLVYLVIAVAQLRMRKQLQASGQPIEFRMWLYPWLTWAVILFIVAALSIMLIMPEHRHEVFATALLTIFTVCLGLLNARRKPRLGEDYAGKTARV

SEQ ID NO: 5056 - protein, 298 aa, Pseudomonas aeruginosa
MALQVASAPHGSSEDSTSASLPANYPYHTRMRRNEYEKAKHDLQIELLKVQSWVKETGQRVVVLFEGRDAAGKGGTIKRFMEHLNPRGARIVALEKPSSQEQGQWYFQRYIQHLPTAGEMVFFDRSWYNRAGVERVMGFCSPLQYLEFMRQAPELERMLTNSGILLFKYWFSVSREEQLRRFISRRDDPLKHWKLSPIDIKSLDKWDDYTAAKQAMFFHTDTADAPWTVIKSDDKKRARLNCIRHFLHSLDYPDKDRRIAHEPDPLLVGPASRVIEEDEKVYAEAAAAPGHANLDIPA

SEQ ID NO: 5057 - protein, 460 aa, Pseudomonas aeruginosa
MTAQLNPQRDTRDYQQLDAAHHIHAFLDQKALNREGPRVMVRGDGLQLWDNDGKRYLDGMSGLWCTNLGYGRQDLAAAASRQLEQLPYYNMFFHTTHPAVVELSEMLFSLLPDHYSHAIYTNSGSEANEVLIRTVRRYWQILGKPQKKIMIGRWNGYHGSTLGSTALGGMKFMHEMGGMLPDFAHIDEPYWYANGGELSPAEFGRRAALQLEEKILELGAENVAAFVAEPFQGAGGMIFPPQSYWPEIQRICRQYDVLLCADEVIGGFGRTGEWFAHEHFGFQPDTLSIAKGLTSGYIPMGGLVLGKRIAEVLVEQGGVFAHGLTYSGHPVAAAVAIANLKALRDEGVVTRVREETGPYLQRCLREVFGDHPLVGEVQGAGFVAALQFAEDKVTRKRFANENDLAWRCRTIGFEEGVIIRSTLGRMIMAPALVAGRAEIDELIDKTRIAVDRTAREIGVL

SEQ ID NO: 5058 - protein, 483 aa, Pseudomonas aeruginosa
MQLKDAKLFRQQAYVDGAWVDADNGQTIKVNNPATGEIIGSVPKMGAAETRRAIEAADKALPAWRALTAKERANKLRRWFDLMIENQDDLARLMTIEQGKPLAEAKGEIAYAASFLEWFGEEAKRIYGDTIPGHQPDKRIIVIKQPIGVTAAITPWNFPSAMITRKAGPALAAGCTMVLKPASQTPYSALALAELAERAGIPKGVFSVVTGSAGEVGGELTSNPIVRKLTFTGSTEIGRQLMAECAQDIKKVSLELGGNAPFIVFDDADLDAAVEGALISKYRNNGQTCVCANRLYVQDGVYDAFVDKLKAAVAKLNIGNGLEAGVTTGPLIDAKAVAKVEEHIADAVSKGAKVVSGGKPHALGGTFFEPTILVDVPKNALVSKDETFGPLAPVFRFKDEAEVIAMSNDTEFGLASYFYARDLARVFRVAEQLEYGMVGINTGLISNEVAPFGGIKASGLGREGSKYGIEDYLEIKYLCLGGI

SEQ ID NO: 5059 - protein, 344 aa, Pseudomonas aeruginosa
MLTIYSDDHRLHHGRHELIGGQFTPCFEKPSRADMVLDRVKAVGLGEVRAPRDFGLEPIRRVHSEGFVRFLQNAWQDWLATGRSHDMLPIAWPTRRLRQTEPDNIDGRLGYYSFDAGAPITAGTWQAITSSANVALSGQSELANGARSVFSLCRPPGHHAAADYMGGYCFFNNAAIAAQAFLDRGAGRVAILDVDYHHGNGTQDIFYDRADVLFTSIHGDPRFEYPYFLGYADEKGNGVGTGYNFNYPLAAGSDWATWSQALQAAIRQIQAYAADALIVSLGVDTFKEDPISQFRLDSPDYLRMGEAIGKLGLATLFVMEGGYAVEEIGINAVNVLQGFEGVHR

SEQ ID NO: 5060 - protein, 759 aa, Pseudomonas aeruginosa
MLNTLRKIVQEVNSAKDLKAALGIIVQRVKEAMGTQVCSVYLLDTETQRFVLMATEGLNKRSIGKVSMAPSEGLVGLVGTREEPLNLENAAAHPRYRYFAETGEERYASFLGAPIIHHRRVMGVLVVQQKERRQFDEGEEAFLVTMSAQLAGVIAHAEATGSIRGLGKLGKGIQEAKFVGVPGAPGVGVGKAVVVLPPADLEVVPDKQVDDIDAEIALFKQALEGVRADMRALSSKLASQLRKEERALFDVYLMMLDDASIGNEVKRIIRTGQWAQGALRQVVMEHVQRFELMDDAYLRERASDVKDIGRRLLAYLQEERKQNLTYPEQTIIVSEELSPAMLGEVPEGRLVGLVSVLGSGNSHVAILARAMGIPTVMGAVDLPYSKVDGIDLIVDGYHGEVYTNPSAELVRQYSDVVAEERELSKGLAALRELPCETLDGHRMPLWVNTGLLADVARAQERGAEGVGLYRTEVPFMINDRFPSEKEQLAIYREQLSAFHPLPVTMRTLDIGGDKALSYFPIKEDNPFLGWRGIRVTLDHPEIFLVQTRAMLKASEGLDNLRILLPMISGTHELEEALHLIHRAWGEVRDEGVDIAMPPIGMMVEIPAAVYQTRELARQVDFLSVGSNDLTQYLLAVDRNNPRVADLYDYLHPAVLHALKKVVDDAHLEGKPVSICGEMAGDPAAAVLLMAMGFDSLSMNATNLPKVKWLLRQITLDKARDLLGQLLTFDNPQVIHSSLHLALRNLGLGRVINPAATVQP

SEQ ID NO: 5061 - protein, 612 aa, Pseudomonas aeruginosa
MPDYRSKTSTHGRNMAGARALWRATGMKDEDFKKPIIAIANSFTQFVPGHVHLKDLGQLVAREIEKAGGVAKEFNTIAVDDGIAMGHDGMLYSLPSREIIADSVEYMVNAHCADAIVCISNCDKITPGMLMAALRLNIPVVFVSGGPMEAGKTKLASHGLDLVDAMVVAADDSCSDEKVAEYERSACPTCGSCSGMFTANSMNCLTEALGLSLPGNGSTLATHADREQLFLRAGRLAVELCQRYYGEGDDSVLPRNIANFKAFENAMTLDIAMGGSTNTILHLLAAAQEAEVPFDLRDIDRLSRKVPQLCKVAPNIQKYHMEDVHRAGGIFSILGELARGGLLHTDVPTVHSPSMADAIAQWDITQTRDEAVHTFFKAGPAGIPTQTAFSQNTRWPSLDDDRAEGCIRSVEHAYSKEGGLAVLYGNIALDGCVVKTAGVDESIHVFEGSAKIFESQDAAVKGILGDEVKAGDIVIIRYEGPKGGPGMQEMLYPTSYLKSKGLGKQCALLTDGRFSGGTSGLSIGHASPEAAAGGAIGLVQDGDKVLIDIPNRSINLLVSDEELAARRAEQDKKGWKPAAPRARRVSTALKAYALLATSADKGAVRNKALLDG

SEQ ID NO: 5062 - protein, 243 aa, Pseudomonas aeruginosa
MAAPFFQAKPRMLRSLFRRLFKYLLWFMAASVVLVAVLRWVPPPGTMVMVERKVGSWVDGQPIDLQRDWRSWEQLPDSLKVAVIAGEDQHFAEHHGFDLPAIQQALAHNERGGSIRGASTLSQQVAKNVFLWSGRSWLRKGLEAWFTLLIETLWTKQRILEVYLNSAEWGPGVFGAQAAARYHFGLDAERLSRTQASQLAAVLPSPLKWSAARPGPYVRQRAAWIRQQMWQLGGDDYLLRLER

SEQ ID NO: 5063 - protein, 423 aa, Pseudomonas aeruginosa
MTISIRGARVIDPASDLDQVGDLHIEAGKIVAIGAAPAGFSAQKTLDGAGLVAAPGLVDLSVALREPGYGRKGNVESETRAAAAGGTTSLCCPPYTRPVLDTPAVAELILDRAREAGNAKVYPIGALTRGFGGEQLSELVALRDTGCVAFTNGLHGFASNRILRRALEYAATFDLTVIFTSQDTDLAEGGLAHEGPTASFLGLAGIPETAETVALARNLLLVEQSGVRAHFSQLTSARGIELVAQAQARGLPVTCDVALYQLILTDEALVGFSSLYHVQPPLRTRADREALREAVKNGVVQAIASHHQPHEADAKNAPFAATEPGISGAELLLPLAMTLVQDGLLDLPTLLARLSHGPAQALRLPAGRLAVGQAADLVLFDPQGSTLAGESWYSKGQNSPFVGHCLPGRVRYTLVDGHLTHEG

SEQ ID NO: 5064 - protein, 2472 aa, Pseudomonas aeruginosa
MGDRHDYVALEWVKGEIAETLKQARQALEAFVENPQDPTRMRFCLTYVHQVQGTLQMVEFYGAALLAEEMEQLVQALLDGRVPNQGEALEVLMQAILQLPVYLDRIQTARRDLPMVVLPLLNDLRAARGEKLLSETSLFAPDLSQRQPQLDGEAIAQLRTDELGGLLRKLRQTQQMALVGLLRNQDVATSLGYLARVYARLEGLCREAPLGPLWSIASGLVEGLANGSVVNSASVRTLLRQLDRELKRLVEQGADGLNQAAPDELVKNLLFYVAKAPSQSPRIRALKEQYRLDEALPDHETVDAERARLAGPDRDAMRSVVGALCEELVRIKDSLDLFVRSDRGHPSELDALLAPLKQIADTLAVLGFGQPRKVILDQLDVIHALAQGRREPSDAILMDVAGALLYVEATLAGMAGPGDERNSEESRLPTTDVAQIHQLVIKEARNGLEQAKDAIIEFIASQWNHEHLARVPELLTQVRGGLAMIPLERAATLLETCNRYIQEQLLARKAVPDWQSLDTLADAITSVEYYLERLSEDHASQSDLILDVAEDSLANLGYTLKPNSSAPAEPGLSGPAAIESPAAEPERPEAVVEVAETAEQPPADTAPAEAAREDAPQLASDDNWTLGEVAPDAGEPSLDLALDLPLDDSAEVPPALPEVVEESGQPQSTSAPARSLDDFSLDEIDLSGLDLPADAAPASGPAALADWSLPEQWGLGDDLAQPAQAGETLDLSLEEPALSFDAPLESLEPLPALEPFDGSAEQELVLDALDPLPLDVALPEAEGEVSAWEGSSLEELDLSDLDLPEVQLPEAEAEAPPAAEALASEAPALSLAEVMAAPVQPINPPAQNVPVSLLPPPADEEPVDEELREVFIEEAGEVLETIGRYLPAWKADHDDREALTEVRRAFHTLKGSGRMVRALVIGELAWSIENLFNRVLDRSIAASEPVQRVVDQVVALLPELVEEFAANAQRQRDDVDLLAATAHALAKGEPLPEPPAPDDGGVPPEAGAEQPSSLDNGVQAPPLADAPQAAAEAQSDVELLDPQLLEIFTNEAETHLEALVGFLADCARELPQPVTDALQRALHTLKGSAHMAGILPIAEIATPLEKLVKEYKSNLLAFDLREAELLHDAEQLFRIGLEQVGAQRPLNPIPGSDALLERIEALHQERIASLEAERYSDAGERRDPLLIEAFLVEGMDILLDAEDLLERWHEHPQERQELSALREELSTLDRGARHAELPQVEELCQALLALYDAVEEGRLAVSPAFFEEARQAHEALIGMMDQVAAGLQVTPRPERVAALQELLEAPAAEAVPFIDPESLGADDFPPEDEEPALPEAVYEEAGAPAEETVPAAPAPAPGRELDEEMVSIFLEEAVDILESAGQALAQWQAEPGALSSLSALQRDLHTLKGGARMAEIAEIGDLAHELEALYEGLVDRRYQHSPQLAGLLQACHDRLAEQLDQLSAGQPLADPHDLIQSIRRFRQGPVAEAATPGEAESPVEELVAPAVEEPAAPAAEAFEERDPELVEIFLEEGFDILDSAAAALQRWMDDVDNTIELEALQRDLHTLKGGARMAEIGEIGDLAHELEFLYEGLCGGRLRASPALFGLLQRCHDELAEMLEAVRGHRTLPDGQALIAEIRRLRSDPDEQLSVPTSVSLKPLAAKGAAADESEILDIFLEEADDLLENLELALGRWDGGNGDAQPLDDLLRILHTLKGGARLAGQTELGNLAHDLEQHLTDAQQQGAPWPDSLLLDAQSGLEGLQRQVDLLRERLAEDDEAGERPEPAQALVQADDTDRAVASALAELTRLAPAAGAIMAAEAAPPAAPATTLPFVRKAQEAAQEAASRRAPQELVKVPAELLENLVNLAGETSIFRGRVEQQVSDVGFTLGEMESTIERVRDQLRRLDTETQAQILSRHQADAERAGYEEFDPLEMDRYSQLQQLSRALFESASDLLDLKETLAAKNRDAETLLLQQARVNTELQEGLMRTRMVPFDRLVPRLRRIVRQVAGELGKQVEFVVGNADGEMDRTVLERIVAPLEHMLRNAVDHGIESGETRRAAGKPEHGTIRLNIGREGGDILLTLSDDGAGIRLDAVRRKAIERGLMSADSDLSDHEVLQFVLESGFSTAEKVTQISGRGVGLDVANSEVKQLGGSVSIQTEPGQGTRFNVRLPFTVSVNRALMVLSGEDLYAVPLNTIEGIVRVSPYELEALYDQRGEAGLDTPSFEYAGQSYELKYLGELLNNGQEPKLVGQSLPLPVILVRSSEHAVAVQVDSLAGSREIVVKSLGPQFAGVAGISGATLLGDGRVVVILDLLATIRSRHALLGQESRRERLALRQEMAASESEQQRPPLVMVVDDSVTVRKVTTRLLERNGMNVLTAKDGVDAIAQLQEHRPDILLLDIEMPRMDGFEVATLVRHDERLGNLPIIMITSRTGEKHRERALGIGVNQYLGKPYQETELLEAIQSLVGQHE

SEQ ID NO: 5065 - protein, 343 aa, Pseudomonas aeruginosa
MSERVTPRVAVIADTSLQRHVLQQALLGHGYEVVLNADPARVDDAALECAPDLWLVDLTQQDDSPLLDSLLEQDRAPVLFGEGHAPERHTEHYPRWERRLIGKLKRLIGDPSDGVGDSLGALLDEERPPRLEIPGDLAAMPLQAGEAAREVWLLAASLGGPAAVKAFLDALPGGLPIGFLYAQHIDASFEQNLPQAVGRHSQWHVKNVRDGEALRCGEVMVVPVLHELGFHHDGRLKCSQRSWPEPYTPSIDQMMLNLAQQFGPDCGVIVFSGMGSDGSAAAAYVRRQGGEVWTQRADSCVCSSMPDSLREAGYSSFNASPRELAEALVKHLAARCAPTGVET

SEQ ID NO: 5066 - protein, 240 aa, Pseudomonas aeruginosa
MRLSRFFVDQPLSLGQHDLPEAQAHYIGRVLRHATGDAVQLFDGSGREYLGELVEVGKKNVRVELREQFAGQPDSPLRIHLGQGLSRGERMDWAIQKATELGVAEITPIVSERCEVRLKDERADKRLQHWRQVAISACEQCGRSSLPLIHPPLALEDWLRGRDDDLRLVLHPVAAPLASHAPPSRLAFLVGPEGGLSDAEVEQAQAAGFHSARLGPRVLRTETAPVVALAVAQQLWGDFA

SEQ ID NO: 5067 - protein, 191 aa, Pseudomonas aeruginosa
MLKKTLAALALGSALFTAGQAMAADYKIDKEGQHAFIEFRIKHLGYSWLYGRFNDFDGSFTFDEKNPSADKVKVTINTNSVDTNHAERDKHLRSGDFLNVSKNPTATFESTEVKANGDSADITGNLTLNGVTKPVTIKAKLIGQGDDPWGGYRAGFEGSATLKLKDFGIKMDLGPASQEVELLLSVEGIRQ

SEQ ID NO: 5068 - protein, 285 aa, Pseudomonas aeruginosa
MATVEILGAECRAGGAVNDDALGCTAQAAWVIDGATSIGRSVLGVESDARWLAQAVDRHLRLLLEVEPEQSSETLLRRLLNDIQGDFRAQSGRDWHDLEDMPAACLSLLRIRGGEIELLNIGDSRILVEGADGQVRSFGDSALHELDRQSLAHFCRMREEHPQWDHAELFKASRPRVRQNRLLMNKPEGYWALDISDRWLGQVQRETLPLAALRSFVLMTDGFDRLVEPFRRYTDEQLLRRLEDVGVSAMLDELREIEQGDDQALAFPRFKIHDDASALWGRIAG

SEQ ID NO: 5069 - protein, 172 aa, Pseudomonas aeruginosa
MSAGDVSNSEFVGSLYRDHRGWLLAWLNRNLGCRQRAEDLSQDTFVRLLGRPELPGLREPRAFLAKVARGLMIDHFRRAALEQAYLAELALVPEAEQPSAEEQYLILEDLREIDRLLGTLSLKARSAFLYSRLDGMPHAEIAERLGVSVPRVRQYLAQGLRQCYIALYGEPR

SEQ ID NO: 5070 - protein, 601 aa, Pseudomonas aeruginosa
MPDYKAPLRDIRFVRDELLGYEAHYQSLPGAEDATPDMVNAILEEGAKFCEQVIAPLNRVGDLEGCTWSADGVKTPTGFKEAYQQFVEGGWPSLAHDVEHGGQGLPESLGLAISEMVGQANWSWGMYPGLSHGAMNTLHAHGTAEQQATYLTKLVSGEWTGTMCLTEPHCGTDLGMLRTKAEPQADGSYKVTGTKIFISAGEHDMADNIVHIVLARLPDAPQGTKGISLFIVPKFLPNAEGNAGERNAVSCGSIEHKMGIHGNATCVMNFDAATGFLIGPPNKGLNCMFTFMNTARLGTALQGLAHAEVGFQGGIAYARERLQMRSLTGPKAPEKPADPIIVHPDVRRMLLTMKAFAEGNRAMLYFAAKQVDIVQRSQDEEQKKAADSMLAFLTPIAKAFMTEVGFESANHGVQIFGGHGFIAEHGMEQNVRDSRISMLYEGTTGVQALDLLGRKVLMTQGEALKGFTKIVHKFCQANEANEAVKEFVAPLAQLNKEWGDLTMKVGMAAMKDREEVGAASVDYLMYSGYACLAYFWADMARLAAEKLAAGTGEEAFYKAKLQTARFYFQRILPRTRAHVAAMLSGANNLMEMAEEDFALGY

SEQ ID NO: 5071 - protein, 797 aa, Pseudomonas aeruginosa
MLRRCCLLFFCLLLSLPVRAEESVALPLTAELRTWLAEHRELRVGVVTEAPYAQYDRRLQQYSGANVELMGWLATAMQVTLRWQGYPDQAALDDALRAGRVDIAPGLSQTPAGLRLWLFSDPYLRVSRLVVGKRDGSGSVELEQLERDTRVAVRAGSSVADYLSSTYSGLQWVSADSEREVLRAVLAGQARYAVIDEAQLSRLTREPEFAELAVVGDIGYPQLLRVATRRDWPELAMVVDQALRSLPRKSLDQLHERWLQPKYPRLGESPGFWQNLSILLGLLLAGALVAVFLQRRQQHALEARLYGARRDLELRQAAEEALRLTQFSIDNSTLGILWVNWDSRVRYANRAAEQMLGHADGQLVDRPLADFEPGLDMDRWLNLWRRARNSEEGPLSFETRCLRADGSWLPADVSLSFLRFGTSEYLVVFLSDVTERRRAREALQESEARMKGIASNVPGMVFRLERPRAGAFSDFAYISEGSEALVGYSARELIESGRGIRGLVHPDDRERYWSSQMAALDENRDWHWQGRILTRQGELRWADIKASARCFEDGRAVWDGVVWDITANKQIELELGESRAQLRELSAHLESVREEEKARIAREVHDELGQVLTVLKLETSMCELAYADAQEGLRERLGNMKKLIAQLFQLVRDVATALRPPILDAGIGSAVEWQARRFEARTQIPCLVEVPENSPQLVDAKAIGLFRILQEALTNVMRHAEAHTVQLRLLREGDELCLSVSDDGRGFDVATVGRGSSFGLVGMRERVLMMGGTLDIDSAPGEGTTLSVRIPLGVAGP

SEQ ID NO: 5072 - protein, 262 aa, Pseudomonas aeruginosa
MAITIPYFWNLICGGQGMSEYGVLVRNGLGQTVIDGEFHNLSLLLERNIEVETSQWFSLDFPYAVTSAAPPVLAVQAWKNKILYFDSVQYRGGPGNWTGATLSFSGYGTHTSGSVRIRVYAYALPLLRGYGLRVRNSAGSVVFDSLRLPLVFSAELGGAPEDWVRVSGEPIIGAGRIDIYRPATWGQPADSYIAVGMALDVEFGRVAVSGGTANAIIYIRWGFTEEGVPRLMQHAYTGLPSSYPGIPAAVYYAMPSIPIIKA

SEQ ID NO: 5073 - protein, 349 aa, Pseudomonas aeruginosa
MDIKGALNRIVNQLDLTTEEMQAVMRQIMTGQCTDAQIGAFLMGMRMKSETIDEIVGAVAVMRELADGVQLPTLKHVVDVVGTGGDGANIFNVSSAASFVVAAAGGKVAKHGNRAVSGKSGSADLLEAAGIYLELTSEQVARCIDTVGVGFMFAQVHHKAMKYAAGPRRELGLRTLFNMLGPLTNPAGVRHQVVGVFTQELCKPLAEVLKRLGSEHVLVVHSRDGLDEFSLAAATHIAELKDGEVREYEVRPEDFGIKSQTLMGLEVDSPQASLELIRDALGRRKTEAGQKAAELIVMNAGPALYAADLATSLHEGIQLAHDALHTGLAREKMDELVAFTAVYREENAQ

SEQ ID NO: 5074 - protein, 318 aa, Pseudomonas aeruginosa
MKKRPLEDLFFAMYRGKQSFEHFANCSVEGLYEPVMVNGRLVYKTDKDLRAYHRFLNKFLFERLPVVDDVVFSYRKGVNAVDAVEKHAGSKFYFQTDLRDFFSSLTKSDVRRTLEWAKDVCVISDLDVWVERILKLVTIGDSLPMGFSTSPAISNACLYSLDGILKTHCLSNGVIYTRYADDLIFSSSNKQALDPLFGVVCRTLQSEFSGRMGINSQKTKYLRKGGKIKLLGLNVLPNGRVTVDMRHKKEIEVRLFYYVKDRARFLKIMGEVDDEKAIKKFSGLINYVNTVDPAYLDKLRKKYGLTIVDMFIHKSPKL

SEQ ID NO: 5075 - protein, 1041 aa, Pseudomonas aeruginosa
MNCAATGGASMGASERSTNDPSELQPCSLPASASPRKSRLRQRLMLIGFALPILAAVGIVVLHEAHTSRLQARELARYAATLDYEVRQGPSEAILFPADGPFDRRLGYQLLPSFMQRLYDRDYAITRQAHFSPALMRYAEHRLFPPYAEKAQAGLDIADCRGVPIYDFRYPQRRYANFASLPPLVVQSLLFIENRDLLDHERPYLNPAVDWGRFTQAALSQVGKMLGFSAHSSGGSTLATQIEKYRHSAEGRTGSIGDKLRQMLSASVRSYREGPANFAARQDIVLTYLNSVPLSAAPGYGEVTGLADGLWVWYGADYRQVGEALDGKAGLAAQGLALRQVLALMIAHRRPSFYLAPRGRDELDRMTDSHLRVLTQAGVIEAPLRDAALAQKLAFRDPRSQPTVQPLPTNKGVTLARTRLAGMLGVPLYDLDRLDLRANTTLQHELQESVTAYLQKLADPDYAAQLGLIGERLLTPTSTRSVRYSFTLFERTPSGNQVRVQTDNTDQPFDINEGSKLELGSTAKLRVLASYLETVAQIHRDYGGMSVAELRKVEVEPLDFILRWGIDYLVASRDRDLSAMLQAAMERRYSASPYESFFTGGGLHTFNNFRKEDNGRRPMLLEALRESINLPFVRLLRDLIRHDIYQNAGSKVQLLADDKDPRRADYLDRFVDKESQVYLRRFWVKYRDKDANQRLETFLDGLRPWPVRLAAIHRYLQPQADLASFSAFLRERLPRGSLTDKRAAELYERYGPGKFNLNDQGYVARVHPLELWLLGYLQKQPQATFGEAVAASGAERKEVYGWLFKSRHKNARDKRIRILLEVEAFLDLHQQWKKLGYPFDHLVPSYATALGSSGDRPAALAELMGIIVNDGVRMPTLRLEHLDFALGTPYETRFAPEATLGQRVMTSEVATTLRNALSQVVDAGTARRLQGTFSRPDGAPLVMGGKTGTGDNRLQTFSAGGHVRSSKALNRTATFVFYIGPRHFGTLTAYVDGSESSQFKFTSALPVQVLKGMAPLLRDYLDPRTATRCQVPLSPQQIGRL

SEQ ID NO: 5076 - protein, 400 aa, Pseudomonas aeruginosa
MTQSHRPRPLDGITVVSLEHAIAAPFCTRQLADLGARVIKIERPGVGDFARGYDERVNGLSSHFVWTNRSKQSLSLDLKQAEALPLLEKLLAGADVLVQNLAPGAAARLGLSYEALRERFPRLIVCDISGYGEGGPYEKKKAYDLLIQSEGGFLSVTGGAGPNEMAKAGCSIADIAAGMYAYSSILSALLLRERTGEGSRIDVSMLESLVEWMGYPMYYAYQDAPPPPRAGASHSTIYPYGPFPAGDGGTVMLGLQNEREWRAFCDKVLRRPELADDERFSANFKRSANREELRALIVEAFAALPAAEVVARLEQAQIASAHVNDMAGVWAHPQLQARQRWTSIDSPAGRLPALLPPASSSAFVPRMDAVPALGGDSDALLAELGCTAADIQRLRATGTV

SEQ ID NO: 5077 - protein, 747 aa, Pseudomonas aeruginosa
MVQVRAHQPVNTDGSINLEAWLDHVQNLVPGLDRQGLLEACEFARESEQRAIAAQNSWAEGTSSFQTGLEIAEILADLKLDQESLVAAVIYRGVREGKITLEAVNKHFGPVVAKLIEGVLRMAAISASLNPRHSMVLGTQAQVENLRKMLVAMVDDVRVALIKLAERTCAIRAVKNADEEKRHRVAREVFDIYAPLAHRLGIGHIKWELEDLSFRYLEPDQYKQIAKLLHERRLDREQYIANVMSQLKEALAATGVQADLSGRAKHIYSIWRKMQRKGLDFSQIYDVRAVRVLVPEMRDCYTALGIVHTLWRHIPKEFDDYIANPKENGYRSLHTAVIGPEGKVLEVQIRTHSMHEEAELGVCAHWRYKGTDVKASSNHYEEKISWLRQVLEWHEELGDIGGLAEQLRVDIEPDRVYVFTPDGHAIDLPKGATPLDFAYRVHTEVGHNCRGAKINGRIVPLNYSLQTGEQVEIITGKHSGPSRDWLNSNLGYVTTSRARAKIVHWFKLQARDQNVAAGKALIERELSRLALPPVDFDRLAEKANVRTAEDMFAALGAGDLRLAHLVNYAQQLVEPDRDSEQLELIPRKPSKIGHGKRGDVQIQGVGNLLTQMAGCCQPLPGDPIVGYITLGRGVTIHRQDCATALQLAGREPERMIQVSWGPEPVRTYPVDIAIRAYDRSGLLRDVSQVLLNERINVLAVNTRSNKEDNTATMQLTIEIPGLDALGRLLARVSQLPNIIEARRNRTP

SEQ ID NO: 5078 - protein, 442 aa, Pseudomonas aeruginosa
MPSSQLPGASPSEIDLVQLFQQLWASKWLIALIAALATAAALAYALLAVPTYQVDVLLRPIQTKALEAVNVNGLYALTPREALDRVGNELAAYSGRLEYFEAHPELFQQLNAEGLSPEQAFWKFNQDAFSMQQADLKKDPQAAPFFRLSMQYPQGMDGAAILNGMLASTIENERQRILDDLQARIDGRLQFLEQDIEGKRASYQATKEGKIARLLEADSIRRAGLEDELKALRGRLKMVRDSRIQQLNEAIQIATRLGIVKPTTPGALGEVGQDGSRSVFRTEVNNQQIPLYFMGVDALTAERDTLLKRKGDDFTEPRVAKIQQELKQLENNREVQYLQARKGEERFFENIDKLRGEQARLKTLKASELKIELVRIDQKASTPLKPIKPRKALVVALGLLGGLVFGVLVALVRAMLRTPRQRVQEDSLPPGVVSLDRSLSGT

SEQ ID NO: 5079 - protein, 451 aa, Pseudomonas aeruginosa
MNATALSPNPAPAISRRTMLIAFVFCFLGLLADGVDLMFLAYSLNSLKAEFGLSNFEAGSLGSLTLAGMAVGGIYGGWCCDRFGRVRVVTWTIVLFSIGTALLGLTQNYWQFALIRFVASLGLGSLFVACNILMSECVGTRYRTTILAAMQAGWTVGYLVATLLAGQIIPEFGWRTLFFTAVAPALVCLALRPWVPESPSWLAAQAGRQRPGAAPQSHAEAGGAGPLGRMLGDPETRGMFLLWSLTSCFLLFGYYGTNNWMPSYLESELGMNFKSMTGYMVGTYSAMILGKVAAGVCADLFGRRLTFAAGAIGSAAFMPLIVFYHSPSNILWILITFGFIYGVPVGVLATYMTESFSTRVRGSAVGTAYNLGRIGAAVAPAGIGLLATHVSIGAGFLVMGITYVLTGLIPALFIADRLYDPNRESRDAESASRRQAPGSAVDTAERRAAKA

SEQ ID NO: 5080 - protein, 417 aa, Pseudomonas aeruginosa
MSQSLKRALFSALLVILVSYPILGLKLRTVGIKLEVLGADAQTLWTIAAAALAMFVWQLFRDRIPLKLGRGVGYKVNGSGLKNFLSLPSTQRWAVLALVVVAFVWPFFASRGAVDIATLILIYVMLGIGLNIVVGLAGLLDLGYVGFYAVGAYTYALLAEYAGFGFWTALPIAGMMAALFGFLLGFPVLRLRGDYLAIVTLGFGEIIRILLRNMTEITGGPNGIGSIPKPTLFGLTFERRAPEGMQTFHEFFGIAYNTNYKVILLYVVALLLVLLALFVINRLMRMPIGRAWEALREDEVACRALGLNPTIVKLSAFTIGASFAGFAGSFFAARQGLVTPESFTFIESAMILAIVVLGGMGSQLGVILAAVVMVLLQEMRGFNEYRMLIFGLTMIVMMIWRPQGLLPMQRPHLELKP

SEQ ID NO: 5081 - protein, 774 aa, Pseudomonas aeruginosa
MRPLSRWLSSCGSLLALAALFLVVPLAGRYWLGWSTPFGYLSDLALGSLLVLLLHRRSLWFALPVMLLWCLFLIGNAELVAAVGRMPEPSDLKYLLDPQFVSSSTQGGGLAHLPLALGLGGATLLCVLLWRRRGPRLPRYAYALPAAFLAAHVGLQYLRPSDADQWQQYNLPHKLLASALSSGQLAVEDWLADDRPDTPPDVAGLNQLDLSGTPLLAGGGRARNVLIVAMEGIPGAYIAANRAAINSSYHEAPMPRLSGWAERAMTTPDYVLHSHQTIRGLYAMLCGDYSKLDSGTPKGVELLNNPARARECLPAQLRQHGFSTHFLQGAGLRFMAKDKVMPQMGFDKTLGRDWFRNTSYLEFPWGMDDKAFFEGAATYVKQLRQQKKPWMLTLLTVGTHQPYSAPADYLARYPSAKQAAVAYLDDAIDAFLADLEKQGVLRDTLVVLTSDESHGVDQVRLASAWGFNLVLAPEQAALPPIKSGVYGHVDLAASVLDYFGYRVPAGISGRSLFRDYASGREMMSYTNGMLRHHDGKDTFVECDFQQVCRRYRSEGFIADEAEFLGRFSGRQARLVSQRAAVLDHSVQQAGQLGQEFQFATHERIRLKPETHNDWTDNLIGAQYLEMPKNSRTTVTLKIRALQMDRNGARVTLKTKEFERDVPIPVPDIPRLLKGKPLDMSFTFDNPEARKAFSFHLLAEGRGIIEISDFHVVTAANPEPVESRSQVAEAAKEQPLLSTLKSLFANRPETEEAERADAPRERTVIPEQKALILSH

SEQ ID NO: 5082 - protein, 679 aa, Pseudomonas aeruginosa
MAKPSFFSSDLVQVLLCPRLHELQFAVKALLAGGLALYLAFGLELEQPQWALMTVFVVSQPYSGMVLAKGMFRLIGTCAGALVSIGMVALYGQASLPFLLLMALWLAFCTAGASLLHNHASYGFVLAGYTAAIVALPASADPATVFDQAVARCSEIGLGILCAALVNVLLWPRRLERQLANQGKAAWEAGLQAAAAELRGADERGELLAALGRIAAADAQRDHAWFEGALGRARSQALRVLGLDLLGLLRAARKVARERRLLDPASAHALQPWLEELEALLREGRQAEFEACRQRLRLALDAAHGQLHLCLVCLERLLGEARAAGRSVEALVYGAPTRQAPGAIAWHRDIERGVLFGLRSALAFLCVAAFWLASAWPSGLGAVSITGVVLSLFASRDNPAQAGLNFLRGILLSIPLAGFVALFYLPGVDGFPLLCLGLGVPLFFAALCVNRASLAGIASPFCIFFVKNVAPSNSMSYDLAHFLNNALSTVLGVAFAVLVFNLVSLRPGERHYRRMLQATLGDLARLTLRSPAQAEAWFGGRTADRLIRLAQRYDRLPEGRRQPWSDGLMGLDFGDELLYLRQCLEEVPASLAQARDRYLRRLRLALLGDGPRAEREHALDPPTARLLKALAASPLAGSERGELAGAALVQLQATWRQWCRSHAPAGTALRADPLPGAGR

SEQ ID NO: 5083 - protein, 327 aa, Pseudomonas aeruginosa
MKPLERLEPLFADETEEDIDHRAAYWFSRRRSGHFSAACRAELEDWLRADPRHREALEGMERLWREFDGLPRPALDDIPEPVPAWRLPRALAAAFFVFCALLVATLFWRDQSLGPNLAYGTAPGEQREVVLADGSKLFLDVDTQVQVRYAERTRDVLLKKGEVFFVVSHDPARPFRVGSGDSRVTVLGTQFSVRRNAQALAVAVKQGRVALQPSLEKDAEHVLLAGDSARLDLAEQRLELGHVAPEQVASWRDGQLVFRDKPLGELVEELSRYRAAPIRLGDPRLAGKRVSGTVRIARPDDFLLALPALLPVRVQPQAGGEVLILAR

SEQ ID NO: 5084 - protein, 297 aa, Pseudomonas aeruginosa
MTSTSRGLAGTLLPVGLLLIAMASIQSGASLAKSMFPLVGAQGTTALRLFFAALILLLLLRPWRKRLSLQSLRSVVVYGIALGGMNLLFYLSVRTVPLGIAVALEFTGPLLVAILSSRRLLDFLWIGLAVFGIWLLLPLGNSAEPLDLVGAAYALGAGVCWALYILFGQRAGADHGAQGAALGVLVAAILVVPIGVAHAGADLLDPALIPLALGVAVLSTALPYTLEMVALTRLPARTFGTLMSIEPAFGALSGLLFLGERLSPTQWLAIGAIILASVGTTLSVKSRGAAPALPAKD

SEQ ID NO: 5085 - protein, 813 aa, Pseudomonas aeruginosa
MHFSLRSRHLRPSLLASSLLLAVSAQGQEKLDVDLPAAPLGQAINALAQQSSVQILFAGDLGAGRQAPALKGRFTPEEALRQLLRDSGLKAQARDEHTFIVVPASEAAVPATQARSEPLDMEQMEITASRTSSDLVSATRQSTVIEHAQLEELRQGSDSLATVLAKAVPGMSDSSRTITEYGQTLRGRSMLVMVDGVPLNTNRDSSRNLANIDPALIERIEVIRGSSAIYGSGATGGIISITTRPAGGENRAETRLSATSPLTRLGSDGLGGQFQQYFAGSLGALDYSFDFGTRHVGASYDAHGDRIAPEPSQGDLFDSNVYNIGGKLGLRIDENQRVQLALSHYDARQDTDYATDPRVARLPPGSVPANAIKGLELDEQNRIRNTLANLEYENLDILGSRLSAQLYYRDYFTRFTPFDARAVSTRGGNVDQIMQNSEVFGSRLTLRTPLGESGNTELVWGGDYNQERSDMPLDVFDPAAYDASGGLVFDKIGKLTYMPPLRTRSAGAFAQLQHRFDEHWSIDGGLRYEYSTAEFDDFIPLSESKAASPVTVKGGDLDYDAVLSNLGIVYSPVAGQEIYASFSQGFQLPDVGIQLRNARRGFDIGSSNLEPVKTNNYELGWRGAIGGNTLGSLALFYTTSKLGDVQSFNNGLILTRTKERIYGVEASADWLSDDEVWGAGGSATWMRGREKPDGKDWQDMTGYRVPPLKLTAYLQYKPDADWNNRLQATFFDSKDYRLDGVESFGRRQVSTYTTVDLVSQYRITPDDQLSLGIQNLFNRDYYPLYSQLLRNNNNTSHLPAPGTVLTASYTHNW

SEQ ID NO: 5086 - protein, 113 aa, Pseudomonas aeruginosa
MRSPLATIACACLLLGGCSKSAEDSANPLLGKDAECLELFARSNALYCDIREDERESQANGTPRRHTDYEVADAAYLLKATGERCAIDTTYVTECSAKAGQWLQKARAKAAKP

SEQ ID NO: 5087 - protein, 262 aa, Pseudomonas aeruginosa
MKVWAVANQKGGVGKTTSSIALAGLLADAGKRVVVVDLDPHGSMTSYFGYDPDTLEHSAFDLFLHQGNVPEGLPASLLRSTSNERISLLPSSTALATLERQSPGKSGLGLVVSKSLAQLWQDFDHAIIDSPPLLGVLMVNALAASQHLVIPVQTEFLAVKGLERMVNTLAMINRSRKQALPYTIVPTLFDRRTQASLSTLRILNENYPDNLWQAFIPIDTRLRDASRAGVTPSQHDGKSRGVIAYRALLKHLLAQQPATRVA

SEQ ID NO: 5088 - protein, 332 aa, Pseudomonas aeruginosa
MKRLFSASLLAAGLALGGAAHAAQPLLNVSYDVMRDFYKEYNPAFQKYWKAEKGENITIQMSHGGSSKQARSVIDGLPADVITMNQATDIDALADNGGLVPKDWATRLPNNSAPFTSATVFIVRKGNPKALKDWPDLLKDGVQVVVPNPKTSGNGRYTYLSAWGYVLKNGGDENKAKEFVGKLFKQVPVLDTGGRAATTTFMQNQIGDVLVTFENEAEMIAREFGRGGFEVVYPSVSAEAEPPVAVVDKVVEKKGSRAQAEAYLKYLWSDEGQTIAANNYLRPRNPEILAKFADRFPKVDFFSVEKTFGDWRSVQKTHFIDGGVFDQIYSPN

SEQ ID NO: 5089 - protein, 227 aa, Pseudomonas aeruginosa
MAELAPLLVSALILGLLGGGHCLGMCGGLMGALTLAIPAEQRGRRLRLLLAYNLGRILSYACAGLLLGLAGWAVARTPLAGALRVVAGLLLIAMGLYLAGWWSGLTRVEALGRGLWRHLEPFARRLLPVSSLPRALLLGAIWGWLPCGLVYSTLLWATSQGSALDSALLMLAFGLGTWPVLLATGMAAERVTALLRRRGVRIVGGLMVILFGLWTLPGPHQAWLMGH

SEQ ID NO: 5090 - protein, 885 aa, Pseudomonas aeruginosa
MTDTARADALLADLPADGRGRLKVFLGAAPGVGKTFAMLQAAQAQLRQGVKLRAGVVETHSRAETESLLAGVPQQPLRSLEYRGMKLQEMDLDGLLADPPALALVDELAHSNVPGSRHAKRWQDIQELLAAGIDVYTTVNVQHLESLNDQVRDITGVQVRETVPDWVLQEAYEIVLIDLPPRELLERLREGKVYVPEQARAAIDAFFSQTNLTALRELAMQTAAARVDADLNHRYRQRGEEAPALRGRLLVGIDGDEQAERLVRHACRVAERRHLPWSVVHVDTGGLRGEQARMRLQGAQQLAERLGGEIVVLRAGEVARTLLQHARERRASLVLVGQSRRRWYRRAFGGGLAGRLLRDGQGLEISALDSEADLRPAEPRPRYPVVWNDYLLALLATALASGLAWIVAHLLELPNISLVFLMAVLLVAVRSSLMPALLCAVASFLAYDFLFIPPHFSFAIHRHEDLLSLAFFLFMAGLTGNLAARQRRQLEALRDTQEETSLLLELSRKLTAATDRQAVLAAAAQQFDDWKDVEVCLLGQVNGEWKTEAGVQRQLADQERVAADWAWAHDQPAGLGTGTLPGGRWWWWPLSAEEGPLALLGVAPLDGQPLSPQRRRLLAALGQPLAQALARARLAEDLEAARLHGETEQLRSALLASVSHDLRTPLTAMRGSIDSLLALGEAIPPADRRELLESTRDEAERLDRYIQNLLDMTRLGHGGLKLARDWVAPGDIVGSALNRLRAVLAPYRVQAIVANDLPLLYVHAALIEQALINVLENAARFSPNHGRLRIEVSQDAAELRFAVSDEGPGIPEAEREKIFDMFYTAARGDRGGQGTGLGLAICQGMIGAHGGRISVGEGLDGRGTTLVLHLPLHPQPDLGQLEGDE

SEQ ID NO: 5091 - protein, 181 aa, Pseudomonas aeruginosa
MSSLTVYHENQPEQPLKLLTHAEDIASTLAEVGVRFERWEAAAPIAAGASQDEVIAAYAHEIERLKRERGYITVDVVSLNSDHPQKAELRAKFLDEHRHGEDEVRFFVAGRGLFVLHIEEHVYAVLCERNDLISVPAGTRHWFDMGEHPHFVAVRLFNNPEGWVAQFTGDDIASRFPLLED

SEQ ID NO: 5092 - protein, 776 aa, Pseudomonas aeruginosa
MPRCSTRSAQRLSPLFLVLSLAVLGLAPPVHPAPAETAAAQEEEQWTINMKDAEIGDFIEQVSSISGQTFVVDPRVKGRVTVVSQARLSLAEVYQLFLSVLATHGYAVLPQGDQARIVPNMEARQDAAQKTVRDGPGSLETRVVQAQQTSVAELIPMIRPLVPAHGHLAAVPSANALIVSDRRSNIERIEAIVRSLDRAGEHDYSIYDMRHAWVAEIAEVLDRSVTPAAGKSAATVQVLADSRSNRLVLLGPPQARARLLRLAQSLDVPSSRSANSRVIRLRHGDAKTLAATLGEIGESLHGERGQDGRGSGKRGLLVRADESLNALVILADPEDVGLLEDIVRQLDVPRAQLLVEAAIVELSGEIGDALGVQWALRSGHVAGGAGFADSGLSIGTLLGALQAGKPPAELPDGAIVGLGSRDFGALVTALSRNSRSNLLSTPSLLTLDNQKAEILVGQNVPFQTGSYTTSASGSSNPFTTVERKDIGVTLKVTPHIGEDRMLRLEIEQEISSIAPTATLAAKAVDLVTNKRSIKSTVLADDGQVIVLGGLIQDDLQRSDSRVPLLGDIPGVGRLFRSSRETRVKRNLMVFLRPSIVRDAAGLERISHGRYRSIQLLRGAAGEPARPLFEDAGAIDLRPAAQVAPAPIGSPRSYPAPAPVLMEKPRLADPASLGDGRGGEVLEVRQGTHAPQPPSPQRYAVRLVEGSSEAFMRALIERHPGLSLRLRRELRDGQELFAVERGDYLDPEQARRALAELPESLPRGKARVIAHTPGSAL

SEQ ID NO: 5093 - protein, 723 aa, Pseudomonas aeruginosa
MEAEKTPDNVVILNHDPIVDPLRQGLLLLCRQLGRPLGDAELVDGMPLEHGRLPLHLVARALRRADITAQVTRQPLRRIDRYLLPALLLLDDGRALVLVGNDGEHAEVLVPQSDGGSQRMPLAELEALYSGTAVFAKCRYRPDGRVGDYASALPEHWFFGPLKRLWRSYAEVTAAALVANVLAVASALFAMQVYDRVVPNAAFDTLWILASGVALAIVLDGVLRIMRGHLLNVLGKRLDLQLSTLLFSRVLSTRVAAKPASMGAFSTQVREFESVREFFTSSSAALISDLPFVAIFLLIIAVIGGHVVWVPLVACVLMILPGLLTQRLLGHLSRQNLREGAMKNGVLLEAFEHLETVKATRAEGRCLHQWETLTGELAGTAMKTHTLASTLSYSASIVQQLCYVGVVVFGVYRISEGAMTVGGLVACSILASRAIAPLSQAAGILGRWQHTKVAMEGLDQLMSAEQERPQGKRFVHKERLQGHYRLEGVRLAHGDSPPVVDVQALNIRAGERVALLGGNGAGKSTLLRLLSGLLDAQAGRLLLDDVSLTQIDPADRQRGIGYLPQDVALFHGSLRDNLNLENAALGDEELLETLDGVGLGAFVRGHPLGLDMPIQGNASLSGGQRQAVGLARVLLQDPPILLLDEPTAAFDQGSEKQVIDYLQQWLGKRTLVITTHKKSMLALVERAVVLRQGRVIMDGPLEQVVQGNQVQAPQAAEGGNHGL

SEQ ID NO: 5094 - protein, 466 aa, Pseudomonas aeruginosa
MKLTLTPPLTPSHWMRSTDLADATSAPLVGTHSADVAIVGGGFVGLWTAITLKQLEPDARVLLLEQDVCGGGASGRNGGFVMSWWPKIGTLLGFCSEAQARFLGESAERAIQELGEFCARHDIDAHFQQKGWLWTATTAHHLDAWNDTLAACERLGVSPFERLDASEVARRTGSPVHLAGVFERSNATVQPALLVQGMRRVALALGVEIHERCGVSQIVPGQPAQLLSAGARVQAKAVVLATNAWSAALPRLSRLIVPVNSSIAVTEAIPQRLERIGWTGGEAITDSQLMVDYYRTTRDGRIAFGKGTGALSYGSRIGRVFDVDRESLALTEADFRRTYPSLGDIPLVDGWSGPIDRTYDSLPVFGRLHENIHYGIGWSGNGVGPSRLGGRILASLALGRDDPWSRCPLVERRCRSFPPEPLRYLGGSLVRNAVLRKERAELAGTAPSATDRFLARFAPAGLEDKS

SEQ ID NO: 5095 - protein, 304 aa, Pseudomonas aeruginosa
MHIRILGSAAGGGFPQWNCNCRNCRGVRDGSVAAQPRTQSSIALSDDGERWILCNASPDIRAQIAAFPALQPARRPRDTAIGAIVLLDSQIDHTTGLLSLREGCPHEVWCTQMVHQDLSEGFPLFPMLSHWNGGLRHRPIALDGEPFAIPACPRLRFTAIPLRSSAPPYSPHRGDPHPGDNIGLFVEDLDSAGALFYAPGLGEVDEALLEWMRRADCLLVDGTLWRDDEMLVCEVGDKLGRQMGHLAQSGPGGMLEVLAKVPAARKVLIHINNTNPILDTASAERAELDASGIEVAWDGMHIQL

SEQ ID NO: 5096 - protein, 432 aa, Pseudomonas aeruginosa
MNLDSTALAYQSGFGNEFSSEALPGALPVGQNSPQKAPYGLYAELLSGTAFTMARSEARRTWLYRITPSAKHPPFRRLERQIAGAELDAPTPNRLRWDPLALPEQPTDFLDGLLRMAANAPGDKPAGVSIYQYLANRSMERCFYDADGELLLVPQLGRLRLCTELGALQVEPLEIAVIPRGMKFRVELLDGEARGYIAENHGAPLRLPDLGPIGSNGLANPRDFLTPVARYEDSRQPLQLVQKYLGELWACELDHSPLDVVAWHGNNVPYKYDLRRFNTIGTVSFDHPDPSIFTVLTSPTSVPGLANIDFVIFPPRWMVAENTFRPPWFHRNLMNEFMGLIQGAYDAKAGGFVPGGASLHSCMSAHGPDAESCDKAIAADLKPHRIDQTMAFMFETSQVLRPSRAALETPALQNDYDACWASLVSTFNPQRR

SEQ ID NO: 5097 - protein, 424 aa, Pseudomonas aeruginosa
MSEYIETDDASYFRVRRQAYVSAELHRRELHEIFDDSWLYAAHLSELREPGDFITRDVGGRNLIIQRRADGEPAVYLNACAHRGAKVCAERQGNSQRFTCPYHGWTYDSHGSLIGLPDKAAYQHAGQCHPELSLTQVKHAVYRNFLFIHYGARQASLETYLGQAKDYIDLICDQSEAELEIIPGGFEHSIKANWKLLAENGVDAYHLPFAHKRYLEYLNTLGTDPESHKRHGRGEALGNGHALIISGPPSTGRPIAYWSPLFPEALKPSIAAKFERLVERFGQARAEDIAHTNKSLFIFPNLVINDILGLNIRSFFPTAADEVSVTVWGAGFADETREERAARINGLISFIGPGGFGTPDDVEILESCQRAYAHAALGYSDFSRGMGPATRRHVDEEQNRGFWREWSRRLGQQPAALRRLAVAV

SEQ ID NO: 5098 - protein, 296 aa, Pseudomonas aeruginosa
MASLVTAVLFLVVCISWGTTWLGIKIAVESVPPLTAAGLRFLIAFPLFLLFARLRHETIFFPRRLLAFFVFVTLGYFSVPYYLLNYGEQYVASGLTALLFSSMPVFILIFSAIFLRERIYLSQILGIAIGFGSLFMIIRSQGLHLDYTELLGVLAILLAAIMHALSYVITKRQGADIGVITFNTLPIGIAGLGLFMAGLVMEHPNLSAVTSRSWAALIYLGLVASVGGFIVYFFLLKRLSPVVLSFVFIIFPVFAVIIGAWYEGVAISRELIGFTVLLLAGFAITKLPIEKLLGRR

SEQ ID NO: 5099 - protein, 590 aa, Pseudomonas aeruginosa
MSSTVADQLLERLSQWGVKRVFGYPGDGINGIMGAMGRRAEAFDYIRVRHEEMAAFMAGAHAKFTGEVGVCLATSGPGAIHLLNGLYDARMDHQPVLAIVGQQAATALGSDYQQEVDLQSLFKDVSAYVETVVSPAQLLHVLDRALRVAVGERQVATVIVPNDVQQMAAPKRQPHEHGHVMSAVGFVQPRPYARDADLEAAAAILNRGRRVAILAGAGALGAHRQLEAVAERLAAGVAKALLGKAAVSDDLPYVTGSIGLLGTRASSMLMEHCDTLLIVGSTFPYSEFLPKAGQARAVQIDLYPRNIGIRYPIDQALLGDAGETLERLLPLLEQKKHGAWRRRVERAVTASREEARRQAEEPADPINPQRVFRSLSEQLPDDAILCGDSGSHTNWYARDIRMRPGMLGSLSGKLATMGSGVPYAIAAKLAYPQRPVVAMVGDGAMQMNGNAELVTVQQYWQRWDSPTFIVLVLNNGDLNQVTWEQRALAGDPEFSPAQEVIDFPYARYADMLGFKGIRVDRPEDIDAAWAEAFAADRPVLLEVVTDPNVPPLPPHISFEQAKHLLGAMLQDDPKRWGVIRQSARQVLARH

SEQ ID NO: 5100 - protein, 183 aa, Pseudomonas aeruginosa
MTRTSNPCAVVLAFAAIAASGTAMAANTITFSGEVTDQTCQVAVNGFTDPTVILDSVPVSALDGAVGRSAGETAFTLQLTDCVAPTADEHFTTLFQATNPSAAGNLVNTAASGATGVALQLLDSVGGNPVDLAGGAAVPAGDIVLANGATSTSYDYAVQYVSEAATVTPGPVLGVVTYTLRYE

SEQ ID NO: 5101 - protein, 709 aa, Pseudomonas aeruginosa
MSEQNNEQRSQAAGTDTVDRGNSNAKLEQLEAYREDATGEALSTNTGTRIADNQNTLKAGERGPSLLEDFIMREKITHFDHERIPERVVHARGSAAHGYFEAYEDLSDLTKAGFLAEAGKRTPVFVRFSTVQGPRGSADTVRDVRGFAVKFYTDEGNFDLVGNNMPVFFIQDAIKFPDFVHAVKPEPHNEIPTGASAHDTFWDFVSLTPESAHMVMWLMSDRAIPIAYRNMQGFGVHTFRLVNAAGESVLVKFHWRPKSGTCSLVWDEAQKLAGKDPDFNRRTLWEDIEKGDYPEWELGLQVIPENQQDSFDFDLLDPTKLVPEELVPVRVVGRMVLNRNPDNFFAETEQVAFHVGHVVPGIDFTNDPLLQGRLFSYTDTQLLRLSGPNFNEIPINRPLCPFHNNQRDAPHRQTINRGRASYEPNSIDGGWPKETPPAARNGGFSTYHEPVSGSKLRKRADSFADHFSQAALFWHSMSEAEQAHIVAAYSFELSKVERQSIREREVNQILLNIDPQLAARVAANVGVQLAAPANPTPQPKPSPALSQMNLLSGDIRSRKVAILIADGVAESDVSDLRDALRQEGADAKLIAPSASPVQAENGAELSPEGTWDGLPSVAFDAVFVPGGAASSQAIGADGRGLHYLLEAYKHLKPVAFAGDAQALASQLSLPGDPGVVLGATATDVFPGLRQALMQHRIWQREAATKAIPA

SEQ ID NO: 5102 - protein, 194 aa, Pseudomonas aeruginosa
MKTSYDDTRQHLLDTGYRIMAVKGFSGVGLNEILQSAGVPKGSFYHYFKSKEQFGQALLEDYFRVYLADMDQRFSAPGLNARERLMSYWQKWLDNACPPCDEQRCLVVKLSAEVADLSESMRITLRDGSDGIIERLVGCLGQGRDDGSLAPCDARHMASALYQLWLGASLLSKLHRSPGPLETAMQTTRSLLEI

SEQ ID NO: 5103 - protein, 345 aa, Pseudomonas aeruginosa
MSQSTQVNRRIVLASRPHGAPTRDNFRIEQVPLPEPGAGQVLLRTVYLSLDPYMRGRMSDAPSYAPPVELGAVMVGGTVSRVEASNHPGFKVGDWVLSANGWQDYALSDGSGLARLGESPEHPSYALGLLGMPGFTAYMGLLDIGKPQAGETLVVAAATGPVGATVGQIGKLKGCRVVGVAGGAEKCRHAVQVLGFDACLDHHAADFAERLAEACPDGIDIYYENVGGKVFDAVFPLLNAKARIPVCGIVAHYNDTELPPGPDRLPALMGTILRKRIKVQGFIIFDDYGHRYDEFQRDMSKWFADGLIQYREERVDGLENAPEAFFGLLQGRNFGKLVVRVGADA

SEQ ID NO: 5104 - protein, 215 aa, Pseudomonas aeruginosa
MAEINIYQNPGQSLANIYKGFARQCNPGFVFPEAQTIEAWDIPLRLHPEFIPGGDISKADQQYSTLLAQEIANGVTIGFRMVNEKERVCNVEILPLLTSMAQNLDRIKARFGSGYLDRFKGSPNVYPTDVGFSTDASGGISQESGLLVSYGVNLRTLTPGTWQAMTLPEDIKALVGPGVGLRLDAPNFSDVFNTIKSGLRYTTAVTLLLAYFAAI

SEQ ID NO: 5105 - protein, 204 aa, Pseudomonas aeruginosa
MQHIIGMPLQLIIIGMPHSIIFAISMQQFLNISMSMPCIGIILQCMASPCMEHSIMHFIGAMPIIGMPIPMPIVGIIAMQAWDMPIIARLPHCIIMGMPQFIIIAIISALLRNWPMSIPIAGIILHSMPSSIVSHCMVAIIIGMPIMGIIGMAAFMFIGICMAFIMAVTPVGEAGVGANGADSRQRRRTGKMPVQQPSRALHGG

SEQ ID NO: 5106 - protein, 815 aa, Pseudomonas aeruginosa
MPAPHGLSPLSKAFLMRRAFQRRILPHSLAMALSLPLAGYVQAQEVEFDIPPQALGSALQEFGRQADIQVLYRPEEVRNKRSSAIKGKLEPNQAITELLRGTGASVDFQGNAITISVAEAADSSVDLGATMITSNQLGTITEDSGSYTPGTIATATRLVLTPRETPQSITVVTRQNMDDFGLNNIDDVMRHTPGITVSAYDTDRNNYYARGFSINNFQYDGIPSTARNVGYSAGNTLSDMAIYDRVEVLKGATGLLTGAGSLGATINLIRKKPTHEFKGHVELGAGSWDNYRSELDVSGPLTESGNVRGRAVAAYQDKHSFMDHYERKTSVYYGILEFDLNPDTMLTVGADYQDNDPKGSGWSGSFPLFDSQGNRNDVSRSFNNGAKWSSWEQYTRTVFANLEHNFANGWVGKVQLDHKINGYHAPLGAIMGDWPAPDNSAKIVAQKYTGETKSNSLDIYLTGPFQFLGREHELVVGTSASFSHWEGKSYWNLRNYDNTTDDFINWDGDIGKPDWGTPSQYIDDKTRQLGSYMTARFNVTDDLNLFLGGRVVDYRVTGLNPTIRESGRFIPYVGAVYDLNDTYSVYASYTDIFMPQDSWYRDSSNKLLEPDEGQNYEIGIKGEYLDGRLNTSLAYFEIHEENRAEEDALYNSKPTNPAITYAYKGIKAKTKGYEAEISGELAPGWQVQAGYTHKIIRDDSGKKVSTWEPQDQLSLYTSYKFKGALDKLTVGGGARWQGKSWQMVYNNPRSRWEKFSQEDYWLVDLMARYQITDKLSASVNVNNVFDKTYYTNIGFYTSASYGDPRNLMFSTRWDF

SEQ ID NO: 5107 - protein, 4342 aa, Pseudomonas aeruginosa
MMDAFELPTTLVQALRRRAVQEPERLALRFLAEDDGEGVVLSYRDLDLRARSIAAALQAHAQLGDRAVLLFPSGPDYVAAFFGCLYAGVIAVPAYPPESARRHHQERLLSIIADAEPRLVLTTADLREPLLQMNAQLSAANAPQLLCVDQLDPAVAEAWDEPQVRPEHIAFLQYTSGSTALPKGVQVSHGNLVANEVLIRRGFGIGADDVIVSWLPLYHDMGLIGGLLQPIFSGVPCVLMSPRYFLERPVRWLEAISQYGGTVSGGPDFAYRLCSERVAESALQRLDLSGWRVAFSGSEPIRQDSLERFAEKFAASRFDASSFFACYGLAEATLFVTGGQRGQGIPALAVDGEALARNRIAEGEGSVLMCCGRSQPEHAVLIVDAASGEVLGDDNVGEIWAAGPSIAHGYWRNPEASAKAFVERDGRTWLRTGDLGFLRDGELFVTGRLKDMLIVRGHNLYPQDIERTVESEVPSARKGRVAAFAVTVDGEEGIGIAAEIGRGVQKSVPAQELIDSIRQAVAEAYQEAPKVVALLNPGALPKTSSGKLQRSACRLRLEDGSLDSYALFPGLQAVQEAQPPAGDDELLARIGEIWKARLGVAQVAPRDHFFLLGGNSIGAAQVVAQVRDSLGVALDLRQLFEAPTLQAFSATVARQLAAGLPAEAPMAHLPRGVDLPQSAAQQRLWLTWQIDPQSAAYNIPGGLRLRGELDEAALRASFQRLVERHEALRTRFLERDGAALQRIDERGEFAWQFVDLAALAEHERAAAAAQRREAEAQQPFDLEKGPLLRVSLVRLDEQEHQLWVTLHHIVADGWSLNLLLDEFSRLYAEACGGQPADLAPLELHYAEFAAWQRQWLDAGEGARQLAYWRERLGDTAPVLELATDHPRTARQASPAARYSLRVDEALARAIREAALDHEASVFMWLLAAFQALLHRHSGQGEIRIGVPSANRQRLETQGLVGFFINTLVLRGTPRARQPFAALLGEAREATLGAQANQDLPFDQVLAACGQGGQLFQVLFNHQQRDLSALRRLPGLLADELPWHSREAKFDLQLQSEEDARGRLTLNFDYAADLFDEASIRRFAAQYLELLRQVAEDPQRCLGDIALVDAEQAAHLAEWGSAPCEPARAWLPELLERQLAQSAERVALEWDGGSLGYAELHARANRLAHYLRDKGVGPDVRVAICAERSPQLLVGLLAIVKAGGAYVPLDPDYPSERLAYMLADSGVELLLTQAHLFERLPGAEGVTPICLDSLKLDNWPSQAPGLHLHGDNLAYVIYTSGSTGQPKGVGNTHAALAERLQWMQATYTLDGDDVLMQKAPVSFDVSVWECFWPLVTGCRLVLAAPGEHRDPARLVELVRQFGVTTLHFVPPLLQLFIDEPGVAACGSLRRLFSGGEALPAELRNRVLQRLPAVALHNRYGPTETAINVTHWQCRAEDGERSPIGRPLGNVVCRVLDAEFNLLPAGVAGELCIGGLGLARGYLGRPALSAERFVADPFSAAGERLYRTGDRARWNADGVLEYLGRLDQQVKLRGFRIEPEEIQARLLAQPGVAQAVVVIREGVAGSQLVGYYTGAVGAEAEAEQNQRLRAALQAELPEYMVPTQLMRLAQMPLGPSGKLDTRALPEPVWQQREHVEPRTELQRRIAAIWSEVLGLPRVGLRDDFFELGGHSLLATRIVSRTRQACDVELPLRALFEASELEAFCEQVRAAQAAGRTDSHGAIRRIDREQPVPLSYSQQRMWFLWQLEPDSPAYNVGGLARLSGPLDVARFEAALQALVQRHETLRTTFPSVDGVPVQRVHGDGGLHMDWQDFSALDRDSRQQHLQTLADSEAHRPFDLESGPLLRVCMVKMAEREHYLVVTLHHIVTEGWAMDIFARELGALYEAFLDDRESPLEPLPVQYLDYSVWQREWLESGERQRQLDYWKAQLGNEHPLLELPGDRPRPPVQSHQGDLYRFDLSPELAERVRRFNAARGLTMFMTMTATLAALLYRYSGQQDLRIGAPVANRIRPESEGLIGAFLNTQVLRCRLDGQMSVGELLEQVRQTVIDGQSHQDLPFDHLVEALQPPRSAAYNPLFQVMCNVQRWEFQQTRQLAGMTVEYIANDARATKFDLNLEVTDLDQRLGCCLTYSRDLFDEPRIARMAGHWQNLLEALLGDPQRRIAELPLFAAEERKQLLLAGTAGEAGLQDTLHGLFAARVAASPQAPALTFAGQTLSYAELDARSNRLARVLRSHGVGPEVRVGLALERSLEMVVGLLAILKAGGAYVPLDPEYPLERLQYMIEDSGVRLLLSHAALFEALGELPAGVARWCLEEDGPALDAEDPAPLAALSGPQHQAYLIYTSGSTGKPKGVAVSHGEIAMHCAAVIECFGMRAEDCELHFYSINFDAASERLLAPLLCGARVVLRAQGQWGAEEICELIRAEGVSILGFTPSYGSQLAQWLESQGRQLPVRMCITGGEALTGEHLQRIRQAFAPASFFNAYGPTETVVMPLACLAPERLEEGAASVPIGSVVGARVAYILDADLALVPQGATGELYVGGAGLARGYHERPALSAERFVPDPFAAEGGRLYRTGDLVRLCDNGQVEYVGRIDHQVKIRGFRIELGEIEARLLEHPQVREALVLALDSPSGKQLAGYVASAVAEQDEDAQAALREALKTHLKQQLPDYMVPAHLLLLASLPLTANGKLDRRALPAPDPALNRQAYEAPRSVLEQQLAGVWREVLNVERVGLGDNFFELGGDSILSIQVVSRARQLGIHFSPRDLFQHQTVQSLAAVARHSQASQAEQGPVQGDSALTPIQHWFFDLPLARREHWNQALLLQPRQAIDLGLLRKSLQRLVEQHDALRLAFRQVDGEWLAQHRPLREQELLWHVPVQSFDECAELFAKAQRSLDLEQGPLLRAVLVDGPAGEQRLLLAIHHLVVDGVSWRVLLEDLQQVYRQFAEGAEPALPAKTSAFRDWAGRLQAYAGSESLREELGWWQARLGGQPVEWPCDRPQGDNREALAESVSLRLDPQRTRQLLQQAPAAYRTQVNDLLLTALARVLCRWSGQPSTLVQLEGHGREALFDDIDLTRSVGWFTSAYPLRLTPAQSPGESIKAIKEQLRAVPHKGLGYGVLRYLADPAVRQAMAALPTAPITFNYLGQFDQSFADALFQPLDQPTGPIHDEQAPLPNELSVDGQVYGGELVLRWTYSRERYDARTVNELAQAYLAELQALIEHCLEDGAGGLTPSDFPLAQLSQAQLDALAVPAGEIEDVYPLTPMQEGLLLHTLLEPGTGIYYMQDRYRIDSPLDPERFAAAWQAVVARHEALRASFVWNAGETMLQVIHKPGRTRIEFLDWSELPEDGHEERLQALHKREREAGFDLLEQPPFHLRLIRLGEARYWFMMSNHHILIDAWCRGLLMNDFFEIYSALGESRPANLPTPPRYRDYIAWLQRQDLEQSRRWWSESLRGFERPTLVPSDRPFLREHAGESGGMIVGDRYTRLDAADGARLRELAQRYQLTVNTFAQAAWALTLRRFSGERDVLFGVTVAGRPVGMPEMQRTVGLFINSIPLRVQMPAAGQRCTVREWLNRLFERNLELREHEHLPLVAIQESSELPKGQPLFDSLFVFENAPVEVSVLDRAQSLNASSDSGRTHTNFPLTVVCYPGDDLGLHLSYDQRYFEAPTVERLLGEFKRLLLALADGFHGELEALPLLGEDERDFLLDGCNRSARDYPLEQGYVRLFEAQVAAHPQRIAASCLEQRWSYAELNRRANRLGHALRAAGVGIDQPVALLAERGLDLLGMIVGSFKAGAGYLPLDPGHPTQRLTRIVELSRTLVLVCTQACREQALALFDELGCVDRPRLLVWDEIQQGEGAEHDPQVYSGPQNLAYVIYTSGSTGLPKGVMVEQAGMLNNQLSKVPYLELDENDVIAQTASQSFDISVWQFLAAPLFGARVAIVPNAVAHDPQGLLAHVGEQGITVLESVPSLIQGMLAEERQALDGLRWMLPTGEAMPPELARQWLKRYPRIGLVNAYGPAECSDDVAFFRVDLASTESTYLPIGSPTDNNRLYLLGAGADDAFELVPLGAVGELCVAGTGVGRGYVGDPLRTAQAFVPHPFGAPGERLYRTGDLARRRADGVLEYVGRIDHQVKIRGFRIELGEIEARLHERADVREAAVAVQEGANGKYLVGYLVPGETPRSSADSPAGLMVEQGAWFERIKQQLRADLPDYMVPLHWLVLDRMPLNANGKLDRKALPALDIGQMQNQAYQAPRNELEETLARIWAEVLKVERVGVFDNFFELGGHSLLATQIASRVQKALQRNVPLRAMFECTTVEELASYIESLAPSEISEQKAERLNDLMSKLEML

SEQ ID NO: 5108 - protein, 159 aa, Pseudomonas aeruginosa
MITIFFETGEELDLPLDNFAKSNLSGLELHRAIFDGLDLSEADFTASNLRNASFNHALLGGAVMNSAALMNASFVDAIMKGVKLVDAMAAYADFSGADLSMASLKNADIGGSNFINSNLRDVNIDVARIDGAVFRGAIYNDRTIWPKGFIPENFGAIKG

SEQ ID NO: 5109 - protein, 353 aa, Pseudomonas aeruginosa
MHNDNSTEKRADFYRRIRQQHLTPLWEALHSLVPAQPAGGCQAALWRYRELRPFLLEAGDLISAEEAVRRVLVLENPDLPGQSSITPSLYAGLQLILPGEIAPSHRHTQSALRFVVEGYGAYTSVDGERTRMEPGDFIITPSWTWHDHGNRAAAEGGEPVVWLDGLDIPMLRFFGATFAENHDEPVQPLRRGEGDSLARYGSNMLPLRHQPTTPTSPLFSYPYARSREALERLARLERPDPWEGHKLRYVNPATGGWAMPTIATCLQLLPAGFLGQPARSTDASVYSVVEGSGVAQIGGRRFAFEAKDLFVVPSWAELRLEAGATDCVLFSFSDRPVQQALGILRESRETLAH

SEQ ID NO: 5110 - protein, 254 aa, Pseudomonas aeruginosa
MLPDPLPVPLFALRIDRAASRTASHRHACGQLYCLERGLLVVEDEHGRQALPPRQIAWIPPGHPHSAHSHGSLAGWSAYLAAEHCRDLPRHPGVLACSAFVALIVERATRWPTGSAWSTERENLLRVLLDELRHAVPQRTRLPYPGDSRLRRIAEALLANPGDPRPAAEWARWAGLSSRSLSRLFGAETGMSFAQWRQLARLHAAVERLAAGQAVGEVAWSLGYESPSSFASAFRTVFGETPSGYSSRANEALA

SEQ ID NO: 5111 - protein, 1062 aa, Pseudomonas aeruginosa
MNFSQFFIQRPIFAAVLSLLILIGGAISLFQLPISEYPEVVPPTVVVRANFPGANPKVIGETVASPLEQAITGVENMLYMSSQSTSDGKLTLTITFALGTDLDNAQVQVQNRVTRTEPKLPEEVTRLGITVDKASPDLTMVVHLTSPDNRYDMLYLSNYAVLNVKDELARLDGVGDVQLFGLGDYSLRVWLDPNKVASRNLTATDVVNAIREQNRQVAAGTLGAPPAPSDTSFQLSINTQGRLVTEEEFENIIIRAGANGEITRLRDIARVELGSNQYALRSLLNNKPAVAIPIFQRPGSNAIEISNLVREKMAELKHSFPQGMDYSIVYDPTIFVRGSIEAVVHTLFEALVLVVLVVILFLQTWRASIIPLAAVPVSLIGTFAVMHMLGFSLNALSLFGLVLAIGIVVDDAIVVVENVERNIGLGLKPVEATKRAMREVTGPIIATALVLCAVFIPTAFISGLTGQFYRQFALTIAISTVISAFNSLTLSPALAAVLLKGHHEPKDRFSVFLDKLLGSWLFRPFNRFFDRASHGYVGTVNRVLRGSSIALLVYGGLMVLTYFGFSSTPTGFVPQQDKQYLVAFAQLPDAASLDRTEAVIKQMSEIALAQPGVADSVAFPGLSINGFTNSPNSGIVFTPLKPFDERKDPSQSAGAIAAALNAKYADIQDAYIAIFPPPPVQGLGTIGGFRLQIEDRGNQGYEELFKQTQNIITKARALPELEPSSVFSSYQVNVPQIDADIDREKAKTHGVAISDIFDTLQVYLGSLYANDFNRFGRTYQVNVQAEQQFRLEPEQIGQLKVRNNLGEMVPLASFIKVSDTSGPDRVMHYNGFITAELNGAPAAGYSSGQAQAAIEKLLKEELPNGMTYEWTELTYQQILAGNTALFVFPLCVLLAFLVLAAQYESWSLPLAVILIVPMTLLSAITGVILAGSDNNIFTQIGLIVLVGLACKNAILIVEFAKDKQEEGMDRVAAVLEACRLRLRPILMTSIAFIMGVVPLVISTGAGAEMRHAMGVAVFSGMIGVTFFGLLLTPVFYVLIRRFVENREARRAANDKGLPEVHA

SEQ ID NO: 5112 - protein, 186 aa, Pseudomonas aeruginosa
MNIPNLLTLLRVLLIPIFILLFYLPTSWSYLTASAVFALAAATDWLDGYLARRLGQSTPFGAFLDPVADKLMVAVALVLLVEEHANLWLTLPAVIIIGREIVVSALREWMAELGARAQVAVSNLGKWKTAAQMLALVILLANPPLMTFWVILGYVLLIISAALTLWSMVHYLLAAWPHLSTTPKEK

SEQ ID NO: 5113 - protein, 319 aa, Pseudomonas aeruginosa
MSRPFLRRLAIVFAASVVLSGIGGAQAEEVLRIGFQKSSTLLTLIRSQGTFERELARQGIRVSWHEFPSGLPLLESLNVGNVDLSADVADTVPVFAQAAGARLTYFARETPSPAAQAILVGEHSPLKSLAELKGRRIAVTKAAGSHYLLIAALASAGLEFSDIQPAYLTPADGRAAFENGKVDAWVTWDPYVASAQRQQRARVLADGQGLASYQRYYLASSDYARKHPEVLQQVFAELQRTGRWLKSHPADAAKVLGPLWGNLDAATVEQANARRSYDVQPVSADGLDEQQRIADAFHAQGLLPKPVDARAVEVWQPRH

SEQ ID NO: 5114 - protein, 531 aa, Pseudomonas aeruginosa
MSAYQNEIKAVAALKEKNGSSWSAINPEYAARMRIQNRFKTGLDIAKYTAAIMRKDMAEYDADSSVYTQSLGCWHGFIGQQKLISIKKHLKTTNKRYLYLSGWMVAALRSDFGPLPDQSMHEKTAVSGLIEELYTFLRQADARELDLLFTGLDAARAAGDKAKEAELLAQIDNFETHVVPIIADIDAGFGNAEATYLLAKKMIEAGACCIQIENQVSDEKQCGHQDGKVTVPHIDFLAKINAVRYAFLELGVDDGVIVARTDSLGAGLTKQIAVTNEPGDLGDLYNSFLDCEEISESELGNGDVVIKREGKLLRPKRLASNLFQFRKGTGEDRCVLDCITSLQNGADLLWIETEKPHVGQIKAMVDRIREVIPNAKLVYNNSPSFNWTLNFRQQVFDAFVAEGKDVSAYDRNKLMSVEYDDTELAKVADEKIRTFQRDGSAHAGIFHHLITLPTYHTAALSTDNLAKGYFADEGMLAYVKGVQRQELRQGIACVKHQNMAGSDIGDNHKEYFAGEAALKASGKDNTMNQFH

SEQ ID NO: 5115 - protein, 448 aa, Pseudomonas aeruginosa
MTLTSIGPANRMARSAETHPLTWRLREDAQPVWLEEYQSKDGYAAARKALTQMAQDDIVQTVKDSGLKGRGGAGFPTGVKWGLMPKDESLNIRYLLCNADEMEPNTWKDRMLMEQLPHLLVEGMLISARALKAYRGYIFLRGEYVDAARNLNRAIDEAKAAGLLGKNILGSGFDFELFVHTGAGRYICGEETALINSLEGRRANPRSKPPFPAAVGVWGKPTCVNNVETLCNVPAIVGNGVDWYKTLARPGSEDMGTKLMGFSGKVKNPGLWELPFGVSARELFEDYAGGMRDGFQLKAWQPGGAGTGFLLPEHLDAQMFAGGIAKVGTRMGTGLAMAVDDSINMVSLLRNMEEFFARESCGWCTPCRDGLPWSVKLLRALERGEGQPGDLETLEQLVNFLGPGKTFCAHAPGAVEPLGSALKYFRAEFEAGISRQPSAAPRPATVGA

SEQ ID NO: 5116 - protein, 359 aa, Pseudomonas aeruginosa
MISDGARRHAASARSSGFVLVGVVWFLAIMTLLASAAVLWVGRSLDATENRRKVLLRELEEHALLARVQWLVATQRYTVAGLSVPGNAGAAPSKVDMDTSILPIGGELPLDGREFCMANGWCVALLDRSARLSLSGIDPRVLSRLLAGLGVPAEQVQVMVAQWFSYLYPGAAPRLGSAAQASDRSSPGQARRRPLRSVMEVFRLEAWRPWEAHLLDAGWRDLVAADEAALNINTADARILSLAWGLPEDAVGRLLQARWQRPFTRMSDLHDVLGGHARLVPEDGWARLASPVLSIRLYPPGAEQGTEYEVRFNSEHRLLPPWQLLSKRSVKINDRYSNPPLHPDIAPGVLAAPLVARPW

SEQ ID NO: 5117 - protein, 324 aa, Pseudomonas aeruginosa
MPSRITLNANGGPEVLRLEQVQAQQPGPGEVWLEQAAIGVNPLDLGQRSGAVPIPLPSGLGLEGAGVVAALGPGVSGLAPGDRVAYATGPLGAYASARLYPAERLLKLPDTLAFEDAAALLFKGITAHYLLYATYPVGPGTRILLYGAAGAVGQLMAAWARHLGAWVIGVVSKAESVERARAAGCDEVLVFDAASLAAQVAELTAGRKVDVVYDPIGRATFEASLNSLRPRGLLVSFGATSGVPPAVEVATLNAKGSLFLTRPSLAAHTANPEEYRLRAQAVLRAHADGVIQPRVWRRYPLAEAAVAHTDLLEGRSQGALVLLP

SEQ ID NO: 5118 - protein, 1317 aa, Pseudomonas aeruginosa
MSGLPVSHVGEKVSGGVISTGSPTVHVGSSAVGLADRVSACVPLVGKPVNPMLGSKLLPEEVDFALAAPDTFTFARGYLSSNPRIGRLGRGWWLPGESMHLELSEDACVLVDAQGRRIGFPALAPGAQHYSGSEELWLRRGGSSGGEAQAWRGRWAAVPAELQTQEGSVLVLSGHSYLHFQRCPDGIWRLQASFGRAGYRTEFRWSGRGLLTGVRDSAGRSYALVYQQACEPSEGDDGLRLFGVILASHDGPPPDYIDPQSPGLDWLVRYQFSDSGDLIAVRDRLGQVVRVFAWREHMLVAHGEPGGLEVRYEWDVHAPHGRVVKQIEAGGLTRTFRYLRDATEVSDSLGRVERYEFAGEGGQRRWTALVRADGSRSEFDYDLFGRLVAMRDPLGRETRRRRDGQGRMLEEESPGKARYRKRVDEETGLLVELEDAMQRRWTFERDERGNATTVRGPAGSTRYAYEDPRLPDRPTRIVDPRGGERRLEWNRFGLLAALTDCSGQVWRYDYDNEGRLVASSDPLGQLTRRRYDPLGQLIGLELADGSALSYEYDALGRQTRIADAEGHATLFSWGHGDLLARVSDAGGGELSYLHDEAGRLVALTNENGVQAQFRYDLLDRLVEETGFDGRRQRYRYNAADELIAREDADGRETTYAYDRDGRLASIRVPATEHAPALVERYRWLADGRLASAGGADCEVRYTYDEVGNLRLESQVHADGWVYSVEHSHDALGVRQTSRYGDAPPVAWLTYGPGHLHGALVGAVELAFERDALHREVRRDARRDGQDDALFTQERQHAPLGRLQRSRLRLAGGFDWQRGYRYDGLGQLVGIDDNQYPSVRYEYDLGGRLLASRRAGAAASTYRYDAAGNRLEGVGEHAREDARQAFAENELYRSGFSRSETRASQAGEGPARWAGNRVERIAGNRYRFDALGNLVERIGADGERLRLAYDGAQRLVHLTRDYADGTRLEARYRYDALSRRIAKVVLRDGVEQQVRFGWDGDRQCAEAFARELRTTVHEPGGFVPLLRLEQACEPDPPELLQLRQAFAAEGQPLPAQCVPALGEARIAFFHTDHLGTPLQLSDERGQLRWQGVPDDWRAVAPERQPGAQPIRFQGQYHDEESGLYYNRYRYYLPEAGRYASQDPLGLGGGPNPYAYALNAPTLAYDPTGLIIPLVVIGAFAARAAIGAALGAGIELGMQTGKQVLGQMKDNWDSDRDLTDIKWKCIDINWKHVGASAAIGTVAPGMLSTGKTVVQSAKAIRTLSGQAANTANRAAKLAARKAAHADTIKKAVATQAAWQTGKQIVKCPLKDEEEECPPQ

SEQ ID NO: 5119 - protein, 212 aa, Pseudomonas aeruginosa
MELSLSRVHFPVTTLGPGRRLGIWFQGCSIRCPGCISADTWGPGRRRIALARLLADIQPWLEQAEGITVSGGEPFEQFAALLALLGELRRRSRADILVYSGYPLEHLHAQLEQAAGLIDALISDPYQQHAEQSLALRGSDNQRLSLLTELGRARLGGYQRPLREDDKALDLMFDHDGSVWMAGIPRRDDLLRLQDLLREQGHQLSVSAHRPR

SEQ ID NO: 5120 - protein, 64 aa, Pseudomonas aeruginosa
MPKMKTKSGAAKRFKKTAGGLKHKHAFKSHILTKMTTKRKRQLRGTSMLNKSDVARVERSLRLR

SEQ ID NO: 5121 - protein, 233 aa, Pseudomonas aeruginosa
MAQSETVERILDAAEQLFAEKGFAETSLRLITSKAGVNLAAVNYHFGSKKALIQAVFSRFLGPFCASLEKELDRRQAKPEAQHATLEDLLHLLVSQAMAVKPRSGNDLSIFMRLLGLAFSQSQGHLRKYLEEVYGKVFRRYMLLVNEAAPKLPPIELFWRVHFMLGAAAFSMSGIKALRAMAETDFGVNTSTEQVMHLMVPFFAAGMRAESGIDDPLLAGAQLRPRNKTPAKA

SEQ ID NO: 5122 - protein, 868 aa, Pseudomonas aeruginosa
MGKSLVIVESPAKAKTINKYLGSQYVVKSSIGHIRDLPTSGSSSSKEPAAKGRKSASEAPALSPKEKARRQLVSRMGVDPEHGWKAKYEILPGKEKVIDELRRLAKDADTVYLATDLDREGEAIAWHLREAIGGDESRYKRVVFNEITKKAIQEAFSQPGELDINRVNAQQARRFLDRVVGYMVSPLLWQKIARGLSAGRVQSVAVKLVVEREREIRAFVPEEYWEVHADLGTAKGANVRFEVTREKGEAFKPLNEAQAMAALEKLKASAYSVAKREDRPTSSRPSAPFITSTLQQAASNRLGFGVKKTMMMAQRLYEAGYITYMRTDSTNLSADAIGMVRGFIEDEFGQKYLPGKANVYSSKEGAQEAHEAIRPSDVNLKPTQLSGMERDAERLYDLIWRQFVACQMTPAEYLSTSVSVTAGDFELRAKGRILKFDGYTRVLPQQSKPGEDDVLPEMKEGENLKLIKLDPSQHFTKPPARYSEASLVKELEKRGIGRPSTYAAIISTIQERGYVTTHNRRFYAEKMGDIVTDRLNESFANLMDYGFTAGMEEHLDDVAQGERDWKHLLDEFYGDFKKKLEVAEVSEKGMRANQPTLTNIPCRECGRPMMIRTASTGVFLGCSGYSLPPKERCKATVNLIPGDEIAADDEGESESRVLRGKHRCPICSTAMDAYLLDEKHKLHICGNNPDCPGYEIEEGQYRIKGYEGPSLECDKCGSEMQLKTGRFGKFFGCTNPTCKNTRKLLKNGEAAPPKMDAIRMPELKCEKVDDIYVLRDGASGMFLAASQFPKNRETRAPLVSEIIPHKAELDPKYHYLCDAPQKDPDGRPAVIRFSRKTKEQYVQSEVDGKPTGWRAFYDGGKWKVEDKR

SEQ ID NO: 5123 - protein, 391 aa, Pseudomonas aeruginosa
MSLNPRDVVIVDFGRTPMGRSKGGMHRNTRAETMSAHLISKLLERNPKVDPAEVEDVIWGCVNQTLEQGWNIARMASLMTQIPHTSAAQTVSRLCGSSMSALHTAAQAIQTGNGDVFVIGGVEHMGHVGMMHGVDPNPHLSLYAAKASGMMGLTAEMLGKMHGISREAQDKFGARSHQLAWKATQEGKFKDEIIPMEGYDENGFLKVFDFDETIRPETTVETLAELKPAFNPKGGTVTAGTSSQITDGASCMIVMSAQRAQDLGIQPMAVIRSMAVAGVDPAIMGYGPVPSTNKALKRAGLTIADIDFVELNEAFAAQALPVLKDLKLLDKMDEKVNLHGGAIALGHPFGCSGARISGTLLNVMKQNGGTLGVSTMCVGLGQGITTVFERI

SEQ ID NO: 5124 - protein, 126 aa, Pseudomonas aeruginosa
MSEGKDPADGRPSLRRFGAAFLGLLHGHVELFGIELQEQKANTLRLLLFAGLALVFALLLLVGLSLLVLIVFWDTNRLAAALGLCLFYVIGSLFCGWRLYQSINDESSPFSATLEELANDRERLLP

SEQ ID NO: 5125 - protein, 725 aa, Pseudomonas aeruginosa
MADVYELFLTCPKGLESLLLEEAQGLGLDEARAQVSAVRGQGSLEVAYRLCLWSRLANRVLLVLARFPVENAESMYMAVHAVNWEDHLDAGGTLAVEFSGKGSGIDNTHFGALKVKDAIVDNLRERSGRRPSVDKVNPDVRVHLHLDRGQATLSLDLSGHSLHQRGYRLQQGAAPLKENLAAAVLIRAGWPKIAAEGGALADPMCGVGTFLVEAALMAADIAPNLKRERWGFSSWLGHVPALWRKLHEEAQQRAAAGLARPPLWIRGYEADPRLIQPACNNIERAGVADWVKIYQGELATFEPRPDKGQTGLVICNPPYGERLGDEASLLYLYQNLGERLRQSCIGWSAGVFTGAPELGKRMGIRSHKQYAFWNGALACKLLMIQVEPRQFVTGERGERNDEGLARAPSEPARLSEGGQMFANRLQKNLRQLGKWARRDKIECYRLYDADMPEYALAVDIYGDWVHVQEYAAPKSIDPAKAQARLFDALAAIPQTLGVAQERVVVKRRERQAGKKQYERQSSEGKFLEVGEGDVRLLVNLTDYLDTGLFLDHRPMRLRIQKEAAGKRFLNLFCYTATATVHAARGGARSTTSVDLSKTYLDWARRNLSLNGFSDKQRLVHGDVMEWLREDDGQYELIFIDPPTFSNSKRMEGVFDVQRDHVELLDLAMARLAPGGVLYFSNNFRKFELDESVQARYAVEEITGETLDPDFARNPKIHRAWRITVR

SEQ ID NO: 5126 - protein, 1620 aa, Pseudomonas aeruginosa
MAFFTAASKADFQHQLQTALAQHLGDKALPQVTLFAEQFFSLISLDELTQRRLSDLVGCTLSAWRLLERFDRDQPEVRVYNPDYEKHGWQSTHTAVEVLHPDLPFLVDSVRMELNRRGYSIHTLQTNVLSVRRSAKGELKEILPKGSQGKDVSQESLMYLEIDRCAHAGELRALEKAILEVLGEVRVTVADFEPMKAKARELLTWLGKAKLKVPAEELKEVRSYLEWLLDNHFTFLGYEEFSVADEADGGRMVYDEKSFLGLTRLLRAGLSKDDLHIEDYAVAYLREPVLLSFAKAAHPSRVHRPAYPDYVSIRELDGKGRVIRECRFMGLFTSSVYNESVNDIPFIRGKVAEVMRRSGFDTKAHLGKELAQVLEVLPRDDLFQTPVDELFSTALAIVRIQERNKIRVFLRKDPYGRFCYCLAYVPRDVYSTETRLKIQQVLMERLQASDCEFWTFFSESVLARVQFILRVDPKSRIDIDPARLEEEVIQACRSWQDDYSSLVVENLGEAKGTNVLADFPKGFPAGYRERFAPHFAVVDLQHLLSLSEQRPLVMSFYQPLAQGEQQLHCKLYHADTPLALSDVLPILENLGLRVLGEFPYRLRHQNGREYWIHDFAFTYAEGLDVDIQQLNEILQDAFVHIVSGDAENDAFNRLVLTANLPWRDVALLRAYARYLKQIRLGFDLGYIASALNAHTDIARELVRLFKTRFYLARKLTAEDLEDKQQKLEQAILGALDEVQVLNEDRILRRYLDLIKATLRTNFYQPDGNGQNKSYFSFKFNPKAIPELPRPVPKYEIFVYSPRVEGVHLRGGKVARGGLRWSDREEDFRTEVLGLVKAQQVKNAVIVPVGAKGGFVPRRLPLGGSRDEIQAEAIACYRIFISGLLDITDNLKEGEVVPPANVVRHDEDDPYLVVAADKGTATFSDIANGIAAEYGFWLGDAFASGGSAGYDHKGMGITAKGAWVSVQRHFRERGIDVQKDNISVIGIGDMAGDVFGNGLLMSDKLQLVAAFNHMHIFIDPNPDAASSFVERQRLFNLPRSSWADYDAKLISAGGGIFLRSAKSIAITPEMKARFDIQADRLAPTELIHALLKAPVDLLWNGGIGTYVKSSKETHADVGDKANDGLRVDGRELRAKVVGEGGNLGMTQLARVEFGLHGGANNTDFIDNAGGVDCSDHEVNIKILLNEVVQAGDMTEKQRNALLVKMTDAVGALVLGNNYKQTQALSLAQRRARERIAEYKRLMGDLEARGKLDRALEFLPSDEELAERISAGQGLTRAELSVLISYSKIDLKESLLKSLVPDDDYLTRDMETAFPALLAEKFGDAMRRHRLKREIVSTQIANDLVNHMGITFVQRLKESTGMSAANVAGAYVIVRDVFHLPHWFRQIENLDYQVPADIQLTLMDELMRLGRRATRWFLRSRRNELDAARDVAHFGPRIAALGLKLNELLEGPTRELWQARYQTYVDAGVPELLARMVAGTSHLYTLLPIIEASDVTGQDTAEVAKAYFAVGSALDLTWYLQQITNLPVENNWQALAREAFRDDLDWQQRAITVSVLQMQDGPKEVEARVGLWLEQHLPLVERWRAMLVELRAASGTDYAMYAVANRELMDLAQSSQHGVCIP

SEQ ID NO: 5127 - protein, 474 aa, Pseudomonas aeruginosa
MAGKTLYDKLWDMHLVKQRDDGSALIYIDRHILHEVTSPQAFEGLRLAGRKPWRIDANIATPDHNVPTTRTERKGGIAAIADEVSRLQVQTLDENCDDFGITEFKMNDVRQGIVHVVGPEQGATLPGMTVVCGDSHTSTHGAFGALAHGIGTSEVEHVLATQCLVAKKMKNMLVKVEGRLPAGVTAKDIVLAVIGRIGTAGGNGHAIEFAGSAIRDLSIEGRMTICNMSIEAGARVGLVAVDQKTIDYVKGRPFAPSAEQWDQAVACWQGLVSDADARFDTVVELDAAQIKPQVSWGTSPEMVLAVDQNVPDPARESDPIKRGSIERALKYMGLRPNQAITDIQLDRVFIGSCTNSRIEDLRAAAEVARGRKVAATIKQALVVPGSGLVKEQAEKEGLDRIFIEAGFEWREPGCSMCLAMNPDRLESGEHCASTSNRNFEGRQGAGGRTHLVSPAMAAAAAVNGRFIDVRELLA

SEQ ID NO: 5128 - protein, 411 aa, Pseudomonas aeruginosa
MSAAFINRVARVLVGTLGAQLITIGVTLLLVRLYSPAEMGAFSVWLSFATIFAVVVTGRYELAIFSTREEGELQAIVKLILQLTLLIFVAVAIAVVIGRHLIESMPVVIGEYWFALAVASLGLGINKLVLSLLTFQQSFNRLGVARVSLAACIAVAQVSAAYLLEGVSGLIYGQLFGVVVATALAALWVGKSLILNCIETPWRMVRQVAVQYINFPKFSLPADLVNTVASQVPVILLAAKFGGDSAGWFALTLKIMGAPISLLAASVLDVFKEQAARDYREFGNCRGIFLKTFRLLAVLALPPFIIFWFIGEWAFGLVFGEAWAESGRYAVLMVPLFYMRFVVSPLSYTIYIAQRQSMDLLWQLALLLLTFICFTLPDSVDSVLWFYSIAYAVMYFVYFWMSFQCAKGDAK

SEQ ID NO: 5129 - protein, 438 aa, Pseudomonas aeruginosa
MYILARVDRSILLNTVLLFAFFSATVWVNNNYIYHLYDYMGSAKKTVDFGLYPYLMVLALICALLCGGAIRRPGDLLVTLLVVILVPHSLVLNGANQYSPDAQPWAGVPLAIAFGILIIGIVNKIRFHPLGALQRENQGRRMLVLLSVLNIVVLVFIFFKSAGYFSFDFAGQYARRALAREVFAAGSANGYLSSIGTQAFFPVLFAWGVYRRQWFYLVLGIVNALVLWGAFGQKYPFVVLFLIYGLMVYFRRFGQVRVSWVVCALLMLLLLGALEHEVFGYSFLNDYFLRRAFIVPSTLLGAVDQFVSQFGSNYYRDTLLGALLGQGRTEPLSFRLGTEIFNNPDMNANVNFFAIAYMQLGYVGVMAESMLVGGSVVLMNFLFSRYGAFMAIPVALLFTTKILEQSLLTVMLGSGVFLMLLFLALISFPLKMSLGKTL

SEQ ID NO: 5130 - protein, 348 aa, Pseudomonas aeruginosa
MTDEIQKHGGVAGDIDLVELVRGLWEEKWIVLIFSLLGILFAAIYAFLSTPVYEARIAILPPSLSDVAGFNQGRTRETGLGPFKVQDVYSVFVRNLQADGTRHRFFNETYLPSLDEELRSVSRDALYKRFTDQISISLPGKDFPGRYLVAIEQEDPERAASWVRRYIADAAEISIQEMLNNAHREIEVKARDIEQRIQNLRENAKARREDRIVQLKEALKVAGALKLEEPPLISGQSSEELSAIMNGSLMYMRGSKAIMAEIQTLEARSSDDPFIPALRTLQEQQLLLSSLRVNSERVSVFRQDGPIETPDSPVRPRRAMILIFGLIIGGVLGGFLALCRIFLKKYAR

SEQ ID NO: 5131 - protein, 440 aa, Pseudomonas aeruginosa
MIRRHSCKGVGSSVAWSLLGLAISAQSLAGTVTTDGADIVIKTKGGLEVATTDKEFSFKLGGRLQADYGRFDGYYTNNGNTADAAYFRRAYLEFGGTAYRDWKYQINYDLSRNVGNDSAGYFDEASVTYTGFNPVNLKFGRFYTDFGLEKATSSKWVTALERNLTYDIADWVNDNVGTGIQASSVVGGMAFLSGSVFSENNNDTDGDSVKRYNLRGVFAPLHEPGNVVHLGLQYAYRDLEDSAVDTRIRPRMGMRGVSTNGGNDAGSNGNRGLFGGSSAVEGLWKDDSVWGLEGAWALGAFSAQAEYLRRTVKAERDREDLKASGYYAQLAYTLTGEPRLYKLDGAKFDTIKPENKEIGAWELFYRYDSIKVEDDNIVVDSATREVGDAKGKTHTLGVNWYANEAVKVSANYVKAKTDKISNANGDDSGDGLVMRLQYVF

SEQ ID NO: 5132 - protein, 438 aa, Pseudomonas aeruginosa
MIRKHSLGFVASALALAVSAQAFAGTVTTDGADIVIKTKGGLEVATTDKEFSFKLGGRLQADYSRFDGFYTKNGNTADAAYFRRAFIELGGTAYKDWKYQINFDLSHNTGSSDNGYFDEASVTYTGFNPVNLKFGRFDPDFGLEKATSSKWVTAPERNAAYELADWINTHQDGMGAQVNSTLADMAYLSAGVSAKDADDSDGDSVKQFNFRGVFAPMHEAGNVLHVGVNYAYRDLDDTAFDSRIRPRLGMRGIATSGGNDAGDNGNRATFGGVSNSPAGSYKDDSVWGLEGAWAMGPFSAQAEYLARKLKADDNAYKDIKAKGYYAQLAYTLTGESRQYKLEGAKFDSVKPENKEIGAWEVFYRYDNIKVEDDNVVADTATREVGDTKAKAHNLGVNWYVNDAVKISAAYVKAKTDKITNNNGDDDGDGFVTRLQYVF

SEQ ID NO: 5133 - protein, 387 aa, Pseudomonas aeruginosa
MSSERVLSNARVVSAERVFVGSVLLRDGLIAAVDEGRSHLAGAEDLGGDYLLPGLVELHTDNLEKHMTPRPGVDWPSASAVLAHDAQIVSAGITTVFDALSIGDVNPKGKRMQQLPKMLEAIGEAAASGDARADHRLHLRCEVSHPQTLEVFRELVEHPLVQLVSVMDHAPGQRQFARLEKYREYYQGKYHLSDAEMDAFIVEQVANSERYSDAARAAIVDVCQGRGLSVASHDDATLAHVRESAGYGMAIAEFPTTVEAARASHEHGLQVLMGAPNVVRGGSHSGNVAAAQLAGIGVLDILSSDYYPASLLHAALLLAGEHSEYDAIRYDLPRAVAMVSRTPALAAGLTDRGEIRVGLRADLLQARALGNNQPVVRQVWRGGQRVF

SEQ ID NO: 5134 - protein, 295 aa, Pseudomonas aeruginosa
MRRESLLVSVCKGLRVHVERVGQDPGRSTVMLVNGAMATTASFARTCKCLAEHFNVVLFDLPFAGQSRQHNPQRGLITKDDEVEILLALIERFEVNHLVSASWGGISTLLALSRNPRGIRSSVVMAFAPGLNQAMLDYVGRAQALIELDDKSAIGHLLNETVGKYLPQRLKASNHQHMASLATGEYEQARFHIDQVLALNDRGYLACLERIQSHVHFINGSWDEYTTAEDARQFRDYLPHCSFSRVEGTGHFLDLESKLAAVRVHRALLEHLLKQPEPQRAERAAGFHEMAIGYA

SEQ ID NO: 5135 - protein, 408 aa, Pseudomonas aeruginosa
MTATSDLIESLISYSWDDWQVTRQEARRVIAAIRNDNVPDATIAALDKSGSLIKLFQRVGPPELARSLIASIAGRTTMQRYQARNALIRSLINNPLGTQTDNWIYFPTITFFDICADLADAAGRLGFAAAGATGVASQAIQGPFSGVGATGVNPTDLPSIAFGDQLKLLNKDPATVTKYSNPLGDLGAYLSQLSPQDKLNQAQTLVGQPISTLFPDAYPGNPPSRAKVMSAAARKYDLTPQLIGAIILAEQRDQTRDEDAKDYQAAVSIKSANTSIGLGQVVVSTAIKYELFTDLLGQPVRRGLSRKAVATLLASDEFNIFATARYIRYVANLASQQDLRKLPKTRGAFPSIDLRAYAGNPRNWPRDNVRALASEYTSRPWDDNLSPGWPMFVDDAYATFLDPGMRFP

SEQ ID NO: 5136 - protein, 1053 aa, Pseudomonas aeruginosa
MTFPRFFIDRPIFAIVLSVLMMIGGIVSFFQLPLSEYPAVTPPTVQVTTAYPGANPDVIAQTVATPLEQAITGVEGMLYMSSQSATDGRMILTITFDQHIDPDMAQIQVQNRVSRVLSRLPDEVQRQGVVTQKTSPDILMVVHLLSPEQRYDPLYISNYAYLQVRDELLRLPGISDVVVWGAGEYSMRLWLDPDLIAARGLTAGEVIAAVREQNVQVAAGAVGQAPDSTAAFQVTVNTLGRLSDEEQFGDIIVRTGADGQVTRLRDVARIEMGGDAYALRSLLDGEPAVALQIIQSPGANALDTAEAVRATVARLEGNFPAGLSARIAYDPTVFVRASLQTVATTLLEAILLVVVVVVLFLRSWRASLIPLMAVPVSLVGTFAVMHLMGFSLNTLSLFGLVLSIGIVVDDAIVVVENVERHIENGEPPLQAARRAMDEVTGPIMAITSVLAAVFIPTAFLSGLQGEFYRQFALTIAISTILSALNSLTLSPALAGLLLRPRPAGGAVAGRFQRLLQVLGRPLRNAPEAYGNAVRKVVRVSGLALVVYGGLLGLTWVGFQAVPPGFVPMQDKYYLVGIAQLPNGASLERTDAVVRQMSRIGLDEPGVESVVAFPGLSVNGFVNVPNAAVMFFMLDPFESRTSADLGALAIAGRLQARFASIPDGFLGVFPPPPVPGLGTIGGFKMQVEDRGGAGLEALARQTQVLMMKATESGQLGGLMTSFDINAPQLEVVVDRTKVKSQGVRLADVFEALQVYLGSLYINDFNRFGRTYKVTAQADAPHRMQAEAIGRLQVRNAAGAMLPLSSFVTVTPSSGPDRVIHYNGYPSADISGGALPGVSSGQAVALMERLAGEVLPEGMTFEWTDLTYQQKLAGNSALFIFPLCVLLAYLILAAQYNSWLLPLAVLLIVPMCLLSAIAGVWLVGGDNNVFVQIGLVVLVGLAAKNAILIVEFARTLEAEGARALEAVVEACRLRLRPILMTSLAFIAGVVPLVMASGAGAEMRQAMGVAVFAGMLGVTLFGLFLTPVFYVLVRALAARLERRAGGSLAHLEGGRP

SEQ ID NO: 5137 - protein, 378 aa, Pseudomonas aeruginosa
MADGLRVALVAGEASGDILGSGLMQALRARHPDIEFIGVGGPRMEAEGLSSYFPMERLSVMGLVEVLGRLPELLRRRKRLIRTLIEARPDVMIGIDAPDFTLGVEHKLRQAGLRTVHYVSPSVWAWRQKRVLKIREACDLMLALFPFEARFYEEHGVPVRFVGHPLANTIPLQADRAAARARLGLPADGQVLALMPGSRGGEVGKLGALFLDTAQRLLVERPGLRFVLPCASAARREQIEQMLQGREPLPLTLLDGASHEALAACDAVLIASGTATLEALLYKRPMVVAYRVAGLTYRILKRLVKSPYISLPNLLAGRLLVPELIQDAATPQALAATLSPLLDDGSQQVEFFDAIHRALRQDASAQAAEAVLQLVERR

SEQ ID NO: 5138 - protein, 335 aa, Pseudomonas aeruginosa
MRIGIVNDMPLAVEALRRALAFEPQHQIVWVASNGAEAVTQCAADTPDVVLMDLLMPVMDGVEATRRIMAESPCAIVIVTVDIEQNVHRVFEAMGYGALDAVNTPALGIGNPQTAAAPLLRKIQNVGWLIGQRDNRGKVQVVPPKAGGARQRLVAIGASAGGPASLAVLLKQLPASFNAAVVLVQHVDEVFAAGMAEWLASESKLPVRLARDGEPPIPGQILLAGTNNHIRLLRNGSLVYTAEPRSFVYRPSIDVFFESVANYWRGDAVGVLLTGMGRDGAQGLKQMRERGFLTIAQDQASCAVYGMPKAAAAIDAAVQILSLEKIAPRLAEVFD

SEQ ID NO: 5139 - protein, 539 aa, Pseudomonas aeruginosa
MTEYATTPSYTVPATTPQEERKVIFASSLGTVFEWYDFFLYGALAAVISKQFFAGVNDTTAFIFALMAFAAGFLVRPFGALVFGRLGDMIGRKYTFLVTILLMGLSTFAVGLLPTYASIGVAAPIILVTLRMLQGLALGGEYGGAAIYVAEHAPANKRGSYTSWIQSTATLGLLLSLLVILACRQLTGDEFETWGWRLPFLLSIVLLGISTWIRLSMRESPAFLKMKAEGKVSKAPLRESFTQWGNLKVVLTALFSINAGQAVTFYTAQFYVLFFLTQVLKVDGGTANGLLIVALVLGAPFFIVAGWLSDRIGRKPVLLAGLLLATLFYFPLFKGLTHYANPAIDQASRQSPISVVADPATCTFQFDPVGKATFDSPCDKVKTFLVKAGLPYSTVAAPAGSDVRVRIGETEIAGFDAEAMAAAVKTAGYPQQADGSQVNKPMVIAIIFALVLISTLCYGPLAALMVELFPTRIRYSSLSLPYHIGNGWFGGFLPTVSFALVVYTGDIFYGLWYPVLITGGSLVCALLFLRETRHTDIHR

SEQ ID NO: 5140 - protein, 568 aa, Pseudomonas aeruginosa
MQRLSRIGRNTLAVSVSTLLLSACNQGDDAPKPAAVAPQPAAPSMAALSIPLCLNGQCAVIDQDAKLLVPFDNDYDNIVASAYQGTLMAAREERWNLIQAKDGKVLRDDIGEALSLLTPNLYGFVRDGKYGVVDGQGKEVQAPRFDDIYPNSANEFIIYEIDGKRGILDAKGKQLTEALYDTTLVNGSVAEHGGLISAERGEEKWIINLATGEQKAVAYESLGDLHDGVMSASVIGKGSQLVDAKGDVVGDGKSYDYLGTPANGLVAFREKYDSPCGYLDYQGKVAIAAQFAGCGAFGKQGGLAQQRMEDGSSGKYGLIDRSGAWKVQPQYDSADSAGLTALGYTVDVPGLAAVGVSTGLFSADFGIFNLDEGSEWVKPGYAQIGALGNDLFVVAKKGGPQKTVSFMGSESQVPVVGLMDRSGKMLLEPDELISIQSAYDGRFLEGLDGMDNAAHTVLLDRQGRTLVPALWQKLEVNPQQGYILGYEVSGTGDEATETLRALYDLNGKPRFTVATTDCGAEQLLDGNGKAIWPQDPTPYCQSDDEQDDEGEPEQEPAPVEESEETSES

SEQ ID NO: 5141 - protein, 452 aa, Pseudomonas aeruginosa
MQKEGVLRVITRNSPATYFQDRNGETGFEYELAKRFAERLGVELKIETADNLDDLYAQLSREGGPALAAAGLTPGREDDASVRYSHTYLDVTPQIIYRNGQQRPTRPEDLVGKRIMVLKGSSHAEQLAELKKQYPELKYEESDAVEVVDLLRMVDVGDIDLTLVDSNELAMNQVYFPNVRVAFDFGEARGLAWALPGGDDDSLMNEVNAFLDQAKKEGLLQRLKDRYYGHVDVLGYVGAYTFAQHLQQRLPRYESHFKQSGKQLDTDWRLLAAIGYQESLWQPGATSKTGVRGLMMLTNRTAQAMGVSNRLDPKQSIQGGSKYFVQIRSELPESIKEPDRSWFALAAYNIGGAHLEDARKMAEKEGLNPNKWLDVKKMLPRLAQKQWYAKTRYGYARGGETVHFVQNVRRYYDILTWVTQPQMEGSQIAESGLHLPGVNKTRPEEDSGDEKL

SEQ ID NO: 5142 - protein, 298 aa, Pseudomonas aeruginosa
MSDLPPLTALRSFEAVARLGSISQAASELHVTHSAISQQIKLLENLLGLALFVREGRGLRLSENGRFYALQVRASLGEIADATRVVRARPREGELVVTVMPSFGLNWLLPRLPRFRKRHPHCRVRLVASLDVQNLRQGLADLGVRIGKGDWEGVGRERLFDDELLMVAAPDFNGGRLPRTPSEIVACPTLRSTESWALWCQRAGVAEPQHGLLINDSNLLLEAVRLGQGIALERRSLVAGALAEGRLVQLGDIRVPYPYPYWLVWPQREPPSDRHQAFADWLREEARRYQAEQPPLSE

SEQ ID NO: 5143 - protein, 764 aa, Pseudomonas aeruginosa
MTNNSAPPLVVTRGNDNGYEPGSMVITHVQASGLDIIQYIPGRSSYGTPPFVPPGPSPYVGPGMQEYRRLRDTLDKSNSELKKNLKNKTLKEVDELKSEAGLPVKAVSANDIRDEKSIVDALMDAKAKSLKAIEDRPANLYTASDFPQKSEAMYQNQLLASRKFYGEFLDRHMSELAKAYSADIYKAQIAILKQTSQELESKARSMEAQAQQVTQQLGADFNAITTPTATKVQQRVKAVDASLSQVSTQVSGAVASATQAVQVKTAQAQQQANSQISSSQNLISAAFRNQIALAAQASGEAQVTAFNTQVKQIVNEATAFSTARKQALAQFAANAAAEVETEVNRLTAQVKASPTKAASQAAQATLRQFTESTYAKVNTYAQQTEAELQAKAKEVSAAVAEAQRAATNDLQKTADVVPGQIIQAANTLAMPATSTPLVSVAGFGSAAVETARLAASLTNAVNRLVQIAGSGPGAYVATFAVLSLYSDQAGKDSDKVPAGVRNALALEASALGLPGTADLQSVAKAGGTVDMPVRLTSAAQESPSGKSQIAAMLTNGATVPKGVPVRAATLNAATGRYEVTVPAKSTVPNTPPLILTWTPATPPGSQNPSSTTPVVPQPVPVYEGATITPVQAEPESYPGVPLDLDDLIVIFPVGSGVKPIYIMFNHNPHDVVIDDKIREQIPIRGWTEVEVRDVIGKGATGSSSDKRRPNKTIDGLGRNDSATVYGSPPNGYIVVNDRTGEIIQIADRNDSAWAVDGRIIWRNK

SEQ ID NO: 5144 - protein, 468 aa, Pseudomonas aeruginosa
MGMIANTQLKAARGPLLLDWRPEDPEFWARNGKRIASRNLWISIPALLLAFAVWMIWSTVTVRLNSAGFAFSNDQLFLLAALPSISGATLRVFYSFMVPIFGGRRWTALSTASMLIPCIWLGFAVQDPSTPYWVFALIALLCGFGGGNFASSMSNISFFYPKSQQGTALGLNAGLGNLGVSVMQFAVPLAVAGGLFGAFGGEPQQLGDGGRLWLQNAGWIWVPFIAVVSVAAWFGMNDIADAKASFRDQAVIFKRKHNWLMCWLYVATFGSFIGFSAGFAMLSKTQFPDVNPLQYAFLGPLVGALSRPLGGWLADKFGGARITLWNYALMIGGVFAVIAFLPGDGGQGNFFGFLGAFILLFFFAGIGNGSTFRMIPVIFRNEWARRVRDGQADEAGAARNASMESAAVIGFSAAIGAFGGFFIPKAFGTSLHMTGSAEGALYVFIAYYLSCIVATWWWYARKGAESPC

SEQ ID NO: 5145 - protein, 431 aa, Pseudomonas aeruginosa
MASLRQKQYSVLGMSTLSFAVNFAVWTMFSIIGIRIKDELGLSESQFGLMVALPILTGSLVRLPLGLITDRFGGRIVFFIHMLLVAIPIYGLAFASQYWHYLVLGLFVGLAGGSFAVGIAYTSAWFEKERQGTAMGIFGAGNAGAAITNLVAPMIVVAFGWRMVPQVYSVAMLVTAVLFWLFTWTDPAHLKGAAEASQRPNLAKQLAPLAELRVWRFGLYYFFVFGGFVALALWLPKYYIAEYGLDLKTASFITMLFTLPSGLIRALGGWFSDHYGARSVNWGVFWVCLVCLFFLSYPQTTMTIHGIQGDLSLGIGLNVWLFTFLVFVVGIAQGFGKASVYRIIHDYYPSNMGTVGGMVGVIGGLGGFCLPILFGYAADHIGVRSSCFMLLFGLTVVCMVWMHYAIKQQRRIDGQAASADVDLPPTLPTHS

SEQ ID NO: 5146 - protein, 259 aa, Pseudomonas aeruginosa
MKKLLLLTALASVISVSASAAEKLIVAATPIPHAEILELIKPTLAKEGVDLQIKVFTDYVQPNVQVAEKRLDANYFQTLPYLENFNKGKGTNLVTVVGVHVEPFGGYSRKYKSLAELPDGATVAIPNEGSNSGRALLLLQKAGLLKLKDPNNALATPKDIAENPKNLKFKELESALLPRVLDQVDLDLINTNYALEAKLNPAKDALVLEDRDSPYVNYLVARPDNKDSDALKKLSAALTSPEVKAFIEKKYAGAVVPAF

SEQ ID NO: 5147 - protein, 511 aa, Pseudomonas aeruginosa
MRWISRPGWPGHLLALAAGALTPLALAPFDYWPLAILSIALLYLGLRGLPGKSALWRGWWYGFGAFGAGTSWIYVSIHDYGAASVPLASLLMLGFTAGVAFFFALPAWLWARCLRRDNAPLGDALAFAALWLALELFRSWFLTGFPWLYAGYSQLQGPLAGLVPVGGVWLSSFVIALSAALLVNLPRLFPHGASLLLGLVLLLGPWAAGLYLKGHAWTHSAGEPLRVVAIQGNIAQELKWDPNQVRAQLDLYRDLSLPQQDVDLIVWPETAVPILQDMASGYLGAMGQVADEKNAALITGVPVRERLADGKSRYFNGITVVGEGAGTYLKQKLVPFGEYVPLQDLLRGLIAFFDLPMSDFARGPADQPLLKAKGYQIAPYICYEVVYPEFAAALAAQSQVLLTVSNDTWFGTSIGPLQHLQMAQMRALESGRWMIRATNNGVTGLIDPYGRIVRQIPQFQQGILRGEVIPMQGLTPYLQYRVWPLAGLAGVLLLWALLGRQLRPQERRLFG

SEQ ID NO: 5148 - protein, 464 aa, Pseudomonas aeruginosa
MARFTHSVGGETYRFDSLKDVMAKASPARSGDFLAGVAASNDGERVAAQMALADIPLKHFLDEALIPYEDDEVTRLIIDTHQRDAFAPVSHLTVGGFRDWLLGDAADEASLRALAPGLTPEMAAAVSKIMRVQDLVLVAQKIRVVTRFRNTLGLRGRLSTRLQPNHPTDDPAGIAASILDGLLFGNGDAMLGINPATDSMASICALLEMLDAIIQRYEIPTQACVLTHVTSSIEAINRGVPLDLVFQSIAGTEAANASFGISLKILQEGYEAGLSQKRGTLGNNLMYFETGQGSALSANAHHGVDQQTCETRAYAVARHFKPFLVNTVVGFIGPEYLYNGKQIIRAGLEDHFCGKLLGVPMGCDICYTNHAEADQDDMDMLLTLLGVAGINFIMGIPGSDDVMLNYQTTSFHDALYARQTLGLKPAPEFEDWLQRMGIFTQADGRIRFGDELPPAFRQALAQLA

SEQ ID NO: 5149 - protein, 297 aa, Pseudomonas aeruginosa
MGSRTWHWPGVLLGLLLATAGAQADTLRVATLDWAPYVGPDLPGKGLASRILDEALALDGHRAELVFLPWQRALKEAAEGRFDALMPAYLSPERRELFHATIPLLDSQLGFFRQRERLLPVNPAHLESLRPYRIGVVRGYVNREDFDADRSLTKDAVTNDWQNLEKLLRGRIDLAVVDRYTGYHLLARNVPALKDRLVFIEPPLEVKPLYVLVPKRHARGAALAASLDRNLRLMRRSGRLEQLIAEAHLERSGQTRTLAVDPLTGQADQQRSPGQEQDQGQHAPLQPAWREDPLGMR

SEQ ID NO: 5150 - protein, 308 aa, Pseudomonas aeruginosa
MIDIDRLSKRFSGRTVVNDLSFRIDRGEIVGLLGPNGAGKSTTLKMLSGFLAPSAGSVRIFGFDMQDKARQAQKLIGYLPENAPSYGEMTVEGFLAFVASIRDYSGREKRRRIDSAMDCMELRDERRSIIETLSKGFKRRVALAQAILHDPELLLLDEPTDGLDPNQKHQVRQLVKNLSESKIVVISTHILEEVSFMCSRALVINGGRLLADNTPGELRTRSRYHHAVSLSIEAPVDPLAIAMLPGVAGIEGRPDRAGTLTILARPGAQILPALNRLIHGSGWRVSGVRTEHGQLEEVFRQLTREPPA

SEQ ID NO: 5151 - protein, 232 aa, Pseudomonas aeruginosa
MRKSWLTASLLALTVASPFAAADIQGHKAGDFIIRGGFATVDPDDSSSDIKLDGAKQRGTKATVDSDTQLGLTFTYMFADKWGVELVAATPFNHQVDVKGLGPGLDGKLADIKQLPPTLLLQYYPMGGTNSAFQPYGGLGVNYTTFFDEDLASNRKAQGFSSMKLQDSWGLAGELGFDYMLNEHALFNMAVWYMDIDTKASINGPSALGVNKTKVDVDVDPWVYMIGFGYKF

SEQ ID NO: 5152 - protein, 316 aa, Pseudomonas aeruginosa
MHTLSSAHNSFEAWNQALRQVCGRFESQPALNRTLFIGDISRQDLGGLELAQIRTNAGRIARQATHADHDDDRHCFLVVQRSGHAQLRQGGDSIELAPGEMALMDSAGGCEIIPHGLIEHTSFHLSREEVCRHLPPSQRAFGKLSPNCASGRLLSLLVQQVCAGELQPWAVADEGGALQEALIALLGPALQHAGEELEGPLAGLYGYSLRRHAERLIEQSLQEPRLSPDMLAGRLRISVRQLYRLFEEQGDSVCRYILRQRLSRSAADLGNPRLRGESITSIAFKWGFSDSAHFSRAFKKQFEVSPKDYRAGALPA

SEQ ID NO: 5153 - protein, 381 aa, Pseudomonas aeruginosa
MSMRLFPGRVSLRRRPGAQARQALVLGLCCLTGGQAWALNEVALNCSFDNGKGLPWRVVNELTSGTAKGTVLFARPVSLFLNYKPQASQEAHELVIGGNWSGVGYPGPYGTVASDVKGIGYRISVDAQDGVKRVIPVDNQPHALDKRVTSFSGSTTSDYLQELVLTVDPGELPAGDLKVTSVSGSATLNLWAVDRLKGEASIGSVLAVPADNYPTGVCRKPYSLIGPASIAIGGGPPPPPIPKKCKVEVGREINVKLGSVALKNFPRVNDTSTERSFDISLSECAALAKPEIAFRDKYVSAQQADPTILSLKSGGAAGFGIVVKNGLDQQRIRFDGTPYPMRRVGDSADLPLSAAYIRIGAEGELKAGVADGAAEFTFTFP

SEQ ID NO: 5154 - protein, 251 aa, Pseudomonas aeruginosa
MDERLRQQQFSLARHLRDPLGNAPPPDIEERRLRVYRELFYNAIEGLLASGFPRLRGLLGEQQWHGLVREFYREERSHTPLFTRIAGVFVDYLRQRGEYRPAWQAELAHFEWSETRLYLAEPDDPPYRREGDLLDGVPLLSSLALPLGYRWPVHRLEEDVALAEAPAEPTLLLMHRDSSHRVHTARLTPLACRLLESLARRRLSGREHLAALALEARSAPGALDAAGLELLAALRTQGVVLGTLERDWAGG

SEQ ID NO: 5155 - protein, 307 aa, Pseudomonas aeruginosa
MGKVALAAKITHVPSLYLSELPGPRHGCRQPAIDGHREIGRRCRELGVDTIVVFDTHWLVNAGYHINCAPHFEGLYTSNELPHFIANMEYGFPGNPELGRILAEGCNALGVETLAHDATTLGPEYGTLVPMRYMNQDRHFKVVSVSALCTVHYLNDSARLGWAMRKAVEEHYDGTVAFLASGSLSHRFAQNGQAPDFSDRIWSPFLEVLDHEVVQMWQEGRWAEFCGMLPEYASKGHGEGFMHDTAMLLGALGWSAYDGKAEVVTPYFGSSGTGQINAVFPVTAQDGSAIPAAQAGNPAGASCASRL

SEQ ID NO: 5156 - protein, 130 aa, Pseudomonas aeruginosa
MPHFIAEYTDNIEAEADLPGLFEKVHACLGASGVFPLGGIRSRGVRLDTWRMADGRHDYAFVHMTLKVGAGRDLETRRQVAEALFEVITAHFAELQARRLLALSFELTELDAELNYKRNNVHEFLNNPAD

SEQ ID NO: 5157 - protein, 265 aa, Pseudomonas aeruginosa
MTHRLHADAVTLRRDARTVSRNLSLAIPEGSFSVIVGPNACGKSTLLAALSRLLAPAEGRVVLDGRDIHSLPGREVARRLGLLPQSALAPDGITVAELVARGRYPHQSFLRQWSPADERAVAAALRATRVDGLAERPLDALSGGQRQRVWIAMVLAQETPLLLLDEPTTYLDIVHQIELLELLAELNRQGRTIVAVLHDLNQACRYASHLIAMRDGAILAEGAPAHIFTERLVEEVFGLRSLIIADPVSGTPLLVPRGIAADAPG

SEQ ID NO: 5158 - protein, 129 aa, Pseudomonas aeruginosa
MRHRKSGRHLSRTSAHRKAMFQNMAVSLFEHELIKTTLPKAKELRRVAEPLITLAKEDSVANRRLAFDRTRSKAAVGKLFNDLGKRYANRPGGYLRILKCGFRAGDNAPMAYVELVDRPVGGEVVEAAE

SEQ ID NO: 5159 - protein, 38 aa, Pseudomonas aeruginosa
MKVRASVKKLCRNCKIIRRDGIVRVICSAEPRHKQRQG

SEQ ID NO: 5160 - protein, 144 aa, Pseudomonas aeruginosa
MQLNDLRSAPGARREKHRPGRGIGSGLGKTGGRGHKGLTSRSGGKVAPGFEGGQQPLHRRLPKFGFVSLKAMDRAEVRTSELAKVEGDVVSLQTLKDANLINQHVQRVKVMLSGEVGRAVTLKGIAATKGARAAIEAAGGKFED

SEQ ID NO: 5161 - protein, 58 aa, Pseudomonas aeruginosa
MATVKVTLVKSLNGRLANHKACVKGLGLRRINHTVEVQDTPENRGMINKAYYLLRVEG

SEQ ID NO: 5162 - protein, 166 aa, Pseudomonas aeruginosa
MANNEQKRDEGYIEKLVQVNRVAKTVKGGRIFAFTALTVVGDGKGRVGFGRGKAREVPAAIQKAMEAARRNMIQVDLNGTTLQYPTKSAHGASKVYMQPASEGTGIIAGGAMRAVLEVAGVQNVLAKCYGSTNPVNVVYATFKGLKNMQAPEAVAAKRGKSVEEIL

SEQ ID NO: 5163 - protein, 116 aa, Pseudomonas aeruginosa
MSVKKETRLRRARKARLKMRELETVRLCVYRSSQHIYAQVIAADGGKVLASASTLDKDLREGATGNIDAAKKVGQLVAERAKAAGVTQVAFDRSGFKYHGRVKALADAAREGGLEF

SEQ ID NO: 5164 - protein, 177 aa, Pseudomonas aeruginosa
MSRVAKNPVKLPAGVEIKLAGQQLSIKGAKGALELKVHPSVEVIQDSGELRFAARNGDQQTRAMAGTTRALVNNMVVGVSQGFERKLQLVGVGYKAQAKGQVLSLSLGFSHPVDYELPAGIVAETPSQTDILIKGIDKQLVGQVAAEIRDFRPPEPYKGKGVRYADEVVRRKEAKKK

SEQ ID NO: 5165 - protein, 130 aa, Pseudomonas aeruginosa
MSMQDPLADMLTRIRNAQMAEKTVVSMPSSKLKAAVAKVLKDEGYIADFQISSEVKPQLSIELKYFEGKPVIEEVKRISRPGLRQYKSVEQLPKVRGGLGVSIVSTNKGVMTDRAARAAGVGGEVLCTVF

SEQ ID NO: 5166 - protein, 101 aa, Pseudomonas aeruginosa
MAKESMKNRELKRQLTVAKYAKKRAELKAIIANPNSSAEERWNAQVALQKQPRDASASRLRNRCRLTGRPHGFYRKFGLSRNKLREAAMRGDVPGLVKASW

SEQ ID NO: 5167 - protein, 179 aa, Pseudomonas aeruginosa
MARLKEIYRKEIAPKLKEELQLANVMEVPRVTKITLNMGLGEAVGDKKIIENAVADLEKITGQKPVVTYARKSIAGFKIREGWPIGVKVTLRSDRMYEFLDRLLSISLPRVRDFRGLNAKSFDGRGNYSMGVKEQIIFPEIDYDKIDALRGLDITLTTTARTDDEGRALLRAFKFPFRN

SEQ ID NO: 5168 - protein, 104 aa, Pseudomonas aeruginosa
MQKIRRDDEVIVIAGKDKGKRGKVLKVLADDRLVVGGVNLIKRHTKPNPMLGQQGGIVEKEAPLHVSNVAIFNTETSKADRVGFKVEDGKKIRVFKSTQKPVQA

SEQ ID NO: 5169 - protein, 122 aa, Pseudomonas aeruginosa
MIQTQSMLDVADNSGARRVMCIKVLGGSHRRYAGIGDIIKVTVKEAIPRGKVKKGQVMTAVVVRTKHGVRRTDGSIIRFDGNAAVLLNNKQEPIGTRIFGPVTRELRTEKFMKIVSLAPEVL

SEQ ID NO: 5170 - protein, 88 aa, Pseudomonas aeruginosa
MAEAQKTVRTLTGRVVSDKMDKTVTVLIERRVKHPIYGKYVKRSTKLHAHDESNQCRIGDLVTIRETRPLAKTKAWTLVDIVERAVEV

SEQ ID NO: 5171 - protein, 137 aa, Pseudomonas aeruginosa
MLQPKRTKFRKQMTGHNRGLAHRGSKVSFGEYALKATSRGRLTARQIESARRALTRHVKRGGKIWIRVFPDKPVTKKPLEVRMGKGKGGVEYWVAQIQPGKVLYEIEGVSEELAREAFALAAAKLPLATSFVKRTVM

SEQ ID NO: 5172 - protein, 228 aa, Pseudomonas aeruginosa
MGQKVHPNGIRLGIVKEHTSVWYADRKNYADYLFADLKVREYLQDKLKSASVSRIDIHRPAQTARITIHTARPGIVIGKKGEDVEKLRQDLTKQMGVPVHINIEEIRKPELDAMLVAQSVAQQLERRVMFRRAMKRAVQNAMRIGAKGIKIQVSGRLGGAEIARTEWYREGRVPLHTLRADIDYATYEAHTTYGVIGVKVWIFKGEVIGGRQEELKPVAPAPRKKAAR

SEQ ID NO: 5173 - protein, 110 aa, Pseudomonas aeruginosa
MEVAAKLSGARISAQKARLVADQIRGKKVGEALNLLAFSSKKAAEIMKKVLESAVANAEHNEGADVDDLKVSTVFVNEGRSLKRIMPRAKGRADRIVKRSCHITVKVADK

SEQ ID NO: 5174 - protein, 91 aa, Pseudomonas aeruginosa
MPRSLKKGPFIDLHLLKKVEVAVEKNDRKPIKTWSRRSMILPHMVGLTIAVHNGRQHVPVLVNEDMVGHKLGEFAATRTYRGHAADKKAKR

SEQ ID NO: 5175 - protein, 200 aa, Pseudomonas aeruginosa
MQLNVNGAQAIEVSERTFGGEFNETLVHQAVVAYMAGGRQGSKAQKTRSEVSGGGKKPWRQKGTGRARAGTIRSPIWRGGGTTFAAKPRSHEQKLNKKMYRAALRSILAELVRLDRLVVVADFAVDAPKTKGLVAKLDTLGLKDVLIVTDGVDENLYLAARNLAHVDVRDVQGSDPVSLIAYDKVLVTVSAVKKFEELLG

SEQ ID NO: 5176 - protein, 211 aa, Pseudomonas aeruginosa
MTIGVVGRKCGMTRIFTEEGVSIPVTVIEVEPNRVTQFKTEETDGYRAVQVTAGERRASRVTKAQAGHFAKANVAAGRGVWEFRLGEEQYAAGDQITVDLFQAGQMVDVTGESKGKGFAGTIKRWNFRGQDNTHGNSVSHRVPGSIGQCQTPGRVFKGKKMSGHLGAERVTVQSLEIVRVDAERNLLLVKGAVPGATGGDVIVRPAAKARG

SEQ ID NO: 5177 - protein, 103 aa, Pseudomonas aeruginosa
MQNQQIRIRLKAFDHRLIDQSTQEIVETAKRTGAQVRGPIPLPTRKERFTVLISPHVNKDARDQYEIRTHKRVLDIVQPTDKTVDALMKLDLAAGVEVQISLG

SEQ ID NO: 5178 - protein, 123 aa, Pseudomonas aeruginosa
MATINQLVRKPRKRMVDKSDVPALQNCPQRRGVCTRVYTTTPKKPNSALRKVCRVRLTNGFEVSSYIGGEGHNLQEHSVVLIRGGRVKDLPGVRYHTVRGSLDTSGVKDRKQGRSKYGAKRPK

SEQ ID NO: 5179 - protein, 1399 aa, Pseudomonas aeruginosa
MKDLLNLLKNQGQIEEFDAIRIGLASPEMIRSWSFGEVKKPETINYRTFKPERDGLFCAKIFGPVKDYECLCGKYKRLKHRGVICEKCGVEVALAKVRRERMGHIELASPVAHIWFLKSLPSRIGLLLDMTLRDIERVLYFESYVVIDPGMTTLEKGQLLNDEQYFEALEEFGDDFDARMGAEAVHELLNAIDLEHEIGRLREEIPQTNSETKIKKLSKRLKLMEAFQGSGNKPEWMVLTVLPVLPPDLRPLVPLDGGRFATSDLNDLYRRVINRNNRLKRLLDLAAPDIIVRNEKRMLQEAVDALLDNGRRGRAITGSNKRPLKSLADMIKGKQGRFRQNLLGKRVDYSGRSVITVGPTLRLHQCGLPKKMALELFKPFIFGKLEGRGMATTIKAAKKMVERELPEVWDVLAEVIREHPVLLNRAPTLHRLGIQAFEPVLIEGKAIQLHPLVCAAYNADFDGDQMAVHVPLTLEAQLEARALMMSTNNILSPANGEPIIVPSQDVVMGLYYMTREAINAKGEGMAFADLQEVDRAYRSGQASLHARVKVRINEKIKGEDGQLTANTRIVDTTVGRALLFQVVPAGLPFDVVNQSMKKKAISKLINHCYRVVGLKDTVIFADQLMYTGFAYSTISGVSIGVNDFVIPDEKARIINAATDEVKEIESQYASGLVTQGEKYNKVIDLWSKANDEVSKAMMANLSKEKVVDREGKEVDQESFNSMYMMADSGARGSAAQIRQLAGMRGLMAKPDGSIIETPITANFREGLNVLQYFISTHGARKGLADTALKTANSGYLTRRLVDVAQDLVVTEIDCGTEHGLLMSPHIEGGDVVEPLGERVLGRVIARDVFKPGSDEVIVPAGTLIDEKWVDFLEVMSVDEVVVRSPITCETRHGICAMCYGRDLARGHRVNIGEAVGVIAAQSIGEPGTQLTMRTFHIGGAASRTSAADNVQVKNGGTIRLHNLKHVVRADGALVAVSRSGELAVADDFGRERERYKLPYGAVISVKEGDKVDPGAIVAKWDPHTHPIVTEVDGTVAFVGMEEGITVKRQTDELTGLTNIEVMDPKDRPAAGKDIRPAVKLIDAAGKDLLLPGTDVPAQYFLPANALVNLTDGAKVSIGDVVARIPQETSKTRDITGGLPRVADLFEARRPKEPSILAEISGTISFGKETKGKRRLVITPNDGSDPYEELIPKWRHLNVFEGEQVNRGEVISDGPSNPHDILRLLGVSSLAKYIVNEIQDVYRLQGVKINDKHIETILRQMLRKVEVSESGDSSFIKGDQVELTQVLEENEQLGTEDKFPAKYERVLLGITKASLSTESFISAASFQETTRVLTEAAVTGKRDFLRGLKENVVVGRLIPAGTGLAYHSERKRQRDLGKPQRVSASEAEAALTEALNSSGN

SEQ ID NO: 5180 - protein, 122 aa, Pseudomonas aeruginosa
MALTNEDIINAVSEMSVMQVVELIKAMEEKFGVTAAAATVAAAGPAAAAAEEQTEFTIVLAEAGDKKVNVIKVVRELTGLGLKEAKAVVDGAPGVVKEGASKEEAEAAKKALEEAGAKVELK

SEQ ID NO: 5181 - protein, 166 aa, Pseudomonas aeruginosa
MAIKLEDKKAIVAEVNEAAKAALSAVVADARGVTVGAMTGLRKEAREAGVYVKVVRNTLLKRAVEGTQFDVLNDVFKGPTLIAFSNEHPGAAARIFREFAKGQDKFEIKAAAFEGQFLAANQIDVLASLPTYDEAVSQLMSVIQGATSKLARTLAAIRDQKEAAAA

SEQ ID NO: 5182 - protein, 480 aa, Pseudomonas aeruginosa
MTVNASIFWYDYETTGIDPRRDRPLQIAGIRTDEALNEIGEPMNLYCRPSDDILPHPMACLITGITPQRLAERGLSEADFMTRVHAQLAQPATCVAGYNSLRFDDEVTRYSLYRNFFDPYAREWQGGNSRWDLIDMVRTAYALRPEGIQWPQLDGRLSLKLEMLTAANGLEHGQAHDALSDVRATIALARLIRQRQPRLYDYLYQLRSKHKVLDQVRLLQPLVHVSGRFSAERHFLSVVLPLAWHPRNRNALIVCDLCADPAPLLELSAEDLRRRLYTRRDELAEGELPVPLKQIQVNRCPVVAPLSVLRAEDRQRTGIELDECQQKAELLRQHQTVWADKLTALYGEESFSASDDPEQQLYDGFIGDRDRRLCEQLRLAEPEQLAKEQWPFDDARLQELFFRYRARNFPETLNVAERQQWESFCRNRLSHEEYGAPNTLPAFEAALEACRQEQGGTLPAVLAAWRDYAAELRQRYSLET

SEQ ID NO: 5183 - protein, 487 aa, Pseudomonas aeruginosa
MNCRASATLWIRSSCLITAMEHGPLQAGNSDAGQGHGAGRSRGARRSGTGAKKARQYSRSGETGARADDQTLVGQPAGRPINPRSASWQFVRLGNPQGAGYIAARCHYGTEPMRTDKPPLKQRALQKLLLRRFGMAAGTYLLGLVLLWLALLSGFYRAAPTTAAASTTLVVACQLAFLWLFASGRNLRYADPSLTEPQVLVAIAWLTYFLYHVDSLRGTFMVFYVLALLFGVFQLPPRVFARCAALAFIAFSGIYLVEALQQRLELPGRAALQVLVMFIVMVWLSLFASYIQAMRQRMRQRRYALQAHQDTLRGMMRQLEDLVATDELTGLFNRRHFMRMASRALEDLLPNRQHGLALIDLDHFKRINDRHGHAAGDRVLQTFAAVARSCLRDGDVLARYGGEEFVLLLPHADAEQLESCCERLRLAFQQAEPVGVTVDTLSLSVGMTLLYADDDLDEALQRADQALYRAKRGGRNRCDATWEVTSA

SEQ ID NO: 5184 - protein, 384 aa, Pseudomonas aeruginosa
MLGLPLDRREGPPMPALPLSRRALAALALVFALPALAEDWPDTDWPRAQQPAGPALEAFERYAFGRRDDVRRKGIRTDAVVVIRDGRLVYERYAGPSRAETPHLTWSVSKSLLATLLGVAEGEGRFQLDDPVARYYPPFARHPEVTLRHLLNWSSGLDWQEDYEFAPLKSSVVAMLYTRGRDDMAGFVAETPQARPPGRRFRYSSGDSNVLAAALHGMLGADYAEYPWRALFEPLGIRSAVWERDAAGTFVGSSYVYMSARDLARVGLLMQRHGRWRERQLLPLAWVEFNLTPFARYRPSAEEEGEAVPGGQWWLNRAVKGAPAPWPDVAETAFAALGHWGQALYVLPEEKLVIVRYADDRDGRFRHNEFLRLAQAAFAGEARP

SEQ ID NO: 5185 - protein, 300 aa, Pseudomonas aeruginosa
MILFDYKLLAALAAVVEQGGFERAAQALGLSQSAVSQRIKLLEARVGQPVLVRETPPHPTDLGRRLLNHVQQVRLLEGDLQRWVPNLDEGGAPERLRIALNADSLATWWAAAVGDFCAERRVLLDLVVEDQEVGLKRMRAGEVAGCVCGSARPVAGARSLLLGAMRYRGLASPDFIARHFPRGVEAAALAGVPAIVFGPDDLLQHRFLKDLGVEGGFIHHLCPSSEGFVRLTAGGLGWGLVPERQVQGELARGELVELLPGQVIDVPLYWHYWRNGGELLASLTEHLLARAGDGLVRVSG

SEQ ID NO: 5186 - protein, 1018 aa, Pseudomonas aeruginosa
MAFTDPFIRRPVLASVVSLLIVLLGMQAFSKLVIREYPQMENALITVTTLYAGANAETIQGYITQPLQQSLASAEGIDYMTSVSRQNYSTISIYARIGANTDRLVTELLAKSNEVKSQLPPDAEDPVLQKEAADASALMYISFYSEQMNNPQITDYLSRVIQPKLATLPGIAEAEILGNQVFAMRLWLDPVKMAAFGVTAGEINQAVQQYNFLAAAGEVKGQLVVTSVNASTDLKSPQAFAAIPVKTDGDRRVLMGDVARVELGAASYDAISSFNGIPSVYIGIKGTPSANPLDVIKEVRAKMPELEEQLPPNLKVSIAYDATRFIQASIDEVVKTLGEAVLIVIVVVFLFLGAFRSVLIPVVTIPLSMIGVLFFMQAMGYSINLLTLLAMVLAIGLVVDDAIVVVENIHRHIEEGKPPFEAALEGAREIAVPVVSMTITLAAVYAPIGFLTGLTGALFKEFAFTLAGAVIISGIVALTLSPMMCSRLLRHEENPSGLAHRLDLIFEGLKQRYQRALHGTLDTRPVVLVFAVLVLALIPVLLMFTKKELAPEEDQGIVFLMTNSPQTANLDYLNRYTAEFEGIFRSFPEYYSAFQINGYNGVQAGIGGMLLKPWDEREKSQMELLHAVQAKLNEIPGVQIFAFNLPSLPGTGEGLPFQFVLNTANDYESLLQVAQRVKQRASESGKFAFLDLDLAFDKPELVVDIDREKAAQMGVSMQDLGVALASLLGEGEINRFTIDGRSYKVIAQVERPYRDNPGWLGSYYVKSRNGQLVALSTLIETHERARPRQLNQFQQLNSAIISGFPIVSMGEAIETVQQIAREEAPRGFAVDYAGASRQYVQEGSALLVTFGLALAIIFLVLAAQFESFRDPLVIMVTVPLSICGALIPLFLGVSSLNIYTQVGLVTLIGLISKHGILIVEFANQLRHEQGLGRREAIEQAAAIRLRPVLMTTAAMVLGVIPLILATGAGAVSRFDIGIVIATGMSVGTLFTLFVLPCIYTLVARPDAPPGVTQAANAH

SEQ ID NO: 5187 - protein, 399 aa, Pseudomonas aeruginosa
MLSVLRPFPSPLLSRHGIDLDFPLLAGCLALLGLGLVMVTSASSEVAAAQSGNPLYFSVRHLIYLVIGLISCGLTMMVPMATWQRWGWKLLLVAFGLLVLVITPGIGREVNGSMRWIGFGLFNIQPSEIAKVCVVIFMAGYLIRRQQEVRESWMGFFKPFVVLLPMAGLLLREPDFGATVVMMGAAAAMLFLGGVGLFRFGLMVLLAVGAVVLLIQTQPYRMARLTNFTDPWADQFGAGYQLSQALIAFGRGGWLGMGLGNSIQKQFYLPEAHTDFVFAVLAEELGIVGALATVALFVFVSLRALYIGIWAEQAKQFFSAYVAYGLAFLWIGQFLINIGVNVGLLPTKGLTLPFLSYGGSSLVICCACLGMLLRIEWERRTHLGSEEYEFNEEDFADER

SEQ ID NO: 5188 - protein, 142 aa, Pseudomonas aeruginosa
MKTYTAKPETVQRDWFVVDAAGQTLGRLATEIARRLRGKHKPEYTPHVDTGDYIVVINAEQVRVTGAKTTDKMYYHHSGFPGGIKSINFEKLIAKAPERVIETAVKGMLPKNPLGRDMYRKLKVYKGASHPHTAQQPQELKI

SEQ ID NO: 5189 - protein, 200 aa, Pseudomonas aeruginosa
MAAHAAGPDKRPLTRYHGGVFHWTTTMAEFHDDDSQFEEKSKSQIKRELHALQDLGERLTTLQPQLLERLPLTDPLRKALLEAPKHKAHIARKRHIQYIGKLMRDQDVDAIVALIDQVDSSTRQYNERFHALERWRDQLIAGGDAALDAFVGEFPECDRQHLRGLVRHAQHEAAHNKPPAAARKVFKYIRELDETKRGLR

SEQ ID NO: 5190 - protein, 323 aa, Pseudomonas aeruginosa
METVLTARDLTRHYEVSRGLFKGHAQVRALNGVSFELEAGKTLAVVGESGCGKSTLARALTLIEEPTSGSLKIAGQEVKGASKDQRRQLRRDVQMVFQNPYASLNPRQKIGDQLAEPLLINTALSREERREKVQQMMRQVGLRPEHYQRYPHMFSGGQRQRIALARAMMLQPKVLVADEPTSALDVSIQAQVLNLFMDLQQQFRTAYVFISHNLAVVRHVADDVLVMYLGRPAEMGPADKLYENPLHPYTRALLSATPAIHPDPTKPKIRIQGELPNPLNPPEGCAFHKRCPYATERCRSEVPELRLLDQRQVACHHAEQFLG

SEQ ID NO: 5191 - protein, 299 aa, Pseudomonas aeruginosa
MKVLILAAYALSILYVHFRGRVRHKLSRQLSDHSSFLAPINCLMYLFSKVPNRPYLAPQTFPELQVLVDNWQAIRSEALHLHDAGNIKRSEQYDDIGFNSFFKSGWKRFYLKWYDEAHPSAGQLCPQTTALLRQIPSVKAAMFAELPPGSKLVRHRDPYAGSLRFHLGLFTPNDPACFIEVDGERYHWRDGEAVVFDETFIHYAENATEHNRIILFCDIERPLTQGWATAFNRWFSRNVMAAAAAPNNAGDRTGGLNRIFDSLYKIRLQGKRLKKRNRKLYYLQKWGFFALVLAFILWI

SEQ ID NO: 5192 - protein, 854 aa, Pseudomonas aeruginosa
MRIDRLTSKLQLALSDAQSLAVGHDHPAIEPVHLLSALLEQQGGSIKPLLMQVGFDIAALRSGLNKELDALPKIQSPTGDVNLSQDLARLLNQADRLAQQKGDQFISSELVLLAAMDENTRLGKLLLGQGVSRKALENAVANLRGGEAVNDPNVEESRQALDKYTVDMTKRAEEGKLDPVIGRDDEIRRTIQVLQRRTKNNPVLIGEPGVGKTAIVEGLAQRIINGEVPDGLKDKRLLALDMGALIAGAKFRGEFEERLKAVLNELGKQEGRVILFIDELHTMVGAGKAEGAMDAGNMLKPALARGELHCVGATTLDEYRQYIEKDAALERRFQKVLVDEPSEEDTIAILRGLKERYEVHHGVSITDGAIIAAAKLSHRYITDRQLPDKAIDLIDEAASRIRMEIDSKPEELDRLDRRLIQLKIEREALKKEDDEATRKRLAKLEEDIVKLEREYADLEEIWKSEKAEVQGSAQIQQKIEQAKQEMEAARRKGDLESMARIQYQTIPDLERSLQMVDQHGKTENQLLRNKVTDEEIAEVVSKWTGIPVSKMLEGEREKLLRMEQELHRRVIGQDEAVVAVSNAVRRSRAGLADPNRPSGSFLFLGPTGVGKTELCKALAEFLFDTEEALVRIDMSEFMEKHSVARLIGAPPGYVGFEEGGYLTEAIRRKPYSVVLLDEVEKAHPDVFNILLQVLEDGRLTDSHGRTVDFRNTVVVMTSNLGSAQIQELAGDREAQRAAVMDAVNAHFRPEFINRIDEVVVFEPLAREQIAGIAEIQLGRLRKRLAERELSLELSQEALDKLIAVGFDPVYGARPLKRAIQRWIENPLAQLILAGKFAPGASISAKVEGDEIVFA

SEQ ID NO: 5193 - protein, 817 aa, Pseudomonas aeruginosa
MPDSVAAGLRLAPEELTRPFAPEQFTFDTTDDLEPFRGVLGQERAVEALQFGVAMPRPGYNVFVMGEPGTGRFSFVKRYLQAEGKRVATPSDWVYLNNFDEPREPRVIELPPGSATEFSADIDRLIDNLMSTFPAVFEHPAYQQKKNAVDRAFNQRYDRALDSVERRALEKDVALYRDSANVAFTPMKDGKALDEAEFAQLPEAERERFHKDIAALEEYLNEELASLPQWKRESSNQLRELNEETITLALQPLLAPLVEKYNNNPGVCAYLQAMQLNLLKTVVDQLVDDSRTDAQRKQGLIEQYAPNQAIVHHATSGAPVVFESHPTYDNLFGRIEYSSDQGALYTSYRQLRPGALHRANGGFLILEAEKMLGEPFVWDALKRALQSRQLKMESPLAELGRLAAVSLTPQVIPLQLKVIIIGSRQIYYTLQDLDPDFQEMFRVLVDFDEDIPLGEDSLEQFAQLLKTRTSEEGMAPLSGAAVARLATYSARLAEHQGRLSARIGDLFQLVSEADFIRQLANEEVIQLGHIERALKAKQTRTGRVSARILDDMLAGIILIDTAGAAVGKCNGLTVLEVGDSVFGVPARISATVYPGSSGIVDIEREVNLGQPIHSKGVMILTGYLGSRYAQEFPLEISASIALEQSYGYVDGDSASLGEVCTLISALSRTPLKQCFAITGSINQFGEVQAVGGVNEKIEGFFRLCEARGLTGEQGVIIPRANVTTLMLDERVLQAVRAGQFHVYAVREVDEALALLVGKPVGAQDEKGRFPKGSVNDLVVARLQEISELGMEEDDKEKDKPAEKETVAAKDKAAAKKD

SEQ ID NO: 5194 - protein, 1043 aa, Pseudomonas aeruginosa
MSEFFIKRPNFAWVVALFISLAGLLVISKLPVAQYPNVAPPQITITATYPGASAKVLVDSVTSVLEESLNGAKGLLYFESTNNSNGTAEIVVTFEPGTDPDLAQVDVQNRLKKAEARMPQAVLTQGLQVEQTSAGFLLIYALSYKEGAQRSDTTALGDYAARNINNELRRLPGVGKLQFFSSEAAMRVWIDPQKLVGFGLSIDDVSNAIRGQNVQVPAGAFGSAPGSSAQELTATLAVKGTLDDPQEFGQVVLRANEDGSLVRLADVARLELGKESYNISSRLNGTPTVGGAIQLSPGANAIQTATLVKQRLAELSAFFPEDMQYSVPYDTSRFVDVAIEKVIHTLIEAMVLVFLVMFLFLQNVRYTLIPSIVVPVCLLGTLMVMYLLGFSVNMMTMFGMVLAIGILVDDAIVVVENVERIMAEEGISPAEATVKAMKQVSGAIVGITLVLSAVFLPLAFMAGSVGVIYQQFSVSLAVSILFSGFLALTFTPALCATLLKPIPEGHHEKRGFFGAFNRGFARVTERYSLLNSKLVARAGRFMLVYAGLVAMLGYFYLRLPEAFVPAEDLGYMVVDVQLPPGASRVRTDATGEELERFLKSREAVASVFLISGFSFSGQGDNAALAFPTFKDWSERGAEQSAAAEIAALNEHFALPDDGTVMAVSPPPINGLGNSGGFALRLMDRSGVGREALLQARDTLLGEIQTNPKFLYAMMEGLAEAPQLRLLIDREKARALGVSFETISGTLSAAFGSEVINDFTNAGRQQRVVIQAEQGNRMTPESVLELYVPNAAGNLVPLSAFVSVKWEEGPVQLVRYNGYPSIRIVGDAAPGFSTGEAMAEMERLASQLPAGIGYEWTGLSYQEKVSAGQATSLFALAILVVFLLLVALYESWSIPLSVMLIVPIGAIGAVLAVMVSGMSNDVYFKVGLITIIGLSAKNAILIVEFAKELWEQGHSLRDAAIEAARLRFRPIIMTSMAFILGVIPLALASGAGAASQRAIGTGVIGGMLSATFLGVLFVPICFVWLLSLLRSKPAPIEQAASAGE

SEQ ID NO: 5195 - protein, 360 aa, Pseudomonas aeruginosa
MKASLLKKLDVLSDRYEELTALLGDAEVISDQTRFRAYSREYAEVEPVILAFRDYRKVQADLEGAQALLKDSDPELRDLAEEEVAEARGRLAALGDSLQRMLLPKDPNDSRNVFLEIRAGTGGDEAAIFSGDLFRMYSRYAERQGWRIETLSENEGEHGGYKEVIARVEGDNVYAKLKFESGAHRVQRVPETESQGRIHTSACTVAVLPEPDEQAAIEINPADLRVDTYRSSGAGGQHVNKTDSAVRITHIPSGIVVECQEERSQHKNRAKAMAWLAAKLNDQQQAAAQQAIASTRKLLVGSGDRSERIRTYNFPQGRVTDHRINLTLYSLGEVMEGAVEQVIEPLLQEYQADQLAALGD

SEQ ID NO: 5196 - protein, 339 aa, Pseudomonas aeruginosa
MSRACLLAALLAAPFAHAEMTALDDEQLSDVQGAGIGFVLDSAMVDGNKATIAINGVTNTATGQNVPITVKELYVAATGSNKGSTLAPVTLGRLNFPFKLNLAKGSVLTTQLDDGRVVSTLPDTADVIELAFPSLVSGAGGQPCIAGYAGAGSNCSSRASEKVDAGIRFDFGVTSTRTDVLNLDFSELAMDGSYLRFWGANARSQLVGEIRLNLYAKTFEIMSCGAGSPSCVSAAEQAARTVYLTNAYASVALGYGKSQPLLFSVTADGNFTFELPKLTLANAADFYANAPRTSLVIENLNIGGTRPGYGQVPTGGYNMGRNEISGLSFNYLKVTSHNL

SEQ ID NO: 5197 - protein, 354 aa, Pseudomonas aeruginosa
MSSTPSLSHSPAELYRAWQDLRAERPQLRARDAAALLQVSEGELVASRVGIDAVRLRPDWAALLPALGELGPIMALTRNEHCVHERKGPYREVTVSANGQMGLVVSPDIDLRLFLGGWNAVFAIAEETARGTQRSIQVFDQQGVAVHKVFLAEASDVRAWEPLVERLRAAEQDAVLALHEPRAPAAALVDAQIDAAALREGWAALKDTHHFHALLKKHGAQRTQALRLAGGEWAERLDNGDLAKLFEAAAESGLPIMVFVGNAHCIQIHTGPVCNLKWLDDWFNVLDPEFNLHLKTTGIAELWRVRKPSTDGIVTSWEAFDADGELIVQLFGARKPGEPERDDWRELAESFKAL

SEQ ID NO: 5198 - protein, 840 aa, Pseudomonas aeruginosa
MTQVTVKELAQVVDTPVERLLLQMRDAGLPHTSAEQVVTDSEKQALLTHLKGSHGDRASEPRKITLQRKTTTTLKVGGSKTVSVEVRKKKTYVKRSPDEIEAERQRELEEQRAAEEAERLKAEEAAARQRAEEEARKAEEAARAKAAQEAAATAGAEPAVVADVAVAEPVAKPAAVEERKKEEPRRVPKRDEDDDRRDRKHTQHRPSVKEKEKVPAPRVAPRSTDEESDGYRRGGRGGKSKLKKRNQHGFQNPTGPIVREVNIGETITVAELAAQMSVKGAEVVKFMFKMGSPVTINQVLDQETAQLVAEELGHKVKLVSENALEEQLAESLKFEGEAVTRAPVVTVMGHVDHGKTSLLDYIRRAKVAAGEAGGITQHIGAYHVETERGMVTFLDTPGHAAFTAMRARGAQATDIVILVVAADDGVMPQTQEAVQHAKAAGVPIVVAVNKIDKPEANPDNIKNGLAALDVIPEEWGGDAPFVPVSAKLGTGVDELLEAVLLQAEVLELKATPSAPGRGVVVESRLDKGRGPVATVLVQDGTLRQGDMVLVGINYGRVRAMLDENGKPIKEAGPSIPVEILGLDGTPDAGDEMTVVADEKKAREVALFRQGKFREVKLARAHAGKLENIFENMGQEEKKTLNIVLKADVRGSLEALQGSLSGLGNDEVQVRVVGGGVGGITESDANLALASNAVLFGFNVRADAGARKIVEAEGLDMRYYNVIYDIIEDVKKALTGMLGSDLRENILGIAEVRDVFRSPKFGAIAGCMVTEGMVHRNRPIRVLRDDVVIFEGELESLRRFKDDVAEVRAGMECGIGVKSYNDVKVGDKIEVFEKVEVARSL

SEQ ID NO: 5199 - protein, 381 aa, Pseudomonas aeruginosa
MIISASTDYRAAAQRKLPPFLFHYIDGGAYAEYTLRRNVEDLSAIALRQRVLKNMSELSLETRLFDETLAMPVALAPVGLTGMYARRGEVQAARAAAAKGVPFTLSTVSVCPIEEVAPAIDRPMWFQLYVLKDRGFMRNALERAKAAGVTTLVFTVDMPVPGARYRDAHSGMSGPYAAPRRILQAMTHPAWAWDVGLLGKPHDLGNISAYRGNPTGLEDYIGWLGANFDPSISWKDLEWIREFWDGPMVIKGILDPEDARDAVKFGADGIVVSNHGGRQLDGVLSSARALPAIADAVKGELAILADSGIRTGLDVVRMIALGADSVLLGRAFVYALAAAGEAGVRNLLELIEKEMRVAMVLTGAKSIGEISADSLVRELGA

SEQ ID NO: 5200 - protein, 370 aa, Pseudomonas aeruginosa
MNRPASPAMRDDRELTPEQLAAFGAELDALRLRTLADLGADDARYIRRVRAAVRVCCWSGRALLMFGWLPPTWLLGSLLLGLGKILENMELGHNVMHGQYDWMNDPEFAGRAYEWDIAGPSDFWRHTHNHIHHTYTNVLGKDDDVGYGVVRLFPEQRWKPFYRWQPLWVTLQALLFQYAVAIQHLRLDKYAKGRLDKAELMPLLRRLRAKLGRQWTKDYLLFPLLGLFAGGFGAVFVGNLLANVLRNLWTFTVIFCGHFTEKAVVFPPSVLEGETRGHWYLRQLRGSSNLEGGPLFHILTGNLSHQIEHHLYPDLPARRYAALSREVREIARRYGQTYNSGRLGRQFLTVLRRIWVYRLPPREPLPAGRG

SEQ ID NO: 5201 - protein, 400 aa, Pseudomonas aeruginosa
MAWNEPGDNSNNNDRDPWGGRRGGGGGGGDRKGPPDLDEAFRKLQDSLNGLFGGKKRSGNGSGSGSGGKGGGLGLFGIGLAILAVLWLYNAIYVVDEQEQAVILRFGKYYETVGPGLNFYFPPIDKRFQENVTRERAYSKQGQMLTEDENIVEVPLTVQYKISNLQDFVLNVDQPEVSLQQATESALRHVAGSTTMDRILTEGREQMATEVRERLQRFLDTYRTGITVTQVNIQSAQAPREVQEAFDDVIRAREDEQREKNQAEAYANGVVPEARGQAQRIIEEANGYRDEVISRAQGEADRFSKLLVEYRKAPEVTRERLYLDTMQEVFSQTSKVLVTGQQGQNNLLYLPLDKMIDGRNAAPATGAGASAGGGSASASDLGSRIVNDLRQQDARTRESR

SEQ ID NO: 5202 - protein, 603 aa, Pseudomonas aeruginosa
MSDSPQNPGPSSLKIYFRLLGYVKPYIGMFLLSIVGFLIFASTQPMLAGILKYFVDGLSNPDAALFPNVQWPWLRDLHLVYAVPLLIILIAAWQGLGSFLGNFFLAKVSLGLVHDLRVALFNKLLVLPNRYFDTHSSGHLISRITFNVTMVTGAATDAIKVVIREGLTVVFLFLYLLWMNWKLTLVMLAILPVIAVMVTTASRKFRKQSKKIQVAMGDVTHVASETIQGYRVVRSFGGEAYEEKRFLDASQSNTDKQLRMTKTGAVYTPMLQLVIYVAMAILMFLVLWLRGDASAGDLVAYITAAGLLPKPIRQLSEVSSTVQRGVAGAESIFEQLDEAAEEDQGTVEKERVSGRLEVRNLSFRYPGTDKQVLDDISFIAEPGQMIALVGRSGSGKSTLANLVPRFYQHNDGKILLDGVEVEDYRLRNLRRHIALVTQQVTLFNDSVANNIAYGDLAGAPREEIERAAKAANAKEFIDNLPQGFDTEVGENGVLLSGGQRQRLAIARALLKDAPLLILDEATSALDTESERHIQAALDEVMKGRTTLVIAHRLSTIEKADLILVMDQGQIVERGSHAELLAQNGHYARLHAMGLDEQAPAPVG

SEQ ID NO: 5203 - protein, 438 aa, Pseudomonas aeruginosa
MSNPQVRPQAEEEPALIEAAREAANEVLEAATEVERYIEKGTPQFMRTSLALFSGGFATFALLYCIQPMMPVLSKAFSISAAESSLALSVATAMLALGLLVTGPISDAIGRKPVMVVSLLAAALFTLGSAVMPTWHGVLLMRALVGLSLSGLAAVAMTYLSEEIHPQHIGLSMGLYIGGNAIGGMSGRLISGVLVDFISWHAALAVLGGLALVAALVFWRVLPESKHFRPAPLKPATLLNGYRLHFRDAGLPWLFLIGFLLMGSFVTLFNYIGYRLLAEPYHMSQAVVGVLSVVYLSGIYSSAWVGSLADKLGRRKVLWAVILLMLGGLLLTLFEPIPLMLAGLLLFTFGFFGAHSVASSWIGRRALRAKGQASSLYLFSYYVGSSLAGTLGGVFWHYYGWNGIGLFIGSLLVVAVLVSLHLARLPALPGNTLAQPAH

SEQ ID NO: 5204 - protein, 266 aa, Pseudomonas aeruginosa
MKKYLASLVLGVCALVGVASVQAAGAVEDAVKRGTLRVGMDPTYMPFEMTNKRGQIIGFEVDLLKAMAKSMGVKLELVSTSYDGIIPALLTDKFDMIGSGMTLTQERNLRLNFSEPFIVVGQTLLVRKELEGKIKSYKDLNDPQYSITSKIGTTGEIVARKLISKAKYHGFDNEPEAVMDVVNGKADAFIYDSPYNVVAVSKFGAGKLVYLDQPFTYEPLAFGLKKGDYDSINFINNFLHQIREDGTYQRIHDKWFKNTEWLKEME

SEQ ID NO: 5205 - protein, 293 aa, Pseudomonas aeruginosa
MMRPLCFFLLIFLLSGNPVMAAELRPFICVNEKDHLPSLDPQADAWYREAVALAKPDTLRPWDRIVDLYSKAVERGHWKAMHNLASLYRTGWPGGVEKDTQKALDLYQKMIDLKVPQGFYDMAAMIGNRAGVKNPATDGLTFLDKAASLGNPPALTELGRLYIYVAGQDELGLKYTNCAAGQGYAPANYELAMYYRLVAHNYPKAAGYYLLAASQGNDDAAFFMSGVFDKTSPDVDRMWYAPDEKLHKLYDGIYDQLAADPDLRFPNLIKDHPLPPHPTQGYDADRPDWKPGQ

SEQ ID NO: 5206 - protein, 297 aa, Pseudomonas aeruginosa
MSHSDQSQRFLFDDTDVRGEMVDLERSYSEVLAKHPYPEPVAQLLGEMLAAASLLCGTLKFDGLLVLQARSSGAVPLLMVECSSDRQVRGLARYSAESIGADAGMQELMPEGVLTLTVDPVKGQRYQGIVALEGVNLAECLSNYFASSEQLPTRFWLNANGRRARGLLLQQLPADRLKDPEAREASWQHLTTLADTLTAEELLALDNETVLHRLYHEETVRLFEPQPLVFHCSCSRERSANALVSLGQADCERLLEEEEGSISIDCQFCNQRYLFDASDVAQLFAGAGSQGPSETRH

SEQ ID NO: 5207 - protein, 439 aa, Pseudomonas aeruginosa
MKTPLWFPQSFFARTLWLVLIVVLFSKALTLVYLLMNEDVIVDRQYSHGAALTIRAFWAADEESRAAIAKASGLRWVPSSADQPGEQHWPYTEIFQRQMQMELGPDTETRLRIHQPSQLWVRAPSLGEGWLAVPLYPHPLRGQRIWSVLGWFLGIGLLSTAAAWIFVRQLSQPLKRLVVAARQFGQGRSVRLPLGPETPSEMAEVYRAFNQMAEDIEQGGRERELMLAGVSHDLRTPLTRLRLSLELLPESEREMVEDMIRDIEDMDAILDQFLAFIRDGRDEPVEEGDLTDLVREVVAPFNQTREQVRMALQPVPAMPLRRVSMKRLLGNLIDNALNHGGGSVEVASYVAGESAAPYVVLSVLDRGQGIDPAEVDSIFNPFIRGDKARGGKGTGLGLAIVKRIAAQHGGSVELRNRDGGGLEARVCLPLGLLLPRGAA

SEQ ID NO: 5208 - protein, 422 aa, Pseudomonas aeruginosa
MSLIADHGFAFLVLACLFGFFMAWGVGANDVANAMGTSVGSRALTIRQAILVAMVFEFCGAYFAGGEVTETIRSGIVDPQYMTPDLLVFGMLSALLAAGVWLLLATIKGWPVSTTHSIVGAIIGFASVGVSVHAVHWGAIGPIVASWVVTPVLSGLLAFALFRSVQWLVLHAEDPFRSARRYVPLYMFLAGFMVALMTVGKGLKHVGLELSGLQTLGLALLAGGLVMGLGIVLLLRIRPTGGADPRGGFASVERVFAVLMIFTACSMAFAHGANDVANAIGPVAAVVAVVQAGGDLDLVSRSPVPSWVLLLGAVGIVIGLATYGYRVIATIGREITELTPSRGFAAELATASTVVGASAIGLPVSTTHTLVGAVLGIGMARGIGALNLRVIGSIFLSWVVTLPAGAVLAILFFLVLRALFGA

SEQ ID NO: 5209 - protein, 454 aa, Pseudomonas aeruginosa
MQKETEIKLRVSRATLEALQEHPLLKKRNKSGWERRELYNQYYDTPGRELARAKVALRMRRDGEQYIQTLKSRGQSVAGLSERNEWDWYLEKNKLDLKKLDDKCWPAALKDLDKKQLKPIFSTDFVRQRAEIAWGRGKARVVVEAALDLGKVVAGDNQEEICELELELRQGDAAALLELAAELAADLPLMPCDISKAERGYRLFDPNSYEVDPPAQKLLAETPLDGAFAAIAWYLLGSSQRLAEQYRFNGHWRLLEDWLQHLQNLRTLLGSLGQAVPRASSRELREALDALLADWAPRIERGRDDETLRQQAPQLFRGELDETRWGLFSLNASRWLLAKAWTESRNERGNRQGSAALGKWLLRSLAEEAQATPLARAHQHPELLPDQAPRLQRMLTWLRLARGVLDLPEADRLYGELAKLLELLRQPVDAERLAARAAQAHTVLTLKPWKALMK

SEQ ID NO: 5210 - protein, 633 aa, Pseudomonas aeruginosa
MHPPKILLWLLPLVCAFSLGALADTAVDPSQALHLLSYLAADYPPTVADGKIVDPSEYQEQVEFVGNLQALVLTLPMRPERAELERGVASLRQAIEQRLPGRDVALQARNLEARVADIYQVVQTPAITPDPSRAAPIYAQQCAICHGDAGKGDGPAGIGLEPPPANLTDRQRLDHLSLYDLRNVIGLGVAGTDMPAFADQLDERQRWDLASYVAGLSAGSAQPDKAHAYPLATLATQTPAEVAEHDGEAAAESFRALRAHPPLEQRGPGQLIDYTAATLDKSFAVYREGDRDQAYDLSVAAYLEGFELVESSLDNVDADLRRSTEKQLMAYRQALRDGLPETQVAQQLELAKGKLAEAAKQLGGDSLSFSISFVSALLILLREGVEAILVLAAILAFLRNTGQESAVRGVHVGWGLAFVAGFATWALAAYVIDIGGAQRELMEGFTSLFACVMVLWLGVWMHDRRHAAAWQDYIRSSLVGGGGRFGFAVLAFFSVYRELFEVILFYETLWLQAGPAGHNAVIGGAATAVVLLIGLAWVILRGSAKLPLGLFFSINAALLCALSVVFAGHGVIALQEAGVIGTRPVPFFDFDWLGIKADAYSLSAQAMALVAIALLYGRSRIVERRRAAANAAD

SEQ ID NO: 5211 - protein, 619 aa, Pseudomonas aeruginosa
MGLPLGLGKPNRLVNALYQRLRTLPERQLTLYTALSLGRPAAGGDLQRRFLEPFAERVFADYPELDYLHALRRDELPANIRVEEFYLQPGSLLDSAPAQQHYISCNYSHVARDINAKGVNAVAQLVARHPERPGKLSLACNPDITLDLLPMLEKRRAAGETIVAIGVVHDDLPYLPGDAEVEESVFDLLIDAPAESSRLFSTPNMPVNLQDHCIGLHASALVRDGGTLQIGIGSMGDALTAALLLRQRDNATYRALIDELGVRARWAETIERDGGLEPFRRGLYGCSEMFVPGLLALAEAGVLSRRVYPDEARQRAAERGEAPVEGGVWLHGGFFLGPLAFYRRLREMSLEERAGIGMTGIGFVNNLYRQEELKRLQRRDARFINSAFTVTLLGAGVADQLEDGRVLSGVGGQYNFVAQAHELEGARSILMLRSWRESGGEVSSNIVWQYAHTTIPRHLRDMVVTEYGIADLRGKNDAEVIAALLAIADSRFQQALAEQAQSAGKLPKDFVLPERYRNNTPERLQALHQAHAAALPEFPLGSDFDEVEQDLLRALGWLKRKLKLSEILELGKATLDAPEPEAYPAHLRRMDLDDPQGLREELYQRLLLAGLRASQEERG

SEQ ID NO: 5212 - protein, 78 aa, Pseudomonas aeruginosa
MSRVCQVTGKGPVTGNNISHAHNKTRRRFLPNLQHHRFWVESEKRFVRLRVSAKGMRIIDKRGIEAVLADLRARGEKF

SEQ ID NO: 5213 - protein, 312 aa, Pseudomonas aeruginosa
MKTTIRQLGCALLILASGAALAAEPEQCRTVRLGTVNWTDVVASSAVAEALLDGLGYQVKQTSASQQIVLAGLADKQLDLFLGYWQPTMQPVARPYLDKGRIEVIEPPTLADAQSTYAVPSYVAEGGLKTFADIARFKDKLGGRIYAIEPGSGSNRITRKMIDDNRFGLKGFQLVESSEAGMLTAVKRAIKRKQWVVFFGWKPHPMNLQIDMTYLTGSEDVFGPDEGAATVSTMTAAGYQAQCGNVARLLHNLRFSSAQVSQVMAPILDRTQPLDAARQWLKANPEPLKAWLDGVSTFDGKDGLAALQASLK

SEQ ID NO: 5214 - protein, 450 aa, Pseudomonas aeruginosa
MTDLNRTALPSRTDGTVEKTDTLVVGAGQAGVAMSEHLSRLGVPHLVLERNRIAEAWRSGRWDSLVANGPAWHDRFPGMEFDIDPDGFPGKDQVAAYFEAYAKRFDAPIRTGVEVRKVVRNVGRPGFTVDTSAGTIEANRVVAATGPFQRPVIPPIAPRDERIRQIHSAHYYNPQQLPEGAVLVVGAGSSGVQIADELQRAGRQVYLSVGAHDRPPRSYRNRDFCWWLGVLGEWDAEVAKPGREHVTIAVSGARGGHTVDFRALAHQGVTLVGLTESFVDGVATFRPDLAENLARGDENYLALLDAADAYIARNGLDLPEEPEARRRLPDPQCVTDPILELDLAEAGVGSIIWATGYAVDFGWLQVDAFDRDGKPRHQRGVSSEPGVYFIGLPWLSRRGSSFIWGVWHDARHVADHIAIQRKYLAYRDAAQRQEQDRASQAPQTSLQEVS

SEQ ID NO: 5215 - protein, 471 aa, Pseudomonas aeruginosa
MIKKILIANRGEIAVRIVRACAEMGIRSVAVYSEADRHALHVKRADEAHSIGADPLAGYLNPRALVNLAVESGCDALHPGYGFLSENAELAEICAERGIKFIGPSAQVIRRMGDKTEARRSMIAAGVPCTPGTEGNVADLAEALREAERIGYPVMLKATSGGGGRGIRRCNSREELEQAFPRVISEATKAFGSAEVFLEKCIVNPKHIEAQILADSFGNTVHLFERDCSIQRRNQKLIEIAPSPQLTPEQRAYIGDLAVRAAKAVGYENAGTVEFLLADGEVYFMEMNTRVQVEHTITEEITGIDVVREQIRIASGLELSVKQDDIVHRGYALQFRINAEDPKNNFLPSFGKITRYYAPGGPGVRTDTAIYTGYTIPPYYDSMCLKLIVWALTWEEALDRGLRALDDMRVQGVKTTAPYYQEILRNPEFRSGQFNTSFVESHPELTQYSIKRNPSHLAIAIATAIAAHAGL

SEQ ID NO: 5216 - protein, 728 aa, Pseudomonas aeruginosa
MNDDLSLLLNSLNDPQRQAVAAPLGRQLVLAGAGSGKTRVLVHRIAWLIQVEHASPYSILSVTFTNKAAAEMRHRIEQLLGINPAGMWVGTFHGLAHRLLRAHWREAGLSENFQILDSDDQQRLVKRVIRELGLDEQRWPARQAQWFINGQKDEGLRPQHIQPGGDLFLATMLKIYEAYEAACARAGVIDFSELLLRALDLWRDHPGVLEHYQRRFRHILVDEFQDTNAVQYAWLRILAKGGDSLMVVGDDDQSIYGWRGARIENIQQFSDDFADAEVIRLEQNYRSTASILKAANALIANNQGRLGKELWTDGEDGESLSLYAAFNEHDEARYVVESIESALKGGLARSEIAILYRSNAQSRVLEEALLREKIPYRIYGGQRFFERAEIKNAMAYLRLLDGRGNDAALERVVNVPARGIGEKTVESIREFARGNDVSMWEAIRLMIANKVLPGRAASALTGFVELIENLSAKVMDMPLHLMTQTVIEQSGLISYHKEEKGEKGQARVENLEELVSAARAFENSEEEEDLTPLQAFLSHASLEAGETQADAHEDSVQLMTLHSAKGLEFPLVFLVGMEEGLFPHKMSLEESGRLEEERRLAYVGVTRAMQRLVLTYAETRRLYGSETYNKVSRFIREIPPALIQEVRLSNTVSRPYGGTSRSAGGNLFSGAGVPETPFSLGQRVRHALFGEGTILNFEGAGAQARVQVNFESEGSKWLMLGYAKLEAL

SEQ ID NO: 5217 - protein, 201 aa, Pseudomonas aeruginosa
MNKLLVSLLLTLGLTGLAHAAGDAAAGQAKAAVCGACHGADGNSPAPNFPKLAGQGERYLLKQMHDIKDGKRTVLEMTGLLTNLSDQDLADIAAYFASQKMSVGMADPNLVAQGEALFRGGKIAEGMPACTGCHSPSGVGIATAGFPHLGGQHATYVAKQLTDFREGTRTNDGDTKIMQSIAAKLSNKDIAAISSYIQGLH

SEQ ID NO: 5218 - protein, 913 aa, Pseudomonas aeruginosa
MSQAPLVLVDGSSYLYRAFHALPPLTTSTGKPTGAVKGVLNMLLSLRKQYPDSPFAVVFDAKGPTFRDELFAEYKANRPSMPDDLRVQVEPLHASVRALGLPLLCVEGVEADDVIGTLARSSAAADRPVVISTGDKDMAQLVDGHITLVNTMTGSRLDVDGVKEKFGVGPELIIDFLALMGDKVDNIPGVPGVGEKTALGLLTGVGGGLEVLYASLDKVPELPIRGAKGLPAKLEENREQAFLSYQLATIKTDVELDVEIDKLYPGEPQREALIALYRELEFKNWLDDLLREAKEAGENGEAETPIQAEVDYDVVLDQAGFDAWLKKLEEAELIAFDTETTSIDAQQAQVVGVSFAVKEGEAAYVPLAHSYMGVPEQLDRDAVLRALKPLLEDPKKLKVGQHAKYDINVLANASTPIALRGVAYDTMLESYVLDSTATRHDMDSLALKYLGHSTIRFEDIAGKGAKQLTFDQIAIEQAGPYAAEDADVTLRLHQALWQKLEAIPSLARVLTDIEMPLVPVLARIERNGALVDANLLGIQSRELGEKMVALERQAYDLAGQEFNLGSPKQLGAILYDKLGLPVLSKTATGQPSTAEAVLAELAEQDFELPKVIMQYRSMSKLKSTYTDRLPEQINPRTGRIHTSYHQAVAATGRLSSSDPNLQNIPIRTAEGRRIRQAFVAPQGYKLLAADYSQIELRIMAHLAKDDGLLDAFRHDLDVHRATAAEVFGVPLEDVSGDQRRSAKAINFGLIYGMSAFGLAKQIGVERKEAQAYIDRYFARYPGVLAYMERTRAQAAEQGFVETLFGRRLYLPEIHSKNGAMRKAAERTAINAPMQGTAADIMKRAMVAVDNWLQESGLDARVILQVHDELVLEVREDLVEQVCEGIRPLMSGAATLDVPLVVEAGVGSNWDEAH

SEQ ID NO: 5219 - protein, 217 aa, Pseudomonas aeruginosa
MFSLPHHSPRDLPFGRRQTAILFVDMQRAWVEPGRDPHVDPQAAGYFYERVQNQVIPNQQRLLRAMRAVDENVLHTVIESLTADGRDRSLDHKLSEMHLPKGSPDARVIDALEPTANEIVLPKTSSGVFNSTAIDYVLRNLGTRHLIVCGVVTDQCVDMAVRDAADRGYLVTLVEDACATHTPERHQACLEAIKGYCWISDTETVLQRIAALGRSNL

SEQ ID NO: 5220 - protein, 455 aa, Pseudomonas aeruginosa
MQAATETIVAIATAQGRGGVGIVRVSGPLAGQMAVAVSGRQLKARHAHYGPFLDAGGQVIDEGLSLYFPGPNSFTGEDVLELQGHGGPVVLDLLVQRCLELGARQARPGEFSERAFLNDKLDLAQAEAIADLIEASSEQAARNALRSLQGEFSRRVHALTEQLISLRIYVEAAIDFPEEEIDFLADGHVLGLLEKVRTELSTVQREASQGALLRDGMTVVIAGRPNAGKSSLLNALAGREAAIVTDIAGTTRDVLREHIHIDGMPLHVVDTAGLRDTEDHVEKIGVERALKAIGEADRVLLVVDATAPEAADPFSLWPEFLDQRPEPGKVTLIRNKADLSTESIGLEESADGHVTITLSARTGAGLELLREHLKACMGFEQTAESGFSARRRHLEALRLAGQALEHGHSQLIHNGAGELLAEDLRQAQQHLGEITGAFTPDDLLGRIFSSFCIGK

SEQ ID NO: 5221 - protein, 116 aa, Staphylococcus aureus
PYDIIGKEALYDMIDYFYTLVEKDERLNHLFPGDFAETSRKQKQFLTQFLGGPNIYTEEHGHPMLRKRHMAFTITEFERDAWLENMQTAINRAAFPQGVGDYLFERLRLTANYMVN

SEQ ID NO: 5222 - protein, 638 aa, Staphylococcus aureus
MILLQLNHISKSFDGEDIFTDVDFEVKTGERIGIVGRNGAGKSTLMKIIAGVENYDSGNVSKIKDLRLGYLTQQMTFNSNATVFEEMSKPFEHIKRMESLIKEETDWLSKHANDYDSDTYKTHMSRYESLSNQFEQLEGYQYESKIKTVLHGLNFSEEDFNKPINDFSGGQKTRLSLAQMLLNEPDLLLLDEPTNHLDLETTKWLEDYLRYFKGAIVIISHDRYFLDKIVTQIYDVALGDVKRYVGNYEEFIQQRDLYYQKRMQEYESQQAEIKRLETFVEKNITRASTSGMAKSRRKILEKMERIDKPMLDAKSANIQFGFDRNTGNDVMHVKNLEIGYQTAITKPISIEVSKGDHIAIIGPNGIGKSTLIKTIANQQKALNGDITFGANLQIGYYDQKQAEFKSSKTILDYVWDQYPLMNEKDIRAVLGRFLFVQDDVKKIINDLSGGEKARLQLALLMLQRDNVLILDEPTNHLDIDSKEMLEQALQHFEGTILFVSHDRYFINQLANKVFDLTIDGGKMYLGDYQYYIEKVEEAEALKAHQEEQSVNVQAHEKSMEQSSYHNQKEQRREQRKLERQISECENEIETLETTILQIDEQLTQPEVYNNPQKANELAIQKQDSEQKLEHAMSKWEEL

SEQ ID NO: 5223 - protein, 691 aa, Staphylococcus aureus
LLKRLKEKSNDEIVQNTINKRINFIFGVIVFIFAVLVLRLGYLQIAQGSHYKQIIKNDENITVNESVPRGRILDRNGKVLVDNASKMAITYTRGRKTTQSEMLDTAEKLSKLIKMDTKKITERDKKDFWIQLHPKKAKAMMTKEQAMLADGSIKQDQYDKQLLSKIGKSQLDELSSKDLQVLAIFREMNAGTVLDPQMIKNEDVSEKEYAAVSQQLSKLPGVNTSMDWDRKYPYGDTLRGIFGDVSTPAEGIPKELTEHYLSKGYSRNDRVGKSYLEYQYEDVLRGKKKEMKYTTDKSGKVTSSEVLNPGARGQDLKLTIDIDLQKEVEALLDKQIKKLRSQGAKDMDNAMMVVQNPKNGDILALAGKQINKSGKMTDYDIGTFTSQFAVGSSVKGGTLLAGYQNKAIKVGETMVDEPLHFQGGLTKRSYFNKNGHVSINDKQALMHSSNVYMFKTALKLAGDPYYSGMALPSDISSPAQKLRRGLNQVGLGVKTGIDLPNETRGQIEPLTNNPGNYLDLSIGQYDTYTPLQLSQYVSTIANDGYRIQPHIGLTIHESTNKDEVGPLKKKINGTVLNKVNNTEKEIKQIQEGFKMAFNDKDGTGYVSFKDTVVPTAGKTGTAEVFQNGEPRVNSTYIGYAPIDDPKLAFSIVYTNQPVPPPWLTGGDLGRDVINYYFKQLGKDDKNKDKDK

SEQ ID NO: 5224 - protein, 325 aa, Staphylococcus aureus
MKENFWSELPRPFFILAPMEDVTDIVFRHVVSEAARPDVFFTEFTNTESFCHPEGIHSVRGRLTFSEDEQPMVAHIWGDKPEQFRETSIQLAKMGFKGIDLNMGCPVANVAKKGKGSGLILRPDVAAEIIQATKAGGLPVSVKTRLGYYEIDEWKDWLKHVFEQDIANLSIHLRTRKEMSKVDAHWELIEAIKNLRDEIAPNTLLTINGDIPDRKTGLEFAEKYGIDGVMIGRGIFHNPFAFEKEPREHTSKELLDLLRLHLSLCNKYEKDEIRQFKSLRRFFKIYVRGIRGASERRHQLMNTQSIAEARALLDEFEAQMDEDVK

SEQ ID NO: 5225 - protein, 294 aa, Staphylococcus aureus
QALQQLIPNEKIKVDEPLKRYTYTKTGGNADFYITPTKNEEVQAVVKYAYQNEIPVTYLGNGSNIIIREGGIRGIVISLLSLDHIEVSDDAIIAGSGAAIIDVSRVARDYALTGLEFACGIPGSIGGAVYMNAGAYGGEVKDCIDYALCVNEQGSLIKLTAKELELDYRNSIIQKEHLVVLEAAFTLAPGKMTEIQAKMDDLTERRESKQPLEYPSCGSVFQRPPGHFAGKLIQDSNLQGHRIGGVEVSTKHAGFMVNVDNGTATDYENLIHYVQKTVKEKFGIELNREVRIIG

SEQ ID NO: 5226 - protein, 443 aa, Staphylococcus aureus
MTHMQLEFSITLEFFGEHELKQHQEIVKSIHKTIHEGTGAGSDFLGWVDLPVDYDKEEFSRIVEASKRIKENSDVLVVIGIGGSYLGARAAIEMLTSSFRNSNEYPEIVFVGNHLSSTYTKELVDYLADKDFSVNVISKSGTTTEPAVAFRLFKQLVEERYGKEEAQKRIFATTDKEKGALKQLATNEGYETFIVPDDVGGRYSVLTAVGLLPIATAGINIEAMMIGAAKAREELSSDKLEENIAYQYATIRNILYAKGYTTEMLINYEPSMQYFNEWWKQLFGESEGKDFKGIYPSSANYTTDLHSLGQYVQEGRRFLFETVVKVNHPKYDITIEKDSDDLDGLNYLAGKTIDEVNTKAFEGTLLAHTDGGVPNMVVNIPQLDEETFGYVVYFFELACAMSGYQLGVNPFNQPGVEAYKQNMFALLGKPGFEDLKKELEERL

SEQ ID NO: 5227 - protein, 323 aa, Staphylococcus aureus
MKFDRHRRLRSSATMRDMVRENHVRKEDLIYPIFVVEKDDVKKEIKSLPGVYQISLNLLESELKEAYDLGIRAIMFFGVPNSKDDIGTGAYIHDGVIQQATRIAKKMYDDLLIVADTCLCEYTDHGHCGVIDDHTHDVDNDKSLPLLVKTAISQVEAGADIIAPSNMMDGFVAEIRRGLDEAGYYNIPIMSYGVKYASSFFGPFRDAADSAPSFGDRKTYQMDPANRLEALRELESDLKEGCDMMIVKPALSYLDIVRDVKNHTNVPVVAYNVSGEYSMTKAAAQNGWIDEERVVMEQMVSMKRAGADMIITYFAKDICRYLD

SEQ ID NO: 5228 - protein, 256 aa, Staphylococcus aureus
MLNLENKTYVIMGIANKRSIAFGVAKVLDQLGAKLVFTYRKERSRKELEKLLEQLNQPEAHLYQIDVQSDEEVINGFEQIGKDVGNIDGVYHSIAFANMEDLRGRFSETSREGFLLAQDISSYSLTIVAHEAKKLMPEGGSIVATTYLGGEFAVQNYNVMGVAKASLEANVKYLALDLGPDNIRVNAISAGPIRTLSAKGVGGFNTILKEIEERAPLKRNVDQVEVGKTAAYLLSDLSSGVTGENIHVDSGFHAIK

SEQ ID NO: 5229 - protein, 1184 aa, Staphylococcus aureus
VYLKSIDAIGFKSFADQTNVQFDKGVTAIVGPNGSGKSNITDAIKWVLGEQSAKSLRGSKMEDIIFSGAEHRKAQNYAEVQLRLDNHSKKLSVDENEVIVTRRLYRSGESEYYINNDRARLKDIADLFLDSGLGKEAYSIISQGRVDEILNAKPIDRRQIIEESAGVLKYKKRKAESLNKLDQTEDNLTRVEDILYDLEGRVEPLKEEAAIAKEYKTLSHQMKHSDIVVTVHDIDQYTNDNRQLDQRLNDLQGQQANKEADKQRLSQQIQQYKGKRHQLDNDVESLNYQLVKATEAFEKYTGQLNVLEERKKNQSETNARYEEEQENLIELLENISNEISEAQDTYKSLKSKQKELNAVIRELEEQLYVSDEAHDEKLEEIKNEYYTLMSEQSDVNNDIRFLKHTIEENEAKKSRLDSRLVEVFEQLKDIQGQIKTTKKEYQQTNKELSAVDKEIKNIEKDLTDTKKAQNEYEEKLYQAYRYTEKMKTRIDSLATQEEEYTYFFNGVKHILKAKNKELKGIHGAVAEIIDVPSKLTQAIETALGASLQHVIVDSEKDGRQAIQFLKERNLGRATFLPLNVIQSRVVATDIKSIAKEANGFISIASEAVKVAPEYQNIIGNLLGNTIIVDHLKHANELARAIKYRTRIVTLEGDIVNPGGSMTGGGARKSKSILSQKDELTTMRHQLEDYLRQTESFEQQFKELKIKSDQLSELYFEKSQKHNTLKEQVHHFEMELDRLTTQETQIKNDHEEFEFEKNDGYTSDKSRQTLSEKETHLESIKASLKRLEDEIERYTKLSKEGKESVTKTQQTLHQKQSDLAVVKERIKTQQQTIDRLNNQSQQTKHQLNDVKEKIAFFNSDEVMGEQAFQNIKDQINGQQETRTRLSDELDKLKQQRIELNEQIDAQEAILQVCHQDILAIENHYQDIKAEQSKLDVLIHHAIDHLNDEYQLTVERAKSEYTSDESIDALRKKVKLMKMSIDELGPVNLNAIEQFEELNERYTFLSEQRTDLRKAKETLEQIISEMDQEVTERFKETFHAIQGHFTAVFKQLFGGGDAELQLTEADYLTAGIDIVVQPPGKKLQHLSLLSGGERALTAIALLFAILKVRSAPFVILDEVEAALDEANVIRYAKYLNELSDETQFIVITHRKGTMEFADRLYGVTMQESGVTKLVSVNLNTIDDVLK

SEQ ID NO: 5230 - protein, 869 aa, Staphylococcus aureus
MDINKMTYAVQSALQQAVELSQQHKLQNIEIEAILSAALNESESLYKSILERANIEVDQLNKAYEDKLNTYASVEGDNIQYGQYISQQANQLITKAESYMKEYEDEYISMEHILRSAMDIDQTTKHYINNKVEVIKDIIKKVRGGNHVTSQNPEVNYEALAKYGRDLVEEVRQGKMDPVIGRDEEIRNTIRILSRKTKNNPVLIGEPGVGKTAIVEGLAQRIVKKDVPESLLDKTVFELDLSALVAGAKYRGEFEERLKAVLKEVKESDGRIILFIDEIHMLVGAGKTDGAMDAGNMLKPMLARGELHCIGATTLNEYREYIEKDSALERRFQKVAVSEPDVEDTISILRGLKERYEVYHGVRIQDRALVAAAELSDRYITDRFLPDKAIDLVDQACATIRTEMGSNPTELDQVNRRVMQLEIEESALKNESDNASKQRLQELQEELANEKEKQAALQSRVESEKEKIANLQEKRAQLDESRQALEDAQTNNNLEKAAELQYGTIPQLEKELRELEDNFQDEQGEDTDRMIREVVTDEEIGDIVSQWTGIPVSKLVETEREKLLHLSDILHKRVVGQDKAVDLVSDAVVRARAGIKDPNRPIGSFLFLGPTGVGKTELAKSLAASLFDSEKHMIRIDMSEYMEKHAVSRLIGAPPGYIGHDEGGQLTEAVRRNPYSVILLDEVEKAHTDVFNVLLQILDEGRLTDSKGRSVDFKNTIIIMTSNIGSQVLLENVKETGEITESTEKAVMTNLNAYFKPEILNRMDDIVLFKPLSIDDMSMIVDKILTQLNIRLLEQRISIEVSDDAKAWLGQEAYEPQYGARPLKRFVQRQIETPLARMMIKEGFPEGTTIKVNLNSDNNLTFNVEKIHE

SEQ ID NO: 5231 - protein, 109 aa, Staphylococcus aureus
  VARIANT (1)...(109): Xaa = Any Amino Acid
MKISTKGRYGLTLMISLAKKEGQGCISLKSIAEENNLSDLYLEQLVGPLRNAGLIRSVRGAKGGYQLRVPAEEISAGDIIRLLEGPITLLKVLNQNHLRKNNYGFAXEM

SEQ ID NO: 5232 - protein, 475 aa, Staphylococcus aureus
SNEINTLIIGIPEHLNQLERISFNHIDITESLERLKHQHIIGSKVGKIYTTAFDVQDQTYRLITVGLGNLKTRSYQDMLKIWGHLFQYIKSEHIEDTYLLMDSFISKYDQLSDVLMACGIQSERATYEFDHYKSSKKAPFKTNLNLISESLIELDFIHEGISIGQSINLARDFSNMPPNVLTPQTFAEDIVNHFKNTKVKVEVKDYDTLVSEGFGLLQAVGKGSKHKPRLVTITYNGKDKDEVPIALVGKGITYDSGGYSIKTKNGMATMKYDMCGAANVVGIIEAASRLQLPVNIVGVLACAENMINEASMKPDDVFTALSGETVEVMNTDAEGRLVLADAVYYANQYQPSVIMDFATLTGAAIVALGDDKAAAFESNSKVILNDILQISSKVDEMVFELPITATERASIKHSDIADLVNHTNGQGKALFAASFVTHFSGQTPHIHFDIAGPATTNKASYNGPKGPTGFMIPTI

SEQ ID NO: 5233 - protein, 437 aa, Staphylococcus aureus
MAKHPFEQFNLESSLIDAVKDLNFEKPTEIQNRIIPRILKRTNLIGQSQTGTGKSHAFLLPLMQLIDSEIKEPQAIVVAPTRELAQQLYDAANHLSQFKAGVSVKVFIGGTDIEKDRQRCNAQPQLIIGTPTRINDLAKTGHLHVHLASYLVIDEADLMIDLGLIEDVDYIAARLEDNANIAVFSATIPQQLQPFLNKYLSHPEYVAVDSKKQNKKNIEFFLIPTKGAAKVEKTLNLIDILNPYLCIIFCNSRDNANDLARSLNEAGIKVGMIHGGLTPRERKQQMKRIRNLEFQYVIASDLASRGIDIEGVSHVINFDVPNDIDFFTHRVGRTGRGNYKGVAITLYSPDEEHNISLIEDRGFVFNTVDIKDGELKEVKAHNQRQARMRKDDHLTNQVKNKVRSKIKNKVKPGYKKKFKQEVEKMKRQERKQFSKQQ

SEQ ID NO: 5234 - protein, 92 aa, Staphylococcus aureus
MARSIKKGPFVDEHLMKKVEAQEGSEKKQVIKTWSRRSTIFPNFIGHTFAVYDGRKHVPVYVTEDMVGHKLGEFAPTRTFKGHVADDKKTRR

SEQ ID NO: 5235 - protein, 112 aa, Staphylococcus aureus
MEAKAVARTIRIAPRKVRLVLDLIRGKNAAEAIAILKLTNKASSPVIEKVLMSALANAEHNYDMNTDELVVKEAYANEGPTLKRFRPRAQGRASAINKRTSHITIVVSDGKE

SEQ ID NO: 5236 - protein, 216 aa, Staphylococcus aureus
VGQKINPIGLRVGIIRDWEAKWYAEKDFASLLHEDLKIRKFIDNELKEASVSHVEIERAANRINIAIHTGKPGMVIGKGGSEIEKLRNKLNALTDKKVHINVIEIKKVDLDARLVAENIARQLENRASFRRVQKQAITRAMKLGAKGIKTQVSGRLGGADIARAEQYSEGTVPLHTLRADIDYAHAEADTTYGKLGVKVWIYRGEVLPTKNTSGGG

SEQ ID NO: 5237 - protein, 156 aa, Staphylococcus aureus
MPRKGSVPKRDVLPDPIHNSKLVTKLIIKIMLDGKRGTAQRILYSAFDLVEQRSGRDALEVFEEAINNIMPVLEVKARRVGGSNYQVPVEVRPERRTTLGLRWLVNYARLRGEKTMEDRLANEILDAANNTGGAVKKREDTHKMAEANKAFAHYRW

SEQ ID NO: 5238 - protein, 693 aa, Staphylococcus aureus
MAREFSLEKTRNIGIMAHIDAGKTTTTERILYYTGRIHKIGETHEGASQMDWMEQEQDRGITITSAATTAAWEGHRVNIIDTPGHVDFTVEVERSLRVLDGAVTVLDAQSGVEPQTETVWRQATTYGVPRIVFVNKMDKLGANFEYSVSTLHDRLQANAAPIQLPIGAEDEFEAIIDLVEMKCFKYTNDLGTEIEEIEIPEDHLDRAEEARASLIEAVAETSDELMEKYLGDEEISVSELKEAIRQATTNVEFYPVLCGTAFKNKGVQLMLDAVIDYLPSPLDVKPIIGHRASNPEEEVIAKADDSAEFAALAFKVMTDPYVGKLTFFRVYSGTMTSGSYVKNSTKGKRERVGRLLQMHANSRQEIDTVYSGDIAAAVGLKDTGTGDTLCGEKNDIILESMEFPEPVIHLSVEPKSKADQDKMTQALVKLQEEDPTFHAHTDEETGQVIIGGMGELHLDILVDRMKKEFNVECNVGAPMVSYRETFKSSAQVQGKFSRQSGGRGQYGDVHIEFTPNETGAGFEFENAIVGGVVPREYIPSVEAGLKDAMENGVLAGYPLIDVKAKLYDGSYHDVDSSEMAFKIAASLALKEAAKKCDPVILEPMMKVTIEMPEEYMGDIMGDVTSRRGRVDGMEPRGNAQVVNAYVPLSEMFGYATSLRSNTQGRGTYTMYFDHYAEVPKSIAEDIIKKNKGE

SEQ ID NO: 5239 - protein, 288 aa, Staphylococcus aureus
MNKLIDEVNNELSVAINKSVMDTQLEESMLYSLNAGGKRIRPVLLLLTLDSLNTEYELGMKSAIALEMIHTYSLIHDDLPAMDNDDYRRGKLTNHKVYGEWTAILAGDALLTKAFELISSDDRLTDEVKIKVLQRLSIASGHVGMVGGQMLDMQSEGQPIDLETLEMIHKTKTGALLTFAVMSAADIANVDDATKEHLESYSYHLGMMFQIKDDLLDCYGDEAKLGKKVGSDLENNKSTYVSLLGKDGAEDKLTYHRDAAVDELMQIDEQFNTKHLLEIVDLFYSRDH

SEQ ID NO: 5240 - protein, 438 aa, Staphylococcus aureus
YLSVSALTKYIKYKFDQDPHLQSVLIKGELSNFKKHSSGHLYFNVKDKESVISAMMFKGSASKLNFEPKEGDEVLLEARVSVFERRGNYQIYVNKMQLDGIGNLYQKLEALKKKLTEEGCFDKANKKSIPKFPKKIAVLTASTGAAIRDIHSTINSRFPLAEQIQISTLVQGEKAKDDIIEKIEYADSLGVDTIIVGRGGGSIEDLWNFNEEAVVRAIYNCKTPIISAVGHETDFTLSDFAADIRAATPTQAAVIATPDQYELLQQIQQYQFTLTRFIKKHLEQQRKHVEHLSSYYKFKQPTLLYDQQIQRRDDLEKRLKQQIQVTFEQQRHRLILLQQRYNLKALLSSVNQEQQNNLQLTNQLVKLLNSKILSYKNDLKNKVENLNNLSPTNTMLRGYAIVNKKDEVITSTKDLTENDQLTLTMKDGLVDAKVTKVR

SEQ ID NO: 5241 - protein, 147 aa, Staphylococcus aureus
MSIEGHKEHIISKNTAKDERTSEFEVSKLNGKIDGKIDVYIDEKVNGKPFKYDHHYNITYKFNGPTDVAGANAPGKDDKNSASGSDKGSDGATTGQSESNSSNKDKVENPQTNAGTPAYIYAIPVASLALLIAITLFVRKKSKGNVE

SEQ ID NO: 5242 - protein, 184 aa, Staphylococcus aureus
MSDIINETKSRMQKSIESLSRELANISAGRANSNLLNGVTVDYYGAPTPVQQLASINVPEARLLVISPYDKTSVADIEKAIIAANLGVNPTSDGEVIRIAVPALTEERRKERVKDVKKIGEEAKVSVRNIRRDMNDQLKKDEKNGDITEDELRSGTEDVQKATDNSIKEIDQMIADKEKDIMSV

SEQ ID NO: 5243 - protein, 80 aa, Staphylococcus aureus
TEEDDIDVKVKDNESKLGGFDWFKRKTNKKDTHENEVESTDEEIYQSEDNHQEHKQNHEHVQDKDKEESKFKKLMKSLFE

SEQ ID NO: 5244 - protein, 596 aa, Staphylococcus aureus
FTKYKKMRYMPGLDGLRAIAVLGIIIYHLNKQWLTGGFLGVDTFFVISGYLITSLLLKEYDDTGIIKLKSFWIRRLKRLLPAVIVLLMVVGTATLLLKSDNIIRVKHDIIAAIFYVSNWWYIAKDVNYFEQFSFMPLKHLWSLAIEEQFYIFFPVILVTLLLTIKKRYKIGFIFWGVSIISLGLMMFIYSINGDHSRVYFGTDTRLQTLLLGVILAFLWPPFKLKNDPPKVVKYVIDSIGSLSFIVLILLFFIINDETNWIYDGGFYLISILTLFIIASVVHPSTWIAKIFSNPVLVFIGKRSYSLYLWHFAVISFVHSYYVDGQIPVYVYFIDISLTIIFAELSYRFIETPFRKEGIKALNWRPSYIPQFIRMAIVVTLLIPFMLILVGAFNKYGKDIIGEKANSFDTTIEDNYLMRIAPIDNIHIDGLVSEKKKESSDVYNNIKPLLIGDSVMVDIGESFKSSVPKSRIDGKVGRQLYQTLPLVKANYSQYKKSSDQVVLELGTNGDFTVKQLDDLLNQFGKAKIYLVNTRVPRIYEANVNRLLADAAKRKSNVTLIDWYKRSQGHSEYFAPDGVHLEYKGVLALKDEILKALK

SEQ ID NO: 5245 - protein, 106 aa, Staphylococcus aureus
ALSMPKVYGSLIDTETRCRHYFTEEDIIAIKFKCCNKYYPCYKCHNEFEKHAIKRWSEPSFNEKAILCGVCKHELTINEYMMVERCPNCQSRFNNRCKYHYHIYFE

SEQ ID NO: 5246 - protein, 296 aa, Staphylococcus aureus
MSVFIDKNTKVMVQGITGSTALFHTKQMLDYGTKIVAGVTPGKGGQVVEGVPVFNTVEEAKNETGATVSVIYVPAPFAADSILEAADADLDMVICITEHIPVLDMVKVKRYLQGRKTRLVGPNCPGVITADECKIGIMPGYIHKKGHVGVVSRSGTLTYEAVHQLTEEGIGQTTAVGIGGDPVNGTNFIDVLKAFNEDDETKAVVMIGEIGGTAEEEAAEWIKANMTKPVVGFIGGQTAPPGKRMGHAGAIISGGKGTAEEKIKTLNSCGVKTAATPSEIGSTLIEAAKEAGIYES

SEQ ID NO: 5247 - protein, 422 aa, Staphylococcus aureus
LAKLARKASRAVGKRGTDLPGQIARKVDTDILRKLAEQVDDIVFISGTNGKTTTSNLIGHTLKANNIQIIHNNEGANMAAGITSAFIMQSTPKTKIAVIEIDEGSIPRVLKEVTPSMMVFTNFFRDQMDRFGEIDIMVNNIAETISNKGIKLLLNADDPFVSRLKIASDTIVYYGMKAHAHEFEQSTMNESRYCPNCGRLLQYDYIHYNQIGHYHCQCGFKREQAKYEISSFDVAPFLHLNINDEKYDMKIAGDFNAYNALTAYTVLRELGLNEQAIKNGFETYTSDNGRMQYFKKERKEAMINLAKNPAGMNASLSVGEQLEGEKVYVISLNDNAADGRDTSWIYDADFEKLSKQQIEAIIVTGTRAEELQLRLKLAEVEVPIIVERDIYKATAKTMDYKGFTSAIPNYTSLAPMLEQLNR

SEQ ID NO: 5248 - protein, 358 aa, Staphylococcus aureus
MRNVKQIATKSIIAIISLGILTYTTMIGSVLADEIKYPSAKFNQPEAKDKTELTSSIFDEKIKENKALELLIFNQENKNVTEEQQLVDEKAQLISDMTGKIYLQVKLKGQIEKEQLVFQNDKNEEFPFVIKGEKDDTIVRILIEQHMDKINMHVKTLAEKKDLDNKEMVYSIHFKEKKVQHDDAKEVPSKHQNQENNQDKLKKDIDDKKDSQKSDIKERRTSLFTEKGLNDIPVQKDKVQQDSNKKIENERPKASGTLKVENSPPTVKKVENDHKEQPKHKDEKSKKEKKKVVEKEKALPAFNRDDDSKNSSQLSSDIKELDEPNHKKQYMLFAAGIVLATILLISAHLYSRKRGNQV

SEQ ID NO: 5249 - protein, 319 aa, Staphylococcus aureus
KCVNRNIVKLVVFMLIFVVAVAGCGQKDTEEKTEMTTIKDELGTEKIKKNPKRVVVLEYSFADYLAALDMKPVGIADDGSSKNITKSVRDKVGAYESVGSRPQPNMEVISKLKPDLIIADVSRHKKIKSELSKIAPTIMLVSGTGDYNANIDAFKTVAKAVGKEKEGEKRLEKHDKILAEIRKKIEQSTLKTAFAFGISRAGMFINNEDTFMGQFLIKMGIQPEVTKDKTTHVGERKGGPYIYLNNEELANINPKVMILATDGKTDKNRTKFIDPAVWKSLKAVKDNKVYDVDRNKWLKSRGIIASESMAEDLEKIAEK

SEQ ID NO: 5250 - protein, 388 aa, Staphylococcus aureus
NQLAKYKQDHLCEYEKIMSNNEKEALEEKVASLDLDFIAKLYNDLYINKRTIDDVSAVSEVKYDIKSQMSDDEIKRIEDQGLQAIKEGQFAVLLMAGGQGTRLGYKGPKGSFEIEGVSSFELQANQLQTLNHQSGHTIQWYIMTSDINHEEALANCKAHSYLGNDQKPIPLFKQDNIGALSKEGKLFLNQQGRIMETPNGNGGVFKSLDKAGYLEEMSNNGVKYIFLNNIDNVLVKVLDPLFAGFTVEHDYDITSKTIQPKPGESVGRLVNVDCKDTVLEYSELDPEVANQFNNANIGIHAFKLGFILNAVNRELPYHLAIKNLKQLDENFGVIEQPTLKFELFYFDIFTYGTSFVTLQVPREEEFSPLKNKEGKDSVATATEDLRRM

SEQ ID NO: 5251 - protein, 996 aa, Staphylococcus aureus
MKPLHLKLNNFGPFLKEEIDFSKIDNNELFLISGKTGSGKTMIFDAMTYALFGKASTEQREENDLRSHFADGKQPMSVTFEFQLNHRIYKVHRQGPYIKEGNTTKTNAKFDVFEMVDGKYEIRESKVISGTQFIIELLGVNADQFRQLFILPQGEFKRFLISNSREKQGILRTLFDSEKFEAIREILKEEVKKEKAQIENRYQQIDLLWQEIESFDDDKIKGLLEVATQQIDKVIENIPLLQARSKEILAFVNESKETAIKEYEIIEKKTLENNILKDNINQLNKNKIDFVQLKEQQPEIEEIEAKLKLLQDITNLLNYIENREKIETKIAKSKKDISETNNKILNLDCDKRNIDKEKKMLEENGDLIESKISFIDKTRVLFNDINKYQQSYLNIERLRTEDEQLGDELNNLIKGLEKVEDSIGNNESDYEKIIELNNAITNINNEINVIKENEKAKDELDKLLGSKQELENQINEEKTILKNLEIKLDRYDKSKLDLNDKESFISEIKSAVKIGDQCPICGNEIQDLGHHIDFDSIAKRQNEIKEIEANIHTMESNIAVHNSEIKFVNEKISNINIKTQSDLSLEVLNKRLLENENALNNQRDLNKFIEQMKEEKDNLTLQIHNKQLRLNKNESELKICRNLITEFETLSKYNNITNFEVDYKKYIQDVNQHQEHSNQIEDKLIQLSQRKLIEQNNLNHYENQLETYNNDLELNEQSIEMEMSRLNLTDDNDINEIIAWRGEQEELEQKRDTYKKRYHEFEMEIARLESLTKDKELLDSDKLKDDYELKKGKMNTLIDEYSAVHYQCQNNIKKTQSIVSHINYLNQELKDQQEIFQLAEILSGKNNKNLTLENFVLIYYLDQIIAQANLRLATMSDNRYQLIRREAVSHGLSGLEIDVFDLHSNKSRHISSLSGGETFQSSLALALGLSEIVQQQSGGISLESIFIDEGFGTLDQETLETVLDTLLNLKSTGRMVGIISHVSELKNRIPLVLEVK

SEQ ID NO: 5252 - protein, 236 aa, Staphylococcus aureus
MAVISMKQLLEAGVHFGHQTRRWNPKMKKYIFTERNGIYIIDLQKTVKKVDEAYNFLKQVSEDGGQVLFVGTKKQAQESVKSEAERAGQFYINQRWLGGLLTNYKTISKRIKRISEIEKMEEDGLFEVLPKKEVVELKKEYDRLIKFLGGIRDMKSMPQALFVVDPRKERNAIAEARKLNIPIVGIVDTNCDPDEIDYVIPANDDAIRAVKLLTAKMADAILEGQQGVSNEEVAAE

SEQ ID NO: 5253 - protein, 140 aa, Staphylococcus aureus
VAKKVDKVVKLQIPAGKANPAPPVGPALGQAGVNIMGFCKEFNARTQDQAGLIIPVEISVYEDRSFTFITKTPPAPVLLKKAAGIEKGSGEPNKTKVATVTKDQVREIANSKMQDLNAADEEAAMRIIEGTARSMGIVVE

SEQ ID NO: 5254 - protein, 182 aa, Staphylococcus aureus
MSEEVGAKRWYAVHTYSGYENKVKKNLEKRVESMNMTEQIFRVVIPEEEETQVKDGKAKTTVKKTFPGYVLVELIMTDESWYVVRNTPGVTGFVGSAGAGSKPNPLLPEEVRFILKQMGLKEKTIDVELEVGEQVRIKSGPFANQVGEVQEIETDKFKLTVLVDMFGRETPVEVEFDQIEKL

SEQ ID NO: 5255 - protein, 60 aa, Staphylococcus aureus
MAKKESFFKGVKSEMEKTSWPTKEELFKYTVIVVSTVIFFLVFFYALDLGITALKNLLFG

SEQ ID NO: 5256 - protein, 510 aa, Staphylococcus aureus
INELICKSILRNKQVKRRIILQNFKELGISDNTVQSLESMGFKEPTPIQKDSIPYALQGIDILGQAQTGTGKTGAFGIPLIEKVVGKQGVQSLILAPTRELAMQVAEQLREFSRGQGVQVVTVFGGMPIERQIKALKKGPQIVVGTPGRVIDHLNRRTLKTDGIHTLILDEADEMMNMGFIDDMRFIMDKIPAVQRQTMLFSATMPKAIQALVQQFMKSPKIIKTMNNEMSDPQIEEFYTIVKELEKFDTFTNFLDVHQPELAIVFGRTKRRVDELTSALISKGYKAEGLHGDITQAKRLEVLKKFKNDQINILVATDVAARGLDISGVSHVYNFDIPQDTESYTHRIGRTGRAGKEGIAVTFVNPIEMDYIRQIEDANGRKMSALRPPHRKEVLQAREDDIKEKVENWMSKESESRLKRISTELLNEYNDVDLVAALLQELVEANDEVEVQLTFEKPLSRKGRNGKPSGSRNRNSKRGNPKFDSKSKRSKGYSSKKKSTKKFDRKEKSS

SEQ ID NO: 5257 - protein, 264 aa, Staphylococcus aureus
YKVVVLDMDDTLLNSDNVISEETANYLTAIQDEGYYVVLASGRPTEGMIPTARDLKLPEHHSYIISYNGSKTINMTNEEVEVSKSIGKQDFDEIVDYCRERGFFVLTYHDGQIIYDSEHEYMNIEAELTGLPMKRVDDIKAYIQGDVPKVMGVDYVANITEARIDLNGVFNDNVDATTSKPFFLEFMAKDVSKGNAIKALCHKLGYSVDQVIAFGDSMNDKSMFEVAGLAIAMGNASDELKQYADEITLDHNENGIPHALKKLL

SEQ ID NO: 5258 - protein, 308 aa, Staphylococcus aureus
  VARIANT (1)...(308): Xaa = Any Amino Acid
VLELTIPASTANLGVGFDSIGMALDKFLHLSVKETSGTKWEYIFHDDASKQLPTDETNFIYHVAQQVAAKYSVDLPNLCIEMRSDIPLARGLGSSASALVGAIYIANYFGDIQLSKHEVLQLATEIEGHPDNVAPTIYGGLIAGYYNDVSKETSVAHIDIPDVDVIVTIPTYELKTEASRRALPQKLTHSEAVKSSAISNTMICALAQHNYELAGKLMQQDGFHEPYRQHLIAEFDEVKTIASQHNAYATVISGAGPTILIFSRKENSGELVRALNRNVVTCHSELVDINVSGVKERIVYQXTLYIVK

SEQ ID NO: 5259 - protein, 230 aa, Staphylococcus aureus
LYQHGTLGTLMAGLLEGTATINELLEHGNLGIATLTGSDGEVIFLDGKAYHANEHKEFIELKGDEKVPYASITNFKASKTFPLQQLSQDDVFAQIKNEMLSENLFSAVKIYGTFKHMHVRMMPAQQPPYTRLIDSARRQPEEKRQDIRGAIVGFFTPELFHGVGSAGFHIHFADDERAYGGHVLDFEVDDVVVEIQNFETFQQHFPVNNETFVKAKIDYKDVAEEIREAE

SEQ ID NO: 5260 - protein, 604 aa, Staphylococcus aureus
REDVRNIAIIAHVDHGKTTLVDELLKQSGIFRENEHVDERAMDSNDIERERGITILAKNTAVDYKGTRINILDTPGHADFGGEVERIMKMVDGVVLVVDAYEGTMPQTRFVLKKALEQNLKPVVVVNKIDKPSARPEGVVDEVLDLFIELEANDEQLEFPVVYASAVNGTASLDPDKQDDNLQSLYETIIDYVPAPIDNSDEPLQFQVALLDYNDYVGRIGIGRVFRGKMRVGDNVSLIKLDGTVKNFRVTKIFGYFGLKRLEIEEAQAGDLIAVSGMEDINVGETVTPHDHQEALPVLRIDEPTLEMTFKVNNSPFAGREGDFVTARQIQERLNQQLETDVSLKVSNTDSPDTWVVAGRGELHLSILIENMRREGYELQVSKPQVIIKEIDGVMCEPFERVQCEVPQENAGAVIESLGARKGEMVDMTTTDNGLTRLIFNVPARGMIGYTTEFMSMTRGYGIINHTFEEFRPRIKAQIGGRRNGALISMDQGSASTYAILGLEDRGVNFMEPGTEVYEGMIVGEHNRENDLTVNITKTKHQTNVRSATKDQTQTMNRPRILTLEEALQFINDDELVEVTPESIRLRKKILNKNVREKEAKRIK

SEQ ID NO: 5261 - protein, 294 aa, Staphylococcus aureus
LGSHVSMSGKKMLEGSAIEAHEYGETTFMIYTGAPQNTRRKSIEDLNITKGHEVMEKYGLSNIVVHAPYIINIANTTKPETFNLGVDFLQQEIERTQAIGAKDIVLHPGAHVGAGVDAGINKIIEGLNEVLTNDNNVRIALETMAGKGTEIGRSFEELARIIDGVHNNERLSVCFDTCHTHDAGYNVKEDFDGVLNEFDKIIGVDRIKVVHVNDSKNDRGAQKDRHENIGFGYIGFDALNYIVHHNSFKDIPKILETPYVGEDKKNKKPPYKLEIEMLKQQQFDPELKNKVMQQ

SEQ ID NO: 5262 - protein, 669 aa, Staphylococcus aureus
MGKIKELQTSLANKIAAGEVVERPSSVVKELLENAIDAGATEISIEVEESGVQSIRVVDNGSGIEAEDLGLVFHRHATSKLDQDEDLFHIRTLGFRGEALASISSVAKVTLKTCTDNANGNEIYVENGEILNHKPAKAKKGTDILVESLFYNTPARLKYIKSLYTELGKITDIVNRMAMSHPDIRIALISDGKTMLSTNGSGRTNEVMAEIYGMKVARDLVHISGDTSDYHIEGFVAKPEHSRSNKHYISIFINGRYIKNFMLNKAILEGYHTLLTIGRFPICYINIEMDPILVDVNVHPTKLEVRLSKEEQLYQLIVSKIQEAFKDRILIPKNNLDYVPKKNKVLHSFEQQKIEFEQRQNTENNQEKTFSSEESNSKPFMAENQNDEIVIKEDSYNPFVTKTSESLIADDESSGYNNTREKDEDYFKKQQEILQEMDQTFDSNDDTSVQNYENKASDDYYDVNDIKGTKSKDPKRRIPYMEIVGQVHGTYIIAQNEFGMYMIDQHAAQERIKYEYFRDKIGEVTNEVQDLLIPLTFHFSKDEQLVIDQYKNELQQVGIMLEHFGGHDYIVSSYPVWFPKDEVEEIIKDMIELILEEKKVDIKKLREDVAIMMSCKKSIKANHYLQKHEMSDLIDQLREAEDPFTCPHGRPIIINFSKYELEKLFKRVM

SEQ ID NO: 5263 - protein, 300 aa, Staphylococcus aureus
KKIRKLPIILLIVVILLIALVVYIVHSYNSGVEYAKKHAKDVKVHQFNGPVKNDGKISILVLGADKAQGGQSRTDSIMVVQYDFINKKMKMMSVMRDIYADIPGYGKHKINSAYALGGPELLRKTLDKNLGINPEYYAVVDFTGFEKMIDELMPEGVPINVEKDMSKNIGVSLKKGNHRLNGKELLGYARFRHDPEGDFGRVRRQQQVMQTLKKEMVNFRTVVKLPKVAGILRGYVNTNIPDSGIFQTGLSFGIRGEKDVKSLTVPIKNSYEDVNTNTDGSALQINKNTNKQAIKDFLDE

SEQ ID NO: 5264 - protein, 230 aa, Staphylococcus aureus
LYQHGTLGTLMAGLLKGTASINELLQHGDLGIATLTGSNGEVIFLDGKAYHANEHKEFVELKGNELTPYATVTKFVADTSYETKDKSSEAVFAEIKEKMLSENLFSAVKISGLFKKMHVRMMPAQEPPYTRLIDSARRQPEQTETYVKGSVVGFFTPELFHGIGSAGFHVHFANDDRNFGGHVLDFEVEDVKVEIQNIETFEQHFPIQDEDFINANIDYKDIADEIREAE

SEQ ID NO: 5265 - protein, 374 aa, Staphylococcus aureus
MEKLKLMTIVGTRPEIIRLSSTIKACDQYFNQILVHTGQNYDYTLNQIFFDDLELRQPDHYLEAVGSNFGETMGNIIAKTYDVLLREQPDALLILGDTNSCLAAVSAKRLKIPVFHMEAGNRCFDQNVPEEINRKIVDHVSDVNLPYTEHSRRYLLDEGFNKANIFVTGSPMTEVIEAHRDKINHSDVLNKLGLEPQQYILVSAHREENIDNEKNFKSLMNAINDIAKKYKMPVIYSTHPRSWKKIEESKFEFDPLVKQLKPFGFFDYNALQKDAFVVLSDSGTLSEESSILKFPGVLIRTSTERPEVLDKGTVIVGGITYNNLIQSVELAREMQNNNEPMIDAIDYKDTNVSTKVVKIIQSYKDIINRNTWRK

SEQ ID NO: 5266 - protein, 528 aa, Staphylococcus aureus
  VARIANT (1)...(528): Xaa = Any Amino Acid
LHKKLWSIANDLRGNMDASEFRNYILGLIFYRFLSEKAEQEYADALSGEDITYQEAWADEEYREDLKAELIDQVGYFIEPQDLFSAMIRDIETQDFDIEHLATAIRKVETSTLGEESENDFIGLFSDMDLSSTRLGNNVKERTALISKVMVNLDDLPFVHSDMEIDMLGDAYEFLIGRFAATAGKKAGEFYTPQQVSKILAKIVTDGKDKLRHVYDPTCGSGSLLLRVGKETQVYRYFGQERNNTTYNLARMNMLLHDVRYENFDIRNDDTLENPAFLGHTFDAVIANPPYSAKWTADSKFENDERFSGYGKLAPKSKADFAFIQHMVHYLDDEGTMAVVLPHGVLFRGAAEGVIRRYLIEEKNYLEAVIGLPANIFYGTSIPTCILVFKKCRQQDDNVLFIDASNDFEKGKNQNHLSDAQVERIIDTYKRKETIDKYSYSATLQEIADNDYNLNIPRYVDTFEEEAPIDLDQVQQDLKNIDKEIAEIEQEINAYLKELGVLKDEXYTKEKCARVEIPRVXRRVGREE

SEQ ID NO: 5267 - protein, 312 aa, Staphylococcus aureus
  VARIANT (1)...(312): Xaa = Any Amino Acid
MFKKKMLAATLSVGLIAPLASPIQESRANTNIENIGDGAEVIKRTEDVSSKKWGVTQNVQFDFVKDKKYNKDALIVKMQGFINSRTSFSDVKGSGYELTKRMIWPFQYNIGLTTKDPNVSLINYLPKNKIETTDVGQTLGYNIGGNFQSAPSIGGNGSFNYSKTISYTQKSYVSEVDKQNSKSVKWGVKANEFVTPDGKKSAHDRYLFVQSPNGPSGSAREYFAPDNQLPPLVQSGFNPSFITTLSHEKGSKXIRVNLKFHMGRNVDITYATLFPRTGIYAERKHNAFVNRNFVVRYEVNWKTHEIKVKGHN

SEQ ID NO: 5268 - protein, 133 aa, Staphylococcus aureus
NDAIKILKENGLKYTDKRKDMLDIFVEEDKYINAKYIQQVMDENYPGISFDTIYRNLHLFKDLGIIENTELDGEMKFRIACTNHHHHHFICEKCGDTKVIDYCPIDQIKLSLPGVNIHKHKLEVYGVCESCQD

SEQ ID NO: 5269 - protein, 295 aa, Staphylococcus aureus
MGLVIEHVTKRFGKMTAVNDISLELESGKMLGFLGRNGAGKTTTFRMILGLSEPTEGHITYNGKKLDKTMYNRIGYLPEERGLHGKLTVEEELKYLATLKGMSKTEIQQQISYWLERFDITENRKKRIDSLSKGNQQKIQLLASMLHKPELLILDEPFSGLDPVNVELLKEAVKDLNDWGSTIVYSSHRMEHVEELCDDVCILDKGQLVVSGDINHVRASNGNKKVVIESETTLPDLTHIRGIIHSENMKQGIQLTIENEDVAKDIYQVVAHQGYVKRFQVVEPSLQDIFIEKVG

SEQ ID NO: 5270 - protein, 495 aa, Staphylococcus aureus
MSEEMNDQMLVRRQKLQELYDLGIDPFGSKFDRSGLSSDLKEEWDQYSKEELVEKEADSHVAIAGRLMTKRGKGKAGFAHVQDLAGQIQIYVRKDQVGDDEFDLWKNADLGDIVGVEGVMFKTNTGELSVKAKKFTLLTKSLRPLPDKFHGLQDIEQRYRQRYLDLITNEDSTRTFINRSKIIQEMRNYLNNKGFLEVETPMMHQIAGGAAARPFVTHHNALDATLYMRIAIELHLKRLIVGGLEKVYEIGRVFRNEGVSTRHNPEFTMIELYEAYADYHDIMDLTESMVRHIANEVLGSAKVQYNGETIDLESAWTRLHIVDAVKEATGVDFYEVKSDEEAKALAKEHGIEIKDTMKYGHILNEFFEQKVEETLIQPTFIYGHPTEISPLAKKNPEDPRFTDRFELFIVGREHANAFTELNDPIDQKGRFEAQLVEKAQGNDEAHEMDEDYIEALEYGMPPTGGLGIGIDRLVMLLTDSPSIRDVLLFPYMRQK

SEQ ID NO: 5271 - protein, 163 aa, Staphylococcus aureus
MSAIIEAKKQLVDEIAEVLSNSVSTVIVDYRGLTVAEVTDLRSQLRETGVEYKVYKNTMVRRAAEKAGIEGLDEFLTGPTAIATSSEDAVAAAKVISGFAKDHEALEIKSGVMEGNVITAEEVKTVGSLPSHDGLVSMLLSVLQAPVRNFAYAVKAIGEQKEE

SEQ ID NO: 5272 - protein, 120 aa, Staphylococcus aureus
NHEQIIEAIKEMSVLELNDLVKAIEEEFGVTAAAPVAVAGAAGGADAAAEKTEFDVELTSAGSSKIKVVKAVKEATGLGLKDAKELVDGAPKVIKEALPKEEAEKLKEQLEEVGATVELK

SEQ ID NO: 5273 - protein, 419 aa, Staphylococcus aureus
MKFTELTVTEFDNFVQNPSLESHYFQVKENIVTRENDGFEVVLLGIKDDNNKVIVASLFSKIPTMGSYVYYSNRGPVMDFSDLGLVDYYLKELDKYLQQHQCLYVKLDPYWLYHLYDKDIVPFEGREKNDALVNLFKSHGYEHHGFTTEYDTSSQVRWMGVLNLEGKTPETLKKTFDSQRKRNINKAINYGVKVRFLERDEFNLFLDLYRETEERAGFVSKTDDYFYNFIDTYGDKVLVPLAYIDLDEYVLKLQQELNDKENRRDQMMAKENKSDKQMKKIAELDKQIDHDQHELLNASELSKTDGPILNLASGVYFANAYEVNYFSGGSSEKYNQFMGPYMMHWFMINYCFDNGYDRYNFYGLSGDFTENSEDYGVYRFKRGFNVQIEELIGDFYKPIHKVKYWLFTTLDKLRKKLKK

SEQ ID NO: 5274 - protein, 871 aa, Staphylococcus aureus
MSNVTPMMQQYLKIKSEYQDCLLFFRLGDFYEMFYEDAKEASRVLEITLTKRDAKKENPIPMCGVPYHSADSYIDTLVNNGYKVAICEQMEDPKQTKGMVRREVVRIVTPGTVMEQGGVDDKQNNYILSFVMNQPEIALSYCDVSTGELKVTHFNDEATLLNEITTINPNEVVINDNISDHLKRQINMVTETITVRETLSSEIYSVNQTEHKLMYQATQLLLDYIHHTQKRDLSHIEDVVQYAAIDYMKMDFYAKRNLELTESIRLKSKKGTLLWLMDETKTPMGARRLKQWIDRPLISKEQIEARLDIVDEFSAHFIERDTLRTYLNQVYDIERLVGRVSYGNVNARDLIQLKHSISEIPNIKALLNSMNQDTLVQVNQLEPLDDLLDILEQSLVEEPPISVKDGGLFKVGFNMQLDEYLEASKNGKTWLAELQAKERQRTGIKSLKISFNKVFGYFIEITRANLQNFEPSEFGYMRKQTLSNAERFITDELKEKEDIILGAEDKAIELEYQLFVQLREKVKKYTERLQQQAKIISELDCLQSFAEIAQKYNYTRPSFSENKTLELVESRHPVVERVMDYNDYVPNNCRLDNETFIYLITGPNMSGKSTYMRQVAIISIMAQMGAYVPCKEAVLPIFDQIFTRIGAADDLVSGKSTFMVEMLEAQKALTYATEDSLIIFDEIGRGTSTYDGLALAQAMIEYVAETSHAKTLFSTHYHELTTLDQALPSLKNVHVAANEYNGELIFLHKVKDGAVDDSYGIQVAKLADLPEKVISRAQVILSEFEASADKKSSISNLKMVENEPEINQENSNLSVEETTDTLSQKDFEQASFDLFENDQESEIELQIKNLNLSNMTPIEALVKLSELQNQL

SEQ ID NO: 5275 - protein, 203 aa, Staphylococcus aureus
LNVYFICGTSDVPSHRTIHEVLEAALKAGITLFQFREKGESALKGNDKLVLAKELQHLCHQYDVPFIVNDDVSLAKEINADGIHVGQDDAKVKEIAQYFTDKIIGLSISDLGEYAKSDLTHVDYIGVGPIYPTPSKHDAHTPVGPEMIATFKEMNPQLPIVAIGGINTSNVAPIVEAGANGISVISAISKSENIEKTVNRFKD

SEQ ID NO: 5276 - protein, 222 aa, Staphylococcus aureus
KGIIHIFHGMAEHMERYDKLAHALSKDGFDVIRHNHRGHGINIDESTRGHYDDMKRVIGDAFEVAQTVRGNVDKPYIIIGHSMGSVIARLFVETYPQYVDGLILSGTGMYPLWKGLPTVKVLQLITKIYGAEKRVEWVNQLVSNSFNKKIRPLRTQSDWISSNPTEVDNFIKDPYSGFNVSNQLLYQTAYYMLHTSQLKNIKKLNHAMPILLVSGYDDPLGD

SEQ ID NO: 5277 - protein, 372 aa, Staphylococcus aureus
KRMKIGITCYPSMGGSGIIATELGIKLAERGHEVHFITSNIPFRIRKPLPNMIFHQVEVNQYAVFQYPPYDITLSTKIAEVIKEYDLDLLHMHYAVPHAICGILAREMSGKDIKIMTTLHGTDITVLGYDHSLQGAIKFGIEKSDIVTSVSKSLAQETHEIIETNKEIIPIYNFVRENEFPTKHNTALKAQFGIAPDEKVLIHVSNFRQVKRIDTIIETFAKVREKIPSKLILLGDGPELVPMRQKTKELNVEEDVLFLGKQDCVSEFYQLSDLVLLLSEKESFGLTLLEAMKTGVVPIGSNAGGIKEVIKHGETGFVVDVGDCDSASDYAIRLLEDKVLYNKLQKNMLADIAERFGSELITDQYEYYYQKM

SEQ ID NO: 5278 - protein, 261 aa, Staphylococcus aureus
VIGNPISHSLSPVMHRANFNSLGLDDTYEALNIPIEDFHLIKEIISKKELDGFNITIPHKERIIPYLDHIDEQAINAGAVNTVLIKDGKWIGYNTDGVGYVKGLHSVYPDLENAYILILGAGGASKGIAYELAKFVKPKLTVANRTMARFESWNLNINQISLADAEKYLAEFDIVINTTPAGMAGNNESIINLKHLSPNTLMSDIIYIPYKTPILEEAERKGNHIYNGLDMFVYQGAESFKIWTNKDADINSMKTAVLQQL

SEQ ID NO: 5279 - protein, 1212 aa, Staphylococcus aureus
VTIVFGITTYFSEKKKYNKDVEKREKDYKAYLDNKSKEINKAIKAQRFSLNYHYPTVAEIKDIVETKAPRIYEKTSHHHDFLHYKLGIANVEKSFELDYQEEEFNQRRDELFDDAKELYEFYTDVEQAPLINDLNHGPIAYIGARHLILEELEKMLIQLSTFHSYHDLEFLFVTREDEVETLKWARWLPHMTLRGQNIRGFVYNQRTRDQILTSIYSMIKERIQAVRERSRSNEQIIFTPQLVFVITDMSLIIDHVILEYVNQDLSEYGISLIFVEDVIESLPEHVDTIIDIKSRTEGELITKEKELVQLKFTPENIDNVDKEYIARRLANLIHVEHLKNAIPDSITFLEMYNVKEVDQLDVVNRWRQNETYKTMAVPLGVRGKDDILSLNLHEKAHGPHGLVAGTTGSGKSEIIQSYILSLAINFHPHEVAFLLIDYKGGGMANLFKDLVHLVGTITNLDGDEAMRALTSIKAELRKRQRLFGEHDVNHINQYHKLFKEGVATEPMPHLFIISDEFAELKSEQPDFMKELVSTARIGRSLGIHLILATQKPSGVVDDQIWSNSKFKLALKVQDRQDSNEILKTPDAADITLPGRAYLQVGNNEIYELFQSAWSGATYDIEGDKLEVEDKTIYMINDYGQLQAINKDLSGLEDEETKENQTELEAVIDHIESITTRLEIEEVKRPWLPPLPENVYQEDLVETDFRKLWSDDAKEVELTLGLKDVPEEQYQGPMVLQLKKAGHIALIGSPGYGRTTFLHNIIFDVARHHRPDQAHMYLFDFGTNGLMPVTDIPHVADYFTVDQEDKIAKAIRKIHDIISERKRLLSQERVVNIEQYNKETGNSIPNVFLIIDNYDTVKESPFMEEYEEMMSKVTREGLALGVYIVLSGSRSSAIKSAIFTNIKTRVALYLFENNELTNIIGSYKKGVKDVKGRAAINDDNFTQFQIAQPFELADGQTYNERIKNEVAQMKEFYVGDYPKHIPMMPDKVLMEDIQETYDLEKIIHEEHKLPLGLDFEDVELVSLDLTSSSIVTAIKPTEMEKMNDVIMSSLSVYSKNQFVILVDAEDNMSQYAEDVTSYYSAPSDLSNIRLGFKQEIEARKNGEKSIEECKIVFINNIKRFNQLTGMTEAELRVLFHDGQKVHIIIIASGLYSDTIGAFDRESKMMVRTINQALISHKISEQEFIRVKDRFGEPELKVGEMYYINNQEYQKIKL

SEQ ID NO: 5280 - protein, 657 aa, Staphylococcus aureus
DQLAVDTLRALSIDTIEKANSGHPGLPMGAAPMAYTLWTRHLNFNPQSKDYFNRDRFVLSAGHGSALLYSLLHVSGSLELEELKQFRQWGSKTPGHPEYRHTDGVEVTTGPLGQGFAMSVGLALAEDHLAGKFNKEGYNVVDHYTYVLASDGDLMEGISHEAASFAGHNKLSKLVVLYDSNDISLDGELNKAFSENTKARFEAYGWNYLLVKDGNDLEEIDNAITTAKSQEGPTIIEVKTTIGFGSPNKAGTNGVHGAPLGEDERKLTFENYGLDPEKRFNVSEEVYEIFQNTMLKRANEDESQWNSLLEKYAETYPELAEEFKLAISGKLPKNYKDELPRFELGHNGASRADSGTVIQAISKTVPSFFGGSADLAGSNKSNVNDATDYSSETPEGKNVWFGVREFAMGAAVNGMAAHGGLHPYGATFFVFSDYLKPALRLSSIMGLNATFIFTHDSIAVGEDGPTHEPIEQLAGLRAIPNMNVIRPADGNETRVAWEVALESESTPTSLVLTRQNLPVLDVPEDVVEEGVRKGAYTVYGSEETPEFLLLASGSEVSLAVEAAKDLEKQGKSVRVVSMPNWNAFEQQSEEYKESVIPSSVTKRVAIEMASPLGWHKYVGTAGKVIAIDGFGASAPGDLVVEKYGFTKENILNQVMSL

SEQ ID NO: 5281 - protein, 469 aa, Staphylococcus aureus
VKRGLKDRHISMIAIGGCIGTGLFVTSGGAIHDAGALGALIGYAIIGIMVFFLMTSLGEMATYLPVSGSFSTYATRFVDPSLGFALGWNYWFNWVVTVAADITIAAQVIQYWTPLQGIPAWAWSALFLVIIFSLNSLSVRVYGESEYWLALIKVVTVIVFIAIGLLTIVGIMGGHFVGFEIFNKGEGPILGGNLGGSLLSILGVFLIAGFSFQGTELIGITAGESENPERAVPKAIKQVFWRIVLFYILAIFVIGMLIPYDSSALMGGGNDVATSPLTLVFKNAGFAFAASFMNAVILTSVLSAGNSGMYASTRMLYSMSKDKLAFETFGKTNKNGVPYMSLLVTAIIVVIIFVVQSVTEGAYQYIVAASGLTGFIAWVGIAVSHYRFRRAFDKQNYDKSKLKYTAKLFPFGPIFAAILCIVVIIGQDVDFIKTGDFNFSRFLITYMGIPVFLAFFIYHKLRYKTKKIP

SEQ ID NO: 5282 - protein, 201 aa, Staphylococcus aureus
LVALIVFIGMFYSVVTNQEWLENIDMGSLTWFTDYFGEPQRQYVNNLFNYYMTFSAEIGDVKGVVLISIIVTIILFIKQRHLAVWFVTYLVSGVIMNKLIKDTVLRPRPYNHLAVDTGFSFPSGHSNASTLLYFALMIIIISVAAKTITKVLSALVMGILWLSILFCRLYFHAHYFSDVIGGTSLAIIWVALFLMVYPYFI

SEQ ID NO: 5283 - protein, 435 aa, Staphylococcus aureus
MTKPIVAIVGRPNVGKSTIFNRIVGERVSIVEDTPGVTRDRIYSSGEWLTHDFNIIDTGGIEIGDAPFQTQIRAQAEIAIDEADVIIFMVNVREGLTQSDEMVAQILYKSKKPVVLAVNKVDNMEMRTDVYDFYSLGFGEPYPISGSHGLGLGDLLDAVVSHFGEEEEDPYDEDTIRLSIIGRPNVGKSSLVNAILGEDRVIVSNVAGTTRDAIDTEYSYDGQDYVLIDTAGMRKKGKVYESTEKYSVLRALKAIERSNVVLVVIDAEQGIIEQDKRVAGYAHEQGKAVVIVVNKWDTVEKDSKTMKKFEDEVRKEFQFLDYAQIAFVSAKERTRLRTLFPYINEASENHKKRVQSSTLNEVVTDAISMNPTPTDKGRRLNVFYATQVAIEPPTFVVFVNDVELMHFSYKRYLENQIRAAFGFEGTPIHIIARKR

SEQ ID NO: 5284 - protein, 390 aa, Staphylococcus aureus
MTEEFNESMINDIKEGDKVTGEVQQVEDKQVVVHINGGKFNGIIPISQLSTHHIDSPSEVVKEGDEVEAYVTKVEFDEENETGAYILSRRQLETEKSYSYLQEKLDNNEIIEAKVTEVVKGGLVVDVGQRGFVPASLISTDFIEDFSVFDGQTIRIKVEELDPENNRVILSRKAVEQEENDAKKDQLLQSLNEGDVIDGKVARLTQFGAFIDIGGVDGLVHVSELSHEHVQTPEEVVSIGQDVKVKIKSIDRDTERISLSIKDTLPTPFENIKGQFHENDVIEGVVVRLANFGAFVEIAPGVQGLVHISEIAHKHIGTPGEVLEPGQQVNVKILGIDEENERVSLSIKATLPNEDVVESDPSTTKAYLESEEEDNPTIGDMIGDKLKNLK

SEQ ID NO: 5285 - protein, 191 aa, Staphylococcus aureus
LMKEIVIASNNQGKINDFKVIFPDYHVIGISELIPDFDVEETGSTFEENAILKSEAAAKALNKTVIADDSGLEVFALNGEPGIYSARYAGENKSDEANIEKLLNKLGNTTDRRAQFVCVISMSGPDMETKVFKGTVSGEIADGKYGENGFGYDPIFYVPKLDKTMAQLSKEQKGQISHRRNAINLLQAFLE

SEQ ID NO: 5286 - protein, 117 aa, Staphylococcus aureus
MKIILKNNSDFPIYEQIKQQVKQNILKGHVAPGEHLPSMRELAKDLQVSLITTKRAYEDLEKDGFVTTIRGKGTFVKEKDSSILKEKQFFTIENLVKELVNEAQAIEMSLEELQDIL

SEQ ID NO: 5287 - protein, 350 aa, Staphylococcus aureus
RITQVHRILEQKHLDAIIILSDYNRRYLSGFTGTSGALIISKDKQYLITDFRYIDQATKQAPNYEIINRKSTIIGEIKELLHQENFENVGFEGHHVSYDTYLELNKSRISLISISNTVDKIRDVKDADEIALIQKAANIVDETYEYILTVVKAGMTEKELKAILESKMLELGADGPSFDTIVASGHRGALPHGVASDKIIEKGDMITLDFGAYYNGYCSDITRTFAIGEPDPKLKEIYQIVLESQMKAINEIRPGMTGAEADAISRNYLESKGYGKEFGHSLGHGIGLEIHEGPMLARTIQDKLQVNNCVTVEPGVYIEGLGGIRIEDDILITENGCQVFTKCTKDLIVL

SEQ ID NO: 5288 - protein, 328 aa, Staphylococcus aureus
ETLFSGIQPSGIPTIGNYIGALKQFVDVQNDYDCYFCIVDQHAITMPQDRLKLRKQTRQLAAIYLASGIDPDKATLFIQSEVPAHVQAGWMLTTIASVGELERMTQYKDKAQKAVEGIPAGLLTYPPLMAADIVLYNTNIVPVGDDQKQHIELTRNLVDRFNSRYNDVLVKPEIRMPKVGGRVMSLQDPTRKMSKSDDNAKNFISLLDEPNVAAKKIKSAVTDSDGIIKFDRDNKPGITNLISIYAGLTDMPIKDIEAKYEGEGYGKFKGDLAEIVKAFLVEFQEKYESFYNSDKLDDILDQGRDKAHKVSFKTVKKMEKAMGLGRKR

SEQ ID NO: 5289 - protein, 216 aa, Staphylococcus aureus
MTKGILGRKIGMTQVFGENGELIPVTVVEAKENVVLQKKTVEVDGYNAIQVGFEDKKAYKKDAKSNKYANKPAEGHAKKADTAPKRFIREFRNVDVDAYEVGQEVSVDTFVAGDVIDVTGVSKGKGFQGAIKRHGQSRGPMSHGSHFHRAPGSVGMASDASRVFKGQKMPGRMGGNTVTVQNLEVVQVDTENKVILVKGNVPGPKKGLVEIRTSIK

SEQ ID NO: 5290 - protein, 206 aa, Staphylococcus aureus
MANYDVLKLDGTKSGSIELSDAVFGIEPNNSVLFEAINLQRASLRQGTHAVKNRSAVSGGGRKPWKQKGTGRARQGTIRAPQWRGGGIVFGPTPRSYAYKMPKKMRRLALRSALSFKAQENGLTVVDAFNFEAPKTKEFKNVLSTLEQPKKVLVVTENEDVNVELSARNIPGVQVTTAQGLNVLDITNADSLVITEAAAKKVEEVL

SEQ ID NO: 5291 - protein, 360 aa, Staphylococcus aureus
CIGCGAPLQSEDKNKPGFVPEHNMFRDDVICRRCFRLKNYNEVQDVGLESEDFLKLLSGLADKKGIVVNVVDVFDFEGSFINAVKRIVGNKKIILAANKLDLLPKQINKRRVKEWLKRTARKYGLEADDVVLISAEKGWGIDDLLSSIANIRENEDVYIVGTTNVGKSTLINKLIEASVGEKDVVTTSRFPGTTLDMIDIPLDETSFMYDTPGIIQDHQMTHLVSEKELKIIMPKKEIKQRVYQLNEAQTLFFGGLARIDYVSGGKRPLVCFFSNDLNIHRTKTEKANDLWRNQLGDLLTPPGNPQNFDLSEVKAVRLETGKEKRDVMISGLGFITIGPGAKVIVRVPKNVDVVLRNSIL

SEQ ID NO: 5292 - protein, 501 aa, Staphylococcus aureus
  VARIANT (1)...(501): Xaa = Any Amino Acid
MKKKMITLGTVAIATSLFTWDNKADAIVNDNYTGQSQVKEDSKNSNKISNDSLYWGVFGNLEAQFKNALNLLKEYQYSEEEYKEAKDKLMTRIVSENQYLLDKKFKEYEAYKAAFPNFKAQNPTLKRLSFDNYDIRDLRQGEYNDIRASLKNAVETFHKDVSAVQSKQTDLKTFDQQEMDQAKLKINELENKALMLGFAFSKQTDARQDLYNKLDMILGYSEKERTEKQPKNKRMFEETVKDLETIMDEFFTDIGKQRPSEIPTLTDNNENNKALAKSLRDLTNSITSNSSQKKTVDKVVKKPDTQSTGNKEFVIKEPTKPSIPTYTEEITKKPMPSIKQEIKEKIIYSSPQRFAGLSGERDDSSTSYNSLQTRITTNSNLVEFEEDTSARSQYGPRPQFNKTPKYIKYKDASTGIHEYNDGTFGYEARPKFNKPASTNKYNVTTKQDGTVSYGARPTFNKSSYTNAYNVTTHANGTTTYGPRVTKXQSLNXISIAVSNRA

SEQ ID NO: 5293 - protein, 330 aa, Staphylococcus aureus
IRKICKNATICSLAISTAIVAFPETSLAKIKTEITPVVEKAIDSETKMYTRTATTSDTEKNISQSLQFNFLNEPNYDKETLFIKAKGTISSGLEILYPNGYWSSTLRWPGSYSVSIQNVDDNTNTKVTDFAPKNQDETRDVKYTYGYKTGGNFTINQNGLSGNITQEYNYSETISYQQPSYRTLIDKPTSNKAVAWKVEANVIKNMGYDHTRDATTDGNTKVGSEIFTLTRNGNLWARDNFTPKNKMPVTVSEGFNPEFLTVMSHDKKGKGHSLFVVRYKRVMDDFEIRWNYRNIWGYWSGKNNVNKKEESLAALYEIDWKTHSVKLIST

SEQ ID NO: 5294 - protein, 216 aa, Staphylococcus aureus
PNIQWPEVWTAIVETLYMTVVSTIFAFILGLILGVLLFLSAKGKSIGARLFYSIVSFIVNLFRAIPFIILILLLIPFTSLILGTISGPTGALPALIIGAAPFYARLVEIAFKEIDKGVIEAAWSMGANTWTVIRKVLLPEAMPALVSGITVTAIALVGSTAVAGVIGAGGLGNLAYLTGFTRNQNDVILVSTVFILIIVFIIQFIGDWLTNKLDKR

SEQ ID NO: 5295 - protein, 271 aa, Staphylococcus aureus
MKKLFGLILVLTFAVVLAACGNGSKSGSDDKKITVGASPAPHAEILEKAKPLLEKKGYELDIKTINDYTTPNKLLDKGEIDANYFQHTPYLNTEKKDKGYKIVSAGDVHLEPMAVYSKKYKSLKELPKGATVYVSNNPAEQGRFLKFFVDAGLIKIKKGVKIEDAKFSDITENKKDIKFNNKQSAEFLPKIYQNEDADAVIINSNFAIEQKLNPKKDSIAVESAKDNPYANLIAVKEGHQDDKKIKALIEVLQSKDIQDFINEKYNGAVIP

SEQ ID NO: 5296 - protein, 640 aa, Staphylococcus aureus
  VARIANT (1)...(640): Xaa = Any Amino Acid
MLXNXTFKEGXNMSDRFIKFNDEQLDAKQVMMLQDLARLLLKNEQTQVKIQKFPYYNPVQNVLITSWFWSHRPSHIEMAGLKTDVMLAAYGYHMMDVQIVNEVVQDKTFKHPKFYQQLFKLLEDMRVLNSIKIERPSTAKLIDLRLDTRISYTESQIKVYRTKTQYTDLLFLYLEHAFLSQDFFDIPSIHSDLDDILVNMFLYLPNFFQNQNSEDNMYLAQRIMYQVDDILKEDMLNEYYYLPKTLYNTLASPEFEDLKRTDASQVDGEDDTSEDDNNESEKADSKSADSESKGGAYLEMELHEGQNSETLGNDEAREGDATDDMTDMMTKKGKGSNDTLNREEGDAVGQSQAFQLDGVNKNVEIKWQIPEIEPQYVLEYQESKQDVQYEIKDLIQIIKKTIEREQRDARFNLTKGRLQKDLINWFIDDQYKLFYKKQDLSKSFDATFTLLIDASASMHDKMAETKKGVVLFHETLKALNIKHEILSFSEDAFDSDDHAQPNIINEIINYDYSTFEKDGPRIMALEPQDDNRDGVAIRVASERLMRRNQHQRFLIVFSDGEPSAFNYSQDGIIDTYEAVEMSRKFGIEVFNVFLSQDPITEDVEQTIHNIYGQYAIFVEGVAHLPGHLSPLLKKLLLKSL

SEQ ID NO: 5297 - protein, 437 aa, Staphylococcus aureus
MTHYHFVGIKGSGMSSLAQIMHDLGHEVQGSDIENYVFTEVALRNKGIKILPFGANNIKEDMVVIQGNAFASSHEEIVRAHQLKLDVVSYNDFLGQIIDQYTSVAVTGAHGKTSTTGLLSHVMNGDKKTSFLIGDGTGMGLPESDYFAFEACEYRRHFLSYKPDYAIMTNIDFDHPDYFKDINDVFDAFQEMAHNVKKGIIAWGDDEHLRKIEADVPIYYYGFKDSDDIYAQNIQITDKGTAFDVYVDGEFYDHFLSPQYGDHTVLNALAVIAISYLEKLDVTNIKEALETFGGVKRRFNETTIANQVIVDDYAHHPREISATIETARKKYPHKEVVAVFQPHTFSRTQAFLNEFAESLSKADRVFLCEIFGSIRENTGALTIQDLIDKIEGASLINEDSINVLEQFDNAVVLFMGAGDIQKLQNAYLDKLGMKNAF

SEQ ID NO: 5298 - protein, 454 aa, Staphylococcus aureus
MTQQQNNKRTLKNKHTYQNEPLPNRKDFVVSFITGALVGSALGLYFKNKVYQKADDLKVKEQELSQKFEERKTQLEETVAFTKERVEGFLNKSKNEQAALKAQQAAIKEEASANNLSDTSQEAQEIQEAKREAQAETDKSAAVSNEESKAVALKAQQAAIKEEASANNLSDTSQEAQEIQEAKKEAQAETDKSAAVSKPESQASALKAQQAAVKEEASANNLSDTSQEAQEIQEAKKETQAETDKSAAVSNEESKASTLNVSKEESQAERLANAAKQKQAKLTPGSKESQLTEALFAEKPVAKNDLKEIPQLVTKKNDVSETETVNTDNKDTVKQKEAKFENGVITRKADEKTTNNTAVDKKSGKQSKKTTPSNKRNASKASTNKTSSQKKQHNKKSSQGAKKQSSSSKSTQKNNQTSNKNSKTTNAKSSNASKKSNAKVEKAKSKIEKRTFND

SEQ ID NO: 5299 - protein, 316 aa, Staphylococcus aureus
EAQKMGAKFKAGLEKSRQNFQEQLNNLIARYRKVDEDFFEALEEMLITADVGFNTVMTLTEELRMEAQRRNIQDTEDLREVIVEKIVEIYHQEDDNSEAMNLEDGRLNVILMVGVNGVGKTTTIGKLAYRYKMEGKKVMLAAGDTFRAGAIDQLKVWGERVGVDVISQSEGSDPAAVMYDAINAAKNKGVDILICDTAGRLQNKTNLMQELEKVKRVINRAVPDAPHEALLCLDATTGQNALSQARNFKEVTNVTGIVLTKLDGTAKGGIVLAIRNELHIPVKYVGLGEQLDDLQPFNPESYVYGLFADMIEQNEE

SEQ ID NO: 5300 - protein, 350 aa, Staphylococcus aureus
MKVLVAMDEFHGIISSYQANRYVEEAVASQIETADVVQVPLFNGRHELLDSVFLWQSGQKYRIPVHDADMNEVEGVYGQTDTGMTVIEGNLFLKGKKPIVERTSYGLGEMINHALDNDAKHVVISLGGIDSFDAGAGMLQALGAQFYDDEGRVVDMRQGAGVIKYIRRMDMSNLHPKMETARIQVMSDFSSRLYGKQSEIMQTHDAHQLNHNQAAEIDNLIWYFSELFKSELKIAIGPVERGGAGGGIAAVLNGLYQAEILTSHALVDQLTHLENLVEQADLIIFGEGLNENDQLLETTTLRIAELCHKHQKVAIAICATAEKFDLFESQGVTAMFNTFIDMPETYTDFK

SEQ ID NO: 5301 - protein, 485 aa, Staphylococcus aureus
MTDIINKLQAFADANPQSIAVRHTTDELTYQQLMDESSKLAHRLQGSKKPMILFGHMSPYMIVGMIGAIKAGCGYVPVDTSIPEDRIKMIINKVQPEFVFNTTDESFESLEGEVFTIEDIKTSQDPVIFDSQIKDNDTVYTIFTSGSTGEPKGVQIEYASLVQFTEWMLELNKSGNEQQWLNQAPFSFDLSVMAIYPCLASGGTLNLVDKNMINKPKLLNEMLTATPINIWVSTPSFMEMCLLLPTLNEEQYGSLNEFFFCGEILPHRAAKALVSRFPSATIYNTYGPTEATVAVTSIQITQEILDQYPTLPVGVERSGARLSTTDEGELVIEGQSVSLGYLKNDQKTAEVFNFDDGIRTYHTGDKAKFENGQWFIQGRIDFQIKLNGYRMELEEIETQLRQSEFVKEAIVVPVYKNDKVIHLIGAIVPTTEVTDNAELTKNIKNDLKSRLPEYMIPRKFEWMEQLPLTSNGKIDRKKIAEVING

SEQ ID NO: 5302 - protein, 208 aa, Staphylococcus aureus
LLQALYETLYMVSIALFLGAVIGIPLGVLLVITRKQGIWPNIVIHQVLNPLINILRSLPFIILLIAIVPFTKLVVGTSIGTTAAIVPLTVYVAPYIARLVENSLLEVDEGIIEAAKAMGASPLQIIRYFLIPEALGSLVLAITTAIIGLIGSTAMAGAVGGGGIGDLALVYGYQRFDTTVIIITVIVLVIIVQVIQTLGNVLARFIRR

SEQ ID NO: 5303 - protein, 421 aa, Staphylococcus aureus
MDKIVIKGGNKLTGEVKVEGAKNAVLPILTASLLASDKPSKLVNVPALSDVETINNVLTTLNADVTYKKDENAVVVDATKTLNEEAPYEYVSKMRASILVMGPLLARLGHAIVALPGGCAIGSRPIEQHIKGFEALGAEIHLENGNIYANAKDGLKGTSIHLDFPSVGATQNIIMAASLAKGKTLIENAAKEPEIVDLANYINEMGGRITGAGTDTITINGVESLHGVEHAIIPDRIEAGTLLIAGAITRGDIFVRGAIKEHMASLVYKLEEMGVELDYQEDGIRVRAEGDLQPVDIKTLPHPGFPTDMQSQMMALLLTANGHKVVTETVFENRFMHVAEFKRMNANINVEGRSAKLEGKSQLQGAQVKATDLRAAAALILAGLVADGKTSVTELNHLDRGYVDLHGKLKQLGADIERIND

SEQ ID NO: 5304 - protein, 128 aa, Staphylococcus aureus
IFDYNQIKQIIPHRQPFLLIDKVVEYEEGQRCVAIKQVSGNEPFFQGHFPEYAVMPGVLITEALAQTGAVAILNSEENKGKIALFAGIDKCRFKRQVVPGDTLTLEVEITKIKGPIGKGNAKATVDGQ

SEQ ID NO: 5305 - protein, 202 aa, Staphylococcus aureus
MMIIVMLLLSYLIGAFPSGFVIGKLFFKKDIRQFGSGNTGATNSFRVLGRPAGFLVTFLDIFKGFITVFFPLWLPVHADGPISTFFTNGLIVGLFAILGHVYPVYLKFQGGKAVATSAGVVLGVNPILLLILAIIFFIVLKIFKYVSLASIVAAICCVIGSLIIQDYILLVVSFLVSIILIIRHRSNISRIFRGEEPKIKWM

SEQ ID NO: 5306 - protein, 308 aa, Staphylococcus aureus
MRKLVVGSRRSKLALTQSQQFIDKLKAVEPNLEIEIKEIVTKGDRIVDKQLSKVGGKGLFVKEIQHELFEKNIDMAIHSLKDVPSVIPEGLTLGCIPDRELPFDAYISKTHTPLSQLPEGSIIGTSSLRRGAQILSKYPNLEIKWIRGNIDTRLEKLQTEDYDAIILAAAGLRRMGWSDDIVTSYLDRDTLLPAIGQGALGIECRSDDEELLTLLSKVHNDEVAKCVTAERTFLAEMDGSCQVPIAGYATISDQKEIEFTGLIMTPDGKERFEYTMNGTDPVELGKKVSNKLKEQGAYEIIKCLNEQH

SEQ ID NO: 5307 - protein, 222 aa, Staphylococcus aureus
MKPVVVMTQTNDMQSDLVSIIHKPFIDIKPLNFDIHLLNQRYDWLIFSSKNAVKFFYKYLKGINVDNIAVIGSKTAQYCESLGIQVDFMPNDFSQEGFLKSFNQTNQKILLPSSELARPLLSAALSKDNEVVKIDLYTSVPNKQNIQDVKEMIEHQQIDALTFSSSSAVRYYFNEGFVPKFKSYFAIGEQTARTIKSYQQPVTIAEIQTLESLIEKILESRG

SEQ ID NO: 5308 - protein, 279 aa, Staphylococcus aureus
MVIQWYPGHMAKAKREVSEQLKKVDVVFELVDARIPYSSRNPMIDEVINQKPRVVILNKKDMSNLNEMSKWEQFFIDKGYYPVSVDAKHGKNLKKVEAAAIKATAEKFEREKAKGLKPRAIRAMIVGIPNVGKSTLINKLAKRSIAQTGNKPGVTKQQQWIKVGNALQLLDTPGILWPKFEDEEVGKKLSLTGAIKDSIVHLDEVAIYGLNFLIQNDLARLKAHYKIEVPEDAEIIAWFDAIGKKRGLIRRGNEIDYEAVIELIIYDIRNAKIGNYCFD

SEQ ID NO: 5309 - protein, 57 aa, Staphylococcus aureus
MTSNHHAPYDLGYTRATMDNTKGSETARSSKSYKVVLSSDCSLQLDYMKLESLVIVD

SEQ ID NO: 5310 - protein, 312 aa, Staphylococcus aureus
MRFVHHSIPSINVNDIDLTSQTPDLTMAYPVYINAMTGGSEWTKNINEKLAVVARETGLAMAVGSTHAALRNPRMAETFTIARKMNPEGMIFSNVGADVPVEKALEAVELLEAQALQIHVNSPQELVMPEGNREFVTWLDNIASIVSRVSVPVIIKEVGFGMSKELMHDLQQIGVKYVDVSGKGGTNFVDIENERRANKDMDYLSSWGQSTVESLLETTAYQSEISVFASGGLRTPLDAIKSLALGAKATGMSRPFLNQVENNGIAHTVAYVESFIEHMKSIMTMLDAKNIDDLTQKQIVFSPEILSWIEQR

SEQ ID NO: 5311 - protein, 169 aa, Staphylococcus aureus
LQQAIANRRSVKKFKRDMHIDDALLYQAIEKAADAPNHGMREPWRVVHVPKDRLGDMSKDISKFAFPNELDKQQCHYDAVTKLGGMLLLILKTDPRQRQNDENYFAFGAYAQNLMLLLYEAGIGTCWKSPLYIYDPKVRKTLGIKKDEVLAGFLYLTDLEEDMPKAPRK

SEQ ID NO: 5312 - protein, 879 aa, Staphylococcus aureus
  VARIANT (1)...(879): Xaa = Any Amino Acid
EVXQMDMKPKYDPREVEAGRYEEWVKNGYFKPSEDKSXETYTIVIPPPNVTGKLHLGHAWDTTLQDIITRMKRMQGYDTLYLPGMDHAGIATQAKVEAKLNEQGITRYDLGREKFLEQAWDWKEEYASFIRAQWAKLGLGLDYSRERFTLDEGLSKAVKKVFVDLYNKGIIYRGERIINWDPKARTALSDIEVIHEDVQGAFYHFKYPYADGEGFIEIATTRPETMLGDTAIVVNPNDERYKDVIGKTVILPIVGRELPILADEYVDIDFGSGAMKVTPAHDPNDFEIGQRHQLENIIVMDENGKMNDKAGKYEGMDRFDCRKQLVEDLKEQDLVIKIEDHVHSVGHSERSGAVVEPYLSTQWFVRMEDLAKRSLDNQKTDDRIDFYPQRFEHTFNQWMENIRDWTISRQLWWGHQIPAWYHKETGEIYVGEEAPTDIENWQQDEDVLDTWFSSALWPFSTLGWPDLESEDFKRYYPTNALVTGYDIIFFWVARMIFQGLEFTDRRPFNDVLLHGLVRAEDGRKMSKSLGNGVDPMDVIDEYGADSLRYFLATGSSPGHDLRYSTEKVESVWNFINKIWNGARFSLMNIGEDFKVEDIDLSGNLSLADKWILTRLNETIATVTDLSDKYEFGEVGRALYNFIWDDFCDWYIEMSKIPMNGNDEEQKQITRSVLSYTLDNIMRMLHPFMPFVTEKIWQSLPHEGDTIVKASWPEVRESLIFEESKQTMQQLVEIIKSVRQSRVEVNTPLSKEIPILIQAKDKEIETTLSQNKDYLIKFCNPSTLNISTDVEIPEKAMTSVVIAGKVVLPLEGLIDMDKEISRLEKELAKLQSELDRVDKKLSNENFVSKAPEKVINEEKRKKQDYQEKYDGVKARIEQLK

SEQ ID NO: 5313 - protein, 90 aa, Staphylococcus aureus
MNKTDLINAVAEQADLTKKEAGSAVDAVFESIQNSLAKGEKVQLIGFGNFEVRERAARKGRNPQTGKEIDIPASKVPAFKAGKALKDAVK

SEQ ID NO: 5314 - protein, 234 aa, Staphylococcus aureus
DNKANKEQVHRVFQNISKKYDRLNNIISFEQHKVWRKRVMKDMGVRQGTKALDVCCGTGDWTIALSKAVGPIGEVTGIDFSENMLEVGKEKTASMENVKLVHGDAMELPFEDNSFDYVTIGFGLRNVPDYLVALKEMNRVLKPGGMVVCLETSQPTLPVFKQMYALYFKFVMPIFGKLFAKSKEEYEWLQQSTFNFPGKEELKRMFEEAGFINVRVRSFTGGVAAMHLGYKEKD

SEQ ID NO: 5315 - protein, 312 aa, Staphylococcus aureus
MNNEIKKVEQRLEKAIKSKDSVLEQASLHLLSSGGKRVRPAFVILSSQFGKDEQTSEQTYQVAVALELIHMATLVHDDVIDKSDKRRGKLTISKKWDQTTAILTGNFLLALGLEHLMAVKDNRVHQLISESIVDVCRGELFQFQDQFNSQQTIINYLRRINRKTALLIQLSTEVGAITSQSDKETVRKLKMIGHYIGMSFQIIDDVLDFTSTEKKLGKPVGSDLLNGHITLPILLEMRKNPDFKLKIEQLRRDSERKEFEECIQIIRKSDSIDEAKAVSSKYLSKALDLISELPDGHPKSLLLSLTKKMGSR

SEQ ID NO: 5316 - protein, 172 aa, Staphylococcus aureus
MEFSQKLYQAAKPIINDIYEDDFIQKMLLGNIQADALRHYLQADAAYLKEFTNLYALLIPKMNSMNDVKFLVEQIEFMVEGEVLAHDILAQIVGESYEEIIKTKVWPPSGDHYIKHMYFQAHSRENAIYTIAAMAPCPYIYAELAKRSQSDHKLNREKDTAKWFDFYSTEMD

SEQ ID NO: 5317 - protein, 338 aa, Staphylococcus aureus
MSTNIAINGMGRIGRMVLRIALQNKNLNVVAINASYPPETIAHLINYDTTHGKYNLKVEPIENGLQVGDHKIKLVADRNPENLPWKELDIDIAIDATGKFNHGDKAIAHIKAGAKKVLLTGPSKGGHVQMVVKGVNDDQLDIEAFDIFSNASCTTNCIGPVAKVLNNQFGIVNGLMTTVHAITNDQKNIDNPHKDLRRARSCNESIIPTSTGAAKALKEVLPELEGKLHGMALRVPTKNVSLVDLVVDLEKEVTVEEVNQAFENTGLEGIIEVEHQPLVSVDFNTNPHSAIIDAKSTMVMSGNKVKVIAWYDNEWGYSNRVVDVAEQIGALLTSKETV

SEQ ID NO: 5318 - protein, 189 aa, Staphylococcus aureus
MSLINKEILPFTAQAFDPKKDQFKEVTQEDLKGSWSVVCFYPADFSFVCPTELEDLQNQYEELQKLGVNVFSVSTDTHFVHKAWHDHSDAISKITYTMIGDPSQTITRNFDVLDEATGLAQRGTFIIDPDGVVQASEINADGIGRDASTLAHKIKAAQYVRKNPGEVCPAKWEEGAKTLQPGLDLVGKI

SEQ ID NO: 5319 - protein, 225 aa, Staphylococcus aureus
LERLQKRIANSGYTSRRKAETLISEGKVKVNGTTVTELGTKVKPSDTIEVEGIKIELEDKIYILFHKPTQVITSVSDDRGRTVVTDYFKDIEARIYPVGRLDYDTSGLLLLTNDGEFTNLMTHPRYQIKKKYVAKLKGYLMREEVKALEKGIELEDGMTQPAEVKVKKQDKDKNTTLVEITITEGRNRQVRRMFEHFGHQVTKLSRIEYGPLNVVGLNAGEGRVL

SEQ ID NO: 5320 - protein, 579 aa, Staphylococcus aureus
MSRLNSVVIKLWLTIILIVTTVLILLSIALITFMQYYFTQETENAIREDARRISSLVEQSHNKEEAIKYSQTLIENPGGLMIINNKHRQSTASLSNIKKQMLNEVVNNDHFDDVFDKGKSVTRNVTIKEKGSSQTYILLGYPTKAQKNSHSKYSGVFIYKDLKSIEDTNNAITIITIITAVIFLTITTVFAFFLSSRITKPLRRLRDQATRVSEGDYSYKPSVTTKDEIGQLSQAFNQMSTEIEEHVDALSTSKNIRDSLINSMVEGVLGINESRQIILSNKMANDIMDNIDEDAKAFLLRQIEDTFKSKQTEMRDLEMNTRFFVVTTSYIDKIEQGGKSGVVVTVRDMTNEHNLDQMKKDFIANVSHELRTPISLLQGYTESIVDGIVTEPDEIKESLAIVLDESKRLNRLVNELLNVARMDAEGLSVNKEVQPIAALLDKMKIKYRQQADNLGLNMTFNYCKKRVWSYDMDRMDQVLTNLIDNASRYTKPGDEIAITCDENESEDILYIKDTGTGIAPEHLQQVFDRFYKVDAARTRGKQGTGLGLFICKMIIEEHGGSIDVKSELGKGTTFIIKLP

SEQ ID NO: 5321 - protein, 496 aa, Staphylococcus aureus
MEKYILSIDQGTTSSRAILFNQKGEIAGVAQREFKQYFPQSGWVEHDANEIWTSVLAVMTEVINENDVRADQIAGIGITNQRETTVVWDKHTGRPIYHAIVWQSRQTQSICSELKQQGYEQTFRDKTGLLLDPYFAGTKVKWILDNVEGAREKAENGDLLFGTIDTWLVWKLSGKAAHITDYSNASRTLMFNIHDLEWDDELLELLTVPKNMLPEVKPSSEVYGKTIDYHFYGQEVPIAGVAGDQQAALFGQACFERGDVKNTYGTGGFMLMNTGDKAVKSESGLLTTIAYGIDGKVNYALEGSIFVSGSAIQWLRDGLRMINSAPQSESYATRVDSTEGVYVVPAFVGLGTPYWDSEARGAIFGLTRGTEKEHFIRATLESLCYQTRDVMEAMSKDSGIDVQSLRVDGGAVKNNFIMQFQADIVNTSVERPEIQETTALGAAYLAGLAVGFWESKDDIAKNWKLEEKFDPKMDEGEREKLYRGWKKAVEATQVFK

SEQ ID NO: 5322 - protein, 298 aa, Staphylococcus aureus
MKFLSFKYNDKTSYGVKVKREDAVWDLTQVFADFAEGDFHPKTLLAGLQQNHTLDFQEQVRKAVVAAEDSGKAEDYKISFNDIEFLPPVTPPNNVIAFGRNYKDHANELNHEVEKLYVFTKAASSLTGGNATIPNHKDITDQLDYEGELGIVIGKSGEKIPKALALDYVYGYTIINDITDRKAQSEQDQAFLSKSLTGGCPMGPYIVTKDELPLPENVNIVTKVNNEIRQDGNTGEMILKIDELIEEISKYVALHPGDIIATGTPAGVGAGMQPPKFLQPGDEVKVTIDNIGTLTTYI

SEQ ID NO: 5323 - protein, 353 aa, Staphylococcus aureus
LKQTPLYQNYVDRGAKIVEFGGWAMPVQFSSIKEEHNAVRYEIGLFDVSHMGEIEVTGKDASQFVQYLLSNDTDNLTTSKALYTALCNEEGGIIDDLVIYKLADDNYLLVVNAANTEKDFNWILKHKEKYDVEVQNVSNQYGQLAIQGPKARDLINQLVDEDVTEMKMFEFKQGVKLFGANVILSQSGYTGEDGFEIYCNIDDTEKIWDGLLEYNVMPCGLGARDTLRLEAGLPLHGQDLTESITPYEGGIAFASKPLIDADFIGKSVLKDQKENGAPRRTVGLELLEKGIARTGYEVMDLDGNIIGEVTSGTQSPSSGKSIALAMIKRDEFEMGRELLVQVRKRQLKAKIVK

SEQ ID NO: 5324 - protein, 400 aa, Staphylococcus aureus
  VARIANT (1)...(400): Xaa = Any Amino Acid
IVVAVSTGIDSMCLLYQLLNDYKDSYRKLTCLHVNHGVRSASIEEARFLEAYCERHHIDLHIKKLDLSHSLNRNNSIQNEARIKRYEWFDEMMNVLEADVLLTAHHLDDQLETIMYRIFNGKSTRNKLGFDELSKRKGYQIYRPLLAVSKKEIKQFQERYHIPYFEDESNKDNKYVRNDIRNRIIPAIDENNQLKVSHLLKLKQWHDEQYDILQYSAKQFIQEFVKFDEQSKYLEVSRQSFNDLPNSLKMVVLDCLLSKYYELFNISAKTYEEWFKQFSSKKAQFSINLRINGXFKSHMVNXXXWLKNNGDTYFRVQTIEKPGNYIFNKYRLEIHSNLPKCLFPLTVRTRQSGDTFKLNGRDGYKKVNRLFIDCKVQQWVRDQMPIVLDKQQRIIAVGDL

SEQ ID NO: 5325 - protein, 186 aa, Staphylococcus aureus
MRHGQTLFNFKGLIQGFGDSPLTELGIAQAQKARSYYETKGINFDLYASSTQERASDTLENVAPNHSYQRFKGLKEWHFGLFEGESVYLFDNLYKPEDLFGDRIVPFKGEARQQVEDRVVKTLHDIMSQTKNNALVVSHGTIMGVFLRYCLKLDEALKHNIGNCNILKFEYDNGTFKFVELIDPNL

SEQ ID NO: 5326 - protein, 81 aa, Staphylococcus aureus
MKQGIHPEYHQVIFLDTTTNFKFLSGSTKTSSEMMEWEDGKEYPVIRLDISSDSHPFYTGRQKFAAADGRVERFNKKFGLK

SEQ ID NO: 5327 - protein, 322 aa, Staphylococcus aureus
  VARIANT (1)...(322): Xaa = Any Amino Acid
MXHVLYIKKLSAAAIATMGFATFTMAHQAYAADTTNTQQAHTQMSTQSQDVSYGTYYTIDSNGDYHHTPDGNWNQAMFDNKEYSYTFVDAQGHTHYFYNCYPKNANANGSGQTYVNPATAGDNNDYTASQSQQHINQYGYQSNVGPDASYYSHSNNNQAYNSHNGNGKVNYPNGTSNQNGGSASKATASGHAKDASWLTSRKQLQPYGQYHGGGAHYGVDYAMPENSPVYSLTDGTVVQAGWSNYGGGNQVTIKEANSNNYQWYMHNNRLTVSAGDKVKAGDQIAYSGSTGNSTAPHVHFQRMSGGIGNQYAVDPTSYLQSR

SEQ ID NO: 5328 - protein, 267 aa, Staphylococcus aureus
MREKNLNTVCEEAKCPNIHECWGARRTATFMILGAVCTRACRFCAVKTGLPNELDLNEPERVAESVELMNLKHVVITAVARDDLRDAGSNVYAETVRKVRERNPFTTIEILPSDMGGDYDALETLMASRPDILNHNIETVRRLTPRVRARATYDRTLEFLRRSKELQPDIPTKSSIMVGLGETIEEIYETMDDLRANDVDILTIGQYLQPSRKHLKVQKYYTPLEFGKLRKVAMDKGFKHCQAGPLVRSSYHADEQVNEAAKEKQRQ

SEQ ID NO: 5329 - protein, 421 aa, Staphylococcus aureus
MEKMHITNQEHDAFVKSHPNGDLLQLTKWAETKKLTGWYARRIAVGRDGEIQGVAQLLFKKVPKLPYTLCYISRGFVVDYSNKEALNALLDSAKEIAKAEKAYAIKIDPDVEVDKGTDALQNLKALGFKHKGFKEGLSKDYIQPRMTMITPIDKNDDELLNSFERRNRSKVRLALKRGTTVERSDREGLKTFAELMKITGERDGFLTRDISYFENIYDALHEDGDAELFLVKLDPKENIAKVNQELNELHAEIAKWQQKMETSEKQAKKAQNMINDAQNKIAKNEDLKRDLEALEKEHPEGIYLSGALLMFAGSKSYYLYGASSNEFRDFLPNHHMQYTMMKYAREHGATTYDFGGTDNDPDKDSEHYGLWAFKKVWGTYLSEKIGEFDYVLNQPLYQLIEQVKPRLTKAKIKISRKLKRK

SEQ ID NO: 5330 - protein, 801 aa, Staphylococcus aureus
MVVLVVLGGVYASAKLKLELLPNVQNPVISVTTTMPGATPQSTQDEISSKIDNQVRSLAYVKNVKTQSIQNASIVTVEYENNTDMDKAEEQLKKEIDKIKFKDEVGQPELRRNSMDAFPVLAYSFSNKENDLKKVTKVLNEQLIPKLQTVDGVQNAQLNGQTNREITLKFKQNELEKYGLTADDVENYLKTATRTTPLGLFQFGDKDKSIVVDGQYQSVDAFKNINIPLTLAGGQGQSQSQSDNKQNSAMSDVNQASPQQNSKASASNNISGMPTAKLGDLADITVGDVRTSISKTNGKDAVNLQITKAQDANTVQVAKDVQRKIDTFVDENKDFNVTKTMDTAKPVEKSLYTMVEKASLGTIVAIIVILLFLRNIRTTAISIISIPLSLLMALIALKLSDVSLNILTLGALTVAIGRVIDDSIVVVENIYRRLTDSEEQLKGENLIISATTEVFKPIMSSTLVTIIVFLPLVFVSGSVGEMFRPFALAIAFSLLASLLVSITLVPALAATLFKKGVKRRNKQHQEGLGVVSTTYKKVLHWSLNHKWIVIILSTLILVATIVFGGPRLGTSFISAGDDKFLAITYTPKPGETEQAVLNHAQDVEKYLKQKKHVKTIQYSVGGSSPVDPTGSTNSMAIMVEYDNDTPNFDVEADKVIKHADGFKHPGEWKNQDLGTGAGNKSVEVTVKGPSMDAIKSTVKDIEQKMKQVKGLANVKSDLSQTYDQYEIKVDQNKAAENGISASQLVMHLNENLPEKTVTTVKENGKTVGVKVKQNKQTDWSEDKLNNITLKKPTGGTIKLGD

SEQ ID NO: 5331 - protein, 651 aa, Staphylococcus aureus
MLIKRLWKYFDKERRSRNDIFLTSLIKINRLNLDFYKGVRQGLLMIIPAIIGYLCGNFQFGLLVATGTLAHIYVFKGPSRSKLRTVIICNLAFAICMMLGTLTAKTPLVFGMTLLIVTVIPFYIFTALKIAGPSSTFFIVTFSLPINLPIAPEEALYRGFAILVGGILATMMVLITIVFSKNKAEEQAIQNDFKLISKLLHTYNDKSAFLKVAKTAVDSFKASDKLLITSTSSNDKLSRRFQKLLLLHTSAQGIYSELLELNAKQIRPLPDELIEMMDHIIAQLDNSDENVRYWRKEVTVTEEFQNLFNHILKIDEMVHANEARIAYEADMRKPLYSKRIYQNLTLDSIVFRNTLRYTAIMMIAIFIALMFNFEKAYWIPLSAHTILLGTSTIHAIERGMARGLGTILGVLVLSVILLFSIPTPVAVILMGIAALFTEALVGANYAIAVVFITIQVILMNGLASQNLTINIAFPRVIDVAMGIVIAIIGLFVLGQRTASALLPNVMAEVVRKEATLFHYLFSENQYKDDVYQKNTAMNLSVKLNNMTQVYNAANGELFSDKTLIQNYYPSLFALEEISFMLNRAMANEDRLTINEQLMGEYLATFENIAKHLELNTELEIKILPDLPQYNYIQSAMMNIQHNGFRERDKNV

SEQ ID NO: 5332 - protein, 291 aa, Staphylococcus aureus
LLLLFGTLILLSGCSNIEIFNAKGPVASSQKFLILYSIVFMLVICFVVLGMFAIFIYKYSYNKNAESGKMHHNAIIETIWFVIPIIIVAALAIPTVKTLYDYEKPPKSEKDPMVVYAVSAGYKWFFAYPDEHIETVNTLTIPKDRPVVFKLQAMDTMTSFWIPQLGGQKYAMTGMTMNWTLEASQTGTFRGRNSNFNGEGFSRQTFKVNAVSQKDYDKWVKEVKGKKTLDQDTFDKQLLPSTPNKALEFNGTHMAFVDPAADPEYIFYAYKRFNFELKDPNFTSEENMFKD

SEQ ID NO: 5333 - protein, 649 aa, Staphylococcus aureus
MNFPWDQLLVKGNWMITMAQIGAPFLVIGLIAVITYFKLWKYLYKEWFTSVDHKKIGVMYLICAVLMFVRGGIDALLIRAQLTVPDNKFLESNHYNEIFSTHGVIMIIFMAMPFIFGLWNIVVPLQIGARDVAFPVLNNVSFWLFFAGMILFNLSFIIGGSPAAGWTNYAPLAGEFSPGPGVNYYLIAIQISGLGTLATGINFFVTILRCKTPTMKFMQMPMFTVTTFITTLIVILAFPPLTVALALMTTDRIFDTAFFTVAHGGMPMLWANFFWVWGHPEVYIVILPAFGIYSEIIPTFARKRLFGHQSMVWATAGIAFLSFLVWVHHFFTMGNGALINSFFSISTMLIGIPTGVKLFNWLLTLYKGRITFESPMLFSLAFIPNFLLGGVTGVMLAMASADYQYHNTYFLVAHFHYTLVTGVVFACLAGLIFWYPKMMGYKLNETLNKWCFWFFMIGFNVCFLPQFILGLDGMPRRLYTYMPSDGWFLLNLISTIGALLMAIGFLFLVVSIVYSHFKSPREATGDNWDGLGRTLEWTTASAIPPKYNFAITPDWNDYDTFVDMKEHGRHYLDNHNYKDIHMPNNTPVGFWIGIFMTIGGFFLIFETVIPALICLFGIFGTMIYRSFQIDHGYHIPAAEVAETEARLRE

SEQ ID NO: 5334 - protein, 705 aa, Staphylococcus aureus
MSKQRIYEYAKELNLKSKEIIDELKSMNIEVSNHMQALEDDQIKALDKKFKKEQKNDNKQSTQNNHQKSNNQNQNKGQQKDNKKNQQQNNKGNKGNKKNNRNNKKNNKNNKPQNQPAALKEIPSKVTYQEGITVGEFADKLNVESSEIIKKLFLLGIVANINQSLNQETIELIADDYGVEVEEEVVINEEDLSIYFEDEKDDPEAIERPAVVTIMGHVDHGKTTLLDSIRHTKVTAGEAGGITQHIGAYQIENDGKKITFLDTPGHAAFTTMRARGAQVTDITILVVAADDGVMPQTIEAINHAKEAEVPIIVAVNKIDKPTSNPDRVMQELTEYGLIPEDWGGETIFVPLSALSGDGIDDLLEMIGLVAEVQELKANPKNRAVGTVIEAELDKSRGPSASLLVQNGTLNVGDAIVVGNTYGRIRAMVNDLGQRIKTAGPSTPVEITGINDVPQAGDRFVVFSDEKQARRIGESRHEASIVQQRQESKNVSLDNLFEQMKQGEMKDLNVIIKGDVQGSVEALAASLMKIDVEGVNVRIIHTAVGAINESDVTLANASNGIIIGFNVRPDSGAKRAAEAENVDMRLHRVIYNVIEEIESAMKGLLDPEFEEQVIGQAEVRQTFKVSKVGTIAGCYVTEGKITRNAGVRIIRDGIVQYEGELDTLKRFKDDAKEVAKGYECGITIENYNDLKEGDVIEAFEMVEIKR

SEQ ID NO: 5335 - protein, 465 aa, Staphylococcus aureus
MDNQLINSIIEKYQFSKKQIEAVLTLLEEKNTVPFIARYRKEQTGGLDEVQIKQIDDEYQYMVNLQKRKEEVIKNIEQQGLLTEELKKDILKQNKLQRVEDLYRPFKQKKKTRATEAKRKGLEPLAIWMKARKHEVSIEEKAQQFINEEVQSVEDAIKGAQDMIAEQISDNPKYRTKILKDMYHQGVLTTSKKKNAEDEKGIFEMYYAYSEPIKRIANHRVLAVNRGEKEKVLSVKFEFDTTSVEDFIARQEINHNNVNRSYILEAIKDSLKRLIVPSIEREIHADLTEKAENHAIDVFSENLRNLLLQPPMKGKQILGVDPAFRTGCKLAVINPFGTFIAKGVIYPHPPVSKKEAAEKDFVQMVKAYDVQLIAIGNGTASRETEQFVADLIKKHQLPVQFIIVNEAGASVYSASEIARDEFPDFQVEERSAVSIGRRVQDPLSELVKIDPKSIGVGQYQHDVNQ

SEQ ID NO: 5336 - protein, 389 aa, Staphylococcus aureus
FIHCSDLHLDSPFKSKSHISPKIFEDVQKSAYESFKNIVDIALQQDVDFVIIAGDLFDSENRTLRAEIFLKQQFERLQNEQIFVYVCHGNHDPLSSKISSNWPDNVSVFSNKVETYEAITKSGETIYIHGFSYENRASYENKIDEYPSSQGQKGIHIGVLHGTYSKSSVNERYTEFILEDLNSKLYHYWALGHIHERQQLSDMPVINYSGNIQGRHFNEQGEKGCLLIEGDHLKLKTKFYPTQYIRFEEATIETDKTSKQGLYEVIQNFKEQVREEGKAFYRLTLVINSETLISPQDLLQVEEMITDYEENENQFVYIDELKIQYAQNDESPLVNEFSAELLVDQTVFDKAMSDLYLNPRASKFLDDYGTFDHTALVNRAEEILKAEMR

SEQ ID NO: 5337 - protein, 368 aa, Staphylococcus aureus
MANIKALDQHISDLNQQRQQLVQELDTFYNHAEAVTKSQFVYFNKLSLFHDVQQWLKSAEDTNEKWRINAENTKLVTNELNHLNAQLEENNKKITALFDFINVGTEEDFYQHHEDYQTYTSNLSRFNDLTKYLENQNYSYELSSSLSEKTTAQLEEEDHLLATQVDEYNEQYLEMQAQVSDLSAQINHMETDTTLANLRHEYHSLKNQLNDIAKDWASLSYLQSLVDEHIKQIKDKRLPQVINEAVEILKHLTDGRYTMINYNEDSITVKHVNGQLYDPVELSQSTKELLYVALRISLIKVLRPYYPFPLIVDDAFVHFDKKRTEKMLNYLRSLSEHYQVLYFTCVKDNIVPSKEVITLNKIEEGGKR

SEQ ID NO: 5338 - protein, 312 aa, Staphylococcus aureus
RNIENLNPGDSVDHFFLVHKATQGVTAQGKDYMTLHLQDKSGEIEAKFWTATKNDMATIKPEEIVHVKGDIINYRGNKQMKVNQIRLATTEDQLKTEQFVDGAPLSPAEIQEEISHYLLDIENANLQRITRHLLKKYQERFYTYPAASSHHHNFASGLSYHVLTMLRIAKSICDIYPLLNKSLLYSGIILHDIGKVRELSGPVATSYTVEGNLLGHISIASDEVVEAARELNIEGEEIMLLRHMILSHHGKLEYGSPKLPYLKEAEILCYIDNIDARMNMFEKAYKKTDKGQFTDKIFGLENRRFYNPESLD

SEQ ID NO: 5339 - protein, 231 aa, Staphylococcus aureus
ALVLGGSGSIGSEIVKQLLTDGFEVYVQYYRTDINELTSKFNDDKVHFIQADLSQTIDIDKTFGDIKSLDCLIYASGQSLYGVLQDMKDHDIDACYQLNVLQLIRLCRYFVDVLRQSDNGRIIVISSIWGETGASMETIYSTMKSAQLGFVKALSQELALTSVTVNAITPGFVAGNMASEWQEDELQEMITELPQQRLVLPSEVAHTCAYLYHPNARSVTGTIQKVNGAWY

SEQ ID NO: 5340 - protein, 49 aa, Staphylococcus aureus
EVMTLPSIKVVEHPDLFVETSTCTMEDFDYIIELRENENQEIHYEEMKK

SEQ ID NO: 5341 - protein, 119 aa, Staphylococcus aureus
MIHGIGVDLIEIDRIKVLYSKQPKLVERILTKNEQHKFNNFTHEQRKIEFLAGRFATKEAFSKALGTGLGKHVAFNDIDCYNDELGKPKIDYEGFIVHVSISHTEQYAMSQVVLEKSAF

SEQ ID NO: 5342 - protein, 382 aa, Staphylococcus aureus
MSDKYYRSAYMNVDLNAVASNFKVFSTLHPNKTVMAVVKANAYGLGSVKVARHLMENGATFFAVATLDEAIELRMHGITAKILVLGVLPAKDIDKAIQHRVALTVPSKQWLKEAIKNISGEQEKKLWLHIKLDTGMGRLGIKDTKTYQEVIEIIQRYEQLVFEGVFTHFACADEPGDMTTEQYQRFKDMVNEAIKPEYIHCQNSAGSLLMDCQFCNAIRPGISLYGYYPSEYVQQKVKVHLKPSVQLIANVVQTKTLQAGESVSYGATYTATDPTTIALLPIGYADGYLRIMQGSFVNVNGHQCEVIGRVCMDQTIVKVPDQVKAGDSVILIDNHRESPQSVEVAAEKQHTINYEVLCNLSRRLPRIYHDGDQRFVTNELLK

SEQ ID NO: 5343 - protein, 420 aa, Staphylococcus aureus
MIKIPRGTQDILPEDSKKWRYIENQLDELMTFYNYKEIRTPIFESTDLFARGVGDSTDVVQKEMYTFKDKGDRSITLRPEGTAAVVRSYIEHKMQGNPNQPIKLYYNGPMFRYERKQKGRYRQFNQFGVEAIGAENPSVDAEVLAMVMHIYQSFGLKHLKLVINSVGDMASRKEYNEALVKHFEPVIHEFCSDCQSRLHTNPMRILDCKVDRDKEAIKTAPRITDFLNEESKAYYEQVKAYLDDLGIPYIEDPNLVRGLDYYTHTAFELMMDNPNYDGAITTLCGGGRYNGLLELLDGPSETGIGFALSIERLLLALEEEGIELDIEENLDLFIVTMGDQADRYAVKLLNHLRHNGIKADKDYLQRKIKGQMKQADRLGAKFTIVIGDQELENNKIDVKNMTTGESETIELDALVEYFKK

SEQ ID NO: 5344 - protein, 590 aa, Staphylococcus aureus
  VARIANT (1)...(590): Xaa = Any Amino Acid
MSKRTTYCGLVTEAFLGQEITLKGWVNNRRDLGGLIFVDLRDREGIVQVVFNPAFSEEALKIAETVRSEYVVEVQGTVTKRDPETVNPKIKTGQVEVQVTNIKVINKSETPPFSINEENVNVDENIRLKYRYLDLRRQELAQTFKMRHQITRSIRQYLDEEGFFDIETPVLTKSTPEGARDYLVPSRVHDGEFYALPQSPQLFKQLLMISGFDKYYQIVKCFRDEDLRADRQPEFTQVDIEMSFVDQEDVMQMGEEMLKKVVKEVKGVEINGAFPRMTYKEAMRRYGSDKPDTRFEMELIDVSQLGRDMDFKVFKDTVENDGEIKAIVAKGAAEQYTRKDMDALTEFVNIYGAKGLAWVKVVEDGLTGPIGRFFKTENVETLLTLTGAEAGDLVMFVADKPNVVAQSLGALRVKLAKELGLIDETKLNFLWVTDWPLLEYDEDAKRYVAAHHPFTSPKEADIAKLGTAPEEAEANAYDIVLNGYELGGGSIRIHDGELQEKMFEVLGFTKEQAQEQFGFLLDAFKYGAPPHGGIALGLDRLVMLLTNRTNLRDTIAFPKTASATCLLTNAPGEVSDKQLEELSLRIRHXI

SEQ ID NO: 5345 - protein, 354 aa, Staphylococcus aureus
KSSIKPEHFHLMYLLEQHSPYFIDAELTELRDSFQIHYDINDNHTPFDNIKSFTKNEKLRYLLNIKNLEEVNRTRYTFVLAPDELFFTRDGLPIAKTRGLQNVVDPLPVSEAEFLTRYKALVICAFNEKQSFDALVEGNLELHKGTPFETKVIEAATLDLLTAFLDEQYQKQEQDYSQNYAYVRKVGHTVFKWVSIGMTTLSVLLIAFLAFLYFSVMKHNERIEKGYQAFVKDDYTQVLNTYDDLDGKKLDKEALYIYAKSYIQTNKQGLEKDKKENLLNNVTPNSNKDYLLYWMELGQGHLDEAINIATYLDDNDITKLALINKLNEIKNNGDLSNDKRSEETKKYNDKLQDI

SEQ ID NO: 5346 - protein, 266 aa, Staphylococcus aureus
MNKPIGVIDSGVGGLTVAKEIMRQLPNETIYYLGDIGRCPYGPRPGEQVKQYTVEIARKLMEFDIKMLVIACNTATAVALEYLQKTLSIPVIGVIEPGARTAIMTTRNQNVLVLGTEGTIKSEAYRTHIKRINPHVEVHGVACPGFVPLVEQMRYSDPTITSIVIHQTLKRWRNSESDTVILGCTHYPLLYKPIYDYFGGKKTVISSGLETAREVSALLTFSNEHASYTEHPDHRFFATGDPTHITNIIKEWLNLSVNVERISVND

SEQ ID NO: 5347 - protein, 414 aa, Staphylococcus aureus
EVIKIRGGRTLNGEVNISGAKNSAVAIIPATLLAQGHVKLEGLPQISDVKTLVSLLEDLNIKATLNGTELEVDTTEIQNAALPNNKVESLRASYYMMGAMLGRFKKCVIGLPGGCPLGPRPIDQHIKGFKALGAEIDESSTTSMKIEAKELKGAHIFLDMVSVGATINIMLAAVYATGQTVIENAAKEPEVVDVANFLTSMGANIKGAGTSTIKINGVKELHGSEYQVIPDRIEAGTYMCIAAACGENVILNNIVPKHVETLTAKFSELGVNVDVRDERIRINNNAPYQFVDIKTLVYPGFATDLQQPITPLLFMANGPSFVTDTIYPERFKHVEELKRMGANIEVDEGTATIKPSTLHGAEVYASDLRAGACLIIAGLIAEGVTTIYNVKHIYRGYTDIVEHLKALGADIWTE

SEQ ID NO: 5348 - protein, 407 aa, Staphylococcus aureus
KNYTTKELTQKAKTLKLTNYSKLNKKELVLAIMEAQMEKDGNYYMEGILDDIQPDGYGFLRTVNYSKGEKDIYISASQIRRFEIKRGDKVTGKVRKPKDNEKYYGLLQVDFVNDHNAEEVKKRPHFQALTPLYPDERIKLETETQNYSTRIMDLVTPIGLGQRGLIVAPPKAGKTSLLKEIANAISTNKPDAKLFILLVGERPEEVTDLERSVEAAEVVHSTFDEPPEHHVKVAELLLERAKRLVEIGEDVIILMDSITRLARAYNLVIPPSGRTLSGGLDPASLHKPKAFFGAARNIEAGGSLTILATALVDTGSRMDDMIYEEFKGTGNMELHLDRKLSERRIFPAIDIGRSSTRKEELLISKSELDTLWQLRNLFTDSTDFTERFIRKLKKSKNNEDFFKQLQK

SEQ ID NO: 5349 - protein, 800 aa, Staphylococcus aureus
VSEIIQDLSLEDVLGDRFGRYSKYIIQERALPDVRDGLKPVQRRILYAMYSSGNTHDKNFRKSAKTVGDVIGQYHPHGDSSVYEAMVRLSQDWKLRHVLIEMHGNNGSIDNDPPAAMRYTEAKLSLLAEELLRDINKETVSFIPNYDDTTLEPMVLPSRFPNLLVNGSTGISAGYATDIPPHNLAEVIQATLKYIDNPDITVNQLMKYIKGPDFPTGGIIQGIDGIKKAYESGKGRIIVRSKVEEETLRNGRKQLIITEIPYEVNKSSLVKRIDELRADKKVDGIVEVRDETDRTGLRIAIELKKDVNSESIKNYLYKNSDLQISYNFNMVAISDGRPKLMGIRQIIDSYLNHQIEVVANRTKFELDNAEKRMHIVEGLIKALSILDKVIELIRSSKNKRDAKENLIEVYEFTEEQAEAIVMLQLYRLTNTDIVALEGEHKELEALIKQLRHILDNHDALLNVIKEELNEIKKKFKSERLSLIEAEIEEIKIDKEVMVPSEEVILSMTRHGYIKRTSIRSFNASGVEDIGLKDGDSLLKHQEVNTQDTVLVFTNKGRYLFIPVHKLADIRWKELGQHVSQIVPIEEDEVVINVFNEKDFNTDAFYVFATQNGMIKKSTVPLFKTTRFNKPLIATKVKENDDLISVMRFEKDQLITIITNKGMSLTYNTSELSDTGLRAAGVKSINLKAEDFVVMTEGVSENDTILMATQRGSLKRISFKILQVAKRAQRGITLLKELKKNPHRIVAAHVVTGEHSQYTLYSKSNEEHGLINDIHKSEQYTNGSFIVDTDDFGEVIDMYIS

SEQ ID NO: 5350 - protein, 663 aa, Staphylococcus aureus
MNKQNNYSDDSIQVLEGLEAVRKRPGMYIGSTDKRGLHHLVYEIVDNSVDEVLNGYGNEIDVTINKDGSISIEDNGRGMPTGIHKSGKPTVEVIFTVLHAGGKFGQGGYKTSGGLHGVGASVVNALSEWLEVEIHRDGNIYHQSFKNGGSPSSGLVKKGKTKKTGTKVTFKPDDTIFKASTSFNFDVLSERLQESAFLLKNLKITLNDLRSGKERQEHYHYEEGIKEFVSYVNEGKEVLHDVATFSGEANGIEVDVAFQYNDQYSESILSFVNNVRTKDGGTHEVGFKTAMTRVFNDYARRINELKTKDKNLDGNDIREGLTAVVSVRIPEELLQFEGQTKSKLGTSEARSAVDSVVADKLPFYLEEKGQLSKSLVKKAIKAQQAREAARKAREDARSGKKNKRKDTLLSGKLTPAQSKNTDKNELYLVEGDSAGGSAKLGRDRKFQAILPLRGKVINTEKARLEDIFKNEEINTIIHTIGAGVGTDFKIEDSNYNRVIIMTDADTDGAHIQVLLLTFFFKYMKPLVQAGRVFIALPPLYKLEKGKGKTKRVEYAWTDEELNKLQKELGKGFTLQRYKGLGEMNPEQLWETTMNPETRTLIRVQVEDEVRSSKRVTTLMGDKVQPRREWIEKHVEFGMQEDQSILDNSEVQVLENDQFDEEEI

SEQ ID NO: 5351 - protein, 240 aa, Staphylococcus aureus
MNKNVVIKSLAALTILTSVTGIGATLVEEVQQTAKAENNVTKIKDTNIFPYTGVVAFNSATGFVVGKNTILTNKHVSKNYKVGDRITAHPNSDKSNGGIYSIKKIINYPGKEDVSVIQVEERAIERGPKGFNFNDNVTPFKYAAGAKAGDRIKVIGYPHPYKNKYVLHESTGPVMSVEGSSIVYSAHTESGNSGSPVLNSNNELIGIHFASDVKNDDNRNAYGVYFTPEIKKFIAENIDK

SEQ ID NO: 5352 - protein, 239 aa, Staphylococcus aureus
MNKNIIIKSIAALTILTSVTGVGTTMVEDIQQTAKAENSVKLITNTNVAPYSGVTWMGAGTGFVVGNHTIITNKHVTYHMKVGDEIKAHPNGFYNNGGGLYKVTKIVDYPGKEDIAVVQVEEKSTQPKGRKFKDFTSKFKIASEAKENESISIIGYPNPNGNKLQMYESTGKVLSVNGNIVTSDAVVQPGSSGSPILNSKREAIGVMYASDKPTGESTRSFAVYFSPEIKKFIADNLDK

SEQ ID NO: 5353 - protein, 89 aa, Staphylococcus aureus
HHSEQIKTNLKSRLNRIEGQVRAINRMIEEDVYCDDVLTQIRATRSALNSVAIKLLEQHMKSCIMNKVNQGAQEEAMEELLVTFQKLIK

SEQ ID NO: 5354 - protein, 345 aa, Staphylococcus aureus
VFGGKSAEHEVSILTAQNVLNAIDKDKYHVDIIYITNDGDWRKQNNITTEIKSTDELHLENGEALEISQLLKESSSGQPYDAVFPLLHGPNGEDGTIQGLFEVLDVPYVGNGVLSAASSMDKLVMKQLFEHRGLPQLPYISFLRSEYEKYEHNILKLVNDKLNYPVFVKPANLGSSVGISKCNNEAELKEGIKEAFQFDRKLVIEQGVNAREIEVAVLGNDYPEATWPGEVVKDVAFYDYKSKYKDGKVQLQIPADLDEDVQLTLRNMALEAFKATDCSGLVRADFFVTEDNQIYINETNAMPGFTAFSMYPKLWENMGLSYPELITKLIELAKERHQDKQKNKY

SEQ ID NO: 5355 - protein, 451 aa, Staphylococcus aureus
MINVTLKQIQSWIPCEIEDQFLNQEINGVTIDSRAISKNMLFIPFKGENVDGHRFVSKALQDGAGAAFYQRGTPIDENVSGPIIWVEDTLTALQQLAQAYLRHVNPKVIAVTGSNGKTTTKDMIESVLHTEFKVKKTQGNYNNEIGLPLTILELDNDTEISILEMGMSGFHEIEFLSNLAQPDIAVITNIGESHMQDLGSREGIAKAKSEITIGLKDNGTFIYDGDEPLLKPHVKEVENAKCISIGVATDNALVCSVDDRDTTGMSFTINNKEHYDLPILGKHNMKNATIAIAVGHELGLTYNTIYQNLKNVSLTGMRMEQHTLENDITVINDAYNASPTSMRAAIDTLSTLTGRRILILGDVLELGENSKEMHIGVGNYLEEKHIGVLYTFGNEAKYIYDSGQQHVEKAQHFNSKDDMIEVLTNDLKAHDRVLVKGSRGMKLEEVVNALI

SEQ ID NO: 5356 - protein, 899 aa, Staphylococcus aureus
FGANLGLMLDLYDDFLQDPSSVPEDLQVLFSTIKNDDSIVPALKSTSSQNSDGTIKRVMRLIDNIRQYGHLKADIYPVNPPKRKHVPKLEIEDFDLDQQTLEGISAGIVSDHFADIYDNAYEAILRMEKRYKGPIAFEYTHINNNTERGWLKRRIETPYKVTLNNNEKRALFKQLAYVEGFEKYLHKNFVGAKRFSIEGVDALVPMLQRTITIAAKEGIKNIQIGMAHRGRLNVLTHVLEKPYEMMISEFMHTDPMKFLPEDGSLQLTAGWTGDVKYHLGGIKTTDSYGTMQRIALANNPSHLEIVAPVVEGRTRAAQDDTQRAGAPTTDHHKAMPIIIHGDAAYPGQGINFETMNLGNLKGYSTGGSLHIITNNRIGFTTEPIDARSTTYSTDVAKGYDVPIFHVNADDVEATIEAIDIAMEFRKEFHKDVVIDLVGYRRFGHNEMDEPSITNPVPYQNIRKHDSVEYVFGKKLVNEGVISEDEMHSFIEQVQKELREAHDKINKADKMDNPDMEKPAELALPLQADEQSFTFDHLKEINDALLTYPDGFNILKKLNKVLEKRHEPFNKEDGLVDWAQAEQLAFATILQDGTPIRLTGQDSERGTFSHRHAVLHDEQTGETYTPLHHVPDQKATFDIHNSPLSEAAVVGFEYGYNVENKKSFNIWEAQYGDFANMSQMIFDNFLFSSRSKWGERSGLTLFLPHAYEGQGPEHSSARLERFLQLAAENNCTVVNLSSSSNYFHLLRAQAASLDSEQMRPLVVMSPKSLLRNKTVAKPIDEFTSGGFEPILTESYQADKVTKVILATGKMFIDLKEALAKNPDESVLLVAIERLYPFPEEEIEALLAQLPNLEEVSWVQEEPKNQGAWLYVYPYVKVLVADKYDLSYHGRIQRAAPAEGD

SEQ ID NO: 5357 - protein, 240 aa, Staphylococcus aureus
VKILLIGYGAMNQRVARLAEEKGHEIVGVIENTPKATTPYQQYQHIADVKDADVAIDFSNPNLLFPLLDEEFHLPLVVATTGEKEKLLNKLDELSQNMPVFFSANMSYGVHALTKILAAAVPLLDDFDIELTEAHHNKKVDAPSGTLEKLYDVIVSLKENVTPVYDRHELNEKRQPQDIGIHSIRGGTIVGEHEVLFAGTDETIQITHRAQSKDIFANGAIQAAERLVNKPNGFYTFDNL

SEQ ID NO: 5358 - protein, 1213 aa, Staphylococcus aureus
MTIPEKPQGVIWTDAQWQSIYATGQDVLVAAAAGSGKTAVLVERIIQKILRDGIDVDRLLVVTFTNLSAREMKHRVDQRIQEASIADPANAHLKNQRIKIHQAQISTLHSFCLKLIQQHYDVLNIDPNFRTSSEAENILLLEQTIDEVIEQHYDILDPAFIELTEQLSSDRSDDQFRMIIKQLYFFSVANPNPTNWLDQLVTPYEEEAQQAQLIQLLTDLSKVFITAAYDALNKAYDLFSMMDGVDKHLAVIEDERRLMGRVLEGGFIDIPYLTGHEFGARLPNVTAKIKEANEMMVDALEDAKLQYKKYKSLIDKVKSDYFSREADDLKADMQQLAPRVKYLARIVKDVMSEFNRKKRSKNILDFSDYEHFALQILTNEDGSPSEIAESYRQHFQEILVDEYQDTNRVQEKILSCIKTGDEHNGNLFMVGDVKQSIYKFRQADPSLFIEKYQRFTIDGDGTGRRIDLSQNFRSRKEVLSTTNYIFKHMMDEQVGEVNYDESAQLYYGAPYDESDHPVNLKVLVEADQEHSDLTGSEQEAHFIVEQVKDILEHQKVYDMKTGSYRSATYKDIVILERSFGQARNLQQAFKNEDIPFHVNSREGYFEQTEVRLVLSFLRAIDNPLQDIYLVGLMRSVIYQFKEDELAQIRILSPNDDYFYQSIVNYINDEAADAILVDKLKMFLSDIQSYQQYSKDHPVYQLIDKFYNDHYVIQYFSGLIGGRGRRANLYGLFNKAIEFENSSFRGLYQFIRFIDELIERGKDFGEENVVGPNDNVVRMMTIHSSKGLEFPFVIYSGLSKDFNKRDLKQPVILNQQFGLGMDYFDVDKEMAFPSLASVAYRAVAEKELVSEEMRLVYVALTRAKEQLYLIGRVKNDKSLLELEQLSISGEHIAVNERLTSPNPFHLIYSILSKHQSASIPDDLKFEKDIAQVEDSSRPNVNISIIYFEDVSTETILDNDEYRSVNQLETMQNGNEDVKAQIKHQLDYQYPYVNDTKKPSKQSVSELKRQYETEESGTSYERVRQYRIGFSTYERPKFLSEQGKRKANEIGTLMHTVMQHLPFKKERISEVELHQYIDGLIDKHIIEADTKKDIRMDEIMTFINSELYSIIAEAEQVYRELPFVVNQALVDQLPQGDEDVSIIQGMIDLIFVKDGVHYFVDYKTDAFNRRRGMTDEEIGTQLKNKYKIQMKYYQNTLQTILNKEVKGYLYFFKFG

SEQ ID NO: 5359 - protein, 309 aa, Staphylococcus aureus
MAKTYIFGHKNPDTDAISSAIIMAEFEQLRGNSGAKAYRLGDVSAETQFALDTFNVPAPELLTDDLDGQDVILVDHNEFQQSSDTIASATIKHVIDHHRIANFETAGPLCYRAEPVGCTATILYKMFRERGFEIKPEIAGLMLSAIISDSLLFKSPTCTQQDVKAAEELKDIAKVDIQKYGLDMLKAGASTTDKSVEFLLNMDAKSFTMGDYVTRIAQVNAVDLDEVLNRKEDLEKEMLAVSAQEKYDLFVLVVTDIINSDSKILVVGAEKDKVGEAFNVQLEDDMAFLSGVVSRKKQIVPQITEALTK

SEQ ID NO: 5360 - protein, 102 aa, Staphylococcus aureus
MFAIIETGGKQIKVEEGQEIFVEKLDVNEGDTFTFDKVLFVGGDSVKVGAPTVEGATVTATVNKQGRGKKITVFTYKRRKNSKRKKGHRQPYTKLTIDKINA

SEQ ID NO: 5361 - protein, 103 aa, Staphylococcus aureus
MITVDITVNDEGKVTDVIMDGHADHGEYGHDIVCAGASAVLFGSVNAIIGLTSERPDINYDDNGGHFHIRSVDTNNDEAQLILQTMLVSLQTIEEEYNENIRL

SEQ ID NO: 5362 - protein, 94 aa, Staphylococcus aureus
MLKLNLQFFASKKGVSSTKNGRDSESKRLGAKRADGQFVTGGSILYRQRGTKIYPGENVGRGGDDTLFAKIDGVVKFERKGRDKKQVSVYAVAE

SEQ ID NO: 5363 - protein, 430 aa, Staphylococcus aureus
MFVDQVKISLKAGDGGNGITAYRREKYVPFGGPAGGDGGKGASVVFEVDEGLRTLLDFRYQRHFKASKGENGQSSNMHGKNAEDLVLKVPPGTIIKNVETDEVLADLVEDGQRAVVAKGGRGGRGNSRFATPRNPAPDFSEKGEPGEELDVSLELKLLADVGLVGFPSVGKSTLLSIVSKAKPKIGAYHFTTIKPNLGVVSTPDQRSFVMADLPGLIEGASDGVGLGHQFLRHVERTKVIVHMIDMSGSEGREPIEDYKVINQELAAYEQRLEDRPQIVVANKMDLPESQDNLILFKEEIGEDVPVIPVSTITRDNIDQLLYAIADKLEEYKDVDFTVEEEESVGINRVLYKHTPSQDKFTISRDDDGAYVVSGNAIERMFKMTDFNSDPAVRRFARQMRSMGIDDALRERGCKNGDIVRILGGEFEFVE

SEQ ID NO: 5364 - protein, 139 aa, Staphylococcus aureus
FYLIREDVLPESVVKTLKIKDALKSDPTLSIYDAVKQFDLSRSAFYKYRETIFPVDDKMLDHREFTLILYVTDIVGMLARVLDVISKLELSVLTIHQSIPMEEKATITLSLNAKSKETSVEDVIGALRNLDYVSKVELI

SEQ ID NO: 5365 - protein, 410 aa, Staphylococcus aureus
KRVVITGMGALSPIGNDVKTTWENALKGVNGIDKITRIDTEPYSVHLAGELKNFNIEDHIDKKEARRMDRFTQYAIVAAREAVKDAQLDINENTADRIGVWIGSGIGGMETFEIAHKQLMDKGPRRVSPFFVPMLIPDMATGQVSIDLGAKGPNGATVTACATGTNSIGEAFKIVQRGDADAMITGGTEAPITHMAIAGFSASRALSTNDDIETACRPFQEGRDGFVMGEGAGILVIESLESAQARGANIYAEIVGYGTTGDAYHITAPAPEGEGGSRAMQAAMDDAGIEPKDVQYLNAHGTSTPVGDLNEVKAIKNTFGEAAKHLKVSSTKSMTGHLLGATGGIEAIFSALSIKDSKVAPTIHAVTPDPECDLDIVPNEAQDLDITYAMSNSLGFGGHNAVLVFKKFEA

SEQ ID NO: 5366 - protein, 392 aa, Staphylococcus aureus
KSLFEQARPILEQIQDNGFEAYYVGGSVRDYVMGRNIHDIDITTSATPDEIESIFSHTIPVGKEHGTINVVFNDENYEVTTFRAEEDYVDHRRPSGVTFVRDLYEDLQRRDFTMNAIAMDTSYKLYDYFDGQQDINNRIIRTVGIAEERFQEDALRMIRCLRFQSQLSFEIATETFEAMRTQMADIKFLSIERIVIELTKLMRGINVEKSFNHLKSLKAYNYMPYFEHLDMNQINVTEPIDLELLIAIVSVKFDINYSLKPLKLSNRQVKDINQYIQIMNALPSIITKEQLKMFVYDYDTNLIKNVMVAVDVLKANDIQGHEPLIVNLQTIDETLHHLTMHNRKDMMVNGGVLMAHLNAKSGPWLKDVLRQIEIAIVTGKVSNEETEILKWV

SEQ ID NO: 5367 - protein, 710 aa, Staphylococcus aureus
KSLILAEKPSVARDIADALQINQKRNGYFENNQYIVTWALGHLVTNATPEQYDKNLKEWRLEDLPIIPKYMKTVVIGKTSKQFKTVKALILDNKVKDIIIATDAGREGELVARLILDKVGNKKPLRRLWISSVTKKAIQQGFKNLKDGRQYNDLYYAALARSEVDWIVGINATRALTTKYDAQLSLGRVQTPTIQLVNTRQQEINQFKPQQYYTLSLTVKGFDFQLESNQRYTNKETLEQIVNNLKNVDGKIKSVATKHKKSYPQSLYNLTDLQQDMYRRYKIGPKETLNTLQSLYERHKVVTYPRTDSNYLTTDMVDTMKERIQATMATTYKDQARPLISKTFSSKMSIFNNQKVSDHHAIIPTEVRPVMSDLSNRELKLYDMIVERFLETLMPPHEYDAITVTLEVAGHTFVLKENVTTVLGFKSIRQGESITEMQQPFSEGDEVKISKTNIREHETTPPEYFNEGSLLKAMENPQNFIQLKDKKYAQTLKQTGGIGTVATRADIIDKLFNMNAIESRDGKIKVTSKGKQILELAPEELTSPLLTAQWEEKLLLIERGKYQAKTFINEMKDFTKDVVNGIKNSDRKYKHDNLTTTECPTCGKFMIKVKTKNGQMLVCQDPSCKTKKNVQRKTNARCPNCKKKLTLFGKGKEAVYRCVCGHSETQAHMDQRMKSKSSGKVSRKEMKKYMNKNEGLDNNPFKDALKNLNL

SEQ ID NO: 5368 - protein, 257 aa, Staphylococcus aureus
  VARIANT (1)...(257): Xaa = Any Amino Acid
MIDIHNHILVDIDDGPKTIEKSIALLKQAKDEGVTSIVATPHHLHPRYDNTFQQVLVKLAELRTHPEVQALDIKLFPGQEIRITDSILQGLDNGSIQGINRSKYLLIEFPTGEVPHYTKQLFFEIQSRGYIPIIAHPERNRSIAKNPEILYELVANGALSQLTSSSLVGGFGKNIQKLSLQFIECNLAHFVASDAHSCDQRPFLMQELFHNHKLKKYSNDIEALLRNASSVINDNFVYLDRPTKPGKVKSFLKWFXL

SEQ ID NO: 5369 - protein, 58 aa, Staphylococcus aureus
MILRYATNLKLAKELYQASKPKLQEDKGMIELFEHTFGLQKELVKYVGIAEATTAALY

SEQ ID NO: 5370 - protein, 843 aa, Staphylococcus aureus
MGFLSKILDGNNKEIKQLGKLADKVIALEEKTAILTDEEIRNKTKQFQTELADIDNVKKQNDYLDKILPEAYALVREGSKRVFNMTPYKVQIMGGIAIHKGDIAEMRTGEGKTLTATMPTYLNALAGRGVHVITVNEYLSSVQSEEMAELYNFLGLTVGLNLNSKTTEEKREAYAQDITYSTNNELGFDYLRDNMVNYSEDRVMRPLHFAIIDEVDSILIDEARTPLIISGEAEKSTSLYTQANVFAKMLKQDEDYKYDEKTKAVHLTEQGADKAERMFKVENLYDVQNVDVISHINTALRAHVTLQRDVDYMVVDGEVLIVDQFTGRTMPGRRFSEGLHQAIEAKEGVQIQNESKTMASITFQNYFRMYNKLAGMTGTAKTEEEEFRNIYNMTVTQIPTNKPVQRNDKSDLIYISQKGKFDAVVEDVVEKHKAGQPVLLGTVAVETSEYISNLLKKRGIRHDVLNAKNHEREAEIVAGAGQKGAVTIATNMAGRGTDIKLGEGVEELGGLAVIGTERHESRRIDDQLRGRSGRQGDKGDSRFYLSLQDELMIRFGSERLQKMMSRLGLDDSTPIESKMVSRAVESAQKRVEGNNFDARKRILEYDEVLRKQREIIYNERNSIIDEEDSSQVVDAMLRSTLQRSINYYINTADDEPEYQPFIDYINDIFLQEGDITEDDIKGKDAEDIFEVVWAKIEAAYQSQKDILEEQMNEFERMILLRSIDSHWTDHIDTMDQLRQGIHLRSYAQQNPLRDYQNEGHELFDIMMQNIEEDTCKFILKSVVQVEDNIEREKTTEFGEAKHVSAEDGKEKVKPKPIVKGDQVGRNDDCPCGSGKKFKNCHGK

SEQ ID NO: 5371 - protein, 302 aa, Staphylococcus aureus
LFHTLDEKAKTLNNENGQSFIENLGLAMEQVYTNERGLLEQSTLQDRRKAFQFAYLSLMQEEKIQANHQITPDSIGLILGFLVERFMNNQEELHIVDIASGAGHLSATVKEVLPEIAVMHHLIEVDPVLSRVSVHLANFLEIPFDVYPQDAIMPLPLEEADIVIGDFPVGYYPIDERSKEFKLGFEEGHSYSHYLLIEQAINALKDAGYAFLVVPSNIFTGEHVKQLEKYIATETEMQAFLNLPPTLFKNEKARKSILILQKKKSGETKPVEVLLANIPDFKNPSQFQGFMTELNQWMDTNR

SEQ ID NO: 5372 - protein, 191 aa, Staphylococcus aureus
LKKELLEWIISIAVAFVILFIVGKFIVTPYTIKGESMDPTLKDGERVAVNIIGYKTGGLEKGNVVVFHANKNDDYVKRVIGVPGDKVEYKNDTLYVNGKKQDEPYLNYNLKHKQGDYITGTFQVKDLPNANPKSNVIPKGKYLVLGDNREVSKDSRAFGLIDEDQIVGKVSFRFWPFSEFKYNFNPENTKN

SEQ ID NO: 5373 - protein, 1127 aa, Staphylococcus aureus
LGRAGTGKSTKMLTEIKQKMKADPLGDPIILIAPTQSTFQLEQAFVNDPELNGSLRTEMLHFERLSHRIFQEVGSYSEQKLSKAATEMMIYNIVQEQQKYLKLYQSQAKYYGFSEKLTEQIQDFKKYAVTPEHLESFIADKNMQTRTKNKLEDIALIYREFEQRIQNEFITGEDALQYFIDCMPKSEWLKCADIYIDGFHNFSTIEYLIIKGLIKYAKSVTIILTTDGNHDQFSLFRKPSEVLRHIEEIANELNISIERQYFKQSYRFNNQDLKHLEQEFDALQINRVACQGHINILESATMREEINEIARRIIVDIRDKQLRYQDIAILYRDESYAYLFDSILPLYNIPYNIDTKRSMTHHPVMEMIRSLIEVIQSNWQVNPMLRLLKTDVLTTSYLKSAYLVDLLENFVLERGIYGKRWLDDELFNVEHFSKMGRKAHKLTEDERNTFEQVVKLKKDVIDKILHFEKQMSQAATVKDFATAFYESMEYFELPNQLMTERDELDLNGNHEKAEEIDQIWNGLIQILDDLVLVFGDEPMSMERFLEVFDIGLEQLEFVMIPQTLDQVSIGTMDLAKVDNKQHVYLVGMNDGTMPQPVTASSLITDEEKKYFEQQANVELSPTSDILQMDEAFVCYVAMTRAKRNVTFSYSLMGSSGDDKEISPFLNQIQSLFNQLEITNIPQYHEVNPLSLMQHAKQTKITLFEALRAWLDDEIVADSWLDAYQVIRDSDLLNQGLDYLMSALTFDNETVKLGETLSKELYGKEINASVSRFEGYQQCPFKHYASHGLKLNERTKYELQNFDLGDIFHSVLKYISERINGDFKQLDLKKIRQLTNEALEEILPKVQFNLLNSSAYYRYLSRRIGAIVETTLSALKYQGTYSKFMPKHFETTFRRKPRTTPELNAQTLTTTQGIPINIRGQIDRIDTYTKNDTSFVNIIDYKSSEGSATLDLTKVYYGMQMQMMTYMDIVLQNKQRLGLTDIVKPGGLLYFHVHEPRIKFKSWADIDEDKLEQDLIKKFKLSGLVNADQTVIDALDIRLEPKFTSDIVPVGLNKDGSLSKRGSQVADEATIYKFIQHNKENFIETASNIMDGHTEVAPLKYKQKLPCAFCSYQSVCHVDGMIDSKRYR

SEQ ID NO: 5374 - protein, 228 aa, Staphylococcus aureus
MRIDKFLANMGVGTRNEVKQLLKKGLVNVNEQVIKSPKTHIEPENDKISVRGELIEYVENVYIMLNKPKGYISATEDHHSKTVIDLIPEYQHLNIFPVGRLDKDTEGLLLITNDGDFNHELMSPNKHVSKKYEVISANPITEDDIQAFKEGVTLSDGKVKPAILTYIDNQTSHVTIYEGKYHQVKRMFHSIQNEVLHLRRIKIADLELDSNLDSGEYRLLTENDFDKL

SEQ ID NO: 5375 - protein, 449 aa, Staphylococcus aureus
LKGLLAIESVRDDAKASEDAPVGPGPRKALDYMYEIAHRDGFTTHDVDHIAGRIEAGKGNDVLGILCHVDVVPAGDGWDSNPFEPVVTEDAIIARGTLDDKGPTIAAYYAIKILEDMNVDWKKRIHMIIGTDEESDWKCTDRYFKTEEMPTLGFAPDAEFPCIHGEKGITTFDLVQNKLTEDQDEPDYELITFKSGERYNMVPDHAEARVLVKENMTDVIQDFEYFLEQNHLQGDSTVDSGILVLTVEGKAVHGMDPSIGVNAGLYLLKFLASLNLDNNAQAFVAFSNRYLFNSDFGEKMGMKFHTDVMGDVTTNIGVITYDNENAGLFGINLRYPEGFEFEKAMDRFANEIQQYGFEMKLGKVQPPHYVDKNDPFVQKLVTAYRNQTNDMTEPYTIGGGTYARNLDKGVAFGAMFSDSEDLMHQKNEYITKKQLFNATSIYLEAIYSL

SEQ ID NO: 5376 - protein, 261 aa, Staphylococcus aureus
EVDELEQFYQLGWTLDSAGGASGEAYMAEQDGQKLFLKRNSNPFIAALSAEGIVPKLVWTKRIETGEVVTAQHWKNGRELSSNEMKQTRVAHLLKKIHNSRPLLSMLKRMEMEPITPEIMLNKINASLSREVLTHHIVRKSLTYLEEHMPSLDSRFFTVVHGDVNHNNWLLSDRDELFLVDWEGAMIADPAIDIGMLLYNYVPQQQWSEWLETYGVQESLNLNKRMKWYTVIQSIGLVQWYEEQKRYKDMNTWLKFLNEVM

SEQ ID NO: 5377 - protein, 342 aa, Staphylococcus aureus
FMDYAIQLANMVQGQTGVNPPVGAVVVKEGRIVGIGAHLRKGDKHAEVQALDMAQQNAEGATIYITLEPCSHFGSTPPCVNKIIDCKIAKVVYATKDNSLDTHGDDTLRDHGIEVECVDDERSSQLYQDFFKAKAKQLPQITVKVSASLDGKQANDNGQSQWITNKEVKQDVYKLRHRHDAVLTGRRTVELDDPQYTTRIQDGKNPIKVILSKSGNIHFNQQIYQDESTPIWIYTENPNLTTNQTHIEIIYLKSCDLTTILHNLYKRGVGTLLVEAGPTTTSEFLQSNYIDEFILYYAPKLIGGSGNYQFYQTNDVIEIPDANQFEIVHSELLNQNVKLTLR

SEQ ID NO: 5378 - protein, 210 aa, Staphylococcus aureus
MFTGIVEEIGVVKSVQIRQSVRTIEIEAHKITADMHIGDSISVNGACLTVIDFDQTSFTVQVIKGTENKTYLADVKRQSEVNLERAMSGNGRFGGHFVLGHVDELGTVSKINETANAKIITIQCSQHINNQLVKQGSITVDGVSLTVFDKHDNSFDIHLIPETRRSTILSSKKLGDKVHLETDVLFKYVENILNKDKDQLSVDKLRAFGF

SEQ ID NO: 5379 - protein, 391 aa, Staphylococcus aureus
FDNIDSALMALKNGETIIVVDDENRENEGDLVAVTEWMNDNTINFMAKEARGLICAPVSKDIAQRLDLEQMVDDNSDIFGTQFTVSIDHVDTTTGISAYERTLTAKKLIDPSSEAKDFNRPGHLFPLVAQDKGVLARNGHTEAAVDLAKLTGAKPAGVICEIMNDDGTMAKGQDLQKFKEKHQLKMITIDDLIEYRKKLEPEIEFKAKVKMPTDFGTFDMYGFKATYTDEEIVVLTKGAIRQHENVRLHSACLTGDIFHSQRCDCGAQLESSMKYINEHGGMIIYLPQEGRGIGLLNKLRAYELIEQGYDTVTANLALGFDEDLRDYHIAAQILKYFNIEHINLLSNNPSKFEGLKQYGIDIAERIEVIVPETVHNHDYMETKKIKMGHLI

SEQ ID NO: 5380 - protein, 299 aa, Staphylococcus aureus
LWVFGILVILAIVAVVYVAAKIFITGNKIHNPLDRNHSELRDKKVSLNDGDPFTIALFGVDSDADRKKKGGGERSDSIMILSINPKTKKTEIVSIPRDTRAEIVGRGTTEKIAHAYAYGGPNMAVKSLEKLMNVPIDHYATIDMDGLHNMIDSIGGVDVVSNDTFTVDGVRFTKGQQTHVNGDQALKFIRSRKEEGAGGDFGRQQRQQIVLEAMANKIASPSSITHFNSLMNEIQNNVKTDLTLGDLNTIRSNYKDANDTINKHQLSGQGGIQSDGLYYFIPSEQSKAESTKLLKDNLE

SEQ ID NO: 5381 - protein, 978 aa, Staphylococcus aureus
VTLDGKDYLVEPDTNLLEFIKSQDTFVPSICYNESMGPIQTCDTCTVEIDGKIERSCSTVIDRPMTVNTVNNDVKDAQKEALDRILEKHMLYCTVCDYNNGDCEIHNTMDAWGLQHQTYEYKEKPYEKDYGPFYRYDPNQCILCGRCVEACQDIEVNETIRIDWDREHPRVIWDNDVPINESSCVSCGQCATVCPCNAMMEVNMEGNAGYMTDTEPGSLAAMIDLTKKAEPGYGPLFAISDSEAEMRKERIKKTKTVCTYCGVGCSFEVWTKDREILKVQPSHDSPANKIATCVKGKFSWGHINSDQRLTKPLVRKNGEFHEVEWDEALNVIADNFTSIKEKYGPDALSFISSSKATNEESYLMQKLARQVIGTNNVDNCSRYCQAPATKGLFRTVGHGGDSGSIEDLEKAAMSVLIGTNTAEAHPVIASRMKRAQKLFGQKIHVFDIRKHEMAERADRFYQPKPGTDLAWLSAVTKYIIDHDLHDKAFIEEWVEDFDEYYKSLETFTMAFAEEATGIPEAELIKFAEECAKAESVVICWAMGITQQDIGSDSSTAISNLLLVTGNYRRPGTGAYPLRGHNNVQGCSDMGSMPDKITGYQSIEADDIRAKFEKEYGVKLNPKVGKDNHEMVEGVHDGEIHSLYLYGEDTGIVDSNINFVQAAFEKLDFMVVQDEFLTFTATFADVVLPASPSLEKDGTFTNTERRIQRLYQALKPLGDSKPDWKIFQAIANKLGFDWNYKHPSEIMDEIARLTPLYAGVSYERLEGFNSLQWPLHPDGTDEPILYLEGFNFDNGKAKLFPLSFDNYFKQDEVYDIHVNNGRLLEHFHEGNMTYQTPMIKYKVPRAFVEISPELAEDRGIHEGAEVKLISETGEAVLQVHVTDRVKGKEIYIPLNNDAMENGDLGAINLLTNSDVDQYTDTPSYKRTSCRLEVITKRGKSPLNPNNFRVNKKRHPQYSVQVQKKWERPDYVFPGNQVDK

SEQ ID NO: 5382 - protein, 215 aa, Staphylococcus aureus
VEDIVKNFGEGLSETKVLKGINFEMEQGEFVILNGASGSGKTTLLTILGGLLSQTSGTVLYNDAPLFDKQHRPSDLRLEDIGFIFQSSHLVPYLKVIEQLTLVGQEAGMTKQQSSKRAIQLLKNIGLEDRLNVYPHQLSGGEKQRVAIMRAFMNNPKIILADEPTASLDADRATKVVEMIRQQIKEQQMIGIMITHDRRLFEYADRVIELEDGKI

SEQ ID NO: 5383 - protein, 426 aa, Staphylococcus aureus
SESERLQQLSNEYILGGVNSPSRSYKAVGGGAPVVMKEGHGAYLYDVDGNKFIDYLQAYGPIITGHAHPHITKAIQEQAAKGVLFGTPTELEIEFSKKLRDAIPSLEKIRFVNSGTEAVMTTIRVARAYTKRNKIIKFAGSYHGHSDLVLVAAGSGPSQLGSPDSAGVPESVAREVITVPFNDINAYKEAIEFWGDEIAAVLVEPIVGNFGMVMPQPGFLEEVNEISHNNGTLVIYDEVITAFRFHYGAAQDLLGVIPDLTAFGKIVGGGLPIGGYGGRQDIMEQVAPLGPAYQAGTMAGNPLSMKAGIALLEVLEQDGVYEKLDSLGQQLEEGLLKLIEKHNITATINRIYGSLTLYFTDEKVTHYDQVEHSDGEAFGKFFKLMLNQGINLAPSKFEAWFLTTEHTEEDIKQTLKAADYAFSKMK

SEQ ID NO: 5384 - protein, 179 aa, Staphylococcus aureus
MKRIAVYCGASKGHDPSYVQKAYDLGKYFAEQGYELVFGAGSIGIMGAIQDGVLDHGGKAIGVMPKMLDEHEITSQRLTELILVDSMHERKNKMAELADAFVMAPGGAGSLEEFFEMYSWAQIGIHEKPIAIYNINGFFNPLQTMIDHMIEEGFIDPKYRALAPLCDTKESLIESILNF

SEQ ID NO: 5385 - protein, 298 aa, Staphylococcus aureus
NVLNHIQEAFLNTLKVERNFSEHTLKSYQDDLIQFNQFLEQEHLQLNTFEYRDARNYLSYLYLNHLKRTSVSRKISTLRTFYEYWMTLDENIINPFVQLVHPKKEKYLPQFFYEEEMEALFKTVEEDTSKSLRDRVILELLYATGIRVSELVNIKKQDIDFYANGVTVLGKGSKERFVPFGAYCRQSIENYLEHFKPIQSCNHDFLIVNMKGEAITERGVRYVLNDIVKRTAGVSEIHPHKLRHTFATHLLNQGADLRTVQSLLGHVNLSTTGKYTHVSNQQLRKVYLNAHPRAKKEN

SEQ ID NO: 5386 - protein, 178 aa, Staphylococcus aureus
TTLHATTIYAVRHNGKAAMAGDGQVTLGQQVIMKQTARKVRRLYEGKVLAGFAGSVADAFTLFEKFETKLQQFSGNLERAAVELAQEWRGDKQLRQLEAMLIVMDKDAILVVSGTGEVIAPDDDLIAIGSGGNYALSAGRALKRHASHLSAEEMAYESLKVAADICVFTNDNIVVETL

SEQ ID NO: 5387 - protein, 517 aa, Staphylococcus aureus
LLSLLLILLGIILGVVGGYVVARNLLLQKQSQARQTAEDIVNQAHKEADNIKKEKLLEAKEENQILREQTEAELRERRSELQRQETRLLQKEENLERKSDLLDKKDEILEQKESKIEEKQQQVDAKESSVQTLIMKHEQELERISGLTQEEAINEQLQRVEEELSQDIAVLVKEKEKEAKEKVDKTAKELLATAVQRLAADHTSESTVSVVNLPNDEMKGRIIGREGRNIRTLETLTGIDLIIDDTPEAVILSGFDPIRREIARTALVNLVSDGRIHPGRIEDMVEKARKEVDDIIREAGEQATFEVNAHNMHPDLVKIVGRLNYRTSYGQNVLKHSIEVAHLASMLAAELGEDETLAKRAGLLHDVGKAIDHEVEGSHVEIGVELAKKYGENETVINAIHSHHGDVEPTSIISILVAAADALSAARPGARKETLENYIRRLERLETLSESYDGVEKAFAIQAGREIRVIVSPEEIDDLKSYRLARDIKNQIEDELQYPGHIKVTVVRETRAVEYAK

SEQ ID NO: 5388 - protein, 181 aa, Staphylococcus aureus
VIIVHSMHGNSRNHWYQWLEHNLTLEGYDVTLFNFESPEANTVEQWIEAMTKQINVRKKDTYFVTHGLGSITALKYIEMIDQPIEGFFSIAGFKEDAENIDLDIDLSNVTIDYDNIKKKVDNFYGLSSKNDKYVSYKETQRLMNALEGNLRIVEDGGHFLEEDGFETFTALQDRMQDYMTR

SEQ ID NO: 5389 - protein, 474 aa, Staphylococcus aureus
  VARIANT (1)...(474): Xaa = Any Amino Acid
KKATKFAVANLIIVSTVFSSVTPAIAQSDKSSKDESFAVGNTKNPKNVIFLVGDGMGPSFNTAYRYYKNDPHAKEMTPTAFDSYLKGTNRTYSNDPKQNITDSAAGGTAFSSGHKTYNGAIGVDSNKQKVKTVLERAKEKGKSTGLVSTAELTDATPAAYAAHVTSRDDKNEIAKQFYKDKINGKHKVDVLLGGGAKYFGKSNGNLDKKFKKDGYDLATNSKELSKSDKDKVLGLFADKNMPLAIDASKDEPSLADMQQSALSKLERNKKGFFLMVEGASIDKSAHSNDITGVMSEMEGFEKAFDDAIQYAKKHKDTLVVATADHSTGGLTIGKDKGYEWNPQPIKSMKHSGSYMTEKMAKGEDPEKVINEGYGFEFSQDDMKKVKKENKKLKRLLKKEKDEKSADVEKQTKALQHAIQKPVNDKSYTGWTSDGHTGEDVNTYAYGPRSESFSGNIENTESAKIIFDIFKXNIK

SEQ ID NO: 5390 - protein, 639 aa, Staphylococcus aureus
ERIMSSQKKKISLFAFFLLTVITITLKTYFSYYVDFSLGVKGLVQNLILLMNPYSLVALVLSVFLFFKGKKAFWFMFIGGFLLTFLLYANVVYFRFFSDFLTFSTLNQVGNVESMGGAVSASFKWYDFVYFIDTLVYLFILIFKTKWLDTKAFSKKFVPVVMAASVALFFLNLAFAETDRPELLTRTFDHKYLVKYLGPYNFTVYDGVKTIENNQQKALASEDDLTKVLNYTKQRQTEPNPEYYGVAKKKNIIKIHLESFQTFLINKKVNGKEVTPFLNKLSSGKEQFTYFPNFFHQTGQGKTSDSEFTMDNSLYGLPQGSAFSLKGDNTYQSLPAILDQKQGYKSDVMHGDYKTFWNRDQVYKHFGIDKFYDATYYDMSDKNVVNLGLKDKIFFKDSANYQAKMKSPFYSHLITLTNHYPFTLDEKDATIEKSNTGDATVDGYIQTARYLDEALEEYINDLKKKGLYDNSVIMIYGDHYGISENHNNAMEKLLGEKITPAKFTDLNRTGFWIKIPGKSGGINNEYAGQVDVMPTILHLAGIDTKNYLMFGTDLFSKGHNQVVPFRNGDFITKDYKYVNGKIYSNKNNELITTQPADFEKNKKQVEKDLEMSDNVLNGDLFRFYKNPDFKKVNPSKYKY

SEQ ID NO: 5391 - protein, 624 aa, Staphylococcus aureus
MEAYKIEHLNKSYADKTIFDNLDLSISEGEKIGLVGINGTGKSTLLKVIGGIDDDFTANVMHPNQYRIRYSSQKQDLNEDMTVFDAVLSSDTTTLRIIKQYEQAVQAYADDQSDKLFKRMMDAQDAMDQHDAWDYNAEIKTILSKLGIHDTTKYIKELSGGQQKRVVLAKTLIEQPDLLLLDEPTNHLDFESISWLINYVKQYPHTVLFVTHDRYFLNEVSTRIIELNRGKLASYPGNYESYIEMRAEREVTIQKQQQKQRALYKEELAWMRAGAKARTTKQQARINRFNDLENEVNQRYKDDKGELNLAYSRLGKQVFELEDLSKAINDKVLFEHLTEIIQKGERIGVVGPNGAGKTTLLNILSGEDQQFEGKLKTGQTVKVAYFKQTDETLDRDIRMIDYLREESEIAKEKDGTSVSITQLLERFLFPSATHGKKVYKLSGGEQKRLYLLRLLVHQPNVLLLDEPTNDLDTETLTILEDYIHTFGGTMITVSHDRYFLNKVAQSYWFIHDGQIEKIIGTFEDYESYKKSLDKNKSTLKQQSKSSTTVRKKNGLSYKEKLEYEQLMKRIEQAEVRMEEIDVLMIEASADYGKIKELNEEKEQLEIQYDLDITRWSELEEIKEQ

SEQ ID NO: 5392 - protein, 324 aa, Staphylococcus aureus
MKRLSIIVIIGIFIITGCDWQRTSKEPSKNAQQQQVIKIGYLPITHSANLMMTKKLLSQHNHPKYKLELVKFNNWPDLMDALNSGRIDGASTLIELAMKSRQKGSNIKAVALGHHEGNVIMGQKGMHLNEFNNNGDDYHFGIPHRYSTHYLLLEELRKQLKIEPGHFSYHEMSPAEMPAALSEHRITGYSVAEPFGALGEKLGKGKTLKHGDDVIPDAYCCVLVLRGELLDQHKDVAQAFVQDYKKSGFKMNDRKQSVDIMTHHFKQSRDVLTQSAAWTSYGDLTIKPSGYQEITTLVKQHHLFNPPAYDDFVEPSLYKEASRS

SEQ ID NO: 5393 - protein, 303 aa, Staphylococcus aureus
MIYTVTFNPSIDYVIFTNDFKIDGLNRATATYKFAGGKGINVSRVLKTLDVESTALGFAGGFPGKFIVDTLNNSAIQSNFIEVDEDTRINVKLKTGQETEINAPGPHITSTQFEQLLQQIKNTTSDDIVIVAGSVPSSIPSDAYAQIAQITAQTGAKLVVDAEKELAESVLPYHPLFIKPNKDELEVMFNTTVNSDADVIKYGRLLVDKGAQSVIVSLGGDGAIYIDKEISIKAVNPQGKVVNTVGSGDSTVAGMVAGIASGLTIEKAFQQAVACGTATAFDEDLATRDAIEKIKSQVTISVL

SEQ ID NO: 5394 - protein, 643 aa, Staphylococcus aureus
MRVTELLTKDTIAMDLMANDKNGVIDELVNQLDKAGKLSDVASFKEAIHNRESQSTTGIGEGIAIPHAKVAAVKSPAIAFGKSKEGVDYQSLDMQPAHLFFMIAAPEGGAQTHLDALAKLSGILMDENVREKLLHASSPEEVLAIIDHADDEATKEEEAEAEAQQVAAVEANQDTNGSNEPYVLAVTACPTGIAHTYMARDALKKQADKMGIKIKVETNGSSGIKNHLTEQDIKNATGIIVAADVHVETDRFDGKNVVEVPVADGIKRPEELINKALDTSRKPFVARDGQRKGNSNDSQEKLSPGKAFYKHLMNGVSNMLPLVISGGILMAIVFLFGANSFNPKSSEYNAFAEQLWNIGSKSAFALIIPILSGFIARSIADKPGFASGLVGGMLAISGGSGFIGGIIAGFLAGYLTQGVKAMTRKLPQALEGLKPTLIYPLLTVTATGLLMIYVFNPPASWLNHLLLDGLNNLSGSNIVLLGLVIGAMMAIDMGGPFNKAAYVFATGALIEGNAAPITAAMIGGMIPPLAIATAMLIFRRKFTKEQRGSIIPNYVMGMSFITEGAIPFAAADPLRVIPSMMIGSGIGGAIALGLGSRITAPHGGIIVIVGTDGAHLLQTLIALLVGTLVSALIYGLIKPKLTE

SEQ ID NO: 5395 - protein, 390 aa, Staphylococcus aureus
LIIYNGKVYTEDGKIDNGYIHVKDGQIVAIGEVNDKAAIDNDTTNKIQVIDAKGHHVVPGFIDIHIHGGYGQDAMDGSHDGLKYLSENLLSEGTTSYLATTMTQSTDKIDKALINIAKYEVEQDVHNAAEIVGIHLEGPFISENKVGAQHPQYVVRPFIDKIKHFQETANGLIKIMTFAPEVEGAKEALETYKDDIIFSIGHTVATYEEAVEAVERGAKHVTHLYNAATPFQHREPGVFGAAWLNDALHTEMIVDGTHSHPASVAIAYRMKGNERFYLITDAMRAKGMPEGEYDLGGQKVTVQSQQARLANGALAGSILKMNHGLRNLISFTGDTLDHLWRVTSLNQAIALGIDDRKGSIKVNKDADLVILDDDMNVKSTIKQGKVHTFS

SEQ ID NO: 5396 - protein, 756 aa, Staphylococcus aureus
MIKPKYKWKLIKPTEYISDELTSKLKLTPIVKKILESKSIIDEQAIESIISDTDINHDALQLSDMTKTIERIKRAIANDEKILVYGDYDADGVTSTTILVTTLQLLGAQVGWHIPNRFTEGYGPNELAFRNAHDEGITLIITVDNGIQGHNEIKMVQDLGVDVIVTDHHEIGSTLPEAYAIVHPMHPSFNYPFQQLCGAGVAYKLAQALIENVPDYFKALVAIGTIADLVSLTDENRSLVKQGLKVLNDQCPTSVKALLKEAGYNDNIDEETIGFIIGPRLNAVGRLDDASLACELLMTDDEEEAAFLAEQVEHFNRERKDIVAAITEEAMAMAEMKVKNGDLFLLLAKENWHEGVLGIVASKIVETFALPTLILNIDREQNHAKGSARSIDQVSMFEILSAHQELIAKFGGHHMAAGMTMDIENIESLAEGLNKWMKELSETTSLDPVKPVDVLLTENDITIKNIRDMNRLRPFGTDFSRPIFEMDDLSVSSVKAIGQQKNHLKLTLGESNIAALFWQNGHLEPELQDEQPINILGSVQINEWNGNQSPQLIIQDIAMNEQQILDYRSKRKSLPFTENDENIVVLIHPKSDKVNANEYYYGEEIKQQTDKVVLRDLPTSMEDLSNSLQQLQFSQLYIVLQHNHSIYFDGIPNMDVFKKCYKALITKQETNIQKEGMLLCQHLSVKPDTLKFMLKVFLDLKFVTQEDGLIRINQQPDKRSIDSSKVYQLRQQRMDVEKQLLYQDFSEMKNWIKSQL

SEQ ID NO: 5397 - protein, 291 aa, Staphylococcus aureus
MKKIEAWLSKKGLKNKRTLIVVIAFVLFIIFLFLLLNSNSEDSGNITITENAELRTGPNAAYPVIYKVEKGDHFKKIGKVGKWIEVEDTSSNEKGWIAGWHTNLDIVADNTKEKNPLQGKTIVLDPGHGGSDQGASSNTKYKSLEKDYTLKTAKELQRTLEKEGATVKMTRTDDTYVSLENRDIKGDAYLSIHNDALESSNANGMTVYWYHDNQRALADTLDAMIQKKGLLSNRGSRQENYQVLRQTKVPAVLLELGYISNPTDETMIKDQLHRQILEQAIVDGLKIYFSA

SEQ ID NO: 5398 - protein, 260 aa, Staphylococcus aureus
MNVSVNIKNVTKEYRIYRTNKERMKDALIPKHKNKTFFALDDISLKAYEGDVIGLVGINGSGKSTLSNIIGGSLSPTVGKVDRNGEVSVIAISAGLSGQLTGIENIEFKMLCMGFKRKEIKAMTPKIIEFSELGEFIYQPVKKYSSGMRAKLGFSINITVNPDILVIDEALSVGDQTFAQKCLDKIYEFKEQNKTIFFVSHNLGQVRQFCTKIAWIEGGKLKDYGELDDVLPKYEAFLNDFKKKSKAEQKEFRNKLDESR

SEQ ID NO: 5399 - protein, 132 aa, Staphylococcus aureus
MKRVITYGTYDLLHYGHIELLRRAREMGDYLIVALSTDEFNQIKHKKSYYDYEQRKMMLESIRYVDLVIPEKGWGQKEDDVEKFDVDVFVMGHDWEGEFDFLKDKCEVIYLKRTEGISTTKIKQELYGKDAK

SEQ ID NO: 5400 - protein, 201 aa, Staphylococcus aureus
MYSVISKILNFILVKMSKSLYVIGKDNIPKDSKYVVTCTHESYNEVIMLGMALYPNQIHYMAKKELFKNKWIGKFLTSLNAFPVDRENPGPSTLKRPINLLKDNKTVGIFPTGSRTSQEGAPLKRGASTIAMLSKSPILPVAYVGPTKIHGLLTGQAYINIGKPIDINDLPKDLKRNERIDYITKEIETRTAKLQQELHEI

SEQ ID NO: 5401 - protein, 482 aa, Staphylococcus aureus
FFQNLGRSLMLPVAILPAAAIIAGIGNTLNALHAAPKIAMFFTTVGTTILEQLGILFAIGVAIGMAKKNDGAVALAAALGYFLVTVVLSPMKLAPLLGMKASEINSAFEKMNNGNVFVGIVIGLIAAYAYNKFSETELPLALSFFSGKRLVPIMTAFYCTFLVVILLFLWPLLYSWIVKFGESIVGLGSFGAFVYGVANRLLIPTGLHHALNSVFWFDTIGINDIGKFQSGKDAIKGITGRYQAGFFPIMMFGIPAAALAMYHTAKTTQKKQVYGWFLASSVAAFFVGVTEPIEFAFMFVAPILYVVHALLTGLSLFIAATFHWTAGFSFSAGLIDYVLSLINPVSNHPLMLLVQGVVFFILYYVIFRVVIQVFNLNTIGRGENELVDPTVVKDNIAPGENDIKQSKYHNHAIQILEGLGGQENIVNLTNCATRLRLELKDTSIIDQQKIKNAGAVGVTVNGKHSTQVIVGTHVQQVADEIE

SEQ ID NO: 5402 - protein, 361 aa, Staphylococcus aureus
HQPLLLTPGPTPVPDAIMREIQAPMVGHRSKDFEDIAQQAFQGLKPIFGSQNDVLILTSSGTSVLEASMLNIVNPEDHFVVIVSGAFGNRFKQIAQTYYKNVHIYDVTWGEAVDVKDFINYLSTLNVEVKAVFSQYCETSTTVLHPIHELGNAINQFNSNIYFVVDGVSCIGAVDVDINKDKIDVLVSGSQKAIMLPPGLAFVAYSHRAKERFKEVTTPKFYLDLNKYISSQADNSTPFTPNVSLFRGVNAYVETVKAEGFNHVIARHYAIRNALRSALKALDLTLLVNDKDASPTVTAFKPNTNDEVKIIKDELKNRFKITIAGGQGHLKGQILRIGHMGKISPFDILSVVSALEIILTE

SEQ ID NO: 5403 - protein, 141 aa, Staphylococcus aureus
LHQHDFKVQTSWQGGRNNVGNVQGDILSENISIPASLGGVGIGTNPDEMLVSAASSCYIISLAATLERAKFTDISIEQQSIGTACLNNGKFSMSKIVHHPHIEIPSDQIAQLEKRLPKLITIADNNCMISNAVRNNVDIKI

SEQ ID NO: 5404 - protein, 200 aa, Staphylococcus aureus
MARFRGSNWKKSRRLGISLSGTGKELEKRPYAPGQHGPNQRKKLSEYGLQLREKQKLRYLYGMTERQFRNTFDIAGKKFGVHGENFMILLASRLDAVVYSLGLARTRRQARQLVNHGHILVDGKRVDIPSYSVKPGQTISVREKSQKLNIIVESVEINNFVPEYLNFDADSLTGTFVRLPERSELPAEINEQLIVEYYSR

SEQ ID NO: 5405 - protein, 346 aa, Staphylococcus aureus
NRLTQMLSIEYPIIQAGMAGSTTPKLVASVSNSGGLGTIGAGYFNTQQLEDEIDYVRQLTSNSFGVNVFVPSQQSYTSSQIENMNAWLKPYRRALHLEEPVVKITEEQQFKCHIDTIIKKQVPVCCFTFGIPNESIIKRLKEANIKLIGTATSVDEAIANEKAGMDAIVAQGSEAGGHRGSFLNPKNQLPMVGTISLVPQIVDVVSIPVIAAGGIMDGRGVLASIVLGAEGVQMGTAFLTSQDSNASELLRDAIINSKETDTVVTKAFSGKLARGINNRFIEEMSQYEGDIPDYPIQNELTSSIRKAAANIGDKELTHMWSGQSPRLATTHPANTIMSNIINQINQ

SEQ ID NO: 5406 - protein, 431 aa, Staphylococcus aureus
MIERYSREEMSNIWTDQNRYEVWLEVEILACEAWSELGHIPKADVQKIRQNAKVNVERAQEIEQETRHDVVAFTRQVSETLGEERKWVHYGLTSTDVVDTALSFVIKQANDIIEKDLERFIDVLAEKAKNYKYTLMMGRTHGVHAEPTTFGVKMALWYTEMQRNLQRFKQVREEIEVGKMSGAVGTFANIPPEIESYVCKHLGIGTAPVSTQTLQRDRHAYYIATLALIATSLEKFAVEIRNLQKTETREVEEAFAKGQKGSSAMPHKRNPIGSENITGISRVIRGYITTAYENVPLWHERDISHSSAERIMLPDVTIALDYALNRFTNIVDRLTVFEDNMRNNIDKTFGLIFSQRVLLALINKGMVREEAYDKVQPKAMISWETKTPFRELIEQDESITSVLTKEELDECFDPKHHLNQVDTIFERAGLA

SEQ ID NO: 5407 - protein, 679 aa, Staphylococcus aureus
MNALLNHMNTEQSEAVKTTEGPLLIMAGAGSGKTRVLTHRIAYLLDEKDVSPYNVLAITFTNKAAREMKERVQKLVGDQAEVIWMSTFHSMCVRILRRDADRIGIERNFTIIDPTDQKSVIKDVLKNENIDSKKFEPRMFIGAISNLKNELKTPADAQKEATDYHSQMVATVYSGYQRQLSRNEALDFDDLIMTTINLFERVPEVLEYYQNKFQYIHVDEYQDTNKAQYTLVKLLASKFKNLCVVGDSDQSIYGWRGADIQNILSFEKDYPEANTIFLEQNYRSTKTILNAANEVIKNNSERKPKGLWTANTNGEKIHYYEAMTERDEAEFVIREIMKHQRNGKKYQDMAILYRTNAQSRVLEETFMKSNMPYTMVGGQKFYDRKEIKDLLSYLRIIANSNDDISLQRIINVPKRGVGPSSVEKVQNYALQNNISMFDALGEADFIGLSKKVTQECLNFYELIQSLIKEQEFLEIHEIVDEVLQKSGYREMLERENTLESRSRLENIDEFMSVPKDYEENTPLEEQSLINFLTDLSLVADIDEADTENGVTLMTMHSAKGLEFPIVFIMGMEESLFPHIRAIKSEDDHEMQEERRICYVAITRAEEVLYITHATSRMLFGRPQSNMPSRFLKEIPESLLENHSSGKRQTIQPKAKPFAKRGFSQRTTSTKNKYRHLIGM

SEQ ID NO: 5408 - protein, 657 aa, Staphylococcus aureus
RVNELHDLLNQYSYEYYVEDNPSVPDSEYDKLLHELIKIEEEHPEYKTVDSPTVRVGGEAQASFNKVNHDTPMLSLGNAFNEDDLRKFDQRIREQIGNVEYMCELKIDGLAVSLKYVDGYFVQGLTRGDGTTGEDITENLKTIHAIPLKMKEPLNVEVRGEAYMPRRSFLRLNEEKEKNDEQLFANPRNAAAGSLRQLDSKLTAKRKLSVFIYSVNDFTDFNARSQSEALDELDKLGFTTNKNRARVNNIDGVLEYIEKWTSQRESLPYDIDGIVIKVNDLDQQDEMGFTQKSPRWAIAYKFPAEEVVTKLLDIELSIGRTGVVTPTAILEPVKVAGTTVSRASLHNEDLIHDRDIRIGDSVVVKKAGDIIPEVVLSIPERRPEDAFTYHMPTHCPSCGHELVRIEGEVALRCINPKCQAQLVEGLIHFVSRQAMNIDGLGTKIIQQLYQSELIKDVADIFYLTEEDLLPLDRMGQKKVDNLLAAIQQAKDNSLENLLFGLGIRHLGVKASQVLAEKYETIDRLLTVTEAELVEIHDIGDKVAQSVVTYLENEDIRALIQKLKDKHVNMIYKGIKTSDIEGHPEFSGKTIVLTGKLHQMTRNEASKWLASQGAKVTSSVTKNTDVVIAGEDAGSKLTKAQSLGIEIWTEQQFVDKQN

SEQ ID NO: 5409 - protein, 251 aa, Staphylococcus aureus
  VARIANT (1)...(251): Xaa = Any Amino Acid
LKKRRXXKRIFMRMKRFLTIVQILLVVIIIIFGYKIVQTYIEDKQERANYEKLQQKFQMLMSKHQAHVRPQFESLEKINKDIVGWIKLSGTSLNYPVLQGKTNHDYLNLDFEREHRRKGSIFMDFRNELKNLNHNTILYGHHVGDNTMFDVLEDYLKQSFYEKHKIIEFDNKYGKYQLQVFSAYKTTTKDNYIRTDFENDQDYQQFLDETKRKSVINSDVNVTVKDKIMTLSTCEDAYSETTKRIVVVAKI

SEQ ID NO: 5410 - protein, 341 aa, Staphylococcus aureus
QQTMSELKQQALVDINEANDERALQEVKVKYLGKKGSVSGLMKLMKDLPNEEKPAFGQKVNELRQTIQNELDERQQMLVKEKLNKQLAEETIDVSLPGRHIEIGSKHPLTRTIEEIEDLFLGLGYEIVNGYEVEQDHYNFEMLNLPKSHPARDMQDSFYITDEILLRTHTSPVQARTMESRHGQGPVKIICPGKVYRRDSDDATHSHQFTQIEGLVVDKNVKMSDLKGTLELLAKKLFGADREIRLRPSYFPFTEPSVEVDVSCFKCKGKGCNVCKHTGWIEILGAGMVHPNVLEMAGFDSSEYSGFAFGMGPDRIAMLKYGIEDIRHFYTNDVRFLDQFK

SEQ ID NO: 5411 - protein, 792 aa, Staphylococcus aureus
MLISNEWLKEYVTIDDSVSNLAERITRTGIEVDDLIDYTKDIKNLVVGFVKSKEKHPDADKLNVCQVDIGEDEPVQIVCGAPNVDAGQYVIVAKVGGRLPGGIKIKRAKLRGERSEGMICSLQEIGISSNYIPKSFESGIYVFSESQVPGTDALQALYLNDQVMEFDLTPNRADALSMIGTAYEVAALYNTKMTKPETTSNELELSANDELTVTIENEDKVPYYSARVVHDVTIEPSPIWMQARLIKAGIRPINNVVDISNYVLLEYGQPLHMFDQDAIGSQQIVVRQANEGEKMTTLDDTERELLTSDIVITNGQTPIALAGVMGGDFSEVKEHTSNIVIEGAIFDSVSIRHTSRRLNLRSESSSRFEKGIATEFVDEAVDRACYLLQTYANGKVLKDRVSSGELGAFITPIDITADKINRTIGFDLSQNDIVTIFNQLGFDTEINDDVITVQVPSRRKDITIKEDLIEEVARIYGYDDIPSTLPVFEKVTSGQLTDRQYKTRMVKEVLEGAGLDQAITYSLVSKEDTTAFAMQQRQTIDLLMPMSEAHASLRQSLLPHLIEAASYNVARKNKDVKLFEIGNVFFANGEGELPDQVEYLSGILTGDYVVNQWQGKKETVDFYLAKGVVDRVSEKLNLEFSYRRADIDGLHPGRTAEILLENKVVGFIGELHPTLAAENDLKRTYVFELNFDALMAVSVGYINYQPIPRFPGMSRDIALEVDQNIPAADLLSTIHAHGGNILKDTLVFDVYQGEHLEKGKKSIAIRLNYLDTEETLTDERVSKVQAEIEAAL

SEQ ID NO: 5412 - protein, 388 aa, Staphylococcus aureus
MRYLTSGESHGPQLTVIVEGVPANLEVKVEDINKEMFKRQGGYGRGRRMQIEKDTVEIVSGVRNGYTLGSPITMVVTNDDFTHWRKIMGAAPISDEERENMKRTITKPRPGHADLVGGMKYNHRDLRNVLERSSARETAARVAVGALCKVLLEQLDIEIYSRVVEIGGIKDKDFYDSETFKANLDRNDVRVIDDGIAQAMRDKIDEAKNDGDSIGGVVQVVVENMPVGVGSYVHYDRKLDGRIAQGVVSINAFKGVSFGEGFKAAEKPGSEIQDEILYNTELGYYRGSNHLGGLEGGMSNGMPIIVNGVMKPIPTLYKPLNSVDINTKEDFKATIERSDSCAVPAASIVCEHVVAFEIAKALLEEFQSNHIEQLKQQIIERRQLNIEF

SEQ ID NO: 5413 - protein, 196 aa, Staphylococcus aureus
MNLFYNPKYVGDVAFLQIEPIEGELNYNKKGNVVEITNEGNVVGYNIFEISKDITIEETGHIKLTDELVNVFQKRISEAGFDYKLNADLSPKFVVGYVETKDKHPDADKLSVLNVNVGNDTLQIVCGAPNVEAGQKVVVAKVGAVMPSGMVIKDAELRGVASSGMICSMKELNLPNAPEEKGIMVLNDSYEIGQAF

SEQ ID NO: 5414 - protein, 202 aa, Staphylococcus aureus
MSKFDEQIIVVPREIIFNNEKNTFNGFLNKSGAEGQNKSDALSQYEVKRKNDMEEDPSYKQLISYCLLENEHGEILVYERLSGGGEARLHGQSSIGVGGHMNDVPGAESINEVLRVNAQRELEEEVGLSEQDSQNMEYIGFINDDNNEVGKVHIGVVFKITVSTNDVEAKETDTLRIKWIEKGNIESYDDFETWSALILQDL

SEQ ID NO: 5415 - protein, 86 aa, Staphylococcus aureus
MENFDKTMKFDYEELPTQDVRDVLNNVYRTLDERGYNAVNQIVGYLLSGDPAYIPRQNEARNQIRHIDRDVIMEELVSYYLKEQNK

SEQ ID NO: 5416 - protein, 138 aa, Staphylococcus aureus
KILGLDVGSRTVGIAISDIMGWTAQGLDTLRINEENNELGIDQLVDIIKKHNVGTVVIGLPKNMNNSIGFRGEASLTYKEKLLEAYPSIEIVMWDERLSTMAAERSLLEADVSRQKRKQVIDKMAAVFILQGYLDSLH

SEQ ID NO: 5417 - protein, 102 aa, Staphylococcus aureus
MTEHNHDSQLEINNEEELLTLFDEEGNEVLYRKVLEFYHPEFKKEYVILAEEGAQSDEDDMIELVPMINEPDESGDGGKLVPIETDEEWDMIEEVVNTEMEE

SEQ ID NO: 5418 - protein, 446 aa, Staphylococcus aureus
RCLIANRGEIAVRIIRACREYGIETVAVYAKGDEQSLHVHLADQAICIGEANALDSYLNIDRIISAAQITGANAIHPGYGFLSESTKFAQTVEEQGIAFIGPTKNTMEMMGDKITARQTVHHAGVPVIPGSNGAVNHVSEIEKLAKDIGYPVVIKAASGGGGKGIRIVKKAEDLEKAFKEAKSEGKKYFDDDRVYVEAFIPVAKHVEVQVMGDGQDNYVHLGERDCSVQRKNQKLIEESPCAALTEERRQQICNDAVKVARAANYRSAGTIEFLVTDTAHYFIEMNARIQVEHTVTEMRAERDLVAAQLYLLEHNHLPFSQSDIQFNGHVIEARINAENPEKKFQPTPGKVTALHLPQGFNVRVDSLLYHGYQVSPYYDSLVAKVIVKSHDRASAIDKLKATLDEMVIDGFSTTADFLYAVLNYPLYRDGDAKDVDIKFLEKHQIV

SEQ ID NO: 5419 - protein, 247 aa, Staphylococcus aureus
VDLNCDLGEAFGNYSFGGDHQIIPLITSANVACGFHAGDENVMNETVKLAKAHNVAVGAHPGFPDLKGFGRRNIDISNDEIYNLMIYQLGALQGFCRIHQVKINHVKPHGALYQMGAKDREIASVIAQAVYDFDPSLVLVGLANSYLISEAKNVGLITASEVFADRRYEDDGQLVSRKESDAVITDTDEALKQVLKMVKENKVISKNNKEVTLQADTICVHGDGEHALLFVSKIREILMKEGIDIQS

SEQ ID NO: 5420 - protein, 455 aa, Staphylococcus aureus
MAFEGLSERLQATMQKMRGKGKLTEADIKIMMREVRLALLEADVNFKVVKEFIKTVSERALGSDVMQSLTPGQQVIKIVQDELTKLMGGENISINMSNKPPTVVMMVGLQGAGKTTTAGKLALLMRKKYNKKPMLVAADIYRPAAINQLQTVGKQIDIPVYSEGDQVKPQQIVTNALKHAKEEHLDFVIIDTAGRLHIDEALMNELKEVKDIAKPNEIMLVVDSMTGQDAVNVAESFDDQLDVTGVTLTKLDGDTRGGAALSIRSVTQKPIKFVGMSEKLDGLELFHPERMASRISGLGDVSRLIEKAQQDVDQEKAKDLEKKMRESSFTLDDFLEQLDQVKNLGPLDDIIKMIPGMNKMKGLDKLNMSEKQIDHIKAIIQSMTPAERNNPDTLNVSRKKRIAKGSGRSLQEVNRLMKQFNDMKKMMKQFTGGGKGKKGKRNQMQNMLKGMNLPF

SEQ ID NO: 5421 - protein, 159 aa, Staphylococcus aureus
MTLSILVAHDLQRVIGFENQLPWHLPNDLKHVKKLSTGHTLVMGRKTFESIGKPLPNRRNVVLTSDTSFNVEGVDVIHSIEDIYQLPGHVFIFGGQTLFEEMIDKVDDMYITVIEGKFRGDTFFPPYTFEDWEVASSVEGKLDEKNTIPHTFLHLIRKK

SEQ ID NO: 5422 - protein, 675 aa, Staphylococcus aureus
MHHVNKYFNQTMVIEALKMSFYKLNPKQLIKNPIMFVVEVGMILTLILICFPDIFGTSYLSRGYLITIFIILLITILFANFSEAFAEGRGKAQADSLRQAQSNLTARLIEENGAYRIVNATELKAGQNIRVENGETIPADGVVINGLATVDESAITGESAPVIKESGGDFDGVIGGTLVTSDWLEIRVESEAGTSFLDKMIALVEGAERNKTPNEIALFTLLTTLTIIFLVVIVTLYPIASYLHLILPIAMLIALTVCLIPTTIGGLLSAIGIAGMDRVTQFNVLAKSGRAVEVCGDVDVMILDKTGTITYGNRIASEFLPVNQQMWEKLIVAAYMSSIYDDTPEGKSIVRLAKQMYINELPKDIDGTYKPFTAETRMSGIITNEISVFKGAPNSMINLVKQQQGDIPLNIESICMDVSSKGGTPLIVIENNVMLGVIYLKDVIKDGLVERFAELRKMGIETVMCTGDNALTAATIAKEAGVDRFVAECKPEDKIKVIKDEQAKGHIVAMTGDGTNDAPALAQANIGLAMNSGTISAKEAANLIDLDSNPTKLIEVVKIGKQLLMTRGALTTFSLANDVAKYFAILPALMMSTIPEMTSLNIMHLSSPKSAIISALIFNALIIVALIPIAMKGVKVKGYSIDRIFINNMLIYGLGGLIVPFLGIKLIDMIVQFFV

SEQ ID NO: 5423 - protein, 124 aa, Staphylococcus aureus
LTIITMVLCGFLFPLAITLIGQIFFYQQANGSLITYDNRIVGSKLIGQHWTETRYFHGRPSAVDYNMNPEKLYKNGVSSGGSNESNGNTELIARVKHHVKFGNSNVTIDAATSSGSGLDPHITL

SEQ ID NO: 5424 - protein, 252 aa, Staphylococcus aureus
MTKCPKCKKIMYTKELAENLNVCFNCDHHIALTAYKRIEAISDEGSFTEFDKGMTSANPLDFPSYIEKIEKDQQKTGLKEAVVTGTAQLDGMKFGVAVMDSRFRMGSMGSVIGEKICRIIDYCTENRLPFILFSASGGARMQEGIISLMQMGKTSVSLKRHSDAGLLYISYLTHPTTGGVSASFASVGDINLSEPKALIGFAGRRVIEQTINEKLPDDFQTAEFLLEHGQLDKVVHRNDMRQTLSEILKIHQ

SEQ ID NO: 5425 - protein, 322 aa, Staphylococcus aureus
MKKIAVLTSGGDSPGMNAAVRAVVRTAIYNEIEVYGVYHGYQGLLNDDIHKLELGSVGDTIQRGGTFLYSARCPEFKEQEVRKVAIENLRKRGIEGLVVIGGDGSYRGAQRISEECKEIQTIGIPGTIDNDINGTDFTIGFDTALNTIIGLVDKIRDTASSHARTFIIEAMGRDCGDLALWAGLSVGAETIVVPEVKTDIKEIADKIEQGIKRGKKHSIVLVAEGCMTAQDCQKELSQYINVDNRVSVLGHVQRGGSPTGADRVLASRLGGYAVDLLMQGETAKGVGIKNNKIVATSFDEIFDGKDHKFDYSLYELANKLSI

SEQ ID NO: 5426 - protein, 585 aa, Staphylococcus aureus
MRKTKIVCTIGPASESEEMIEKLINAGMNVARLNFSHGSHEEHKGRIDTIRKVAKRLDKIVAILLDTKGPEIRTHNMKDGIIELERGNEVIVSMNEVEGTPEKFSVTYENLINDVQVGSYILLDDGLIELQVKDIDHAKKEVKCDILNSGELKNKKGVNLPGVRVSLPGITEKDAEDIRFGIKENVDFIAASFVRRPSDVLEIREILEEQKANISVFPKIENQEGIDNIAEILEVSDGLMVARGDMGVEIPPEKVPMVQKDLIRQCNKLGKPVITATQMLDSMQRNPRATRAEASDVANAIYDGTDAVMLSGETAAGLYPEEAVKTMRNIAVSAEAAQDYKKLLSDRTKLVETSLVNAIGISVAHTALNLNVKAIVAATESGSTARTISKYRPHSDIIAVTPSEETARQCSIVWGVQPVVKKGRKSTDALLNNAVATAVETGRVTNGDLIIITAGVPTGETGTTNMMKIHLVGDEIANGQGIGRGSVVGTTLVAETVKDLEGKDLSDKVIVTNSIDETFVPYVEKALGLITEENGITSPSAIVGLEKGIPTVVGVEKAVKNISNNMLVTIDAAQGKIFEGYANVL

SEQ ID NO: 5427 - protein, 367 aa, Staphylococcus aureus
RGLEGVIAAETKISSIIESQLTYAGYDIDDLAENAQFEEVIFLLWNYRLPNEEELAHLKGKLNQYMTLNPRVYTHFEEYVTDHVHPMTALRTSLSYIAHFDPDAENESDENRYERAMRIQAKVASLVTAFARVRQDKEPLKPNPDLSYAANFLYMLRGELPTDIEVEAFNKALILHADHELNASAFTARCAVSSLSDMYSGIVAAVGSLKGPLHGGANEQVMTMLSEIGSIENVDAYLDEKFANKDKVMGFGHRVYKDGDPRAKYLREMSRQITKDAGREELFEMSVKMEKRMAEEKGLIPNVDFYSASVYHCMEIPHDLFTPIFAVSRSAGWIAHILEQYKDNRIMRPRAKYIGETNRKYIPLEER

SEQ ID NO: 5428 - protein, 423 aa, Staphylococcus aureus
ITMTAEKITQGTEGLNVPNEPIIPFIIGDGIGPDIWKAASRVIDAAVEKAYNGEKRIEWKEVLAGQKAFDTTGEWLPQETLDTIKEYLIAVKGPLTTPIGGGIRSLNVALRQELDLFTCLRPVRWFKGVPSPVKRPQDVDMVIFRENTEDIYAGIEFKEGTTEVKKVIDFLQNEMGATNIRFPETSGIGIKPVSKEGTERLVRAAIQYAIDNNRKSVTLVHKGNIMKFTEGSFKQWGYDLALTEFGDQVFTWQQYDEIVENEGRDAANAAQEKAEKEGKIIIKDSIADIFLQQILTRPAEHDVVATMNLNGDYISDALAAQVGGIGIAPGANINYETGHAIFEATHGTAPKYAGLNKVNPSSVILSSVLMLEHLGWQEAADKITDSIEDTIASKVVTYDFARLMDGAEEVSTSAFADELIKNL

SEQ ID NO: 5429 - protein, 269 aa, Staphylococcus aureus
LQDVIVQEMKVKKRIDSAEEIMELKQFIKNYVQSHSFIKSLVLGISGGQDSTLVGKLVQMSVNELREEGIDCTFIAVKLPYGVQKDADEVEQALRFIEPDEIVTVNIKPAVDQSVQSLKEAGIVLTDFQKGNEKARERMKVQFSIASNRQGIVVGTDHSAENITGFYTKYGDGAADIAPIFGLNKRQGRQLLAYLGAPKELYEKTPTADLEDDKPQLPDEDALGVTYEAIDNYLEGKPVTPEEQKVIENHYIRNAHKRELAYTRYTWPK

SEQ ID NO: 5430 - protein, 486 aa, Staphylococcus aureus
YQLEDDSLMLHNDLYQINMAESYWNDNIHEKMAVFDLYFRKMPFNSGYAVFNGLKRVIDFIEHFGFSESDLEYLKSIGYKDDFLSYLKDLKFTGSIRSMQEGELCFGNEPLLRVEAPLIQAQLIETILLNIVNFHTLITTKASRIRQIASNDKLMEFGTRRAQEIDAALWGARAAYIGGFDSTSNVRAGKLFGIPVSGTHAHAFVQTYGDEYVAFKKYAERHKNCVFLVDTFHTLKSGVPNAIKVAKELGDKINFVGIRLDSGDIAYLSKEARRMLDEAGFTETKIIASNDLDEETITSLKAQGAKVDSWGVGTKLITGYDQPALGAVYKLVAIENEDGSYSDRIKLSNNAEKVTTPGKKNVYRIINKKTGKAEGDYITLENENPYDEQPLKLFHPVHTYKMKFIKSFEAIDLHHNIYENGKLVYQMPTEDESREYLAQGLQSIWDENKRFLNPQEYPVDLSKACWDNKHKRIFEVAEHVKEMEED

SEQ ID NO: 5431 - protein, 314 aa, Staphylococcus aureus
VIEVCNQIGIPYYAVNFEKEYWDKVFTYFLDEYKKGRTPNPDVMCNKEIKFKAFLDHAMNLGANYVATGHYARIHRHEDGHVEMLRGVDNNKDQTYFLNQLSQQQLSKVMFPIGDIEKSEVRRIAEEQGLVTAKKKDSTGICFIGEKNFKTFLSQYLPAQPGDMITLDGKKMGKHSGLMYYTIGQRHGLGIGGDGDPWFVVGKNLKDNVLYVEQGFHHDALYSDYLIASDYSFVNPEDNDLDQGFECTAKFRYRQKDTKVFVKRENDHALRVTFAEPVRAITPGQAVVFYQGDVCLGGATIDDVFKNEGQLNYV

SEQ ID NO: 5432 - protein, 876 aa, Staphylococcus aureus
MKKLKASEIRQKYLDFFVEKGHMVEPSAPLVPIDDDTLLWINSGVATLKKYFDGRETPKKPRIVNSQKAIRTNDIENVGFTARHHTFFEMLGNFSIGDYFKQEAIEFAWEFLTSDKWMGMEPDKLYVTIHPEDMEAYNIWHKDIGLEESRIIRIEGNFWDIGEGPSGPNTEIFYDRGEAYGQDDPAEEMYPGGENERYLEVWNLVFSEFNHNKDHSYTPLPNKNIDTGMGLERMASVSQNVRTNYETDLFMPIMNEIEKVSGKQYLVNNEQDVAFKVIADHIRTIAFAISDGALPANEGRGYVLRRLLRRAVRFSQTLGINEPFMYKLVDIVADIMEPYYPNVKEKADFIKRVIKSEEERFHETLEDGLAILNELIKKAKETTNEINGKDAFKLYDTYGFPIELTEEIAVQAGLKVDMTTFESEMQQQRDRARQARQNSQSMQVQSEVLKNITSASTFVGYDTATAQTTLTHLIYNGEEVSQVEAGETVYFMLTETPFYAVSGGQVADTGIVYNDNFEIAVSEVTKAPNGQNLHKGVVQFGQVNVGATVSAEVNQNDRRDIQKNHSATHLLHAALKSVLGDHVNQAGSLVEADRLRFDFSHFGPMTNDEIDQVERLVNEEIWKGIDVNIQEMDIASAKEMGAMALFGEKYGDVVRVVNMAPFSIELCGGIHVRNTSEIGLFKIVSESGTGAGVRRIEALTGKAAFLYLEDIQEKFNTMKSQLKVKSDDQVVDKLTQLQDEEKALLKQLEQRDKEITSLKMGNIEDQVEEINGYKVLVTEVDVPNAKAIRSTMDDFKSKLQDTIIILASNVDDKVSMVATVPKSLTNNVKAGDLIKQMAPIVGGKGGGRPDMAQGGGTQPENISKSLSFIKDYIKNL

SEQ ID NO: 5433 - protein, 845 aa, Staphylococcus aureus
IDALADKGKKALEALSKKSQEEIDHIVHQMSLAAVDQHMVLAKLAHEETGRGIYEDKAIKNLYASEYIWNSIKDNKTVGIIGEDKEKGLTYVAEPIGVICGVTPTTNPTSTTIFKAMIAIKTGNPIIFAFHPSAQESSKRAAEVVLEAAMKAGAPKDIIQWIEVPSIEATKQLMNHKGIALVLATGGSGMVKSAYSTGKPALGVGPGNVPSYIEKTAHIKRAVNDIIGSKTFDNGMICASEQVVVIDKEIYKDVTNEFKAHQAYFVKKDELQRLENAIMNEQKTGIKPDIVGKSAVEIAELSGIPVPENTKLIIAEISGVGSDYPLSREKLSPVLALVKAQSTKQAFQICEDTLHFGGLGHTAVIHTEDETLQKDFGLRMKACRVLVNTPSAVGGIGDMYNELIPSLTLGCGSYGRNSISHNVSATDLLNIKTIAKRRNNTQIFKVPAQIYFEENAIMSLTTMDKIEKVMIVCDPGMVEFGYTKTVENVLRQRTEQPQIKIFSEVEPNPSTNTVYKGLEMMVDFQPDTIIALGGGSAMDAAKAMWMFFEHPETSFFGAKQKFLDIGKRTYKIGMPENATFICIPTTSGTGSEVTPFAVITDSETNVKYPLADFALTPDVAIIDPQFVMSVPKSVTADTGMDVLTHAMESYVSVMASDYTRGLSLQAIKLTFEYLKSSVEKGDKVSREKMHNASTLAGMAFANAFLGIAHSIAHKIGGEYGIPHGRANAILLPHIIRYNAKDPQKHALFPKYEFFRADTDYADIAKFLGLKGNTTEALVESLAKAVYELGQSVGIEMNLKSQGVSEEELNESIDRMAELAFEDQCTTANPKEALISEIKDIIQTSY

SEQ ID NO: 5434 - protein, 254 aa, Staphylococcus aureus
MIDIHNHILPNIDDGPTNETEMLDLLKQATTQGVTEIIVTSHHLHPRYTTPIEKVKSCLNHIESLEEVQALNLKFYYGQEIRITDQILNDIDRKVITGINDSRYLLIEFPSNEVPHYTDQLFFELQSKGFVPIIAHPERNKAISQNLDILYDLINKGALSQVTTASLAGISGKKIRKLAIQMIENNLTHFIGSDAHNTEIRPFLMKDLFNDKKLRDYYEDMNGFISNAKLVVDDKKIPKRMPQQDYKQKRWFGL

SEQ ID NO: 5435 - protein, 339 aa, Staphylococcus aureus
DKILLITGGTGSFGNAVMKRFLDSNIKEIRIFSRDEKKQDDIRKKYNNSKLKFYIGDVRDSQSVETAMRDVDYVFHAAALKQVPSCEFFPVEAVKTNIIGTENVLQSAIHQNVKKVICLSTDKAAYPINAMGISKAMMEKVFVAKSRNIRSEQTLICGTRYGNVMASRGSVIPLFIDKIKAGEPLTITDPDMTRFLMSLEDAVELVVHAFKHAETGDIMVQKAPSSTVGDLATALLELFEADNAIEIIGTRHGEKKAETLLTREEYAQCEDMGDYFRVPADSRDLNYSNYVETGNEMITQSYEYNSDNTHILTVEEIKEKLLTLEYVRNELNDYKASMR

SEQ ID NO: 5436 - protein, 285 aa, Staphylococcus aureus
DYIVKALAFDGEIRAYAALTTETVQEAQTRHYTWPTASAAMGRTMTATAMMGAMLKGDQKLTVTVDGQGPIGRIIADANAKGEVRAYVDHPQTHFPLNEQGKLDVRRAVGTNGSIMVVKDVGMKDYFSGASPIVSGELGEDFTYYYATSEQTPSSVGLGVLVNPDNTIKAAGGFIIQVMPGAKDETISKLEKAISEMTPVSKLIEQGLTPEGLLNEILGEDHVQILEKMPVQFECNCSHEKFLNAIKGLGEAEIQNMIKEDHGAEAVCHFCGNKYKYTEEELNVL

SEQ ID NO: 5437 - protein, 303 aa, Staphylococcus aureus
DNITQIIGGTPVVKLRNVVDDNAADVYVKLEYQNPGGSVKDRIALAMIEKAEREGKIKPGDTIVEPTSGNTGIGLAFVCAAKGYKAVFTMPETMSQERRNLLKAYGAELVLTPGSEAMKGAIKKAKELKEEHGYFEPQQFENPANPEVHELTTGPELLQQFEGKTIDAFLAGVGTGGTLSGVGKVLKKEYPNIEIVAIEPEASPVLSGGEPGPHKLQGLGAGFIPGTLNTEIYDSIIKVGNDTAMEMSRRVAKEEGILAGISSGAAIYAAIQKAKELGKGKTVVTVLPSNGERYLSTPLYSFD

SEQ ID NO: 5438 - protein, 267 aa, Staphylococcus aureus
MTKTKIMGILNVTPDSFSDGGKFNNVESAVTRVKAMMDEGADIIDVGGVSTRPGHEMVSLEEELNRVLPVVEAIVGFDVKISVDTFRSEVAEACLKLGVDIINDQWAGLYDHRMFQIVAKYDAEIILMHNGNGNRDEPVVEEMLTSLLAQAHQAKIAGIPSNKIWLDPGIGFAKTRNEEAEVMARLDELVATEYPVLLATSRKRFTKEMMGYDTTPVERDEVTAATTAYGIMKGVRAVRVHNVELNAKLAKGIDFLKENENARHNLS

SEQ ID NO: 5439 - protein, 242 aa, Staphylococcus aureus
MDHKSPLVSWNLFGFDIVFNLSSILMILVTAFLVFLLAIICTRNLKKRPTGKQNFVEWIFDFVRGIIEGNMAWKKGGQFHFLAVTLILYIFIANMLGLPFSIVTKDHTLWWKSPTADATVTLTLSTTIILLTHFYGIKMRGTKQYLKGYVQPFWPLAIINVFEEFTSTLTLGLRLYGNIFAGEILLTLLAGLFFNEPAWGWIISIPGLIVWQAFSIFVGTIQAYIFIMLSMVYMSHKVADEH

SEQ ID NO: 5440 - protein, 168 aa, Staphylococcus aureus
ANLFVLGAAGGVEWGTVIVQVLTFIVLLALLKKFAWGPLKDVMDKRERDINRDIDDAEQAKLNAQKLEEENKQKLKETQEEVQKILEDAKVQARQQQEQIIHEANVRANGMIETAQSEINSQKERAIADINNQVSELSVLIASKVLRKEISEQDQKALVDKYLKEAGD

SEQ ID NO: 5441 - protein, 502 aa, Staphylococcus aureus
MAIKAEEISALLRSQIENYESEMSVTDVGTVLQIGDGIALIHGLNDVMAGELVEFHNGVLGLAQNLEESNVGVVILGPYTGITEGDEVKRTGRIMEVPVGEELIGRVVNPLGQPIDGQGPINTTKTRPVEKKATGVMDRKSVDEPLQTGIKAIDALVPIGRGQRELIIGDRQTGKTTIAIDTILNQKDQGTICIYVAIGQKDSTVRANVEKLRQAGALDYTIVVAASASEPSPLLYIAPYSGVTMGEEFMFNGKHVLIVYDDLTKQAAAYRELSLLLRRPPGREAYPGDVFYLHSRLLERAAKLNDDLGGGSITALPIIETQAGDISAYVPTNVISITDGQIFLQSDLFFSGVRPAINAGQSVSRVGGSAQIKAMKKVAGTLRLDLASYRELESFAQFGSDLDEFTASKLERGKRTVEVLKQDQNKPLPVEHQVLIIYALTKGYLDDIPVVDITRFEDELNHWAESNATELLNEIRETGGLPDAEKFDTAINEFKKSFSKSE

SEQ ID NO: 5442 - protein, 89 aa, Staphylococcus aureus
MAISQERKNEIIKEYRVHETDTGSPEVQIAVLTAEINAVNEHLRTHKKDHHSRRGLLKMVGRRRHLLNYLRSKDIQRYRELIKSLGIRR

SEQ ID NO: 5443 - protein, 696 aa, Staphylococcus aureus
MSQEKKVFKTEWAGRSLTIETGQLAKQANGAVLVRYGDTVVLSTATASKEPRDGDFFPLTVNYEEKMYAAGKIPGGFKKREGRPGDDATLTARLIDRPIRPLFPKGYKHDVQIMNMVLSADPDCSPQMAAMIGSSMALSVSDIPFQGPIAGVNVGYIDGKYIINPTVEEKEVSRLDLEVAGHKDAVNMVEAGASEITEQEMLEAIFFGHEEIQRLVDFQQQIVDHIQPVKQEFIPAERDEALVERIKSLTEEKGLKETVLTFDKQQRDENLDNLKEEIVNEFIDEEDPENELLIKEVYAILNELVKEEVRRLIADEKIRPDGRKPDEIRPLDSEVGILPRTHGSGLFTRGQTQALSVLTLGALGDYQLIDGLGPEEEKRFMHHYNFPNFSVGETGPVRAPGRREIGHGALGERALKYIIPDTADFPYTIRIVSEVLESNGSSSQASICGSTLALMDAGVPIKAPVAGIAMGLVTREDSYTILTDIQGMEDALGDMDFKVAGTKEGITAIQMDIKIDGLTREIIEEALEQARRGRLEIMNHMLQTIDQPRTELSAYAPKVVTMTIKPDKIRDVIGPGGKKINEIIDETGVKLDIEQDGTIFIGAVDQAMINRAREIIEEITREAEVGQTYQATVKRIEKYGAFVGLFPGKDALLHISQISKNRIEKVEDVLKIGDTIEVKITEIDKQGRVNASHRAL

SEQ ID NO: 5444 - protein, 515 aa, Staphylococcus aureus
MFPEDEMLGIDIVIPDISYVLENKDKLKGIFLTHGHEHAIGAVSYVLEQLDAPVYGSKLTIALIKENMKARNIDKKVRYYTVNNDSIMRFKNVNISFFNTTHSIPDSLGVCIHTSYGAIVYTGEFKFDQSLHGHYAPDIKRMAEIGEEGVFVLISDSTEAEKPGYNTPENVIEHHMYDAFAKVRGRLIVSCYASNFIRIQQVLNIASKLNRKVSFLGRSLESSFNIARKMGYFDIPKDLLIPITEVDNYPKNEVIIIATGMQGEPVEALSQMAQHKHKIMNIEEGDSVFLAITASANMEVIIANTLNELVRAGAHIIPNNKKIHASSHGCMEELKMMINIMKPEYFIPVQGEFKMQIAHAKLAAEAGVAPEKIFLVEKGDVINYNGKDMILNEKVNSGNILIDGIGIGDVGNIVLRDRHLLAEDGIFIAVVTLDPKNRRIAAGPEIQSRGFVYVRESEDLLREAEEKVREIVEAGLQEKRIEWSEIKQNMRDQISKLLFESTKRRPMIIPVISEI

SEQ ID NO: 5445 - protein, 323 aa, Staphylococcus aureus
MIAVNWNTQEDMTNMFWRQNISQMWVETEFKVSKDIASWKTLSEAEQDTFKKALAGLTGLDTHQADDGMPLVMLHTTDLRKKAVYSFMAMMEQIHAKSYSHIFTTLLPSSETNYLLDEWVLEEPHLKYKSDKIVANYHKLWGKEASIYDQYMARVTSVFLETFLFFSGFYYPLYLAGQGKMTTSGEIIRKILLDESIHGVFTGLDAQHLRNELSESEKQKADQEMYKLLNDLYLNEESYTKMLYDDLGITEDVLNYVKYNGNKALSNLGFEPYFEEREFNPIIENALDTTTKNHDFFSVKGDGYVLALNVEALQDDDFVFDNK

SEQ ID NO: 5446 - protein, 339 aa, Staphylococcus aureus
IRTIGSMLILVYSMLAAFLFIDKVFVNIIYFQGMFYTQIFGIPVFLFLNLIIILLCIIVGSVLAYKINQQNDWIKTQIERSMEGETVGINDQNIEIYSETLDLYHTLVPLNQELHKLRLKTQNLTNENYNINDVKVKKIIEDERQRLARELHDSVSQQLFAASMMLSAIKETKLEPPLDQQIPILEKMVQDSQLEMRALLLHLRPLGLKDKSLGEGIKDLVIDLQKKVPMKVVHEIQDFKVPKGIEDHLFRITQEAISNTLRHSNGTKVTVELFNKDDYLLLRIQDNGKGFNVDEKLEQSYGLKNMRERALEIGATFHIVSLPDSGTRIEVKAPLNKED

SEQ ID NO: 5447 - protein, 412 aa, Staphylococcus aureus
LTNYKEKLQQYAELLVKVGMNVQPKQPVFIRSSVETLELTHLIVEEAYHCGASDVRVVYSDPTLKRLKFENESVEHFANHEIKSYDVEARMDYVKRGAANLALISEDPDLMDGIDSQKLQAFQQQNARAFKGYMESVQKNQFPWVVAAFPSKAWAKRVYPELSVEEAYIKFIDEVFDIVRIDGNDPVENWRQHIANLSVYAQKLQQKNYHALHYVSEGTDLTVGLAKNHIWEDATSYVNGKEQAFIANIPTEEVFTAPDRNRVDGYVTNKLPLSYNGTIIDQFKLMFKDGEIIDFSAEKGEAVLKDLINTDEGSRRLGEVALVPDDSPISNRNTIFYNTLFDENAACHLAIGSAYAFNIQGGTEMTVEEKIASGLNDSNVHVDFMIGSSDLTIYGIFEDGSKELVFENGNWA

SEQ ID NO: 5448 - protein, 226 aa, Staphylococcus aureus
  VARIANT (1)...(226): Xaa = Any Amino Acid
LHFTQREQDKLMIVVAAEVARRRKARGLKLNHPEALALISDELLEGARDGKTVAELMSYGRQILNKEDVMDGVEHMITDIEIEATFPDGTKLITVHHPIVXGGSQMIPGEIITKSTEVEINNHHPETVIEVENTGDRPIQVGSHFHFYEANAALDFEREMAYGKHLDIPAGAAVRFEPGDKKEVQLVEYAGKRKIFGFRGMVNGPIDESRVYRPTDENDEYAGVFG

SEQ ID NO: 5449 - protein, 204 aa, Staphylococcus aureus
VANPIKIGIGGPVGAGKTQLIEKVVKRLSKEMSIGVITNDIYTKEDEKILVNSGVLPESRIIGVETGGCPHTAIREDASMNFAAIDELLERHDDIELIFIESGGDNLAATFSPELVDFSIYIIDVAQGEKIPRKGGQGMIKSDFFVINKTDLAPYVGASLEQMAEDTKVFRGKRPFTFTNLKTDEGLDEVIDWIERDTLLKGLS

SEQ ID NO: 5450 - protein, 196 aa, Staphylococcus aureus
MYDTYHSGWIECITGSMFSGKSEELIRRLRRGIYAKQKVVVFKPAIDDRYHKEKVVSHNGNAIEAINISKASEIMTHDLTNVDVIGIDEVQFFDDEIVSIVEKLSADGHRVIVAGLDMDFRGEPFEPMPKLMAVSEQVTKLQAVCAVCGSSSSRTQRLINGKPAKIDDPIILVGANESYEPRCRAHHIVAPSDNNK

SEQ ID NO: 5451 - protein, 412 aa, Staphylococcus aureus
MSYITKQDKVIAEAIEREFQRQNSNIELIASENFVSEAVMEAQGSVLTNKYAEGYPGRRYYGGCEFVDVTESIAIDRAKALFGAEHVNVQPHSGSQANMAVYLVALEMGDTVLGMNLSHGGHLTHGAPVNFSGKFYNFVEYGVDKDTERINYDEVRKLALEHKPKLIVAGASAYSRTIDFKKFKEIADEVNAKLMVDMAHIAGLVAAGLHPNPVEYADFVTTTTHKTLRGPRGGMILCKEEYKKDIDKTIFPGIQGGPLEHVIAAKAVAFGEALENNFKTYQQQVVKNAKVLAEALINEGFRIVSGGTDNHLVAVDVKGSIGLTGKEAEETLDSVGITCNKNTIPFDQEKPFVTSGIRLGTPAATTRGFDEKAFEEVAKIISLALKNSKDEEKLQQAKERVAKLTAEYPLYQ

SEQ ID NO: 5452 - protein, 209 aa, Staphylococcus aureus
MSKVHVFDHPLIQHKLSYIRDVNTGTKEFRELVDEVGMLMAYEVTRDLELQDVDIETPVTKMTAKRLAGKKLAIVPILRAGLGMTDGILSLVPAARVGHIGLYRDPETLKAVEYFAKLPQDITERQIIVVDPMLATGASAIEAITSLKKRGAKNIRFMCLIAAPEGVEKMHEAHPDVDIYIAALDEKLNDKAYITPGLGDAGDRLFGTK

SEQ ID NO: 5453 - protein, 376 aa, Staphylococcus aureus
  VARIANT (1)...(376): Xaa = Any Amino Acid
KIMTIFGTRPEAIKMAPLVKALEQEKMLEPIVVVTAQHREMLDSVLSTFEIKPKYDLNIMKSGQTLSEITSKSITQLEQVIQLEKPDMVLVHGDTMTTFAGGLTAFYNQVPIGHVEAGLRSYDKYSPFPEEVNRQLVGVLADLHFAPTKNAASHLLSEGKYSESVVVTGNTAIDAMKYTVDDNYKSNIMDKYHDKKFILMTAHRRENIGQPMENIFKAVRRLIDEYTDLALVYPMHKNPKVREVAQKILGSHDRIELIEPLDVVDFHNFAKKSYFILTDSGGIQEEAPSFNKPVLVLRSVTERPESVEAGTLKVIGPNKQNVYQAAKELIDDERLYHQMSEASNPYGDGFASERIVNHIKYYLNLITEKPSDFXGK

SEQ ID NO: 5454 - protein, 159 aa, Staphylococcus aureus
MFHFIIMVVYNMNYNILEVKEMPFTMKGYPEKWKEFEVIKRQKAIEIANAMLKEGYLEKDVVPIAAKKAKDWYRALSKEEIKALEEENFVQFHTATMEKTEVDSEYATTDNEEHIQEQSNQDKSYFDSESIGNQSGGVRQREPLMDGPHPKVVESFKDV

SEQ ID NO: 5455 - protein, 235 aa, Staphylococcus aureus
MSCNEGVALMMYGYPEKWLEGMTTGESIAAELRLGIVNGHIAEGTLLTENQMAKQFNVSRSPIRDAFKLLQQNQLIQLERMGAHVLPFGEQEKKEMYDLRLMLESFAFSRVKNQERLPIVKEMKKQLEMMKVAVKFEDAESFTKHDFEFHETLIKASNHQYLNSFWSHLKPVMMALVLTSMRQRMQQNPQDFERIHHNHQVFIDAVEQYDSQILKEAFHLNFDDVGKDIEGFWLN

SEQ ID NO: 5456 - protein, 978 aa, Staphylococcus aureus
MIVVGMGQDKEAAASEQKTTTVEENGNSATDNKTSETQTTATNVNHIEETQSYNATATEQPSNATQVTTEEAPKAVQAPQTAQPANLETVKEEVVKEEAKPQVKETTQPQDNSGDQKQVDLTPKMATQNQAAETQVEVAQPRTVSESNPRVTRSADVVEAKEASDAKVETGTDVTSKVTVESGSIEAPQGNKVEPHAGQRVVLKYKLKFEKGLHKGDYFDFTLSNNVNTYGVSTARKVPEIKNGSVVMATGQLLGNGKIRYTFTDYIDYKVNVTADLEINLFIDPKTVQSNGQQTITSTLNDKETKNTLPIEYNPGVSNSYANVNGSIETFDKGNNRFTHVAYIKPQNGHKSDSVSITGTLTQGSKADGKAPTVKVYEVLKDANELPQSVYANVSDSSMFKDVTEEMKDKLKVENNGNYKLDIEKLEKSYVIHYDGEYLSGSDQVNFRTHMFGYPEQQYKYYYTHLGYKLTWDNGLVLYSNKAKGDGTNGTITESNNMTFDEEYGTGVITGQYDKNLVTTVEEEYDSSTLDIDYHTAIDGEGGYVDGYIETIEETDSSAIDIDYHTAVDSEAGHVGGYTESSEESNPIDFEESTHENSKHHADVVEYEEDTNPGGGQVTTESNLVEFDEESIKGIVTGAVSDHTTVEDTKEYTTESNLIELVDELPEEHGQAQGPIEEITENNHHISHSGLGTENGHGNYGVIEEIEENSHVDIKSELGYEGGQNSGNQSFEEDTEEDKPKYEQGGNIVDIDFDSVPQIQGQNNGNQSFEEDTEKDKPKYEQGGNIIDIDFDSVPQIHGFNKHNEIIEEDTNKDKPNYQFGGHNSVDFEEDTLPKVSGQNEGQQTIEEDTTPPTPPTPEVPSEPGEPTPPTPEVPSEPETPTPPTPEVPAEPGKPVPPAKEEPKKPSKPVEQGKVVTPVIEINEKVKAVAPTKQKQSKKSELPETGGEESTNKGMLFGGLFSILGLALLRRNKKNHKA

SEQ ID NO: 5457 - protein, 197 aa, Staphylococcus aureus
MEHIFREGQNGAPTLILLHGTGGDEFDLLPLGEALNENYHLLSIRGQVSENGMNRYFKRLGEGVYDEEDLAFRGQELLTFIKEAAERYDFDIEKAVLVGFSNGSNIAINLMLRSEAPFKKALLYAPLYPIEVTSTKNLSDVSVLLSMGKHDPIVPLAASEQVINLFKTRGAQVEEVWVNDHEITETGLTAGQQLLGK

SEQ ID NO: 5458 - protein, 144 aa, Staphylococcus aureus
MDRTKQSLNVFVGMNRALDTLEQITKEDVKRYGLNITEFAVLELLYNKGPQPIQRIRDRVLIASSSISYVVSQLEDKGWITREKDKDDKRVYMACLTEKGQSQMADIFPKHAETLTKAFDVLTKDELTILQQAFMKLSAQSTEV

SEQ ID NO: 5459 - protein, 309 aa, Staphylococcus aureus
LIVALFLVAACGNTDNSSKKESSTKDTISVKDENGTVKVPKDAKRIVVLEYSFADALAALDVKPVGIADDGKKKRIIKPVREKIGNYTSVGTRKQPNLEEISKLKPDLIIADSSRHKGINKELNKIAPTLSLKSFDGDYKQNINSFKTIAKALNKEKEGEKRLAEHDKLIKKYKDEIKFDRNQKVLPAVVAKAGLLAHPNYSYVGQFLNELGFKNALSDDVTKGLSKYLKGPYLQLDTEHLADLNPERMIIMTDNAKKDSAEFKKLQEDPTWKKLNAVKNNRVDIVDRDVWARSRGLISSEEMAKELVE

SEQ ID NO: 5460 - protein, 302 aa, Staphylococcus aureus
MSKTAIIFPGQGAQKVGMAQDLYNNNDQATEILTSAANTLDFDILETMFTDEDGKLGETENTQPALLTHSSALLAALKNLNPDFTMGHSLGEYSSLVAADVLSFEDAVKIVRKRGQLMAQAFPTGVGSMAAVLGLDFDKVDEICKSLSSDDKIIEPANINCPGQIVVSGHKALIDELVEKGKSLGAKRVMPLAVSGPFHSSLMKVIEEDFSSYINQFEWHDAKFPVVQNVNAQGETDKEVIKSNMVKQLYSPVQFINSTEWLIDQGVDHFIEIGPGKVLSGLIKKINRDVKLTSIQTLEDVK

SEQ ID NO: 5461 - protein, 246 aa, Staphylococcus aureus
MKMTKSALVTGASRGIGRSIALQLAEEGYNVAVNYAGSKEKAEAVVEEIKAKGVDSFAIQANVADADEVKAMIKEVVSQFGSLDVLVNNAGITRDNLLMRMKEQEWDDVIDTNLKGVFNCIQKATPQMLRQRSGAIINLSSVVGAVGNPGQANYVATKAGVIGLTKSAARELASRGITVNAVAPGFIVSDMTDALSDELKEQMLTQIPLARFGQDTDIANTVAFLASDKAKYITGQTIHVNGGMYM

SEQ ID NO: 5462 - protein, 73 aa, Staphylococcus aureus
ENFNKVKDIIVDRLGVDADKVTEDASFKDDLGADSLDIAELVMELEDEFGTEIPDEEAEKINTVGDAVKFINS

SEQ ID NO: 5463 - protein, 238 aa, Staphylococcus aureus
VKQKKFMKIYEALKEDILNGQIQYGEQIPSEHDLVQLYQSSRETVRKALDLLALDGMIQKIHGKGSLVIYQEVTEFPFSELVSFKEIQEEMGVAYLTEVVVNEVVEAHEVPEVQHALNINSSESLIHIVRTRRLNQHVKIVDEDYFLKSIVSDIGNDVASDSIYDYLEKVLNLNISYSSKSITFEPFDEQAYQLFGDVSVAYSATVRSIVYLENTMPFQYNISKHLANEFKFNDFSRR

SEQ ID NO: 5464 - protein, 563 aa, Staphylococcus aureus
LNYQALYRMYRPQSFEDVVGQEHVTKTLRNAISKEKQSHAYIFSGPRGTGKTSIAKVFAKAINCLNSTDGEPCNECHICKGITQGTNSDVIEIDAASNNGVDEIRNIRDKVKYAPSESKYKVYIIDEVHMLTTGAFNALLKTLEEPPAHAIFILATTEPHKIPPTIISRAQRFDFKAISLDQIVERLKFVADAQQIECEDEALAFIAKASEGGMRDALSIMDQAIAFGDGTLTLQDALNVTGSVHDEALDHLFDDIVQGDVQASFKKYHQFITEGKEVNRLINDMIYFVRDTIMNKTSEKDTEYRALMNLELDMLYQMIDLINDTLVSIRFSVNQNVHFEVLLVKLAEQIKGQPQVIANVAEPAQIASSPNTDVLLQRMEQLEQELKTLKAQGVSVAPTQKSSKKPARGIQKSKNAFSMQQIAKVLDKANKADIKLLKDHWQEVIDHAKNNDKKSLVSLLQNSEPVAASEDHVLVKFEEEIHCEIVNKDDEKRSSIESVVCNIVNKNVKVVGVPSDQWQRVRTEYLQNRKNEGDDMPKQQVQQTDIAQKAKDLFGEETVHVID

SEQ ID NO: 5465 - protein, 105 aa, Staphylococcus aureus
MRGGGNMQQMMKQMQKMQKKMAQEQEKLKEERIVGTAGGGMVAVTVTGHKEVVDVEIKEEAVDPDDIEMLQDLVLAATNEAMNKADELTQERLGKHTQGLNIPGM

SEQ ID NO: 5466 - protein, 198 aa, Staphylococcus aureus
MHYPEPISKLIDSFMKLPGIGPKTAQRLAFHTLDMKEDDVVQFAKALVDVKRELTYCSVCGHITENDPCYICEDKQRDRSVICVVEDDKDVIAMEKMREYKGLYHVLHGSISPMDGIGPEDINIPSLIERLKNDEVSELILAMNPNLEGESTAMYISRLVKPIGIKVTRLAQGLSVGGDLEYADEVTLSKAIAGRTEM

SEQ ID NO: 5467 - protein, 366 aa, Staphylococcus aureus
MVYSASMVPATKGTLTGGIDVPGTYFYNRQLAYVIMSFIIVFFIAFLMNVKLLSNIKVQKGMIITIVSLLLLTLVIGKDINGSKSWINLGFMNLQASELLKIAIILYIPFMISKKMPRVLSKPKLILSPIVLALGCTFLVFLQKDVGQTLLILIILVAIIFYSGIGVNKVLRFGIPAVLGFLVVFVIALMAGWLPSYLTARFSTLTDPFQFESGTGYHISNSLLAIGNGGVFGKGLGNSAMKLGYLPEPHTDFIFAIICEELGLIGGLLVITLEFFIVYRAFQFANKTSSYFYKLVCVGIATYFGSQTFVNIGGISATIPLTGVPLPFISFGGSSMISLSIAMGLLLIVGKQIKVDQQRKKQQQKV

SEQ ID NO: 5468 - protein, 1147 aa, Staphylococcus aureus
KQIKKLLVANRGEIAIRIFRAAAELDISTVAIYSNEDKSSLHRYKADESYLVGSDLGPAESYLNIERIIDVAKQANVDAIHPGYGFLSENEQFARRCAEEGIKFIGPHLEHLDMFGDKVKARTTAIKADLPVIPGTDGPIKSYELAKEFAEEAGFPLMIKATSGGGGKGMRIVREESELEDAFHRAKSEAEKSFGNSEVYIERYIDNPKHIEVQVIGDEHGNIVHLFERDCSVQRRHQKVVEVAPSVGLSPTLRQRICDAAIQLMENIKYVNAGTVEFLVSGDEFFFIEVNPRVQVEHTITEMVTGIDIVKTQILVAAGADLFGEEINMPQQKDITTLGYAIQCRITTEDPLNDFMPDTGTIIAYRSSGGFGVRLDAGDGFQGAEISPYYDSLLVKLSTHAISFKQAEEKMVRSLREMRIRGVKTNIPFLINVMKNKKFTSGDYTTKFIEETPELFDIQPSLDRGTKTLEYIGNVTINGFPNVEKRPKPDYELASIPTVSSSKIASFSGTKQLLDEVGPKGVAEWVKKQDDVLLTDTTFRDAHQSLLATRVRTKDMINIASKTADVFKDGFSLEMWGGATFDVAYNFLKENPWERLERLRKAIPNVLFQMLLRASNAVGYKNYPDNVIHKFVQESAKAGIDVFRIFDSLNWVDQMKVANEAVQEAGKISEGTICYTGDILNPERSNIYTLEYYVKLAKELEREGFHILAIKDMAGLLKPKAAYELIGELKAAVDLPIHLHTHDTSGNGLLTYKQAIDAGVDIIDTAVASMSGLTSQPSANSLYYALNGFPRHLRTDIEGMESLSHYWSTVRTYYSDFESDIKSPNTEIYQHEMPGGQYSNLSQQAKSLGLGERFDEVKDMYRRVNFLFGDIVKVTPSSKVVGDMALYMVQNDLDEQSVITDGYKLDFPESVVSFFKGEIGQPVNGFNKDLQAVILKGQEALTARPGEYLEPVDFEKVRELLEEEQQGPVTEQDIISYVLYPKVYEQYIQTRNQYGNLSLLDTPTFFFGMRNGETVEIEIDKGKRLIIKLETISEPDENGNRTIYYAMNGQARRIYIKDENVHTNANVKPKADKSNPSHIGAQMPGSVTEVKVSVGETVKANQPLLITEAMKMETTIQAPFDGVIKQVTVNNGDTIATGDLLIEIEKA

SEQ ID NO: 5469 - protein, 398 aa, Staphylococcus aureus
QFSRRTFLKMLGIGGAGVAIGASGVGSMWSFKSMFNTPEDPEKDAYEFYGKVQPGITTPTQKTCNFVALDLKSKDRDAIKAMFKKWTVMADRMMDGDTVGKTSNNPLMPPVDTGESIGLGASKLTITFGISKSLMKKIGLSSKIPDAFKDLPHFPNDQLIDDYSDGDIMIQACSNDSQVSFHAVHNLVRPFRDIVKVRWSQSGFISAKGKETPRNLMAFKDGTINPRKSNQLKDYVFIDDGWAKHGTYCVVRRIQIHIETWDRTALEEQEATFGRKRHSGAPLTGGKEFDEIDLKAKDSHGEYIIDKDAHTRLAKEANTSILRRAFNYVDGTDDRTGNFETGLLFIAFQKATQQFIDIQNNLGSNDKLNEYITHRGSASFLVLPGVSKGGYLGETLFD

SEQ ID NO: 5470 - protein, 660 aa, Staphylococcus aureus
IGKIINERYKIVDKLGGGGMSTVYLAEDTILNIKVAIKAIFIPPREKEETLKRFEREVHNSSQLSHQNIVSMIDVDEEDDCYYLVMEYIEGPTLSEYIESHGPLSVDTAINFTNQILDGIKHAHDMRIVHRDIKPQNILIDSNKTLKIFDFGIAKALSETSLTQTNHVLGTVQYFSPEQAKGEATDECTDIYSIGIVLYEMLVGEPPFNGETAVSIAIKHIQDSVPNVTTDVRKDIPQSLSNVILRATEKDKANRYKTIQEMKDDLSSVLHENRANEDVYELDKMKTIAVPLKKEDLAKHISEHKSNQPKRETTQVPIVNGPAHHQQFQKPEGMLYEPKPKKKSTRKIVLLSLIFSLLMIALVSFVAMAMFGNKYEETPDVIGKSVKEAEQIFNKNNLKLGKISRSYSDKYPENEIIKTTPNTGERVERGDSVDVVISKGPEKVKMPNVIGLPKEQALQKLKSLGLKDVKIEKVYNNQAPKGYIANQSVTANTEIAIHDSNIKLYESLGIKQVYVEDFEHKSFSKAKKALEEKGFKVESKEEYSDDIDEGDVISQSPKGKSVDEGSTISFVVSKGEKSDSSDVKTTTESVDVPYTGKNDKSQKVKVYIKDKDNDGSTEKGSFDITSDQRIDIPLRIEKGKTASYIVKVDGKTVAEKEVSY

SEQ ID NO: 5471 - protein, 1021 aa, Staphylococcus aureus
MNMKKKEKHAIRKKSIGVASVLVGTLIGFGLLSSKEADASENSVTQSDSASNESKSSDSSSVNAAPKTDNTNVSDTKTTSNTNNGETSVAQNPAQQETTQSASTNATTEETPVTGEATTTATKQANTPATTQSSNTNAEELVNQTSNETASNDTNTVSSVNSPQNSTNAENVSTTQDTSTEATPSNNESAPQSTDASNKDVVNQAVNTSAPRMRAFSLAAVAADAPAAGTDITNQLTDVKVTIDSGTTVYPHQAGYVKLNYGFSVPNSAVKGDTFKITVPKELNLNGVTSTAKVPPIMVGDQVLANGVIDSDGNVIYTFTDYVDTKENVTANITMPAYIDPENVTKTGNVTLTTGIGTNTASKTVLIDYEKYGQFHNLSIKGTIDQIDKTNNTYRQTIYVNPSGDNVVLPALTGNLIPNTKSNALIDAKNTDIKVYRVDNANDLSESYYVNPSDFEDVTNQVRISFPNANQYKVEFPTDDDQITTPYIVVVNGHIDPASTGDLALRSTFYGYDSNFIWRSMSWDNEVAFNNGSGSGDGIDKPVVPEQPDEPGEIEPIPEDSDSDPGSDSGSDSNSDSGSDSGSDSTSDSDSDSASDSDSASDSDSASDSDSTSDSDSASDSDSASDSDSASDSDSASDSDSASDSDSDSDSDSDSDSDSDSDSDSDSDSDSDSDSDSDSDSDSDSDSDSDSDSDSDSDSDSDSDSDSDSDSDSDSDSDSDSDSDSDSDSDSDSDSDSDSDSDSDSDSDSDSDSDSDSDSDSDSDSDSDSDSDSDSDSDSDSDSDSDSDSDSDSDSDSDSDSDSNSDSDSDSDSDSDSDSDSDSDSDSDSDSDSDSDSDSDSDSDSESDSDSDSDSDSDSDSDSDSDSDSDSDSDSDSDSDSDSASDSDSGSDSDSASDSDSGSDSDSASDSDSGSDSDSSSDSDSDSASDSTSDTESDNDSDSESDSNSDSDSGSNNNVVPPNSPKNGTNASNKNEAKDSKEPLPDTGSEGEANTSLIWGLLASLGSLLLFRRKKENKDKK

SEQ ID NO: 5472 - protein, 311 aa, Staphylococcus aureus
VFHHISVMLNETIDYLNVKENGVYIDCTLGGAGHALYLLNQLNDDGRLIAIDQDQTAIDNAKEVLKDHLHKVTFVHSNFRELTQILKDLNIEKVDGIYYDLGVSSPQLDIPERGFSYHHDATLDMRMDQTQELTAYEIVNNWSYEALVKIFYRYGEEKFSKQIARRIEAHREQQPITTTLELVDIIKEGIPAKARRKGGHPAKRVFQALRIAVNDELSAFEDSIEQAIELVKVDGRISVITFHSLEDRLCKQVFQEYEKGPEVPRGLPVIPEAYTPKLKRVNRKPITATEEDLDDNNRARSAKLRVAEILK

SEQ ID NO: 5473 - protein, 744 aa, Staphylococcus aureus
MAKQKIKIKKNKIGAVLLVGLFGLLFFILVLRISYIMITGHSNGQDLVMKANEKYLVKNAQQPERGKIYDRNGKVLAEDVERYKLVAVIDKKASANSKKPRHVVDKKETAKKLSTVIDMKPEEIEKRLSQKKAFQIEFGRKGTNLTYQDKLKIEKMNLPGISLLPETERFYPNGNFASHLIGRAQKNPDTGELKGALGVEKIFDSYLSGSKGSLRYIHDIWGYIAPNTKKEKQPKRGDDVHLTIDSNIQVFVEEALDGMVERYQPKDLFAVVMDAKTGEILAYSQRPTFNPETGKDFGKKWANDLYQNTYEPGSTFKSYGLAAAIQEGAFDPDKKYKSGHRDIMGSRISDWNRVGWGEIPMSLGFTYSSNTLMMHLQDLVGADKMKSWYERFGFGKSTKGMFDGEAPGQIGWSNELQQKTSSFGQSTTVTPVQMLQAQSAFFNDGNMLKPWFVNSVENPVSKRQFYKGQKQIAGKPITKDTAEKVEKQLDLVVNSKKSHAANYRIDGYEVEGKTGTAQVAAPNGGGYVKGPNPYFVSFMGDAPKKNPKVIVYAGMSLAQKNDQEAYELGVSKAFKPIMENTLKYLNVGKSKDDTSNAEYSKVPDVEGQDKQKAIDNVSAKSLEPVTIGSGTQIKAQSIKAGNKVLPHSKVLLLTDGDLTMPDMSGWTKEDVIAFENLTNIKVNLKGSGFVSHQSISKGQKLTEKDKIDVEFSSENVDSNSTNNSDSNSDDKKKSDSKTDKDKSD

SEQ ID NO: 5474 - protein, 449 aa, Staphylococcus aureus
MLNYTGLENKNVLVVGLAKSGYEAAKLLSKLGANVTVNDGKDLSQDAHAKDLESMGISVVSGSHPLTLLDNNPIIVKNPGIPYTVSIIDEAVKRGLKILTEVELSYLISEAPIIAVTGTNGKTTVTSLIGDMFKKSRLTGRLSGNIGYVASKVAQEVKPTDYLVTELSSFQLLGIEKYKPHIAIITNIYSAHLDYHENLENYQNAKKQIYKNQTEEDYLICNYHQRQVIESEELKAKTLYFSTQQEVDGIYIKDGFIVYKGVRIINTEDLVLPGEHNLENILAAVLACILAGVPIKAIIDSLTTFSGIEHRLQYVGTNRTNKYYNDSKATNTLATQFALNSFNQPIIWLCGGLDRGNEFDELIPYMENVRAMVVFGQTKAKFAKLGNSQGKSVIEANNVEDAVDKVQDIIEPNDVVLLSPACASWDQYSTFEERGEKFIERFRAHLPSY

SEQ ID NO: 5475 - protein, 439 aa, Staphylococcus aureus
MDDKTKNDQQESNEDKDELELFTRNTSKKRRQRKRSKATHFSNQNKDDTSQQAEFDEEIYLINKDFKKEESKDENNDSASSHANNNNIDDSTDSNNENEDYRYNQEIDDQNESNGIAFDNEQPQSAPKDQNSDSNDEETVTKKERKSKVTQLKPLTLEEKRKLRRKRQKRIQYSVITILVLLIAVILIYMFSPLSKIAHVNINGNNHVSTSKINKVLGVKNDSRMYTFSKKNAINDLEEDPLIKSVEIHKQLPNTLNVDITENEIIALVKYKGKYLPLLENGKLLKGSNDVKINDAPVMDGFKGTKEDDMIKALSEMTPEVRRYIAEVTYAPSKNKQSRIELFTTDGLQVIGDISTISKKMKYYPQMSQSLSRDSSGKLKTRGYIDLSVGASFIPYRGNTSTQSESDKNVTKSSQEENQAKEELQSVLNKINKQSSKNN

SEQ ID NO: 5476 - protein, 64 aa, Staphylococcus aureus
MADESKFEQAKGNVKETVGNVTDNKNLENEGKEDKASGKAKEFVENAKEKATDFIDKVKGNKGE

SEQ ID NO: 5477 - protein, 249 aa, Staphylococcus aureus
ASTLEIKDLHVSIEDKEILKGVNLTINTDEIHAIMGPNGTGKSTLSSAIMGHPSYEVTKGEVLLDGVNILELEVDERAKAGLFLAMQYPSEITGVTNADFMRSAINAKREEGQEINLMQFIKKLDKNMDFLDIDKDMAQRYLNEGFSGGEKKRNEILQLMMLEPKFAILDEIDSGLDIDALKVVSKGINQMRGENFGALMITHYQRLLNYITPDKVHVMYAGKVVKSGGPELAKRLEEEGYEWVKEEFG

SEQ ID NO: 5478 - protein, 141 aa, Staphylococcus aureus
NLDQLYRSVIMDHYKNPRNKGVLDNGSMTVDMNNPTCGDRIRLTFDIEDGIIKDAKFEGEGCSISMASASMMTQAVKGHSLGEAMQMSQEFTKMMLGEDYVITEEMGDIEALQGVSQFPARIKCATLAWKALEKGTVAKEG

SEQ ID NO: 5479 - protein, 449 aa, Staphylococcus aureus
RRHAIILAAGKGTRMKSKKYKVLHEVAGKPMVEHVLESVKGSGVDQVVTIVGHGAESVKGHLGERSLYSFQEEQLGTAHAVQMAKSHLEDKEGTTIVVCGDTPLITKETLETLIAHHEDANAQATVLSASIQQPYGYGRIVRNASGRLERIVEEKDATHAEKDINEISSGIFAFNNKTLFEKLTQVKNDNAQGEYYLPDVLSLILNDGGIVEVYRTNDVEEIMGVNDRVMLSQAEKAMQRRTNHYHMLNGVTIIDPDSTFIGPDVIIGSDTVIEPGVRINGRTEIGEDVVIGQYSEINNSTIENGACIQQSVVNDASVGANTKVGPFAQLRPGAQLGADVKVGNFVEIKKADLKDGAKVSHLSYIGDAVIGERTNIGCGTITVNYDGENKFKTIVGKDSFVGCNVNLVAPVTIGDDVLVAAGSTITDDVPNDSLAVARARQTTKEGYRK

SEQ ID NO: 5480 - protein, 1160 aa, Staphylococcus aureus
MTILTTLIKEDNHFQDLNQVFGQANTLVTGLSPSAKVTMIAEKYAQSNQQLLLITNNLYQADKLETDLLQFVDAEELYKYPVQDIMTEEFSTQSPQLMSERIRTLTALAQGKKGLFIVPLNGLKKWLTPVEMWQNHQMTLRVGEDIDVDQFLYKLVNMGYKRESVVSHIGEFSLRGGIIDIFPLIGEPIRIELFDTEIDSIRDFDVETQRSKDNIEEVDITTASDYIITEEVISHLKEELKSAYENTRPKIDKSVRNDLKETYESFKLFESTYFDHQILRRLVAFMYETPSTIIDYFQKDAIIAVDEFNRIKETEESLTVESDSFISNIIESGNGFIGQSFIKYDDFETLIEGYPVTYFSLFATTMPIKLNHIIKFSCKPVQQFYGQYDIMRSEFQRYVNQNYHIVVLVETETKVERMQAMLSEMHIPSITKLHRSMSSGQAVIIEGSLSEGFELPDMGLVVITERELFKSKQKKQRKRTKAISNAEKIKSYQDLNVGDYIVHVHHGVGRYLGVETLEVGQTHRDYIKLQYKGTDQLFVPVDQMDQVQKYVASEDKTPKLNKLGGSEWKKTKAKVQQSVEDIAEELIDLYKEREMAEGYQYGEDTAEQTTFELDFPYELTPDQAKSIDEIKDDMQKSRPMDRLLCGDVGYGKTEVAVRAAFKAVMEGKQVAFLVPTTILAQQHYETLIERMQDFPVEIQLMSRFRTPKEIKQTKEGLKTGFVDIVVGTHKLLSKDIQYKDLGLLIVDEEQRFGVRHKERIKTLKHNVDVLTLTATPIPRTLHMSMLGVRDLSVIETPPENRFPVQTYVLEQNMSFIKEALERELSRDGQVFYLYNKVQSIYEKREQLQMLMPDANIAVAHGQMSERDLEETMLSFINNEYDILVTTTIIETGVDVPNANTLIIEDADRFGLSQLYQLRGRVGRSSRIGYAYFLHPANKVLTETAEDRLQAIKEFTELGSGFKIAMRDLNIRGAGNLLGKQQHGFIDTVGFDLYSQMLEEAVNEKRGIKEPESEVPEVEVDLNLDAYLPTEYIANEQAKIEIYKKLRKTETFDQIIDIKDELIDRFNDYPVEVARLLDIVEIKVHALHSGITLIKDKGKIIDIHLSVKATENIDGEVLFKATQPLGRTMKVGVQNNAMTITLTKQNQWLDSLKFLVKCIEE

SEQ ID NO: 5481 - protein, 365 aa, Staphylococcus aureus
  VARIANT (1)...(365): Xaa = Any Amino Acid
MAHTITIVGLGNYGIDDLPLGIYKFLKTQNKVYARTLDHPVIESLQDELTFQSFDHVYETHDQFEDVYNDIVAQLVEAANEKDIVYAVPGHPRVAETTTVKLLALAKDNTDIDVKVLGGKSFIDDVFEAVNVDPNDGFTLLDATSLQEVTLNVRTHTLITQVYSAMVAANLKITLMERYPDDYPVQIVTGSRSDGADNVVTCPLYELDHDENAFNNLTSVFVPKITTPTYLYHDFDFATEVIDTLVDEDKGCPWDKVQTHETLKRYLLEETFELFEAIDNEDDWHMIEELGDILLQVLLHTSIGKKEGYIDIKEVITSLNAKMIRRHPHIFGDANAETIDDLKEIWSKAKDAERXTAKSXIXKSI

SEQ ID NO: 5482 - protein, 444 aa, Staphylococcus aureus
QYDLVVLGGGTAGYVAAIRASQLGKKVAIVERQLLGGTCLHKGCIPTKSLLKSAEVFQTVKQAAMFGVDVKDANVNFENMLARKEDIINQMYQGVKHLMQHNHIDIYNGTGRILGTSIFSPQSGTISVEYEDGESDLLPNQFVLIATGSSPAELPFLSFDHDKILSSDDILSLKTLPSSVGIIGGGVIGMEFASLMIDLGVDVTVIEAGERILPTESKQASQLLKKSLSARGVKFYEGIKLSENDINVNEDGVTFEISSDIIKVDKVLLSIGRKPNTSDIGLNNTKIKLSTSGHILTNEFQQTEDKHIYAAGDCIGKLQLAHVGSKEGVVAVDHMFEGNPIPVNYNMMPKCIYSQPEIASIGLNIEQAKAEGMKVKSFKVPFKAIGKAVIDSHDANEGYSEMVIDQSTEEIVGINMIGPHVTELINEASLLQFMNGSALELGLT

SEQ ID NO: 5483 - protein, 321 aa, Staphylococcus aureus
YKSLGLSEEDLKVIYKWMDLGRKIDERLWLLNRAGKIPFVVSGQGQEATQIGMAYALEEGDITAPYYRDLAFVTYMGISAYDTFLSAFGKKDDVNSGGKQMPSHFSSRAKNILSQSSPVATQIPHAVGAALALKMDGKKKIATATVGEGSSNQGDFHEGLNFAGVHKLPFVCVIINNKYAISVPDSLQYAAEKLSDRALGYGIHGEQVDGNNPLAMYKAMKEARERAISGQGSTLIEAVTSRMTAHSSDDDDQYRTKEEREALKKADCNEKFKKELLSAGIIDDAWLAEIEAEHKDIINKVTKAAEDAPYPSVEEAYAFVY

SEQ ID NO: 5484 - protein, 327 aa, Staphylococcus aureus
MAKLSYLEAIRQAQDLALQQNKDVFILGEDVGKKGGVFGTTQGLQQQYGEDRVIDTPLAESNIVGTAIGAAMVGKRPIAEIQFADFILPATNQIISEAAKMRYRSNNEWQCPLTIRAPFGGGVHGGLYHSQSIESIFASSPGLTIVIPSTPYDAKGLLLSSIESNDPVLYFEHKKAYRFLKEEVPEEYYTVPLGKADVKREGEDLTVFCYGLMVNYCLQAADILAADGINVEVVDLRTVYPLDKETIIDRAKHTGKVLLVTEDNLEGSIMSEVSAIIAEHCLFELDAPIMRLAAPDVPSMPFSPVLENEIMMNPEKILNKMRELAEF

SEQ ID NO: 5485 - protein, 425 aa, Staphylococcus aureus
VMEITMPKLGESVHEGTIEQWLVSVGDHIDEYEPLCEVITDKVTAEVPSTISGTITEILVEAGQTVAIDTIICKIETADEKTNETTEEIQAKVDEHTQKSTKKASATVEQTSTAKQNQPRNNGRFSPVVFKLASEHDIDLSQVVGSGFEGRVTKKDLMSVIENGGTTAQSDKQVQTQSTSVATSSNQSSEDNSENSTIPVNGVRKAIAQNMVNSVTEIPHAWMMIEVDATNLVNTRNHYKNNFKNKEGYNLTFFAFFVKAVADALKAYPLLNSSWQGNEIVLHTDINISIAVADENKLYVPVIKHADEKSIKGIAREINTLATKARNKQLTTEDMQGGTFTVNNTGTFGSVSSMGIINHPQAAILQVESIVKKPVVIDDMIAIRSMVNLCISIDHRILDGLQTGKFMNHIKQRIEQYTLENTNIY

SEQ ID NO: 5486 - protein, 144 aa, Staphylococcus aureus
MDMNFDLYMNGVVEQARNEIESAGYEQLTTAEDVDKVLKQDGTTLVMINSVCGCAGGIARPAASHALHYDVLPDRLVTVFAGQDKEATQRAREYFEGYAPSSPSFALVKDGKITEMIERHQIEGHDVMNVINQLQTLFNKYCEE

SEQ ID NO: 5487 - protein, 314 aa, Staphylococcus aureus
YKIGFRTIKTAVGMTLGVIISKLLGLDNYASSAILVVLCIKHTKVHSLQAIISRLVSCFLVLFLGSAIFSLLGQSPIVLGIIVLLFIPLTVVLKVQEGVITSCVILLHVFNAKSIDVHLIVNETLLLLIGLSIAFTMNLMMPSLDKQLDEYKCKIEQQIADIFSKYSYICEKYEDTIAIEFEALLLNIKKAKSIAFRDVKNHFVRNENSYYHYFDMREEQVELLMRMKPLIESICHKDPLLNDVASLLKEIGLNVNSNDYTAMRLHNLYETRLKLDELPLPTTHKALNSRASIIQILNELEEYLQIKSQFGSLK

SEQ ID NO: 5488 - protein, 60 aa, Staphylococcus aureus
MADESKFDQFKGNVKETVGNVTDNKELEKEGQQDKATGKAKEVVENAKNKITDAIDKLRK

SEQ ID NO: 5489 - protein, 82 aa, Staphylococcus aureus
LAKYTIVDMDTCIACGACGAAAPDIYDYDDEGIAFVILDDNQGTAEVPEELYEDMEDAIDGCPTDSIKIADETFDGDALKFE

SEQ ID NO: 5490 - protein, 506 aa, Staphylococcus aureus
ELILVLDFGSQYNQLITRRIREMGVYSELHDHEISIEEIKKMNPKGIILSGGPNSVYEEGSFTIDPEIYNLGIPVLGICYGMQLTTKLLGGKVERANEREYGKAIINAKSDELFAGLPAEQTVWMSHSDKVIEIPEGFEVIADSPSTDYAAIEDKKRRIYGVQFHPEVRHTEYGNDLLNNFVRRVCDCKGQWTMENFIEIEIEKIRQRVGDRRVLCAMSGGVDSSVVAVLLHKAIGDQLTCIFVDHGLLRKGEGDMVMEQFGEGFNMNIIRVNAKDRFMNKLKGVSDPEQKRKIIGNEFVYVFDDEASKLKGVDFLAQGTLYTDVIESGTKTAQTIKSHHNVGGLPEDMEFELIEPINTLFKDEVRKLGIELGIPEHLVWRQPFPGPGLGIRVLGEITEDKLEIVRESDAILRQVIREEGLEREIWQYFTVLPNIQSVGVMGDYRTYDHTVGIRAVTSIDGMTSDFARIDWEVLQKISSRIVNEVDHVNRVVYDITSKPPSTIEWE

SEQ ID NO: 5491 - protein, 537 aa, Staphylococcus aureus
MNIVKDQLENAGFNVKMNIQPDYGSYRTQRQAGNYDIQIDDWMTVFGDPNYAMTALFSSTGSNSLLKDKHVDQLLNKASTQNEADVKQTYKQIEDEVVFDKGYMAPLYGSKKNLVYDNKVLDKNSVGLPNSRALIWQQFDYNNSRERDTRPLVMTQQDGEIPTLDPIRSIAPSVYSINMNMYTRLLLLDENDHLTTKGSLSRDYAVNKDNKAFYFLLRDDDYFAKVVNGQARNTGERVSAEDVKFSLDRARDKKSVPNNNTYNMHKHINDIKILKDEDIDQLRKEKDKDDKSIYDKLIKAYNVKSLTTDGQRVNNKDGIYQIVKITTDQSMPREVNYLTHSSAGILSKKFVNQVNQEYPKGYGDSSTIPANSDGKNALYASGAYIMTQKNAYQATFQRNPGFNETEKGSYGPAKIKNITLKFNGDPNNALSELRNHSIDMLADVNQKHFDLIKSDKNLSIIRKNGRKSVFLMLNIKKGIFKTHPNLRQAVVNAIDQDQFIKFYRGDKFKIASPITPLVDTGNEQRQDLEKVEKAINQ

SEQ ID NO: 5492 - protein, 568 aa, Staphylococcus aureus
MKVEVYKGAQGKHNLKDYEETYNTFDWKDVEQAFSWSETGKMNMAYECIDRHVDQGSGDKIALNYKDEHRKESYTYKDMQRLSNKAANVLSEHAEVDKGDRVFIFMSRTPELYFALLGVLKIGAIVGPLFEAFMEKAVADRLENSEAKVLITNKALLPRVPLDKLPNLKKIVVVDEDVEDNYIDFISLMETASDEFDIEWLKSDDGLILHYTSGSTGQPKGVLHVQQAMLVHYISGKYVLDLQEDDVYWCTADPGWVTGTSYGIFAPWLNGATNCIAGGRFSPEQWYSMIEDFKVTIWYTAPTALRMLMSAGDDIVEKYDLSSLRSILSVGEPLNPEVIKWAKKVYGLTVLDTWWMTETGGHMIVNYPTMDVKLGSMGKPLPGIQAAIIDDAGNELPPNRMGNLAIKKGWPSMMYRIWKNPEKYKSYFIGDWYVSGDSAYKDEDGYFWFQGRVDDVIMTAGERVGPFEVESKLVEHEAVAEAGIIGKPDPVRGEIIKAFVALRKGYEPTDELKEEIRLFVKEGLSAHAAPREIEFKDKLPKTRSGKIMRRVLKAWELNLDAGDLSTME

SEQ ID NO: 5493 - protein, 870 aa, Staphylococcus aureus
MNKHQPKLRSFYSIRKSTLGVASVIVSTLFLITSQHQAQAAENTNTSDKISENQNNNATTTQPPKDTNQTQPATQPANTAKNYPAADESLKDAIKNPAVENKEHDIGPREQVNFQLLDKNNETQYYHFFSIKDPADVYYTKKKAEVELDINTASTWKKFEVYENNQKLPVRLVSYSPVPEDHAYIRFPVSDGTQELKIVSSTQIDDGAETNYDYTKLVFAKPIYNDPSLVKSDTNDAVATNDQSSSDASNQTNTNTSNQNTSTTNNANNQPQATTDMSQPAQPKSSANADQASSQPAHETNSNGNTNDKTNESSNQSDVNQQYPPADESLQDAIKNPAIIDKEHTADNWRPIDFQMKNDKGERQFYHYASTVEPATVIFTKTGPIIELGLKTASTWKKFEVYEGDKKLPVELVSYDSDKDYAYIRFPVSNGTREVKIVSSIEYGENIHEDYDYTLMVFAQPITNNPDDYVDEETYNLQKLLAPYHKAKTLERQVYELEKLQEKLPEKYKAEYKKKLDQTRVELADQVKSAVTEFENVTPTNDQLTDVQEAHFVVFESEENSESVMDGFVEHPFYTATLNGQKYVVMKTKDDSYWKDLIVEGKRVTTVSKDTKNNSRTLIFPYIPDKAVYNAIVKVVVANIGYEGQYHVRIINQDIKTQDDDTSQNNTSEPLNVQTGQEDNVTATDTATNNSIETTPSEATDKVDLIEPESDMVKDTDSSVDKDAHHDVDHLSDMSGNTHFDKYDLKEMDTQIAKDTDKGVDNSVGMSSNVDTDKDSNKNKDKVIQLDHITDKNKVNNTGTETNIDTMKYHPISTIKVTDKKTTEHLPNDIHKTVDKTVKTKEKAGTPSKENKLSQSKMLPKTGETTSSQS

SEQ ID NO: 5494 - protein, 415 aa, Staphylococcus aureus
LIEDLKWRGLIYQQTDEQGIEDLLNKEQVTLYCGADPTADSLHIGHLLPFLTLRRFQEHGHRPIVLIGGGTGMIGDPSGKSEERVLQTEEQVDKNIEGISKQMHNIFEFGTDHGAVLVNNRDWLGQISLISFLRDYGKHVGVNYMLGKDSIQSRLEHGISYTEFTYTILQAIDFGHLNRELNCKIQVGGSDQWGNITSGIELMRRMYGQTDAYGLTISLVTKSDGKKFGKSESGAVWLDAEKTSPYEFYQFWINQSDEDVIKFLKYFTFLGKEEIDRLEQSKNEAPHLREAQKTLAEEVTKFIHGEDALNDAIRISQALFSGDLKSLSAKELKDGFKDVPQVTLSNDTTNIVEVLIETGISPSKRQAREDVNNGAIYINGERQQDVNYALAPEDKIDGEFTIIRRGKKKYFMVNY

SEQ ID NO: 5495 - protein, 302 aa, Staphylococcus aureus
LGKSDVEVFPIALGTNAVGGHNLYPNLDEEQGKEVVRQAINHGINLLDTAYIYGPERSEELVGEVVKEYPREQIKIATKGSHEFDENQEVHQNNQPEYLKQQVENSLKRLQTDYIDLYYIHFPDDNTPKDQAVAALQELKEQGKIKAIGVSNFTLDQLKEANKDGYVDVVQLEYNLLHRENEAVLQYCVDHQITFIPYFPLASGILAGKYDENTKFSDHRTTRRDFKPGVFEENVRRVKALESLAAAHQTSIANIVLAFYLTRPAIDVIIPGAKRAEQVIENIKAADIVLSDDEIQYIDELF

SEQ ID NO: 5496 - protein, 339 aa, Staphylococcus aureus
  VARIANT (1)...(339): Xaa = Any Amino Acid
MRAAVVTKDHKVSIEDKKLRALKPGEALVQTEYCGVCHTDLHVKNADFGDVTGVTLGHEGIGKVIEVAEDVESLKIGDRVSIAWMFESCGRCEYCTTGRETLCRSVKNAGYTVDGAMAEQVIVTADYAVKVPEKLDPAAASSITCAGVTTYKAVKVSNVKPGQWLGVFGIGGLGNLALQYAKNVMGAKIVAFDINDDKLAFAKELGADAIINSKDVDPVAEVMKLTDNKGLDATVVTSVAKTPFNQAVDVVKAGARVVAVGLPVDKMNLDIPRLVLDGIEVVGSLVGTRQDLREAFEFAAENKVTPKVQLRKLEEINDIFEEMENGTITGRMVIKFXKY

SEQ ID NO: 5497 - protein, 553 aa, Staphylococcus aureus
MNIIDQVKQTLVEEIAASINKAGLADEIPDIKIEIPKDTKNGDYATNIAMVLTKIAKRNPREIAQAIVDNLDTEKAHVKQIDIAGPGFINFYLDNQYLTAIIPEAIEKGDQFGHVNESKGQNVLLEYVSANPTGDLHIGHARNAAVGDALANILTAAGYNVTREYYINDAGNQITNLARSIETRFFEALGDNSYSMPEDGYNGKDIIEIGKDLAEKHPEIKDYSEEARLKEFRKLGVEYEMAKLKNDLAEFNTHFDNWFSETSLYEKGEILEVLAKMKELGYTYEADGATWLRTTDFKDDKDRVLIKNDGTYTYFLPDIAYHFDKVKRGNDILIDLFGADHHGYINRLKASLETFGVDSNRLEIQIMQMVRLMENGKEVKMSKRTGNAITLREIMDEVGVDAARYFLTMRSPDSHFDFDMELAKEQSQDNPVYYAQYAHARICSILKQAKEQGIEVAAANDFTTITNEKAIELLKKVADFEPTIESAAEHRSAHRITNYIQDLASHFHKFYNAEKVLTDDIEKTKAHVAMIEAVRITLKNALAMVGVSAPESM

SEQ ID NO: 5498 - protein, 493 aa, Staphylococcus aureus
LSFQLLFSLFVIALIIALISGLLFLAPVMPMRYIKLHLYILVMPVLFAVIGFFGIHGQHVLGPFKIDRLSWLLAGFVMALGFIIQKFSMRYLLGDHHYRHYFPLFTAITSFASLAWMSEDLRLMALCWGMTLLCLTLLMNVNRFWKVPRESAKLSSMTFLCGWLAFVGAIVTIYIATGEWRVPQHIAHPTWSLLTNVLLVLAVMIPAAQFPFHRWLIESVTAPTPVSAIMHAGIVNAGGVILTRFAPIFDNGFALSLLLILSSISVLLGSGISLVQVDYKRQLVGSTMSQMGFMLVQCALGVYSAAIIHLILHGIFKATLFLQSGSIVKRFNIPKQASAKDAYGWIVMGRVLAIIVAFLFWMSSDRSAYEVLSALILAWSLLVSWNQMVAFSKGRMARLVGMILISIVTFIYIITHNYFYDVLQNITTHATTPPTISVIISVVILIFGSLLSIWVARHRYSKAFAVLYVWLVNLGEARSKAIESHPNYLKKYL

SEQ ID NO: 5499 - protein, 795 aa, Staphylococcus aureus
  VARIANT (1)...(795): Xaa = Any Amino Acid
LIESAVARGELDESVFNQLVTDMLLEHHYNIPQHYINLYIDNIKTLKDVPASYMNHSNVDVVADLLLEKSKRDMAESYHHYDVRPMSDAIIDEQGMPLSEQVNRQMIKWTKLYIDQFLSSWTMPKREQSFYHAWLHLAQHDHSFTKAQRQVIKGLPNDPKMTIESVLNHFSIVQEDYQAYFEGHLLALPGWAGMLYYRSQQHHFEQHLLTDYLAIRLVVEQLLVGDEFKSVTKDCESRSENWFKQTVASWCYYSDMPSDVLLQHDVNEIKTFIHFAATMNKNVFKNLWLIAWEMTYESQLKQKIKAGHESLAGALDAIQVNVSENDNANQSHSVSLNATQAVDENNSELNQVGTSTKAQIAFCIDVRSEPFRRHIEAAGPFETIGIAGFFGLPIQKEAVDEQFKHDSLPVMVPPAYRIKEFADRYDMNVYRQQQQTMSSMFYTFKLMKNNVMPSLLLPELSGPFLSLSTIVNTIMPRKSRASLQKIKQKWLKKPETKLTIDREFDRTSDLPVGFTEQEQIDFALQALKLMDLTEAFAPFVVLAGHASHSHNNPHHASLECGACGGASSGFNAKLLAMICNRLNVRQGLKQAGVVIPETTVFAAAEHYTSTDTLAWVYVPDTLSALALDAYESLNDAMPMISEHANRERLDKLSTIGRVNHPVEEAQRFASDWSEVRPEWGLAKNASFIIGRRQLTKGIDLEGRTFLHNYDWCKDKDGTLLNTIISGPALVAQWINLQYYASTVAPHFYGSGNKATQTVTSGVGVMQGNCEXSDVWLIMAICYGCXSNDVSFANSF

SEQ ID NO: 5500 - protein, 171 aa, Staphylococcus aureus
MAGIIKEISKQDASELVELATRTFYDTFGSYYDDKDFDQFFEDNYTVEKFTQEINHVDSFHYFYQEDGANVGYIKMNINSAQTEEMGETYLEVQRIYFLKDFQGGGRGSQLIELAEKIAQEHNKHKIWLGVWEHNPRAQAFYKRHGFKVVGEHHFQTGDVTDTDLIMEKEL

SEQ ID NO: 5501 - protein, 489 aa, Staphylococcus aureus
MTTQHSKTDVILIGGGIMSATLGTLLKELSPEKNIKVFEKLAQPGEESSNVWNNAGTGHSALCELNYTKEGKDGTVDCSKAIKINEQYQISKQFWAYLVKTGQLDNPDRFIQAVPHMSFVIGEDNVAFIKSRVATLKKSVLFEKMKLSQDEEEMKSWVPLMIEGRKFDEPIALTYDETGTDVNFGALTAKLFDNLEQRGVGIQYKQNVLDIKKQKSGAWLVKVKDLETNETTTYESDFVFIGAGGASLPLLQKTGIKQSKHIGGFPVSGLFLRCTNQEVIDRHHAKVYGKAAVGAPPMSVPHLDTRFVDGKRSLLFGPFAGFSPKFLKTGSHMDLIKSVKPNNIVTMLSAGIKEMSLTKYLVSQLMLSNDERMDDLRVFFPNAKNEDWEVITAGQRVQVIKDTEDSKGNLQFGTEVITSDDGTLAALLGASPGASTAVDIMFDVLQRCYRDEFKGWEPKIKEMVPSFGYRLTDHEDLYHKINEEVTKYL

SEQ ID NO: 5502 - protein, 96 aa, Staphylococcus aureus
MTKVTREEVEHIANLARLQISPEETEEMANTLESILDFAKQNDSADTEGVEPTYHVLDLQNVLREDKAIKGIPQELALKNAKETEDGQFKVPTIMN

SEQ ID NO: 5503 - protein, 485 aa, Staphylococcus aureus
MSIRYESVENLLTLIKDKKIKPSDVVKDIYDAIEETDPTIKSFLALDKENAIKKAQELDELQAKDQMDGKLFGIPMGIKDNIITNGLETTCASKMLEGFVPIYESTVMEKLHNENAVLIGKLNMDEFAMGGSTETSYFKKTVNPFDHKAVPGGSSGGSAAAVAAGLVPFSLGSDTGGSIRQPAAYCGVVGMKPTYGRVSRFGLVAFASSLDQIGPLTRNVKDNAIVLEAISGADVNDSTSAPVDDVDFTSEIGKDIKGLKVALPKEYLGEGVADDVKEAVQNAVETLKSLGAVVEEVSLPNTKFGIPSYYVIASSEASSNLSRFDGIRYGYHSKEAHSLEELYKMSRSEGFGKEVKRRIFLGTFALSSGYYDAYYKKSQKVRTLIKNDFDKVFENYDVVVGPTAPTTAFNLGEEIDDPLTMYANDLLTTPVNLAGLPGISVPCGQSNGRPIGLQFIGKPFDEKTLYRVAYQYETQYNLHDVYEKL

SEQ ID NO: 5504 - protein, 475 aa, Staphylococcus aureus
MHFETVIGLEVHVELKTDSKMFSPSPAHFGAEPNSNTNVIDLAYPGVLPVVNKRAVDWAMRAAMALNMEIATESKFDRKNYFYPDNPKAYQISQFDQPIGENGYIDIEVDGETKRIGITRLHMEEDAGKSTHKGEYSLVDLNRQGTPLIEIVSEPDIRSPKEAYAYLEKLRSIIQYTGVSDVKMEEGSLRCDANISLRPYGQEKFGTKAELKNLNSFNYVRKGLEYEEKRQEEELLNGGEIGQETRRFDESTGKTILMRVKEGSDDYRYFPEPDIVPLYIDDAWKERVRQTIPELPDERKAKYVNELGLPAYDAHVLTLTKEMSDFFESTIEHGADVKLTSNWLMGGVNEYLNKNQVELLDTKLTPENLAGMIKLIEDGTMSSKIAKKVFPELAAKGGNAKQIMEDNGLVQISDEATLLKFVNEALDNNEQSVEDYKNGKGKAMGFLVGQIMKASKGQANPQLVNQLLKQELDKR

SEQ ID NO: 5505 - protein, 294 aa, Staphylococcus aureus
KRARIIYNPTSGKEQFKRELPDALIKLEKAGYETSAYATEKIGDATLEAERAMHENYDVLIAAGGDGTLNEVVNGIAEKPNRPKLGVIPMGTVNDFGRALHIPNDIMGALDVIIEGHSTKVDIGKMNNRYFINLAAGGQLTQVSYETPSKLKSIVGPFAYYIKGFEMLPQMKAVDLRIEYDGNVFQGEALLFFLGLTNSMAGFEKLVPDAKLDDGYFTLIIVEKSNLAELGHIMTLASRGEHTKHPKVIYEKAKAINISSFTDLQLNVDGEYGGKLPANFLNLERHIDVFAPND

SEQ ID NO: 5506 - protein, 401 aa, Staphylococcus aureus
MSEKKILILCQYFYPEYVSSATLPTQLAEDLIANHINVDVMCGWPYEYSNHKQVSKTEMHRGIRIRRLKYSRFNNKSKVGRIINFFSLFSKFVINIPKMLKYDQILVYSNPPILPLIPDVLHRLLKKKYSFVVYDIAPDNAIKTGATRPGSMIDKLMRYINKHVYKNAENVIVLGTEMKNYLVNHQISKNPDNIHVIPNWYDMRQLQDNRIYNDTFKAYREQYDKIILYSGNMGQLQDMETLISFLKLNKDQPQTLTILCGHGKKFADVKTAIEDHRIENVKMFEFLTGTDYADVLKIADVCIASLIKEGVGLGVPSKNYGYLAAKKPLVLIMDKQSDIVQHVEQYDAGIQIDNGDAHAIYNFINTHSSKELHEMGERAHQLFKDKYTREINTMKYYNLLK

SEQ ID NO: 5507 - protein, 185 aa, Staphylococcus aureus
MKRLFDVVSSIYGLVVLSPILLITALLIKMESPGPAIFKQKRPTINNELFNIYKFRSMKIDTPNVATDLMDSTSYITKTGKVIRKTSIDELPQLLNVLKGEMSIVGPRPALYNQYELIEKRTKANVHTIRPGVTGLAQVMGRDDITDDQKVAYDHYYLTHQSMMLDMYIIYKTIKNIVTSEGVHH

SEQ ID NO: 5508 - protein, 299 aa, Staphylococcus aureus
QKNILKSGIALSELGLGCMSLGTDLKKAEQIIDCAVENGITYFDTADMYDKGINESVVGKALLKYQQRDDIVIGTKVGNRLTNDGSTTWDPSKSYIKEAVKGSLKRLGIDHIDLYQLHGGTIDDPLDETISAFDELKQEGIIRAYGISSIRPNVIDYYLKHSQIETIMSQFNLIDNRPESLLDAIHNNDVKVLARGPVSKGLLTSNSVNVLDNKFKDGIFDYSHDELGETIASIKEIESNLSALTFSYLTSHDVLGSIIVGASSVDQLKENIENYHTKVSLDQIKTARARVKDLEYTNH

SEQ ID NO: 5509 - protein, 487 aa, Staphylococcus aureus
NKHIPCLITIFGATGDLSHRKLFPSIFHLYQQDNLDEHIAIIGIGRRDITNDDFRNQVKSSIQKHVKDTNKIDAFMEHVFYHRHDVSNEESYQELLDFSNELDSQFELKGNRLFYLAMAPQFFGVISDYLKSSGLTDTKGFKRLVIEKPFGSDLKSAEALNNQIRKSFKEEEIYRIDHYLGKDMVQNIEVLRFANAMFEPLWNNKYISNIQVTSSEILGVEDRGGYYESSGALKDMVQNHMLQMVALLAMEAPISLNSEDIRAEKVKVLKSLRHFQSEDVKKNFVRGQYGEGYIDGKQVKAYRDEDRVADDSNTPTFVSGKLTIDNFRWAGVPFYIRTGKRMKSKTIQVVVEFKEVPMNLYYETDKLLDSNLLVINIQPNEGVSLHLNAKKNTQGIETEPVQLSYSMSAQDKMNTVDAYENLLFDCLKGDATNFTHWEELKSTWKFVDAIQDEWNMVDPEFPNYESGTNGPLESDLLLARDGNHWWD

SEQ ID NO: 5510 - protein, 546 aa, Staphylococcus aureus
MNKQWWKEAVAYQVYPRSFNDSNHDGIGDLPGMIDKLDYLKDLGIDVIWLSPMFKSPNDDNGYDISDYQEIMDEFGTMEDFDRLLKGVHDRGMKLILDLVVNHTSDEHPWFIESKSSKDNPKRDWYIWQDPKPDGSEPNNWESIFNGSTWEYDANTEQYYFHLFSKKQPDLNWGNPEVRDAVFEMMNWWFDKGIDGFRVDAITHIKKTFEAGDLPVPEGKTYAPAFDVDMNQPGIQTWLQEMKDRSLSKYDIMTVGEANGVSPDDADDWVGEENGKFNMIFQFEHLGLWNSGDSHFDVNSYKSVLNRWQKQLENKGWNALFIENHDQPRRVSTWGDDDKYWYESATSHAAVYFLQQGTPFIYQGQEIGMTNYPFESIETFNDVAVKNDYQIVKAQGGDVDALLAKYKDENRDNSRTPMQWDDTLNGGFTNGEPWFPVNPNYKTINVALQLEDEHSVLQFYKDLIQLRKSNDVYVYGQFDLVDAENSQVFAYMRTLNEKQVLIVGNLTNHEAELTVPFDVSHGEVKLFNYDAKVNLKQLRPYEACVI

SEQ ID NO: 5511 - protein, 341 aa, Staphylococcus aureus
  VARIANT (1)...(341): Xaa = Any Amino Acid
MVTIKDVALKAGVSPSTVSRVIKGNQRISEATISKVKKVMEELNYFPNTAARTLITNQTYKIGLVLKGSEEPIRLNPFYINVLLGISETCNQHGYGTQTTVSNNMNDLMDEVYKMIKQRMVDAFILLYSKENDPIKQMLIDESMPFIVIGKPTSDIDHQFTHIDNDNILASENLTRHVIEQGVDELIFITEKGNFEVSKDRIQGFETIASQNKINYQIIETSNEREVIFNYMQNLHTRLKDPNIKQAIISLDAMLHLAILSVLYELNIEIPKDVMTATFNDSYLTEIASPPQTSIDIKPRMLGQQAGSAILNILKNKAQDVIELVIIDTELKIRKSTQRXQ

SEQ ID NO: 5512 - protein, 343 aa, Staphylococcus aureus
SMEPILEMIKTLTGINSPSGDTEEAIQFVEKYAKDLGYQTTLTNKGALLITVPGKNDEVQRCITAHVDTLGAMVKEIKEDGRLAIELIGGFTYNAIEGEYCQIKTDAGQIYTGTICLHETSVHVYRNNHEIPRDQKHMEIRIDEVTTSEEDTKSLGISVGDFVSFDPRTVITSSGFIKSRHLDDKASVAMILQLLKKLKEEQIILPHTTQFYISNNEEIGYGANASIDSKIKEYIALDMGALGDGQASDEYTVSICAKDASGPYHKQLKSHLVNLCKINNIPYKVDIYPYYGSDASAALHAGADIRHGLFGAGIESSHAMERTHIDSIKATEKLLYAYCLSPI

SEQ ID NO: 5513 - protein, 202 aa, Staphylococcus aureus
FITFEGPEGSGKTTVINEVYHRLVKDYDVIMTREPGGVPTGEEIRKIVLEGNDMDIRTEAMLFAASRREHLVLKVIPALKEGKVVLCDRYIDSSLAYQGYARGIGVEEVRALNEFAINGLYPDLTIYLNVSAEVGRERIIKNSRDQNRLDQEDLKFHEKVIEGYQEIIHNESQRFKSVNADQPLENVVEDTYQTIIKYLEKI

SEQ ID NO: 5514 - protein, 217 aa, Staphylococcus aureus
MAVLYLVGTPIGNLADITYRAVDVLKRVDMIACEDTRVTSKLCNHYDIPTPLKSYHEHNKDKQTAFIIEQLELGLDVALVSDAGLPLISDPGYELVVAAREANIKVETVPGPNAGLTALMASGLPSYVYTFLGFLPRKEKEKSAVLEQRMYENSTLIIYESPHRVTDTLKTIAKIDATRQVSLGRELTKKFEQIVTDDVTQLQALIQQGDVPLKGEF

SEQ ID NO: 5515 - protein, 256 aa, Staphylococcus aureus
MLIDTHVHLNDEQYDDDLSEVITRAREAGVDRMFVVGFNKSTIERAMKLIDEYDFLYGIIGWHPVDAIDFTEEHLEWIESLAQHPKVIGIGEMGLDYHWDKSPTDVQKEVFRKQIALAKRLKLPIIIHNREATQDCIDILLEEHAEEVGGIMHSFSGSPEIADIVTNKLNFYISLGGPVTFKNAKQPKEVAKHVSMERLLVETDAPYLSPHPYRGKRNEPARVTLVAEQIAELKGLSYEEVCEQTTKNAEKLFNLN

SEQ ID NO: 5516 - protein, 176 aa, Staphylococcus aureus
MKINEFIVVEGRDDTERVKRAVECDTIETNGSAINEQTLEVIRNAQQSRGVIVLTDPDFPGDKIRSTITEHVKGVKHAYIDREKAKNKKGKIGVEHADLIDIKEALMHVSSPFDEAYESIDKSVLIELGLIVGKDARRRREILSRKLRIGHSNGKQLLKKLNAFGYTEADVRQALE

SEQ ID NO: 5517 - protein, 282 aa, Staphylococcus aureus
NKDIATPSRTRALLDKYGFNFKKSLGQNFLIDVNIINNIIDASDIDAQTGVIEIGPGMGSLTEQLARHAKRVLAFEIDQRLIPVLNDTLSPYDNVTVINEDILKANIKKAVENHLQDCEKIMVVANLPYYITTPILLNLMQQDIPIDGYVVMMQKEVGERLNAEVGSKAYGSLSIVVQYYTETSKVLTVPKSVFMPPPNVDSIVVKLMQRTEPLVTVDNEEAFFKLAKAAFAQRRKTINNNYQNYFKDGKQHKEVILQWLEQAGIDPRRRGETLSIQDFAKL

SEQ ID NO: 5518 - protein, 801 aa, Staphylococcus aureus
VSLLHIAVILPLIFALIIPILYRFFKRIHLGWFVLPVPIVIFIYMLTLIKTTMSGNTVMKTLNWMPHFGMNFDLYLDGLGLLFSLLISGIGSLVVLYSIGYLSKSEQLGNFYCYLLLFMGAMLGVVLSDNVIILYLFWELTSFSSFLLISFWRERQASIYGAQKSLIITVFGGLSLLGGIILLAIPTQSFSIQYMIQHASEIQNSPFFIFAMILIMIGAFTKSAQFPFYIWLPDAMEAPTPVSAYLHSATMVKAGLYLIARMTPIFAASQGWIWTVTLVGLITLFWASLNATKQQDLKGILAFSTVSQLGMIMAMLGIGAISYHYQGDDSKIYAAAFTAAIFHLINHATFKGALFMITGAVDHSTGTRDVKKLGGLLTIMPISFTITVITALSMAGVPPFNGFLSKESFLETTFTASQANLFSVDTLGYLFPIIGIVGSVFTFVYSIKFIMHIFFGQYKPEQLPKKAHEVSILMLLSPAILATLVIVFGLFPGILTNSIIEPATSSINHTVIDDVEFHMFHGLTPAFLSTLVIYILGILLIVTFSYWVKLLQRQPGKLTFNYWYNRSANVIPNYSEKMTNSYVTDYSRNNLVIIFGALILLTFVTVFSVPFNINFKDVSPIRIFEVCIVILLLSAAFLILFAKSRLFSIIMLSAVGYAVSVLFIFFKAPDLALTQFVVESISTALFLLCFYHLPNLNRYNEKRSFQLTNALIAGGVGLSVIIIGLIAYGNRHFESISKFYQEHVYDLAHGKNMVNVILVDFRGMDTLFESSVLGIAGLAVYTMIKLRKKRQTQGNEVKNHE

SEQ ID NO: 5519 - protein, 140 aa, Staphylococcus aureus
RQQNDLILQFAAVIIFFMVMVFGFSLFLAGHYTPGGGFVGGLLFASSLVIITIAFDIETMRKIFPLDFKILIGIGLVFCIATPIASWFLGKNFFTHVTFDIPLFILEPVHMTTAVFFDFGVLCAVVGTVMTIIISIGENE

SEQ ID NO: 5520 - protein, 719 aa, Staphylococcus aureus
SLSGLSKVSAFIHRADIGGVLNVSELNLIKRLIQVQNQFKTFYNQLVEEDEGVKYPILDDKMNQLPVLTDLFQQINETCDTYDLYDNASYELQGIRSKISSTNQRIRQNLDRIVKSQANQKKLSDAIVTVRNERNVIPVKAEYRQDFNGIVHDQSASGQTLYIEPSSVVEMNNQISRLRHDEAIEKERILTQLTGYVAADKDALLVAEQVMGQLDFLIAKARYSRSIKGTKPIFKEERTVYLPKAYHPLLNRETVVANTIEFMEDIETVIITGPNTGGKTVTLKTLGLIIVMAQSGLLIPTLDGSQLSVFKNVYCDVGDEQSIEQSLSTFSSHMTNIVEILKHADKHSLVLFDELGAGTDPSEGAALAMSILDHVRKIGSLVMATTHYPELKAYSYNREGVMNASVEFDVDTLSPTYKLLMGVPGRSNAFDISKKLGLSLNIINKAKTMIGTDEKEINEMIESLERNYKRVETQRLELDRLVKEAEQVHDDLSKQYQQFQNYEKSLIEEAKEKANQKIKAATKEADDIIKDLRQLREQKGADVKEHELIDKKKRLDDHYEAKSIKQNVQKQKYDKIVAGDEVKVLSYGQKGEVLEIVNDEEAIVQMGIIKMKLPIEDLEKKQKEKVKPTKMVTRQNRQTIKTELDLRGYRYEDALIELDQYLDQAVLSNYEQVYIIHGKGTGALQKGVQQHLKKHKSVSDFRGGMPSEGGFGVTVATLK

SEQ ID NO: 5521 - protein, 202 aa, Staphylococcus aureus
MSHYYDEDPSVISNEQRIQYQLNHHKIDLITDNGVFSKDKVDYGSDVLVQTFFKTHPPGPSKRIADVGCGYGPIGLMIAKVLPHHSITMLDVNHRALALVEKNQKLNGIDNVIVKESDALSAVEDKSFDFILTNPPIRAGKETVHRIFEQALHRLDSNGELFVVIQKKQGMPSAKKRMNELFGNVEVVNKDKGYYILRSIKA

SEQ ID NO: 5522 - protein, 1179 aa, Staphylococcus aureus
LAGQVVQYGRHRKRRNYARISEVLELPNLIEIQTKSYEWFLREGLIEMFRDISPIEDFTGNLSLEFVDYRLGEPKYDLEESKNRDATYAAPLRVKVRLIIKETGEVKEQEVFMGDFPLMTDTGTFVINGAERVIVSQLVRSPSVYFNEKIDKNGRENYDATIIPNRGAWLEYETDAKDVVYVRIDRTRKLPLTVLLRALGFSSDQEIVDLLGDNEYLRNTLEKDGTENTEQALLEIYERLRPGEPPTVENAKSLLYSRFFDPKRYDLASVGRYKTNKKLHLKHRLFNQKLAEPIVNTETGEIVVEEGTVLDRRKIDEIMDVLESNANSEVFELHGSVIDEPVEIQSIKVYVPNDEEGRTTTVIGNAFPDSEVKCITPADIIASMSYFFNLLSGIGYTDDIDHLGNRRLRSVGELLQNQFRIGLSRMERVVRERMSIQDTESITPQQLINIRPVIASIKEFFGSSQLSQFMDQANPLAELTHKRRLSALGPGGLTRERAQMEVRDVHYSHYGRMCPIETPEGPNIGLINSLSSYARVNEFGFIETPYRKVDLDTHAITDQIDYLTADEEDSYVVAQANSKLDENGRFMDDEVVCRFRGNNTVMAKEKMDYMDVSPKQVVSAATACIPFLENDDSNRALMGANMQRQAVPLMNPEAPFVGTGMEHVAARDSGAAITAKHRGRVEHVESNEILVRRLVEENGVEHEGELDRYPLAKFKRSNSGTCYNQRPIVAVGDVVEYNEILADGPSMELGEMALGRNVVVGFMTWDGYNYEDAVIMSERLVKDDVYTSIHIEEYESEARDTKLGPEEITRDIPNVSESALKNLDDRGIVYIGAEVKDGDILVGKVTPKGVTELTAEERLLHAIFGEKAREVRDTSLRVPHGAGGIVLDVKVFNREEGDDTLSPGVNQLVRVYIVQKRKIHVGDKMCGRHGNKGVISKIVPEEDMPYLPDGRPIDIMLNPLGVPSRMNIGQVLELHLGMAAKNLGIHVASPVFDGANDDDVWSTIEEAGMARDGKTVLYDGRTGEPFDNRISVGVMYMLKLAHMVDDKLHARSTGPYSLVTQQPLGGKAQFGGQRFGEMEVWALEAYGAAYTLQEILTYKSDDTVGRVKTYEAIVKGENISRPSVPESFRVLMKELQSLGLDVKVMDEQDNEIEMTDVDDDDVVERKVDLQQNDAPETQK

SEQ ID NO: 5523 - protein, 142 aa, Staphylococcus aureus
VYRMQGVEIDDKHVEVMVRQMLRKVRIIEAGDTKLLPGSLVDIHNFTDANREAFKHRKRPATAKPVLLGITKASLETESFLSAASFQETTRVLTDAAIKGKRDDLLGLKENVIIGKLIPAGTGMRRYSDVKYEKTAKPVAEV

SEQ ID NO: 5524 - protein, 137 aa, Staphylococcus aureus
MPTINQLVRKPRQSKIKKSDSPALNKGFNSKKKKFTDLNSPQKRGVCTRVGTMTPKKPNSALRKYARVRLSNNIEINAYIPGIGHNLQEHSVVLVRGGRVKDLPGVRYHIVRGALDTSGVDGRRQGRSLYGTKKPKN

SEQ ID NO: 5525 - protein, 88 aa, Staphylococcus aureus
MEQNSYVIIDETGIHARPATMLVQTASKFDSDIQLEYNGKKVNLKSIMGVMSLGVGKDAEITIYADGSDESDAIQAISDVLSKEGLTK

SEQ ID NO: 5526 - protein, 572 aa, Staphylococcus aureus
MSKLIKGIAASDGVAIAKAYLLVEPDLTFDKNEKVTDVEGEVAKFNSAIEASKVELTKIRNNAEVQLGADKAAIFDAHLLVLDDPELIQPIQDKIKNENANAATALTDVTTQFVTIFESMDNEYMKERAADIRDVSKRVLSHILGVELPNPSMIDESVVIVGNDLTPSDTAQLNKEFVQGFATNIGGRTSHSAIMSRSLEIPAIVGTKSITQEVKQGDMIIVDGLNGDVIVNPTEDELIAYQDKRERYFADKKELQKLRDADTVTVDGVHAELAANIGTPNDLPGVIENGAQGIGLYRTEFLYMGRDQMPTEEEQFEAYKEVLEAMNGKRVVVRTLDIGGDKELSYLNLPEEMNPFLGYRAIRLCLAQQDIFRPQLRALLRASVYGKLNIMFPMVATINEFREAKAILLEEKENLKNEGHDISDDIELGIMVEIPATAALADVFAKEVDFFSIGTNDLIQYTLAADRMSERVSYLYQPYNPSILRLVKQVIEASHKEGKWTGMCGEMAGDETAIPLLLGLGLDEFSMSATSILKARRQINGLSKNEMTELANRAVDCATQEEVIELVNNYVK

SEQ ID NO: 5527 - protein, 556 aa, Staphylococcus aureus
MKQLHPNEVGVYALGGLGEIGKNTYAVEYKDEIVIIDAGIKFPDDNLLGIDYVIPDYTYLVQNQDKIVGLFITHGHEDHIGGVPFLLKQLNIPIYGGPLALGLIRNKLEEHHLLRTAKLNEINEDSVIKSKHFTISFYLTTHSIPETYGVIVDTPEGKVVHTGDFKFDFTPVGKPANIAKMAQLGEEGVLCLLSDSTNSLVPDFTLSEREVGQNVDKIFRNCKGRIIFATFASNIYRVQQAVEAAIKNNRKIVTFGRSMENNIKIGMELGYIKAPPETFIEPNKINTVPKHELLILCTGSQGEPMAALSRIANGTHKQIKIIPEDTVVFSSSPIPGNTKSINRTINSLYKAGADVIHSKISNIHTSGHGSQGDQQLMLRLIKPKYFLPIHGEYRMLKAHGETGVECGVEEDNVFIFDIGDVLALTHDSARKAGRIPSGNVLVDGSGIGDIGNVVIRDRKLLSEEGLVIVVVSIDFNTNKLLSGPDIISRGFVYMRESGQLIYDAQRKIKTDVISKLNQNKDIQWHQIKSSIIETLQPYLFEKTARKPMILPVIMKV

SEQ ID NO: 5528 - protein, 370 aa, Staphylococcus aureus
MAPKLQAQFDAVKVLNDTQSKFEMVQILDENGNVVNEDLVPDLTDEQLVELMERMVWTRILDQRSISLNRQGRLGFYAPTAGQEASQLASQYALEKEDYILPGYRDVPQIIWHGLPLTEAFLFSRGHFKGNQFPEGVNALSPQIIIGAQYIQAAGVAFALKKRGKNAVAITHTGDGGSSQGDFYEGINFAAAYKAPAIFVIQNNNYAISTPRSKQTAAETLAQKAIAVGIPGIQVDGMDALAVYQATKEARDRAVAGEGPTLIETMTYRYGPHTMAGDDPTRYRTSDEDAEWEKKDPLVRFRKFLENKGLWNEDKENEVIERAKADIKAAIKEADNTEKQTVTSLMEIMYEDMPQNLAEQYEIYKEKESK

SEQ ID NO: 5529 - protein, 325 aa, Staphylococcus aureus
MAQMTMVQAINDALKTELKNDQDVLIFGEDVGVNGGVFRVTEGLQKEFGEDRVFDTPLAESGIGGLAMGLAVEGFRPVMEVQFLGFVFEVFDAIAGQIARTRFRSGGTKTAPVTIRSPFGGGVHTPELHADNLEGILAQSPGLKVVIPSGPYDAKGLLISSIRSNDPVVYLEHMKLYRSFREEVPEEEYTIDIGKANVKKEGNDISIITYGAMVQESMKAAEELEKDGYSVEVIDLRTVQPIDVDTIVASVEKTGRAVVVQEAQRQAGVGAAVVAELSERAILSLEAPIGRVAAADTIYPFTQAENVWLPNKNDIIEKAKETLEF

SEQ ID NO: 5530 - protein, 468 aa, Staphylococcus aureus
MVVGDFPIETDTIVIGAGPGGYVAAIRAAQLGQKVTIVEKGNLGGVCLNVGCIPSKALLHASHRFVEAQHSENLGVIAESVSLNFQKVQEFKSSVVNKLTGGVEGLLKGNKVNIVKGEAYFVDNNSLRVMDEKSAQTYNFKNAIIATGSRPIEIPNFKFGKRVIDSTGALNLQEVPGKLVVVGGGYIGSELGTAFANFGSEVTILEGAKDILGGFEKQMTQPVKKGMKEKGVEIVTEAMAKSAEETDNGVKVTYEAKGEEKTIEADYVLVTVGRRPNTDELGLEELGVKFADRGLLEVDKQSRTSISNIYAIGDIVPGLPLAHKASYEAKVAAEAIDGQAAEVDYIGMPAVCFTEPELATVGYSEAQAKEEGLAIKASKFPYAANGRALSLDDTNGFVKLITLKEDDTLIGAQVVGTGASDIISELGLAIEAGMNAEDIALTIHAHPTLGEMTMEAAEKAIGYPIHTM

SEQ ID NO: 5531 - protein, 87 aa, Staphylococcus aureus
VSERNDRKVYVGKVVSDKMDKTITVLVETYKTHKLYGKRVKYSKKYKTHDENNSAKLGDIVKIQETRPLSATKRFRLVEIVEESVII

SEQ ID NO: 5532 - protein, 122 aa, Staphylococcus aureus
MIQQETRLKVADNSGAREVLTIKVLGGSGRKTANIGDVIVCTVKNATPGGVVKKGDVVKAVIVRTKSGVRRNDGSYIKFDENACVIIRDDKGPRGTRIFGPVARELREGNFMKIVSLAPEVL

SEQ ID NO: 5533 - protein, 99 aa, Staphylococcus aureus
MHIKKGDNVKVIAGKDKGKEGKVIATLPKKDRVVVEGVNIMKKHQKPTQLNPEGGILETEAAIHVSNVQLLDPKTNEPTRVGYKFVDGKKVRIAKKSGE

SEQ ID NO: 5534 - protein, 179 aa, Staphylococcus aureus
LNRLKEKFNTEVTENLMKKFNYSSVMEVPKIDKIVVNMGVGDAVQNSKVLDNAVEELELITGQKPLVTKAKKSIATFRLREGMPIGAKVTLRGERMYEFLDKLISVSLPRVRDFQGVSKKAFDGRGNYTLGVKEQLIFPEIDYDKVSKVRGMDIVIVTTANTDEEARELLANFGMPFRK

SEQ ID NO: 5535 - protein, 61 aa, Staphylococcus aureus
VAKTSMVAKQQKKQKYAVREYTRCERCGRPHSVYRKFKLCRICFRELAYKGQIPGVRKASW

SEQ ID NO: 5536 - protein, 132 aa, Staphylococcus aureus
MTMTDPIADMLTRVRNANMVRHEKLELPASNIKKEIAEILKSEGFIKNVEYVEDDKQGVLRLFLKYGQNDERVITGLKRISKPGLRVYAKASEMPKVLNGLGIALVSTSEGVITDKEARKRNVGGEIIAYVW

SEQ ID NO: 5537 - protein, 119 aa, Staphylococcus aureus
MISKIDKNKVRLKRHARVRTNLSGTAEKPRLNVYRSNKHIYAQIIDDNKGVTLAQASSKDSDIATTATKVELATKVGEAIAKKAADKGIKEIVFDRGGYLYHGRVKALAEAARESGLEF

SEQ ID NO: 5538 - protein, 164 aa, Staphylococcus aureus
MARREEETKEFEERVVTINRVAKVVKGGRRFRFTALVVVGDKNGRVGFGTGKAQEVPEAIKKAVEAAKKDLVVVPRVEGTTPHTITGRYGSGSVFMKPAAPGTGVIAGGPVRAVLELAGITDILSKSLGSNTPINMVRATIDGLQNLKNAEDVAKLRGKTVEEL

SEQ ID NO: 5539 - protein, 59 aa, Staphylococcus aureus
MAKLQITLTRSVIGRPETQRKTVEALGLKKTNSSVVVEDNPAIRGQINKVKHLVTVEEK

SEQ ID NO: 5540 - protein, 146 aa, Staphylococcus aureus
MKLHELKPAEGSRKERNRVGRGVATGNGKTSGRGHKGQKARSGGGVRPGFEGGQLPLFRRLPKRGFTNINRKEYAIVNLDQLNKFEDGTEVTPALLVESGVVKNEKSGIKILGNGSLDKKLTVKAHKFSASAAEAIDAKGGAHEVI

SEQ ID NO: 5541 - protein, 429 aa, Staphylococcus aureus
  VARIANT (1)...(429): Xaa = Any Amino Acid
MIQTLVNFFRTKEVRNKIFFTLAMLVIFKIGTYIPAPGVNPAAFDNPQGSQGATELLNTFGGGALKRFSIFAMGIVPYITASIVMQLLQMDIVPKFSEWAKQGEVGRRKLNNVTRYLAISLAFIQSIGMAFQFNNYLKGALIINQSIMSYLLIALVLTAGTAFLIWLGDQITQFGVGNGISIIIFAGILSTLPASLIQFGQTAFVGQEDTSLAWLKVLGLLVSLILLTVGAIYVLEAVRKIPIQYAKKQTAQRLGSQATYLPLKVNSAGVIPVIFAMAFFLLPRTLTLFYPDKEGHKTLRCCKSFKXCGMVVYIVLIILFTYFMHLYKLIRKKWLITLRNKVAMFQVLDPGEQTKKYITKVLYRLTFVGSIFLAVISILPILATKFMGLPQSIQIGGTSLLIVIGVAIETMKSLEAQVSQKEYKGFGGR

SEQ ID NO: 5542 - protein, 215 aa, Staphylococcus aureus
MNIILMGLPGAGKGTQASEIVKKFPIPHISTGDMFRKAIKEETELGKEAKSYMDRGELVPDEVTVGIVKERISEDDAKKGFLLDGFPRTIEQAEALNNIMSELDRNIDAVINIEVPEEELMNRLTGRRICESCGTTYHLVFNPPKVEGICDIDGGKLYQREDDNPETVANRLSVNIKQSKPILDFYDQKGVLKNIDGSKDISDVTKDVIDILDHL

SEQ ID NO: 5543 - protein, 72 aa, Staphylococcus aureus
MAKQDVIELEGTVLDTLPNAMFKVELENGHEILAHVSGKIRMNYIRILPGDKVTVEMSPYDLTRGRITYRYK

SEQ ID NO: 5544 - protein, 37 aa, Staphylococcus aureus
MKVRPSVKPICEKCKVIKRKGKVMVICENPKHKQRQG

SEQ ID NO: 5545 - protein, 121 aa, Staphylococcus aureus
MARIAGVDIPREKRVVISLTYIYGIGTSTAQKILEEANVSADTRVKDLTDDELGRIREVVDGYKVEGDLRRETNLNIKRLMEISSYRGIRHRRGLPVRGQKTKNNARTRKGPVKTVANKKK

SEQ ID NO: 5546 - protein, 128 aa, Staphylococcus aureus
ARKQVSRKRRVKKNIENGVAHIRSTFNNTIVTITDEFGNALSWSSAGALGFKGSKKSTPFAAQMASETASKSAMEHGLKTVEVTVKGPGPGRESAIRALQSAGLEVTAIRDVTPVPHNGCRPPKRRRV

SEQ ID NO: 5547 - protein, 314 aa, Staphylococcus aureus
MIEIEKPRIETIEISEDAKFGKFVVEPLERGYGTTLGNSLRRILLSSLPGAAVKYIEIEGVLHEFSAVDNVVEDVSTIIMNIKQLALKIYSEEDKTLEIDVRDEGEVTASDITHDSDVEILNPELKIATVSKGGHLKIRLVANKGRGYALAEQNNTSDLPIGVIPVDSLYSPVERVNYTVENTRVGQSSDFDKLTLDVWTNGSITPQESVSLAAKIMTEHLNIFVGLTDEAQNAEIMIEKEEDQKEKVLEMSIEELDLSVRSYNCLKRAGINSVQELADKSEADMMKVRNLGRKSLEEVKYKLEDLGLGLRKED

SEQ ID NO: 5548 - protein, 122 aa, Staphylococcus aureus
MGYRKLGRTSDQRKAMLRDLATSLIISERIETTEARAKEVRSVVEKLITLGKKGDLASRRNAAKTLRNVEILNEDETTQTALQKLFGEIAERYTERQGGYTRILKQGPRRGDGAESVIIELV

SEQ ID NO: 5549 - protein, 274 aa, Staphylococcus aureus
  VARIANT (1)...(274): Xaa = Any Amino Acid
DKNSVIVFKNVSFQYQSDASFTLKDVSFNIPKGQWTSIVGHNGSGKSTIAKLMIGIEKVKSGEIFYNNQAITDDNFEKLRKDIGIVFQNPDNQFVGSIVKYDVAFGLENHAVPHDEMHRRVSEALKQVDMLERADYEPNALSGGQKQRVAIASVLALNPSVIILDEATSMLDPDARQNLLDLVRKVKSEHNITIISITHDLSEAMEADHVIVMNKGTVYKEGTAIEIFDHAEELTTIGLDLPFPIKINQMLGHQTSFLTYEGLVDQLXLYALTM

SEQ ID NO: 5550 - protein, 273 aa, Staphylococcus aureus
  VARIANT (1)...(273): Xaa = Any Amino Acid
TPYQHQAIHDVNTEFEQGKYYAIVGQTGSGKSTLIQNINALLKPTTGTVTVDDITITHKTKDKYIRPVRKRIGMVFQFPESQLFEDTVEREMIFGPKNFKMNLDEAKNYAHRLLMDLGFSRDVMSQSPFQMSGGQMRKIAIVSILAMNPDIIVVDEPTAGLDPQSKRQVMRLLKSLQTDENKTIILISHDMNEVARYADEVIVMKEGSIVSQTSPKELFKDKEKLADWHIGLPEIVQLQYDFEQKHQTKLKDIALTEEAFVSLYKEWQHEKXI

SEQ ID NO: 5551 - protein, 145 aa, Staphylococcus aureus
MRQTFMANESNIERKWYVIDAEGQTLGRLSSEVASILRGKNKVTYTPHVDTGDYVIVINASKIEFTGNKETDKVYYRHSNHPGGIKSITAGELRRTNPERLIENSIKGMLPSTRLGEKQGKKLFVYGGAEHPHAAQQPENYELRG

SEQ ID NO: 5552 - protein, 130 aa, Staphylococcus aureus
LAQVEYRGTGRRKNSVARVRLVPGEGNITVNNRDVREYLPFESLILDLNQPFDVTETKGNYDVLVNVHGGGFTGQAQAIRHGIARALLEADPEYRGSLKRAGLLTRDPRMKERKKPGLKAARRSPQFSKR

SEQ ID NO: 5553 - protein, 142 aa, Staphylococcus aureus
QDVVKELNQQVANWTVAYTKLHNFHWYVKGPNFFSLHVKFEELYNEASQYVDELAERILAVGGNPVGTLTECVEQSIVKEAAKGYSAEQMVEELSQDFTNISKQLEKAIEIAGNAGDDVSEDMFIGMQTSVDKHNWMFKSYL

SEQ ID NO: 5554 - protein, 376 aa, Staphylococcus aureus
SEKQQILDYIETNKYSYIEISHRIHERPELGNEEIFASRTLIDRLKEHDFEIETEIAGHATGFIATYDSGLDGPAIGFLAEYDALPGLGHACGHNIIGTASVLGAIGLKQVIDQIGGKVVVLGCPAEEGGENGSAKASYVKAGVIDQIDIALMIHPGNETYKTIDTLAVDVLDVKFYGKSAHASENADEALNALDAMISYFNGVAQLRQHIKKGQRVHGVILDGGKAANIIPDYTHARFYTRAMTRKELDILTEKVNQIARGAAIQTGCDYEFGPIQNGVNEFIKTPKLDDLFAKYAEEVGEAVIDDDFGYGSTDTGNVSHVVPTIHPHIKIGSRNLVGHTHRFREAAASVHGDEALIKGAKIMALMGLELITNQD

SEQ ID NO: 5555 - protein, 285 aa, Staphylococcus aureus
MPLVSMKEMLIDAKENGYAVGQYNINNLEFTQAILEASQEENAPVILGVSEGAARYMSGFYTIVKMVEGLMHDLNITIPVAIHLDHGSSFEKCKEAIDAGFTSVMIDASHSPFEENVATTKKVVEYAHEKGVSVEAELGTVGGQEDDVVADGIIYADPKECQELVEKTGIDALAPALGSVHGPYKGEPKLGFKEMEEIGLSTGLPLVLHGGTGIPTKDIQKAIPFGTAKINVNTENQIASAKAVRDVLNNDKEVYDPRKYLGPAREAIKETVKGKIKEFGTSNRA

SEQ ID NO: 5556 - protein, 289 aa, Staphylococcus aureus
KHNDKIIPVILAAISAISILTTLGILITLLLETITFFTRIPITEFLFSTTWNPTGSDPKFGIWALIIGTLKITVIATIFAVPVGLGAAIYLSEYASDRARRIIKPILEILAGIPTIVFGFFALTFVTPVLRSFIPGLGEFNAISPGLVVGIMIVPLITSLSEDAMASVPNKIREGAYGLGATKLEVATKVVLPAATSGIVASIVLAISRAIGETMIVSLAAGSSPTASLSLTSSIQTMTGYIVEIATGDATFGSNIYYSIYAVGFTLFIFTLIMNLLSQWISKRFREEF

SEQ ID NO: 5557 - protein, 535 aa, Staphylococcus aureus
  VARIANT (1)...(535): Xaa = Any Amino Acid
MLQVTDVSLRFGDRKLFEDVNIKFTEGNCYGLIGANGAGKSTFLKILSGELDSQTGHVSLGKNERLAVLKQDHYAYEDERVLDVVIKGHERLYEVMKEKDEIYMKPDFSDEDGIRAAELEGEFAEMNGWNAEADAANLLSGLGIDPTLHDKKMAELENNQKIKVLLAQSLFGEPDVLLLDEPTNGLDIPAISWLEDFLINFDNTVIVVSHDRHFLNNVCTHIADLDFGKIKVYVGNYDFWYQSSQLAQKMAQEQNKKKEEKMKELQDFIARFSANASKSKQATSRKKQLEKIELDDIQPSSRRYPFVKFTPEREIGNDLLIVQNLSKTIDGEKVLDNVSFTMNPNDKAILIGDSEIAKTTLLKILAGEMEPDEGSFKWGVTTSLSYFPKDNSEFFEGVNMNLVDWLRQYAPEDEQTETFLRGFLGRMLFSGEEVKKKASVLSGGEKVRCMLSKMMLSSANVLLLDEPTNHLDLESITAVNDGLKSFKGSIIFTSYDFEFINTIANRVIDLNKQGGVSKEIPYEEYLQEIGVLKXI

SEQ ID NO: 5558 - protein, 322 aa, Staphylococcus aureus
KLAVVGATGLVGTKMLETLNRKNIPFDELVLFSSARSAGQEVEFQGKTYTVQELTDARASEHFDYVLMSAGGGTSEHFAPLFEKAGAIVIDNSSQWRMAEDIDLIVPEVNEPTFTRGIIANPNCSTIQSVVPLKVLQDAYGLKRVAYTTYQAVSGSGMKGKKDLAEGINGKTPEAYPHPIYNNVLPHIDVFLENGYTKEEQKMIDETRKILNVPDLKVTATCARVPVQDSHSVEIDVTLEKEATAEDIKALFDQDDRVVLVDNPENNEYPMAINSTNKDEVFVGRIRRDDSLENTFHVWCTSDNLLKGAALNAVQVLEQVMR

SEQ ID NO: 5559 - protein, 610 aa, Staphylococcus aureus
MSKIIGIDLGTTNSCVTVLEGDEPKVIQNPEGSRTTPSVVAFKNGETQVGEVAKRQAITNPNTVQSIKRHMGTDYKVDIEGKSYTPQEISAMILQNLKNTAESYLGEKVDKAVITVPAYFNDAERQATKDAGKIAGLEVERIINEPTAAALAYGLDKTDKDEKVLVFDLGGGTFDVSILELGDGVFEVLSTAGDNKLGGDDFDQVIIDYLVAEFKKENGVDLSQDKMALQRLKDAAEKAKKDLSGVSQTQISLPFISAGENGPLHLEVNLTRSKFEELSDSLIRRTMEPTRQAMKDAGLTNSDIDEVILVGGSTRIPAVQEAVKKEIGKEPNKGVNPDEVVAMGAAIQGGVITGDVKDVVLLDVTPLSLGIEILGGRMNTLIERNTTIPTSKSQIYSTAVDNQPSVDVHVLQGERPMAADNKTLGRFQLTDIPPAERGKPQIEVTFDIDKNGIVNVTAKDLGTNKEQRITIQSSSSLSDEEIDRMVKDAEVNAEADKKRREEVDLRNEADSLVFQVEKTLTDLGENIGEEDKKSAEEKKDALKTALEGQDIEDIKSKKEELEKVIQELSAKVYEQAAQQQQQAQGANAGQNNDSTVEDAEFKEVKDDDKK

SEQ ID NO: 5560 - protein, 232 aa, Staphylococcus aureus
MSVGILIFVISVIISIITTMRENSHKDRQNQKPPQKTSTDNEPKKGGFFEEIERTFKEISEELNEEEKKSSKRKYDDTLPPLFDELPKEEPKSKPVVEPMAPKKQQETKPMTEKPITVPKAEPVEQKHRPSRQDNSEEIRRQLEKSLRDDIKTIRTDIDREKEKQIAKMEKRARDIIEDKYLSERTKRLKLKQLLNSQNVEKDLTKSAFQFDKDEVINGMIWSEILAKPKQL

SEQ ID NO: 5561 - protein, 294 aa, Staphylococcus aureus
KSGFVSIIGRPNVGKSTFVNRVIGHKIAIMSDKAQTTRNKIQGVMTRDDAQIIFIDTPGIHKPKHKLGDYMMKVAKNTLSEIDAIMFMVNANEEIGRGDEYIIEMLKNVKTPVFLVLNKIDLVHPDELMPKIEEYQSYMDFTEIVPISALEGLNVDHFIDVLKTYLPEGPKYYPDDQISDHPEQFVVGEIIREKILHLTSEEIPHAIGVNVDRMVKESEDRVHIEATIYVERDSQKGIVIGKGGKKLKEVGKRARRDIEMLLGSKVYLELWVKVQRDWRNKVNFIRQIGYVEDQ

SEQ ID NO: 5562 - protein, 462 aa, Staphylococcus aureus
MAKDMDTIVSLAKHRGFVFPGSDIYGGLSNTWDYGPLGVELKNNVKKAWWQKFITQSPFNVGIDAAILMNPKVWEASGHLNNFNDPMIDNKDSKIRYRADKLIEDYMQDVKGDENFIADGLSFEQMKKIIDDEGIVCPVSKTANWTEIRQFNLMFKTFQGVTEDSTNEIFLRPETAQGIFVNYKNVQRSMRKKLPFGIGQIGKSFRNEITPGNFIFRTREFEQMELEFFCKPGEEIEWQNYWKTFASDWLTSLNMSSENMRLRDHDEDELSHYSNATTDIEYKFPFGWGELWGIASRTDFDLRKHAEHSGEDFRYHDPETNEKYIPYCIEPSLGADRVTLAFLCDAYDEEGVEGSKDARTVLHFHPALAPYKAAILPLSKKLSGEAIKIFEQLSSKFSIDFDESQSIGKRYRRQDEIGTPYCVTFDFDSLEDNQVTVRDRDSMEQVRMPISELEAFLTEKTK

SEQ ID NO: 5563 - protein, 248 aa, Staphylococcus aureus
INKKNTINNYNEELDSSNIPEHIAIIMDGNGRWAKKRKMPRIKGHYEGMQTIKKITRVASDIGVKYLTLYAFSTENWSRPESEVNYIMNLPVNFLKTFLPELIEKNVKVETIGFTDKLPKSTIEAINNAKEKTANNTGLKLIFAINYGGRAELVHSIKNMFDELHQQGLNSDIIDETYINNHLMTKDYPDPELLIRTSGEQRISNFLIWQVSYSEFIFNQKLWPDFDEDELIKCIKIYQSRQRRFGGL

SEQ ID NO: 5564 - protein, 257 aa, Staphylococcus aureus
MKVRMLTAIIALIVFLPILLKGGLVLMIFANILALIALKELLNMNMIKFVSVPGLISAVGLIIIMLPQHAGPWVQVIQLKSLIAMSFIVLSYTVLSKNRFSFMDAAFCLMSVAYVGIGFMFFYETRSEGLHYILYAFLIVWLTDTGAYLFGKMMGKHKLWPVISPNKTIEGFIGGLFCSLIVPLAMLYFVDFNMNVWILLGVTLILSLFGQLGDLVESGFKRHFGVKDSGRILPGHGGILDRFDSFMFVLPLLNILL

SEQ ID NO: 5565 - protein, 562 aa, Staphylococcus aureus
MKQSKVFIPTMRDVPSEAEAQSHRLLLKSGLIKQSTSGIYSYLPLATRVLNNITAIVRQEMERIDSVEILMPALQQAELWEESGRWGAYGPELMRLQDRHGRQFALGPTHEELVTSIVRNELKSYKQLPMTLFQIQSKFRDEKRPRFGLLRGREFIMKDAYSFHADEESLDQTYQDMYQAYSRIFERVGINARPVVADSGAIGGSHTHEFMALSAIGEDTIVYSKESDYAANIEKAEVVYEPNHKHTTVRSLEKIETPNVKTAQELADFLGRPVDEIVKTMIFKVDGEYIMVLVRGHHEINDIKLKSYFGTDNIELATQDEIVNLVGANPGSLGPVIDKEIKIYADNFVQDLNNLVVGANEDGYHLINVNVGRDFNVDEYGDFRFILEGEKLSDGSGVAHFAEGIEVGQVFKLGTKYSESMNATFLDNQGKAQPLIMGCYGIGISRTLSAIVEQNHDDNGIVWPKSVTPFDLHLISINPKKDDQRELADALYAEFNTKFDVLYDDRQERAGVKFNDADLIGLPLRIVVGKRASEGIVEVKERLTGDSEEVHIDDLMTVITNK

SEQ ID NO: 5566 - protein, 1436 aa, Staphylococcus aureus
MTEQQKFKVLADQIKISNQLDAEILNSGELTRIDVSNKNRTWEFHITLPQFLAHEDYLLFIHAIEQEFKDIANVTCRFTVTNGTNQDEHAIKYFGHCIDQTALSPKVKGQLKQKKLIMSGKVLKVMVSNDIERNHFDKACNGSLIKAFRNCGFDIDKIIFETNDNDQEQNLASLEAHIQEEDEQSARLATEKLEKMKAEKAKQQDNNESAVDKCQIGKPIQIENIKPIESIIEEEFKVAIEGVIFDINLKELKSGRHIVEIKVTDYTDSLVLKMFTRKNKDDLEHFKALSVGKWVRAQGRIEEDTFIRDLVMMMSDIEEIKKATKKDKAEEKRVEFHLHTAMSQMDGIPNIGAYVKQAADWGHPAIAVTDHNVVQAFPDAHAAAEKHGIKMIYGMEGMLVDDGVPIAYKPQDVVLKDATYVVFDVETTGLSNQYDKIIELAAVKVHNGEIIDKFERFSNPHERLSETIINLTHITDDMLVDAPEIEEVLTEFKEWVGDAIFVAHNASFDMGFIDTGYERLGFGPSTNGVIDTLELSRTINTEYGKHGLNFLAKKYGVELTQHHRAIYDTEATAYIFIKMVQQMKELDVLNHNEINKKLSNEDAYKRARPSHVTLIVQNQQGLKNLFKIVSASLVKYFYRTPRIPRSLLDEYREGLLVGTACDEGELFTAVMQKDQSQVEKIAKYYDFIEIQPPALYQDLIDRELIRDTETLHEIYQRLIHAGDTAGIPVIATGNAHYLFEHDGIARKILIASQPGNPLNRSTLPEAHFRTTDEMLNEFHFLGEEKAHEIVVKNTNELADRIERVVPIKDELYTPRMEGANEEIRELSYANARKLYGEDLPQIVIDRLEKELKSIIGNGFAVIYLISQRLVKKSLDDGYLVGSRGSVGSSFVATMTEITEVNPLPPHYICPNCKTSEFFNDGSVGSGFDLPDKTCETCGAPLIKEGQDIPFETFLGFKGDKVPDIDLNFSGEYQPNAHNYTKVLFGEDKVFRAGTIGTVAEKTAFGYVKGYLNDQGIHKRGAEIDRLVKGCTGVKRTTGQHPGGIIVVPDYMDIYDFTPIQYPADDQNSAWMTTHFDFHSIHDNVLKLDILGHDDPTMIRMLQDLSGIDPKTIPVDDKEVMQIFSTPESLGVTEDEILCKTGTFGVPEFGTGFVRQMLEDTKPTTFSELVQISGLSHGTDVWLGNAQELIKTGICDLSSVIGCRDDIMVYLMYAGLEPSMAFKIMESVRKGKGLTEEMIETMKENEVPDWYLDSCLKIKYMFPKAHAAAYVLMAVRIAYFKVHHPLYYYASYFTIRASDFDLITMIKDKTSIRNTVKDMYSRYMDLGKKEKDVLTVLEIMNEMAHRGYRMQPISLEKSQAFEFIIEGDTLIPPFISVPGLGENVAKRIVEARDDGPFLSKEDLNKKAGLSQKIIEYLDELGSLPNLPDKAQLSIFDM

SEQ ID NO: 5567 - protein, 131 aa, Staphylococcus aureus
MIKCVCLVEETADKILLVQVRNREKYYFPGGKIEEGESQVHALLREVKEELNLTLTMDEIEYIGTIVGPAYPQQDMLTELNGFRALTKIDWENVTINNEITDIRWIDKDNDALIAPAVKVWIETYGGKHDK

SEQ ID NO: 5568 - protein, 1491 aa, Staphylococcus aureus
KGLYDYREEHDACGIGFYANMDNKRSHDIIDKSLEMLRRLDHRGGVGADGITGDGAGIMTEIPFAFFKQHVTDFDIPGEGEYAVGLFFSKERVLGSEHEAVFKKYFEGEGLSILGYRNVPVNKDAIAKHVADTMPVIQQVFIDIRDIEDVEKRLFLARKQLEFYSTQCDLELYFTSLSRKTIVYKGWLRSDQIKKLYTDLSDDLYQSKLGLVHSRFSTNTFPSWKRAHPNRMLMHNGEINTIKGNVNWMRARQHKLIETLFGEDQHKVFQIVDEDGSDSAIVDNALEFLSLAMEPEKAAMLLIPEPWLYNEANDANVRAFYEFYSYLMEPWDGPTMISFCNGDKLGALTDRNGLRPGRYTITKDNFIVFSSEVGVVDVPESNVAFKGQLNPGKLLLVDFKQNKVIENNDLKGAIAGELPYKAWIDNHKVDFDFENIQYQDSQWKDETLFKLQRQFAYTKEEIHKYIQELVEGKKDPIGAMGYDAPIAVLNERPESLFNYFKQLFAQVTNPPIDAYREKIVTSELSYLGGEGNLLAPDETVLDRIQLKRPVLNESHLAAIDQEHFKLTYLSTVYEGDLEDALEALGREAVDAVKQGAQILVLDDSGLVDGNGFAMPMLLAISHVHQLLIKADLRMSTSLVAKSGETREVHHVACLLAYGANAIVPYLAQRTVEQLTLTEGLQGTVVDNVKTYTDVLSEGVIKVMAKMGISTVQSYQGAQIFEAIGLSHDVIDRYFTGTQSKLSGISIDQIDAENKARQQSDDNYLASGSTFQWRQQGQHHAFNPESIFLLQHACKENDYAQFKAYSEAVNKNRTDHIRHLLEFKACTPIDIDQVEPVSDIVKRFNTGAMSYGSISAEAHETLAQAMNQLGGKSNSGEGGEDAKRYEVQVDGSNKVSAIKQVASGRFGVTSDYLQHAKEIQIKVAQGAKPGEGGQLPGTKVYPWIAKTRGSTPGIGLISPPPHHDIYSIEDLAQLIHDLKNANKDADIAVKLVSKTGVGTIASGVAKAFADKIVISGYDGGTGASPKTSIQHAGVPWEIGLAETHQTLKLNDLRSRVKLETDGKLLTGKDVAYACALGAEEFGFATAPLVVLGCIMMRVCHKDTCPVGVATQNKDLRALYRGKAHHVVNFMHFIAQELREILASLGLKRVEDLVGRTDLLQRSSTLKANSKAASIDVEKLLCPFDGPNTKEIQQNHNLEHGFDLTNLYEITKPYIAKGRRYTGSFTVNNEQRDVGVITGSEISKQYGEAGLPENTINVYTNGHAGQSLAAYAPKGLMIHHTGDANDYVGKGLSGGTVIVKAPFEERQNEIIAGNVSFYGATGGKAFINGSAGERFCIRNSGVDVVVEGIGDHGLEYMTGGHVINLGDVGKNFGQGMSGGIAYVIPSDVEAFVENNQLDTLSFTKIKHQEEKAFIKQMLEEHVSHTNSTRAIHVLKHFDRIEDVVVKVIPKDYQLMMQKIHLHKSLHDNEDEAMLAAFYDDSKTIDAKHKPAVV

SEQ ID NO: 5569 - protein, 481 aa, Staphylococcus aureus
MGEFKGFMKYDKQYLGELSLVDRLKHHKAYQQRFTKEDASIQGARCMDCGTPFCQTGQQYGRETIGCPIGNYIPEWNDLVYHQDFKTAYERLSETNNFPDFTGRVCPAPCESACVMKINRESIAIKGIERTIIDEAFENGWVAPKVPSRRRDEKVAIVGSGPAGLTAAEELNLLGYQVTIYERARESGGLLMYGIPNMKLDKDVVRRRIKLMEEAGITFINGVEVGVDIDKATLESEYDAIILCTGAQKGRDLPLEGRMGDGIHFAMDYLTEQTQLLNGEIDDITITAKDKNVIIIGAGDTGADCVATALRENCKSIVQFNKYTKLPEAITFTENASWPLAMPVFKMDYAHQEYEAKFGKEPRAYGVQTMRYDVDDKGHIRGLYTQILEQGENGMVMKEGPERFWPADLVLLSIGFEGTEPTVPNAFNIKTDRNRIVADDTNYQTNNEKVFAAGDARRGQSLVVWAIKEGRGVAKAVDQYL

SEQ ID NO: 5570 - protein, 530 aa, Staphylococcus aureus
MSVDTYTETTKIDKLLKKPTSHFQLSTTQLYNKILDNNEGVLTELGAVNASTGKYTGRSPKDKFFVSEPSYRDNIDWGEINQPIDEETFLKLYHKVLDYLDKKDELYVFKGYAGSDKDTMLKLTVINELAWHNLFAKNMFIRPESKEEATKIKPNFTIVSAPHFKADPEVDGTKSETFVIISFKHKVILIGGTEYAGEMKKGIFSVMNYLLPMQDIMSMHCSANVGEKGDVALFFGLSGTGKTTLSADPHRKLIGDDEHGWNKNGVFNIEGGCYAKAINLSKEKEPQIFDAIKYGAILENTVVAEDGSVDFEDNRYTENTRAAYPINHIDNIVVPSKAAHPNTIIFLTADAFGVIPPISKLNKDQAMYHFLSGFTSKLAGTERGVTEPEPSFSTCFGAPFFPLHPTVYADLLGELIDLHDVDVYLVNTGWTGGKYGVGRRISLHYTRQMVNQAISGKLKNAEYTKDSTFGLSIPVEIEDVPKTILNPINAWSDKDKYKAQAEDLIQRFEKNFEKFGEKVEHIAEKGSFNK

SEQ ID NO: 5571 - protein, 397 aa, Staphylococcus aureus
MLNNKRLFTSESVTEGHPDKIADQVSDAILDAILKDDPNARVACETTVTTGMALIAGEISTTTYVDIPKVVRETIKEIGYTRAKYGYDYETMAILTAIDEQSPDIAQGVDKALEYRDKDSEEEIEATGAGDQGLMFGYATNETETYMPLAIYLSHQLAKRLSDVRKDGTLNYLRPDGKVQVTVEYDENDNPVRIDTIVVSTQHAEDVTLEQIQEDIKAHVIYPTVPENLINEQTKFYINPTGRFVIGGPQGDAGLTGRKIIVDTYGGYARHGGGCFSGKDPTKVDRSAAYAARYVAKNIVAAGLADQCEVQLAYAIGVAEPVSIAIDTFGTGKVSEGQLVEAVRKHFDLRPAGIIKMLDLKQPIYKQTAAYGHFGRTDVLFPWEKLDKVEELKDAVK

SEQ ID NO: 5572 - protein, 272 aa, Staphylococcus aureus
TFYNGNTMPQIGLGTFRVDNDENCMESVKYAIEQGYRSIDTAKVYGNEEQVGAGIRAGLESTGIAREDLFITSKLYFEDFGRENVAAAYEASLSRLGLKYLDLYLVHWPGTNEAVMVDTWKGMEDLYKNNKVKNIGVSNFEPEHLEALLAQVSIKPVINQVEYHPYLTQHKLKLYLAAQHIVMESWSPLMNAQILNDETIKDIAQELGKSPAQVVLRWNVQHGVVTIPKSVTPNRISENFQIFDFELSDEQMTRIDSLNQDKRIGPDPKTFE

SEQ ID NO: 5573 - protein, 1037 aa, Staphylococcus aureus
YLNIHTAYDLLNSSLKIEDAVRLAVSENVEALAITDTNVLYGFPKFYDACIANNIKPIFGMTIYVTNGLNTIETVVLAKDNNGLKDLYQLSSKIKMNSMENVSFELLQQFSSNLIIIFKNVADEHRDIVQVFDSHEDTYLDHRSVLVQGVKHVWIQNVCYQTCQDADTISALAAIRDNTKLDLIHDQEDFGAHFLTEKEIKQLEINQEYLTQVDVIAQKCNAELKYHQSLLPQYQTPNDESAKKYLWRVLVTQLKKLELNYDVYLERLKYEYKVITNMGFEDYFLIVSDLIHYAKTNDVMVGPGRGSSAGSLVSYLLGITTIDPIKFNLLFERFLNPERVTMPDIDIDFEDTRRERVIQYVQEKYGELHVSGIVTFGHLLARAVARDVGRIMGFDEVTLNEISSLIPHKLGITLDEAYQIDDFKKFVHRNHRHERWFSICKKLEGLPRHTSTHAAGIIINDHPLYEYAPLTKGDTGLLTQWTMTEAERIGLLKIDFLGLRNLSIIHQILTQVKKDLGINIDIEKIPFDDQKVFDLLSQGDTTGIFQLESDGVRSVLKKLKPEHFEDIVAVTSLYRPGPMEEIPTYITRRHDPSKVQYLHPHLEPILKNTYGVIIYQEQIMQIASAFANFSYGEADILRRAMSKKNRAVLESERQHFIEGAKQNGYHEDISKQIFDLILKFADYGFPRAHAVSYSKIAYIMSFLKVHYPNYFYANILSNVIGSEKKTAQMIEEAKKQGITILPPNINESHWFYKPSQEGIYLSIGTIKGVGYQSVKVIVDERYQNGKFKDFFDFARRIPKRVKTRKLLEALILVGAFDAFGKTRSTLLQAIDQVLDGDLNIEQDGFLFDILTPKQMYEDKEELPDALISQYEKEYLGFYVSQHPVDKKFVAKQYLTIFKLSNAQNNKPILVQFDKVKQIRTKNGQNMAFVTLNDGIETLDGVIFPNQFKKYEALLSHNDLFIVSGKFDHRKQQRQLIINEIQTLATFEEQKLAFAKQIIIRNKSHIDMFEEMIKATKENANDVVLSFYDETIKQMTTL

SEQ ID NO: 5574 - protein, 394 aa, Staphylococcus aureus
MAKEKFDRSKEHANIGTIGHVDHGKTTLTAAIATVLAKNGDSVAQSYDMIDNAPEEKERGITINTSHIEYQTDKRHYAHVDCPGHADYVKNMITGAAQMDGGILVVSAADGPMPQTREHILLSRNVGVPALVVFLNKVDMVDDEELLELVEMEVRDLLSEYDFPGDDVPVIAGSALKALEGDAQYEEKILELMEAVDTYIPTPERDSDKPFMMPVEDVFSITGRGTVATGRVERGQIKVGEEVEIIGLHDTSKTTVTGVEMFRKLLDYAEAGDNIGALLRGVAREDVQRGQVLAAPGSITPHTEFKAEVYVLSKDEGGRHTPFFSNYRPQFYFRTTDVTGVVHLPEGTEMVMPGDNVEMTVELIAPIAIEDGTRFSIREGGRTVGSGVVTEIIK

SEQ ID NO: 5575 - protein, 385 aa, Staphylococcus aureus
EFLEENINYLKENGLYNEIDTIEGANGPEIKINGKSYINLSSNNYLGLATNEDLKSAAKAAIDSHGVGAGAVRTINGTLDLHDELEETLAKFKGTEAAIAYQSGFNCNMAAISAVMNKNDAILSDELNHASIIDGCRLSKAKIIRVNHSDMDDLRAKAKEAVESGQYNKVMYITDGVFSMDGDVAKLPEIVEIAEEFGLLTYVDDAHGSGVMGKGAGTVKHFGLQDKIDFQIGTLSKAIGVVGGYVAGTKELIDWLKAQSRPFLFSTSLAPGDTKAITEAVKKLMASTELHDKLWDNAQYLKNGLSKLGYDTGESETPITPVIIGDEKTTQEFSKRLKDEGVYVKSIVFPTVPRGTGRVRNMPTAAHTKDMLDEAIAAYEKVGKE

SEQ ID NO: 5576 - protein, 282 aa, Staphylococcus aureus
ELSKQPTPDKAEDNAFFPSPYSLSQYTAPKTDFDGVEHKGAYKDGKWKVLMIAAEERYVLLENGKMFSTGNHPVEMLLPLHHLMEAGFDVDVATLSGYPAKLELWAMPTEDEAVISTYNKLKEKLKQPKKLADVIKNELGPDSDYLSVFIPGGHAAVVGISESEDVQQTLDWALENDRFIVTLCHGPAALLSAGLNREKSPLEGYSVCVFPDSLDEGANIEIGYLPGRLKWLVADLLTKQGLKVVNDDMTGRTLKDRKLLTGDSPLASNELGKLAVNEMLNA

SEQ ID NO: 5577 - protein, 116 aa, Staphylococcus aureus
LKAKGYQLGIVTSDTKKGVEQFLAHTNATSLFDLIISTEADAYEKPNPKVLSPLFEKYNVDPQKVAIVGDTANDMKTASNANLGMAIGVLTGIATKEELHEADIILNSAADILEAL

SEQ ID NO: 5578 - protein, 932 aa, Staphylococcus aureus
MNNKKTATNRKGMIPNRLNKFSIRKYSVGTASILVGTTLIFGLSGHEAKAAEHTNGELNQSKNETTAPSENKTTEKVDSRQQNNIEQSTTSDQPKVNESDNTSVKETTEEPQNTTSTQPTKQNNDAMANKDNLAAQNISTQAKDVSTTPKTTTIKPRTLNRMAVNTVAAPQQGTNVNDKVHFTNIDIAIDKGHVNKTTGNTEFWATSSDVLKLKANYTIDDSVKEGDTFTFKYGQYFRPGSVRLPSQTQNLYNAQGNIIAKGIYDSETSTTTYTFTNYVDQYTNISGSFEQVAFAKRENATTDKTAYPMEVTLGNDKYSKNVIVDYGNQKGQQLISSTNYINNEDLSRNMTVYVNQPKKTYTKETFVTNLTGYKFNPDAKNFKIYEVTNQNQFVDSFTPDTSKLTDVTDKFKITYSNDNKTATVDLLNGQSSSDKQYIIQQVAYPDNSSTDNGKIDYTLETQNGKSSWSNSYSNVNGSSTANGDQKKYNLGDYVWEDTNKDGKQDANEKGIKGVYVILKDSNGKELDRTTTDENGKYQFTGLGNGTYSVEFSTLAGYTPTTANAGTDDAVDSDGLTTTGVIKDADNMTLDSGFYKTPKYSLGDYVWYDSNKDGKQDSTEKGIKDVKVTLLNEKGEVIGTTKTDENGKYRFDNLDSGKYKVIFEKPAGLTQTGTNTTEDDKDADGGEVDVTITDHDDFTLDNGYYEEETSDSDSDSDSDSDSDSDSDSDSDSDSDSDSDSDSDSDSDSDSDSDSDSDSDSDSDSDSDSDSDSDSDSDSDSDSDSDSDSDSDSDSDSDSDSDSDSDSDSDSDSDSDSDSGSDSDSDSDSDSDSDSDSDSDSDSDSDSDSDSDSDSDSDSDSDSDSDSDSDSDSDVGKHTPAKPMSTVKDHHNKAKALPETGSENNNSNNGTLFGGLFAALGSLLLFGRRKKQNK

SEQ ID NO: 5579 - protein, 374 aa, Staphylococcus aureus
MHKKYLLLFFLLLSVALLFSCSKQNEKAQNKSVNPNEYAKHKSKMDEHWETYHGQVYHVFYHPLITDPKVAFTGDTHQAKGNNDWMITVSEFKKSLNELYKNNYIIVNPHDVYDLSSHHVKAKKIKLPKGKKPLIISIDDMNYYSYMRHHGYADRLVLDKNKHVVSETTDSKGHATYSDDNDIVPILNKFVKEHPDFSLNGEKGVVALTGYEGVLGYRTNELTSKDYTKNKKAAEEVVRAMKRDGWSFASHSYGHINFEKTSLDGIKRDTKRWKNEVEPIVGKTDMFVFPHGAQDRHTQAYDYLVDEAEFKFIAGVGPNNFTDISATNVYQDRVAIDGLNLFEFKYKLKPFFNPENVYSKQDRQFFKGNRDYEE

SEQ ID NO: 5580 - protein, 166 aa, Staphylococcus aureus
EHQNVKLNRTVKAAVLTVSDTRDFDTDKGGQCVRQLLQADDVEVSDAHYTIVKDEKVAITTQVKKWLEEDIDVIITTGGTGIAQRDVTIEAVKPLLTKEIEGFGELFRYLSYVEDVGTRALLSRAVAGTVNDKLIFSIPGSTGAVKLALEKLIKPELNHLIHELTK

SEQ ID NO: 5581 - protein, 419 aa, Staphylococcus aureus
MVVEKRNPIPVKEAIQRIVNQQSSMPAITVALEKSLNHILAEDIVATYDIPRFDKSPYDGFAIRSVDSQGASGQNRIEFKVIDHIGAGSVSDKLVGDHEAVRIMTGAQIPNGADAVVMFEQTIELEDIFTIRKPFSKNENISLKGEETTTGDVVLKKGQVINPGAIAVLATYGYAEVKVIKQPSVAVIATGSELLDVNDVLEDGKIRNSNGPMIRALAEKLGLEVGIYKTQQDDLDSGIQVVKEAMEKHDIVITTGGVSVGDFDYLPEIYKAVKAEVLFNKVAMRPGSVTTVAFADGKYLFGLSGNPSACFTGFELFVKPAVKHMCGALEVFPQIIKATLMEDFTKANPFTRFIRAKATLTSAGATVVPSGFNKSGAVVAIAHANCMVMLPGGSRGFKAGHTVDIILTESDAAEEELLL

SEQ ID NO: 5582 - protein, 165 aa, Staphylococcus aureus
LIIDGYNMIGQSPTLSAIAKENLEEARMQLIDAIANYNAVISDEIICVFDAYDQSGVEREYMYHGVKTIFTKEKETADSFIERYVYELYDKHTKHITVVTSDMSEQHAIFGSGAYRISSREMWRDLKENEIDVSKSLDDISENKPRTRIPLSSEILAEFEKIRRG

SEQ ID NO: 5583 - protein, 209 aa, Staphylococcus aureus
LLKRMRDDIKMVFEQDPAARSTLEVITTYAGLHAVWSHLIAHKLYNQKKYVAARAISQISRFFTGIEIHPGAKIGKRLFIDHGMGVVIGETCTIGDNVTIYQGVTLGGTGKERGKRHPDIGDNVLIAAGAKVLGNIKINSNVNIGANSVVLQSVPSYSTVVGIPGHIVKQDGVRVGKTFDHRHLPDPIYEQIKHLERQLEKTRNGEIQD

SEQ ID NO: 5584 - protein, 481 aa, Staphylococcus aureus
MSDRIRVRYAPSPTGYLHIGNARTALFNYLYAKHYNGDFVIRIEDTDKKRNLEDGETSQFDNLKWLGLDWDESVDKDNGYGPYRQSERQHIYQPLIDQLLAEDKAYKCYMTEEELEAEREAQIARGEMPRYGGQHAHLTEEQRQQFEAEGRQPSIRFRVPQNQTYSFDDMVKGNISFDSNGIGDWVIVKKDGIPTYNFAVAIDDYYMEISDVIRGDDHISNTPKQIMIYEAFGWEPPRFGHMSLIVNEERKKLSKRDGQILQFIEQYRDLGYLPEALFNFIALLGWSPEGEEEIFSKEEFIKIFDEKRLSKSPAFFDKQKLAWVNNQYMKQKDTETVFQLALPHLIKANLIPEVPSEEDLSWGRKLIALYQKEMSYAGEIVPLSEMFFKEMPALGEEEQQVINGEQVPELMTHLFSKLEALEPFEAAEIKKTIKEVQKETGIKGKQLFMPIRVAVTGQMHGPELPNTIEVLGKEKVLNRLK

SEQ ID NO: 5585 - protein, 452 aa, Staphylococcus aureus
LAKKKVIFECMACGYQSPKWMGKCPNCGAWNQMEEIVEKAANPKHGVKTKELTGKVQKLNSIKHETTPRVLTDSAEFNRVLGGGIVSGSLVLIGGDPGIGKSTLLLQICASLSQKKKVLYITGEESLSQTKLRAERLDEDSSELQVLAETDLEVIYQTVKEEQPDLLVVDSIQTIYHPEISSAPGSVSQVRESTQSLMNIAKQMNIATFIVGHVTKEGQIAGPRLLEHMVDTVLYFEGDEHHAYRILRAVKNRFGSTNEMGIFEMKQSGLKGVNNPSEMFLEERSTNVPGSTIVATMEGTRPLLIEVQALVTPTTFNNPRRMATGIDHNRLSLLMAVLEKKENYLLQQQDAYIKVAGGVKLTEPAVDLSVIVATASSFKDKAVDGLDCYIGEVGLTGEVRRVSRIEQRVQEAAKLGFKRVIIPKNNIGGWTYPEGIQVIGVTTVHEALSFAL

SEQ ID NO: 5586 - protein, 810 aa, Staphylococcus aureus
MLFGRLTERAQRVLAHAQEEAIRLNHSNIGTEHLLLGLMKEPEGIAAKVLESFNITEDKVIEEVEKLIGHGQDHVGTLHYTPRAKKVIELSMDEARKLHHNFVGTEHILLGLIRENEGVAARVFANLDLNITKARAQVVKALGNPEMSNKNAQASKSNNTPTLDSLARDLTVIAKDGTLDPVIGRDREITRVIEVLSRRTKNNPVLIGEPGVGKTAIAEGLAQAIVNNEVPETLKDKRVMSLDMGTVVAGTKYRGEFEERLKKVMEEIQQAGNVILFIDELHTLVGAGGAEGAIDASNILKPALARGELQCIGATTLDEYRKNIEKDAALERRFQPVQVDEPSVVDTVAILKGLRDRYEAHHRINISDEAIEAAVKLSNRYVSDRFLPDKAIDLIDEASSKVRLKSHTTPNNLKEIEQEIEKVKNEKDAAVHAQEFENAANLRDKQTKLEKQYEEAKNEWKNAQNGMSTSLSEEDIAEVIAGWTGIPLTKINETESEKLLSLEDTLHERVIGQKDAVNSISKAVRRARAGLKDPKRPIGSFIFLGPTGVGKTELARALAESMFGDDDAMIRVDMSEFMEKHAVSRLVGAPPGYVGHDDGGQLTEKVRRKPYSVILFDEIEKAHPDVFNILLQVLDDGHLTDTKGRTVDFRNTIIIMTSNVGAQELQDQRFAGFGGSSDGQDYETIRKTMLKELKNSFRPEFLNRVDDIIVFHKLTKEELKEIVTMMVNKLTNRLSEQNINIIVTDKAKDKIAEEGYDPEYGARPLIRAIQKTIEDNLSELILDGNQIEGKKVTVDHDGKEFKYDIAEQTS

SEQ ID NO: 5587 - protein, 337 aa, Staphylococcus aureus
  VARIANT (1)...(337): Xaa = Any Amino Acid
MTHNIHDNISQWMKSNEETPIVMSSRIRLARNLENHVHPLMYATENDGFRVINEVQDALPNFELMRLDQMDQQSKMKMVAKHLISPELIKQPAAAVLVNDDESLSVMINEEDHIRIQAMGTDTTLQALYNQASSIDDELDRSLDISYDEQLGYLTTCPTNIGTGMRASVMLHLPGLSIMKRMTRIAQTINRFGYTIRGIYGEGSQVYGHTYQVSNQLTLGKSELEIIETLTEVVNQIIHEEKQIRQKLDTYNQLETQDRVFRSLGILQNCRMITMEEASYRLSEVKLGIDLNYIELQNFKFNELMVAIQSPFLLDEEDDKSVKEKRADILREHIKXE

SEQ ID NO: 5588 - protein, 182 aa, Staphylococcus aureus
VLCENCQLNEAELKVKVTSKNKTEEKMVCQTCAEGHHPWNQANEQPEYQEHQDNFEEAFVVKQILQHLATKHGINFQEVAFKEEKRCPSCHMTLKDIAHVGKFGCANCYATFKDDIIDIVRRVQGGQFEHVGKTPHSSHKKIALKRKIEEKNEYLKKLIEIQDFEEAAIVRDEIKALKAESE

SEQ ID NO: 5589 - protein, 182 aa, Staphylococcus aureus
MKIGVLALQGAVREHIRHIELSGHEGIAVKKVEQLEEIEGLILPGGESTTLRRLMNLYGFKEALQNSTLPMFGTCAGLIVLAQDIVGEEGYLNKLNITVQRNSFGRQVDSFETELDIKGIATDIEGVFIRAPHIEKVGQGVDILCKVNEKIVAVQQGKYLGVSFHPELTDDYRVTDYFINHI

SEQ ID NO: 5590 - protein, 290 aa, Staphylococcus aureus
GSDRVKRGMAEMQKGGVIMDVVNAEQARIAEEAGAVAVMALERVPSDIRAAGGVARMANPKIVEEVMNAVSIPVMAKARIGHITEARVLEAMGVDYIDESEVLTPADEEYHLRKDQFTVPFVCGCRNLGEAARRIGEGAAMLRTKGEPGTGNIVEAVRHMRQVNSEVSRLTVMNDDEIMTFAKDIGAPYEILKQIKDNGRLPVVNFAAGGVATPQDAALMMELGADGVFVGSGIFKSEDPEKFAKAIVQATTHYQDYELIGRLASDLGTAMKGLDINQLSLEERMQERGW

SEQ ID NO: 5591 - protein, 545 aa, Staphylococcus aureus
RKIQAKKGLSIECKGWEQEAVLRMLYNNLDPEVAERPEDLVVYGGIGKAARNWEAFEAIEKTLRELESDETMLVQSGKPVAVFKTHEEAPRVLISNSVLVPEWANWDHFNELDKKGLIMYGQMTAGSWIYIGSQGIVQGTYETFAELGNQHFNGDLAGTVTLTAGLGGMGGAQPLAITMNHGVAICVDVDETRVDKRIDTKYCDVKTADLDEALKLAEEAKERGEGLSIGLVGNAVDIHQAILEKGFKIDIITDQTSAHDPLNGYVPQGYSVEEAKVLREKDPKKYVELSQASMAKHVELMLEFQKRGAVAFDYGNNIRQVAFNNGVKNAFDFPGFVPAYIRPLFCEGKGPFRFAALSGDSKDIERADEEMRKLFPENEKLLRWLDLAEEKISYQGLPSRIAWLGYGERAKMGLALNRLVRDGEISAPIVIGRDHLDAGSVASPNRETESMKDGSDAVGDWAVLNALINTAAGGSWISFHHGGGVGMGYSLHAGMVVVADGSERAERRLERVLTTDPGMGVARHVDAGYDIAIQTAKEKGIHIPM

SEQ ID NO: 5592 - protein, 286 aa, Staphylococcus aureus
QDPRTKFKTTDYEKQEQEVPGLQSEMTPAPDCGETSYQGHQRLQGYKMLVTGGDSAIGRAAAIAYAKEGADVAINYLPSEEQDAQEVRQVIEESGQKAVLIPGDIRDEQFNYDLVEQAYQQLGGLDNVTLVAGHQQYHDDIHGFTTEAFTETFETNVYPLFWTIQKALEYLKPGASITTTSSVQGYNPSPILHDYAASKAAIISLTKSFSEELGPKGIRVNCVAPGPFWSPLQISGGQPQSKIPTFGQKTPLGRAGQPVELCGTYVLLASEESSYTTGQVFGVSGG

SEQ ID NO: 5593 - protein, 365 aa, Staphylococcus aureus
MALTAGIVGLPNVGKSTLFNAITKAGALAANYPFATIDPNVGIVEVPDARLLKLEEMVQPKKTLPTTFEFTDIAGIVKGASKGEGLGNKFLSHIREVDAICQVVRAFDDDNVTHVAGRVDPIDDIEVINMELVLADLESVEKRLPRIEKLARQKDKTAEMEVRILTTIKEALENGKPARSIDFNEEDQKWVNQAQLLTSKKMLYIANVGEDEIGDDDNDKVKAIREYAAQEDSEVIVISAKIEEEIATLDDEDKEMFLEDLGIEEPGLDRLIRTTYELLGLSTYFTAGVQEVRAWTFKQGMTAPQCAGIIHTDFERGFIRAEVTSYDDYVQYGGESGAKEAGRQRLEGKEYIMQDGDIVHFRFNV

SEQ ID NO: 5594 - protein, 245 aa, Staphylococcus aureus
KLAMIIIYIIVALIVIKILDKMIAQGFKIQNKSKKGNKKRSKTLISLVQNVVKYIVWFIVITTILSKFGISVEGVIASAGVVGLAVGFGAQTIVKDVITGFFIIFESQFDVGDYVKINNGGTTVAEGTVKSIGLRSTRINTISGELTILPNSSMGEITNYSITNGTAIVKIPVSVDENIDNVEKKLNKLFTSLRSKYYLFVSDPVVIGIDAFEDTRVILRVSAETIPGEGFSGARIIRKEVQKMF

SEQ ID NO: 5595 - protein, 364 aa, Staphylococcus aureus
DTQLAQITLTDDSTGAIANPIHLSTAYKHPKLGQSTGFDYTRTKNPTRSTFETCFAKLEHGIASFATSSGMSAIQLICNLFKPHDEILVSFDLYGGTFRLFEFYEQQYNIKFKYVDFTDYEQVEKEITDKTVALFIEPISNPQMIAIDVKPYYQLCKAKGLLSIIDNTFLTPYLSTPLAEGADIVLHSATKYIGGHNDVLAGVVTVKDESLAQQLFDFHNMTGATLSPIDSYLLLRGLKTLHLRIERAQSNARKLAKKCQSLQAIDEVLYSGQTGMLSLRLNKAYSVAKLLENLDICIFAESLGGTETLVTFPYTQTHVDMPDAEKDKRGIDEYLIRLSLGVENYEDIERDIIQALDKAQIGEI

SEQ ID NO: 5596 - protein, 391 aa, Staphylococcus aureus
MTRVVLAAAYRTPIGVFGGAFKDVPAYDLGATLIEHIIKETGLNPSEINEVIIGNVLQAGQGQNPARIAAMKGGLPETVPAFTVNKVCGSGLKSIQLAYQSIVTGENDIVLAGGMENMSQSPMLVNNSRFGFKMGHQSMVDSMVYDGLTDVFNQYHMGITAENLVEQYGISREEQDTFAVNSQQKAVRAQQNGEFDSEIVPVSIPQRKGEPIVVTKDEGVRENVSVEKLSRLRPAFKKDGTVTAGNASGINDGAAMMLVMSEDKAKELNIEPLAVLDGFGSHGVDPSIMGIAPVGAVEKALKRSKKELSGIDVFELNEAFAAQSLAVDRELKLPPEKVNVKGGAIALGHPIGASGARVLVTLLHQLNDEVETGLTSLCIGGGQAIAAVVSK

SEQ ID NO: 5597 - protein, 803 aa, Staphylococcus aureus
LNYNHNQIEKKWQDYWDENKTFKTNDNLGQKKFYALDMFPYPSGAGLHVGHPEGYTATDIISRYKRMQGYNVLHPMGWDAFGLPAEQYALDTGNDPREFTKKNIQTFKRQIKELGFSYDWDREVNTTDPEYYKWTQWIFIQLYNKGLAYVDEVAVNWCPALGTVLSNEEVIDGVSERGGHPVYRKPMKQWVLKITEYADQLLADLDDLDWPESLKDMQRNWIGRSEGAKVAFDVDNAEGKVEVFTTRPDTIYGASFLVLSPEHALVNSITTDEYKEKVKAYQTEASKKSDLERTDLAKDKSGVFTGAYAINPLSGEKVQIWIADYVLSTYGTGAIMAVPAHDDRDYEFAKKFDLPIIEVIEGGNVEEAAYTGEGKHINSGELDGLENEAAITKAIQLLEQKGAGEKKVNYKLRDWLFSRQRYWGEPIPVIHWEDGTMTTVPEEELPLLLPETDEIKPSGTGESPLANIDSFVNVVDEKTGMKGRRETNTMPQWAGSCWYYLRYIDPKNENMLADPEKLKHWLPVDLYIGGVEHAVLHLLYARFWHKVLYDLGIVPTKEPFQKLFNQGMILGEGNEKMSKSKGNVINPDDIVQSHGADTLRLYEMFMGPLDAAIAWSEKGLDGSRRFLDRVWRLMVNEDGTLSSKIVTTNNKSLDKVYNQTVKKVTEDFETLGFNTAISQLMVFINECYKVDEVYKPYIEGFVKMLAPIAPHIGEELWSKLGHEESITYQPWPTYDEALLVDDEVEIVVQVNGKLRAKIKIAKDTSKEEMQEIALSNDNVKASIEGKDIMKVIAVPQKLVNIVA

SEQ ID NO: 5598 - protein, 406 aa, Staphylococcus aureus
LMAAVAASEQSNNVLLIEKKKGLGRKLKISGGGRCNVTNRLPYAEIIKNIPGNGKFLYSPFSIFDNESIIDFFESRGVKLKEEDHGRMFPVSNKAQDVVDTLVTTIERQHVTIKEEEAVSRIEVNTDQTFTVHTQSSSYVSHSLVIATGGTSVPQTGSTGDGYKFAQDLGHTITELFPTEVPITSAEPFIKSNRLKGLSLKDVELSVLKKNGKKRISHQMDMLFTHFGISGPATLRCSQFVYKEQKNQKTQHISMAIDAFPELNHEQLKQHITSLLSDTPDKIIKNSLHGLIEERYLLFMLEQAGIDENTTSHHLSNQQLNDLVNMFKGFVFKVNGTLPIDKAFVTGGGVSLKEIQPKTMMSKLVPGLFLCGEVLDIHGYTGGYNITSALVTGHVAGLYAGHYSHA

SEQ ID NO: 5599 - protein, 544 aa, Staphylococcus aureus
SKEMVRGTFLITISILITKVLGVLFIIPFNYLIGGQENMAPFTYAYAPYNIAIAVATAGVPLAASKYVAKYNAIGAYKVSQKFYKSSFIVMSITGVLGFLVLYFLAPYISELTLARNVHDKNGWSVDDITWIIRIISMVVIFIPVLATWRGIFQGYKSMGPTAVSEVTEQIARVIFILIGSYLVLNVFDGSILLANGIATFAAAVGAIIGIFTLWYYWRKRKHNIDRMVESDYTDIDVSYGKMYKEIIAYSIPFVIVSLNYPLFNLVDQFTHNGALSLVGIPSQLQDIFFNMLNMSTNKIVMIPTSLSAGFAVSLIPYITKTFAEGRLHEMHHQIRTSIGVLMFITVPASIGIMALAQPLFTVFYGYDPIVLGHDPNHDGSRLLFYYAPVAILISLLSVTASMLQGIDKQKLTVYVILASVVIKLALNYPLIMLFHTPGAILSTSIALLFAIGCNFYILKKYAKFKFSYSWIHFAKIFLYSFIMMLGVELVFFLANLFLEPTKLGYLIIIILGVTVGILIYGTITIKTRLADEFLGEIPEKLRR

SEQ ID NO: 5600 - protein, 268 aa, Staphylococcus aureus
MIWYTIRVKGLVNVNGNIIVAHGMRHGRQNQALLAFISELVKDDIHHYDIAFLESEHQDLETVMTTLVQSGVDHFKIVPLLIFSAMHYLKDIPDIVHEMKRRYPDIKVEVSEPLGTHPLMRRLIEQRICDALAGDEQQVGVMVVAHGNINGKFTKAHEELQICVQNLQISNPTYARTLYGEISFTHDLEIISKRYQKLIVVPLFLYDGRLVNKVKQQMNNMVINPDIHITPSINFDPILKQIINDRLESLNDSNENIKAQTKIKTFLK

SEQ ID NO: 5601 - protein, 184 aa, Staphylococcus aureus
LALKDLFSGFFVIDDEEEVEVPDKQQQVNEAPAKEQSQQTTKQNAIKSVPQKSASRYTTTSEERNNRMSNYSKNNSRNVVTMNNATPNNASQESSKMCLFEPRVFSDTQDIADELKNRRATLVNLQRIDKVSAKRIIDFLSGTVYAIGGDIQRVGTDIFLCTPDNVEVAGSITDHIENMEHSFD

SEQ ID NO: 5602 - protein, 205 aa, Staphylococcus aureus
MPFTPNEIKNKEFSRVKNGLEPTEVANFLEQLSTEIERLKEDKKQLEKVIEERDTNIKSYQDVHQSVSDALIQAQKAGEETKQAAEKQAEAIIAKAEAQANQMVGDAVEKARRLAFQTEDMKRQSKVFRSRFRMLVEAQLDLLKNEDWDYLLNYDLDAEQVTLENIHHLHENDLKPDEVAANAQNNASNTSDNNQQSNDSETTKK

SEQ ID NO: 5603 - protein, 917 aa, Staphylococcus aureus
MDYKETLLMPKTDFPMRGGLPNKEPQIQEKWDAEDQYHKALEKNKGNETFILHDGPPYANGNLHMGHALNKILKDFIVRYKTMQGFYAPYVPGWDTHGLPIEQALTKKGVDRKKMSTAEFREKCKEFALEQIELQKKDFRRLGVRGDFNDPYITLKPEYEAAQIRIFGEMADKGLIYKGKKPVYWSPSSESSLAEAEIEYHDKRSASIYVAFDVKDDKGVVDADAKFIIWTTTPWTIPSNVAITVHPELKYGQYNVNGEKYIIAEALSDAVAEALDWDKASIKLEKEYTGKELEYVVAQHPFLDRESLVINGDHVTTDAGTGCVHTAPGHGEDDYIVGQKYELPVISPIDDKGVFTEEGGQFEGMFYDKANKAVTDLLTEKGALLKLDFITHSYPHDWRTKKPVIFRATPQWFASISKVRQDILDAIENTNFKVNWGKTRIYNMVRDRGEWVISRQRVWGVPLPVFYAENGEIIMTKETVNHVADLFAEHGSNIWFEREAIDLLPEGFTHPGSPNGTFTKETDIMDVWFDSGSSHRGVLETRPELSFPADMYLEGSDQYRGWFNSSITTSVATRGVSPYKFLLSHGFVMDGEGKKMSKSLGNVIVPDQVVKQKGADIARLWVSSTDYLADVRISDEILKQTSDVYRKIRNTLRFMLGNINDFNPDTDSIPESELLEVDRYLLNRLREFTASTINNYENFDYLNIYQEVQNFINVELSNFYLDYGKDILYIEQRDSHIRRSMQTVLYQILVDMTKLLAPILVHTAEEVWSHTPHVKEESVHLADMPKVVEVDQALLDKWRTFMNLRDDVNRALETARNEKVIGKSLEAKVTIASNDKFNASEFLTSFDALHQLFIVSQVKVVDKLDDQATAYEHGDIVIEHADGEKCERCWNYSEDLGAVDELTHLCPRCQQVVKSLV

SEQ ID NO: 5604 - protein, 202 aa, Staphylococcus aureus
IMAKEIAKSLLDIEAVTLSPNDLYTWSSGIKSPIYCDNRVTLGYPLVRGAIRDGLINLIKEHFPGVEVISGTATAGIPHAAFIAEKLKLPMNYVRSSNKSHGKQNQIEGAKSEGKKVVVIEDLISTGGSSVTAVEALKQAGAEVLGVVAIFTYGLKKADDTFSNIQLPFYTLSDYNELIEVAENEGKISSEDIQTLVEWRDN

SEQ ID NO: 5605 - protein, 565 aa, Staphylococcus aureus
MAYDGLFTKKMVESLQFLTTGRVHKINQPDNDTILMVVRQNRQNHQLLLSIHPNFSRLQLTTKKYDNPFNPPMFARVFRKHLEGGIIESIKQIGNDRRIEIDIKSKDEIGDTIYRTVILEIMGKHSNLILVDENRKIIEGFKHLTPNTNHYRTVMPGFNYEAPPTQHKMNPYDITGAEVLKYIDFNAGNIAKQLLNQFEGFSPLITNEIVNRRQFMTSSTLPEAFDEVMAETKLTPTPIFHKNHETGKEDFYFIKLNQFNDDTVTYDSLNDLLDRFYDARGERERVKQRANDLVRFVQQQLHKYQNKLAKLIEEYEQSKNKDTEQLYGELITANIYRIKQGDKEVTALNYYTNEEVVIPLNPTKSPSANAQYYYKQYNRMKTRERELQHQIQLTKDNIDYFSTIEQQLHHISVHEIDEIRDELAEQGFMKQRKNQTKKKKEQIQLQHYVSTDGDDIYVGKNNKQNDYLTNKKAKKTHTWLHTKDIPGSHVVIFNDAPSDTTIKEAAMLAGYFSKAGNSGQIPVDYTLIKNVHKPSGAKPGFVTYDNQKTLYATPDYEHIQKMKQS

SEQ ID NO: 5606 - protein, 357 aa, Staphylococcus aureus
MTIKVGIIGCGGIANGKHMPSLQKVENVEMIAFCDVDISKAASAAEAYGTDNAKVYDDYKALLKDDTIDVIHVCTPNDSHCEITVAGLHAGKHVMCEKPMAKTTAEAQKMIDTAKSTGKKLTIGYQNRFRPDSQFLYKSAQRGDLGDIYFGKAHAIRRRAVPTWGVFLDEEAQGGGPLIDIGTHALDLTLWMMDNYEPESVMGSTFHKLNKQHDAANAWGSWNPDEFTVEDSAFGFIKMKNGATIILESAWAINSLEVDEAKCSLSGTKAGADMKDGLRIHGEDMGTLYTKHVELENKGVDFYEGNEVDEAEEEAKAWIDAVVNDTEPVVKPEQAMVVTKILEAIYQSAKSGKAIYF

SEQ ID NO: 5607 - protein, 341 aa, Staphylococcus aureus
LKVGVIGVGGIAQDRHIPALLKLKDTVSLVAVQDINTVQMIDVAKRFNIPHVVETPSELFKLVDAVVICTPNKFHADLSIEALNHGVHVLCEKPMAMTTEECDRMIEAANKNCKLLTVAYHYRHTDVAMTAKKAIESGVVGKPLVARVQAMRRRKVPGWGVFTNKALQGGGSLIDYGCHLLDLSLWLLGKDMVPHEVLGKTYNQLSKQPNQINDWGTFDHTKFDVDDHVTSYMTFANRASMQFECSWSANIKEDKVHVSLSGEDGGINLFPFEIYEPRFGTIFESKANVEHNEDIAGERQARNFVNACLGIEEIVVKPEEARNVNALIEAIYRSDLDNKSI

SEQ ID NO: 5608 - protein, 294 aa, Staphylococcus aureus
FEDMLDYVAESGLDMIEVGTGGNPGDKFCKLDELLENEDKRQAFMKSITDRGLQISGFSCHNNPISPDPTEAKEADETLRKTIRLANLLDVPVVNTFSGIAGSDDTAKKPNWPVTPWPTAYSEIYDYQWNEKLIPYWQDLAEFAKEQDVKIAIELHAGFLVHTPYTMLKLREATNEYIGANLDPSHLWWQGIDPIAAIRILGQANAIHHFHAKDTYINQENVNMYGLTDMQPYGNVATRAWTFRTVGYGHSPYVWADIISQLIINGYDYVLSIEHEDPIMSVEEGFQKACQTLK

SEQ ID NO: 5609 - protein, 771 aa, Staphylococcus aureus
  VARIANT (1)...(771): Xaa = Any Amino Acid
YSNYLNGYLILNXIGGITMTINKVTVLGAGTMGAQLAALFVNAGLKVKLLDIVVDKNDPNLIAKKSYDKITDKKRPLLFDLNLASHLTYGNFDDDLVNDDADLYIEAVKEDIEIKHAVWQQVLQHAKEDALFATNTSGIPINAIAQAFNEKDQERFFGLHFFNPPRIMKLVELIPTSHTKESIILDVKNFAQNVLGKGVIVVNDVPGFVANRVGTQTMNDIMYRAEQHKLSIVDVDALTGQAIGRPKTGTYALSDLVGLDIAVSVIKGMQQVPEETTYFHDVKIVNTLFENGALGRKTKQGFYKKNKETKARLVYDVEKQDYVPVSQPQLPILNEFNKDLVHNLDVIFNAQDEAGLFLWETLRNNFYYSAINVPKATDDFRDIDRALVWGFNWKLGPFQLWDAMGYERVKTRMEDELGDLPQWISDLDGGFYKQDETIEYATPVSHFVKDELWDKGDAKLSVTHDDQLLLKLQSKNNVITDEFNDALVDAIDFLENEHYTSMVIYADGNNFSVGANLFLMKKAHEDGLVDDVVAQSIDKLHYSFNRLKYSLKPVVTAVQGRALGGGCELVLYSPIVVAASETYIGLVEAGVGLLPSGGGLAEMADRILRTSHKFDDKQASMTKVLTNIAFAKVSTNAFEARRYGYLRDTDTIIFNTAQRVEVALKRAKYEAETNYIPNPRHQYIALGEDFKALIQGQLDAQRRGHFISDHDYHIALNIATILAGGDLPRNTFINQRYIQSLEKIGFIDLLKSKKSYERIAHMLKTGKPLRN

SEQ ID NO: 5610 - protein, 703 aa, Staphylococcus aureus
  VARIANT (1)...(703): Xaa = Any Amino Acid
MKKQIISLGALAVASSLFTWDNKADAIVTKDYSKESRVKENSKYDSPISDWYLSSVLNRLGDQIYYAKELTNKYEYGEKEYKKAIDKLMTRVLGEDQYLLEKKKAQYEVYKKWFEKHKSENPNSDLKMTKFHDFDIYRLSMKEYNEIHQSIKEAVDDFNSEVKEIQYKEKDLVPYNEETEKRVTNGIYDFVCEIDTLYAAYFNHNQYGHNAKELRAKLDIILGDVKDPIRITNERIRKEMMDDLNSIIDDFFMDTNMNRPLNISKYNPDIHDYTNKPENRANFDKLVKETREAVDKADDSWKTKTVKNYGESVTKSPVVKEEKKVEEPQAPKVGNQQEVETTVDKAEEATQPVAQPLVKIPQGTITGEIVKGPDYLTMENKTLQGEIVQGPDFPTMEQNRPSLSDNYTQPTTPNPILEGLEGSSSKLEIKPQGTESTLKGIQGEPSNIEVKPQATETTETSQYGPRPQFNKTPKYVKYRDAGTGIREYNDGTFGYEARPRFNKPSETNAYNVTTNQDGTVSYGARPTYKKPSKTNAYNVTTHANGQVSYGARPTQNKPSETNAYNVTTHANGQVSYGARPTQNKPSETNAYNVTTHANGQVSYGARPTYNKPSETNAYNVTTHANGQVSYGARPTYKKPSETNAYNVTTHANGQVSYGARPTYNKPSETNAYNVTTHADGTATYGPRVTKXIYNSIHRHTVNT

SEQ ID NO: 5611 - protein, 123 aa, Staphylococcus aureus
MMSNKLDGINKMITAKHKQMDDLYDEKQEVEALIDESDALNHSIEQLYQHLGERYYSSNMASRMEQFRDEFHFAKRRSTEALYEQQQQIQHGIRKAEEEMIDLEMRRNIEIEMVTKEENKWKQ

SEQ ID NO: 5612 - protein, 98 aa, Staphylococcus aureus
METIGSIIYLKEGSQKLMIINRGPIVEIENQKYIFDYSACKYPIGVVEDEIYYFNEENIDSVIFKGYSDQDEVRFQELFDNMKQNLDSEIQRGEVTQQ

SEQ ID NO: 5613 - protein, 942 aa, Staphylococcus aureus
MKEPSIVVKGARAHNLKDIDIELPKNKLIVMTGLSGSGKSSLAFDTIYAEGQRRYVESLSAYARQFLGQMDKPDVDTIEGLSPAISIDQKTTSKNPRSTVATVTEIYDYIRLLYARVGKPYCPNHNIEIESQTVQQMVDQIMELEARTKIQLLAPVIAHRKGSHEKLIEDIGKKGYVRLRIDGEIVDVNDVPTLDKNKNHTIEVVVDRLVVKDGIETRLADSIETALELSEGQLTVDVIDGEDLKFSESHACPICGFSIGELEPRMFSFNSPFGACPTCDGLGQKLTVDVDLVVPDKDKTLNEGAIEPWIPTSSDFYPTLLKRVCEVYKINMDKPFKKLTERQRDILLYGSGDKEIEFTFTQRQGGTRKRTMVFEGVVPNISRRFHESPSEYTREMMSKYMTELPCETCHGKRLSREALSVYVGGLNIGEVVEYSISQALNYYKNINLSEQDQAIANQILKEIISRLTFLNNVGLEYLTLNRASGTLSGGEAQRIRLATQIGSRLTGVLYVLDEPSIGLHQRDNDRLINTLKEMRDLGNTLIVVEHDDDTMRAADYLVDIGPGAGEHGGQIVSSGTPQKVMKDKKSLTGQYLSGKKRIEVPEYRRPASDRKISIRGARSNNLKGVDVDIPLSIMTVVTGVSGSGKSSLVNEVLYKSLAQKINKSKVKPGLYDKIEGIDQLDKIIDIDQSPIGRTPRSNPATYTGVFDDIRDVFAQTNEAKIRGYQKGRFSFNVKGGRCEACKGDGIIKIEMHFLPDVYVPCEVCDGKRYNRETLEVTYKGKNIADILEMTVEEATQFFENIPKINRKLQTLVDVGLGYVTLGQQATTLSGGEAQRVKLASELHKRSTGKSIYILDEPTTGLHVDDISRLLKVLNRLVENGDTVVIIEHNLDVIKTADYIIDLGPEGGSGGGTIVATGTPEDIAQTKSSYTGKYLKEVLERDK

SEQ ID NO: 5614 - protein, 293 aa, Staphylococcus aureus
EKSKSELLVVTGLSGAGKSLVIQCLEDMGYFCVDNLPPVLLPKFVELMEQGNPSLRKVAIAIDLRGKELFNSLVAVVDKVKSESDVIIDVMFLEASTEKLISRYKETRRAHPLMEQGKRSLINAINEEREHLSQIRSIANFVIDTTKLSPKELKERIRRYYEDEEFETFTINVTSFGFKHGIQMDADLVFDVRFLPNPYYVVDLRPLTGLDKDVYNYVMKWKETEIFFEKLTDLLDFMIPGYKKEGKSQLVIAIGCTGGQHRSVALAERLGNYLNEVFEYNVYVHHRDAHIES

SEQ ID NO: 5615 - protein, 313 aa, Staphylococcus aureus
KVVLIGGGTGLSVMARGLREFPIDITAIVTVADNGGSTGKIRDEMDIPAPGDIRNVIAALSDSESVLSQLFQYRFEENQISGHSLGNLLIAGMTNITNDFGHAIKALSKILNIKGRVIPSTNTSVQLNAVMEDGEIVFGETNIPKKHKKIDRVFLEPNDVQPMEEAIDALREADLIVLGPGSLYTSVISNLCVNGISDALIHSDAPKLYVSNVMTQPGETDGYSVKDHIDAIHRQAGQSFIDYVICSTQTFNAQVLKKYEEKHSKPVEVNKAELEKESINVKTSSNLVEISENHLVRHNTKVLSTMIYDIALE

SEQ ID NO: 5616 - protein, 314 aa, Staphylococcus aureus
MSFASEMKNELTRIDVDEMNAKAELSALIRMNGALSLSNQQFVINVQTENATTARRIYSLIKRVFNVEVEILVRKKMKLKKNNIYICRTKMKAKEILDELGILKDGIFTHEIDHSMIQDDEMRRSYLRGAFLAGGSVNNPETSSYHLEIFSQNESHAEGLTKLMNSYELNAKHLERKKGSITYLKEAEKISDFLSLIGGYQALLKFEDVRIVRDMRNSVNRLVNCETANLNKTVSAAMKQVESIKLIDKEIGIENLPDRLREIARIRVEHQEISLKELGEMVSTGPISKSGVNHRLRKLNDLADKIRNGEQIEL

SEQ ID NO: 5617 - protein, 337 aa, Staphylococcus aureus
VKDLLQAQQKLIPDLIDKMYKRFSILTTISKNQPVGRRSLSEHMDMTERVLRSETDMLKKQDLIKVKPTGMEITAEGEQLISQLKGYFDIYADDNRLSEGIKNKFQIKEVHVVPGDADNSQSVKTELGRQAGQLLEGILQEDAIVAVTGGSTMACVSEAIHLLPYNVFFVPARGGLGENVVFQANTIAASMAQQAGGYYTTMYVPDNVSETTYNTLLLEPSVINTLDKIKQANVILHGIGDALKMAHRRQSPEKVIEQLQHHQAVGEAFGYYFDTQGQIVHKVKTIGLQLEDLESKDFIFAVAGGKSKGEAIKAYLTIAPKNTVLITDEAAAKIILE

SEQ ID NO: 5618 - protein, 336 aa, Staphylococcus aureus
MAVKVAINGFGRIGRLAFRRIQEVEGLEVVAVNDLTDDDMLAHLLKYDTMQGRFTGEVEVVDGGFRVNGKEVKSFSEPDASKLPWKDLNIDVVLECTGFYTDKDKAQAHIEAGAKKVLISAPATGDLKTIVFNTNHQELDGSETVVSGASCTTNSLAPVAKVLNDDFGLVEGLMTTIHAYTGDQNTQDAPHRKGDKRRARAAAENIIPNSTGAAKAIGKVIPEIDGKLDGGAQRVPVATGSLTELTVVLEKQDVTVEQVNEAMKNASNESFGYTEDEIVSSDVVGMTYGSLFDATQTRVMSVGDRQLVKVAAWYDNEMSYTAQLVRTLAYLAELSK

SEQ ID NO: 5619 - protein, 434 aa, Staphylococcus aureus [sequence omitted]

SEQ ID NO: 5620 - protein, 157 aa, Staphylococcus aureus
MRSKQMADRTNKEIKTGRFIATASIVFSILLIIHYFVSLDNATAKALLNLTNQNTSDKAIDYILNSFRFTGIMYILAYLAGFITFWNRHTYVWWFMFAVYVSNSLFTLINLSITIQAIKAAHGAYLTSPILIVIIGSIALAIYMLVVSIKRKSTFNR

SEQ ID NO: 5621 - protein, 274 aa, Staphylococcus aureus
IEISKDVKIPVLGFGVFQIPQEQTAEAVKEAIKAGYRHIDTAQSYLNETEVGQGIEASGIDRSELFITTKVWIENVNYEDTIKSIERSLQRLNLDYLDLVLIHQPYNDVYGSWRALEELKETGKIKAIGVSNFSVDRIVDLGIHNQIQPQVNQIEINPFHQQEEQVAALQQENVVVEAWAPFAEGKNQLFQNQLLQAIADKYNKSIAQVILRWLVERDIVVLAKSVNPERMAQNLDIFDFELTEEDKQQIATLEESNSQFFSHADPEMIKALTS

SEQ ID NO: 5622 - protein, 142 aa, Staphylococcus aureus
MAIIIGSDEAGKRLKEVIKSYLLDNKYDVVDVTEGQEVDFVDATLAVAKDVQSQEGNLGIVIDAFGAGSFMVATKIKGMIAAEVSDERSGYMTRGHNNSRMITMGSEIVGDTLAKNVVKGFVEGKYDGGRHQIRVDMLNKMC

SEQ ID NO: 5623 - protein, 171 aa, Staphylococcus aureus
MKIALGCDHIVTDTKMRVSEFLKSKGHEVIDVGTYDFTRTHYPIFGKKVGEQVVSGNADLGVCICGTGVGINNAVNKVPGVRSALVRDMTSALYAKEELNANVIGFGGRIIGELLMCDIIDAFINAEYKPTEENKKLIAKIKHLETSNADQADPHFFDEFLEKWDRGEYHD

SEQ ID NO: 5624 - protein, 326 aa, Staphylococcus aureus
MSKSHQKIASIEQLSNNEGIISALAFDQRGALKRMMAKHQTEEPTVAQIEQLKVLVAEELTQYASSILLDPEYGLPASDARNKDCGLLLAYEKTGYDVNAKGRLPDCLVEWSAKRLKEQGANAVKFLLYYDVDDAEEINIQKKAYIERIGSECVAEDIPFFLEVLTYDDNIPDNGSVEFAKVKPRKVNEAMKLFSEPRFNVDVLKVEVPVNMKYVEGFAEGEVVYTKEEAAQHFKDQDAATHLPYIYLSAGVSAELFQETLKFAHEAGAKFNGVLCGRATWSGAVQVYIEQGEDAAREWLRTTGFKNIDDLNKVLKDTATSWKQRK

SEQ ID NO: 5625 - protein, 103 aa, Staphylococcus aureus
MNREEVQLLGFEIVAFAGDARSKFLEALTAAQAGDFAKADALIEEGNNCIAEAHRAQTSLLAKEAQGDDIAYSVTMMHGQDHLMTTILLKDLMKHLLEFYKRG

SEQ ID NO: 5626 - protein, 572 aa, Staphylococcus aureus
MTMMQKLIAQIEKGKPFFEKLSRNIYLRAIRDGFISAMPVILFSSIFLLIAYVPNIFGFKWDKGMEAILMKPYNYTMGLVAFLVAGTTAKSLTDSFNRKLESTNQINFISTMLAAMCGFLFLASDPAKDGGFLSAFMGTKGLLTAFLSAFVTVIVYNFCVKRNITIKMPKEVPPNISQVFKDLIPFSAVIIILYALDLVIRNSFKSNVAEGILKLFEPLFTAADGWIGVTIIFGAFALFWFVGIHGPSIVEPAIAAITYANIEANFKLLQAGEHADKIITSGTQMFIVTFGGTGATLVVPFMFMWMTKSKRNKAIGRASVVPTFFGVNEPILFGAPLVLNPVFFIPFVLAPIVNVWIFKLFVEVLGMNSFSVNLPWTTPGPLGIIMGTGFGLWSFVLAITLIVVDIIIYYPFLKVYDSEILDEEEGRKESNSDLKEKVAANFDTKKADSILAASGVSDDAAKASNITEQTNVLVLCAGGGTSGLLANALNKAAEEYHVPVKAAAGGYGAHMDIMKEYQLIILAPQVASNYEDIKQDTDRLGIKLAKTQGAEYIKLTRDGQAALDFVQQQFEN

SEQ ID NO: 5627 - protein, 470 aa, Staphylococcus aureus
MTKTLPEDFIFGGATAAYQAEGATNTDGKGRVAWDTYLEENYWYTAEPASDFYNRYPVDLELSEKFGVNGIRISIAWSRIFPNGYGEVNPKGVEYYHKLFAECHKRHVEPFVTLHHFDTPEVLHKDGDFLNRKTIDYFVDYAEYCFKEFPEVKYWTTFNEIGPIGDGQYLVGKFPPGIKYDFEKVFQSHHNMMVAHARAVKLFKDGGYQGEIGVVHALPTKYPFDPSNPEDVRAAELEDIIHNKFILDATYLGKYSRETMEGVQHILSVNGGKLNITDEDYAILDAAKDLNDFLGINYYMSDWMRGYDGESEITHNATGDKGGSKYQLKGVGQREFDVDVPRTDWDWMIYPQGLYDQIMRVVKDYPNYHKIYITENGLGYKDEFIESEKTVHDDARIDYVRQHLNVIADAIKDGANVKGYFIWSLMDVFSWSNGYEKRYGLFYVDFETQERYPKKSAYWYKELAETKEIK

SEQ ID NO: 5628 - protein, 335 aa, Staphylococcus aureus
LMMQNKQILFNKIPEGMPQEDTFKIEDVDTPKLESDGVLVQTLYISVDPYMRGRMTKADSYVQPFEIGKPIVSHVVAKVIDSTLADYKKGDVVVGMLPWRIINHVQADQITKVPTTDVPLDLYLSVLGMPGQTAYHGLLDIGQPKDGDTVVVSAASGAVGSVVGQIAKIKGCRVVGIAGGDKKVNYLTETLGFDAGIDYKKEDFAEALAQAVPDGIDVYFENVGGTVGDEVFKHLNRFARVPVCGAISSYNHPEAGIGPRIQGTLIKKQVMMRGFLVSEFADDFKEASEQLATWVQEGKIQSQVTIEDGFENAPRAFKNLFTGDNFGKQVIKVSE

SEQ ID NO: 5629 - protein, 333 aa, Staphylococcus aureus
MKMIGFEKPFKLEEGNLFKVYEQRKPTPENDDILVKVNSISVNPVDTKQRQMEVTQVPRVLGFDAIGTVEAIGPDVTLFSPGDVVFYAGSPNRQGSNATYQLVSEAIVAKAPHNISANEAVSLPLTGITAYETFFDTFKISHNPSENIGKSVLIINGAGGVGSIATQIAKRYGLTVITTASRQETTEWCEKMGADIVLNHREDLVLQFKEKEIPLVDYIFCTYNTDLYYNTMIELIKPLGHITTIVAFNEDQDLNALKLKSITFTHEFMFARPIHRTPDMIKQHEYLEDITKNIESGHYQPTTTQVFEGLSPENLYQAHQLLEKQSMIGKLVI

SEQ ID NO: 5630 - protein, 156 aa, Staphylococcus aureus
MYIQDGRITEYQDYFLQFEWFQPLLISLAALLILIGLILVFSIFKPTHRKPGLYKDFDDGHVYVSRKAVEKTAFDTVAKYDQVRQPNVVAKLYNKKNKSYIDIKTDFFVPNNVQVQSLTEAIRADIKKNVEYFTEMPVRKLEVNVRDQKTSGPRVL

SEQ ID NO: 5631 - protein, 403 aa, Staphylococcus aureus
EQAVIEGHPLHPGAKLRKGLNALQTFLYSSEFNQPIKLKIVLIHSKLSRTMSLSKDYDTTVHQLFPDLIKQLENEFTPNFNFNDYHIMIVHPWQLDDVLHSDYQAEVDKKLIIEAKHTLDYYAGLSFRTLVPKYPAMSPHIKLSTNVHITGEIRTLSEQTTHNGPLMTRILNDILEKDVIFKSYASTIIDEVAGIHFYNEQDEADYQTERSEQLGTLFRKNIYQMIPQEVTPMIPSSLVATYPFNNESPIVTLIKRYQSAASLSDFESSAKSWVETYSKALLGLVIPLVTKYGIALEAHLQNAIATFRKDGLLDTMYIRDFEGLRIDKAQLNEMGYSTSHFHEKSRILTDSKTSVFNKAFYSTVQNHLGELILTISKASKDSNLERHMWYIVRDVLDNIFDQL

SEQ ID NO: 5632 - protein, 310 aa, Staphylococcus aureus
MLESKWGLRFIAFLLALFFFLSVNNVFGNIFNTGNLGQKSSKTIQDVPVEILYNTKDLHLTKAPETVNVTISGPQSKIIKIENPEDLRVVIDLSNAKAGKYQEKYQVKGLADDIHYSVKPKLANITLENKVTKKMTVQPDVSQSDIDPLFKITKQEVSPQTVKVTGGEEQLNDIAYLKATFKTNKKINGDTKDVAEVTAFDKKLNKLNVSIQPNEVNLQVKVEPFSKKVKVNVKQKGSLADDKELSSIDLEDKEIEIFGSRDDLQNISEVDAEVDLDGISESTEKTVKINLPEHVTKAQPSETKAYINVK

SEQ ID NO: 5633 - protein, 451 aa, Staphylococcus aureus
MGKYFGTDGVRGVANQELTPELAFKLGRYGGYVLAHNKGEKHPRVLVGRDTRVSGEMLESALIAGLISIGAEVMRLGIISTPGVAYLTRDMGAELGVMISASHNPVADNGIKFFGSDGFKLSDEQENEIEALLDQENPELPRPVGNDIVHYSDYFEGAQKYLSYLKSTVDVNFEGLKIVLDGANGSTSSLAPFLFGDLEADTETIGCSPDGYNINEKCGSTHPEKLAEKVVETESDFGLAFDGDGDRIIAVDENGQIVDGDQIMFIIGQEMHKNQELNNDMIVSTVMSNLGFYKALEQEGIKSNKTKVGDRYVVEEMRRGNYNLGGEQSGHIVMMDYNTTGDGLLTGIQLASVIKMTGKSLSELAGQMKKYPQSLINVRVTDKYRVEENVDVKEVMTKVEVEMNGEGRILVRPSGTEPLVRVMVEAATDEDAERFAQQIADVVQDKMGLDK

SEQ ID NO: 5634 - protein, 115 aa, Staphylococcus aureus
TNHKLIEAVIKSQLRTDLPSFRPGNTLREHVRIIKGTRERIQVFEGVVIKGRDGGVSKTFSVRKISSGENVERTFPLHTPKIEKIEVKRRGKVRRAKLYYLRSLRGKAARIQEIR

SEQ ID NO: 5635 - protein, 2368 aa, Staphylococcus aureus
MNLFRQQKFSIRKFNVGIFSALIATVTFISTNPTTASAAEQNQPAQNQPAQPADANTQPNANAGAQANPTAQPATPANQGQPAAQPANQGGQANPAGGAAQPNTQPAGQGNQADPNNAAQAQPGNQAAPANQAGQGNNQATPNNNATPANQTQPANAPAAAQPAANAQTQDPNASNTGEGSINTTLTFDDPAISTDENRQDPTVTVTDKVNGYSLINNGKIGFVNSELRRSDMFDKNNPQNYQARGNVAALGRVNANDSTDHGNFNGISKTVNVKPDSELIINFTTMQTNSKQGATNLVIKDAKKNTELATVNVAKTGTAHLFKVPTDADRLDLQFIPDNTAVADASRITTNKDGYKYYSFIDNVGLFSGSHLYVKNRDLAPKATNNKEFTINTEIGNNGNFGASLKADQFKYEVTLPQGVTYVNNSLTTTFPNGNEDSTVLKNMTVNYDQNANKVTFTSQGVTTARGTHTKEVLFPDKSLKLSYKVNVANIDTPKNIDFNEKLTYRTASDIVINNAQPEVTLTADPFSVAVEMNKDALQQQVNSQVDNSHYTTASIAEYNKLKQQADNILNEDANHVETANRASQAAIDGLVTKLQAALIDNQAAIAELDAKAQEKVTAAQQSKKVTQDEVAALVTKINNDKNNAIAEINKQTTAQGVTTEKDNGIAVLDQDVITPTVKPQAKQDIIQAVTTRKQQIKKSNASLQDEKDVANDKIGKIETKAIKDIDAATTNAQVEAIKTKAINDINQTAPATTAKAAALEEFDEVVQAQIDQAPLNPDTTNEEVAEAIERINAAKVSGVKAIEATTTAQDLERVKNEEISKIENITDSTQTKMDAYNEVKQAATARKTQNATVSNATNEEVAEADAAVEAAQKQGLHDIQVVKSKQEVADTKSKVLDKINAIQTQAKVKPAADTEVENAYNTRKQEIQNSNASTTEEKQAAYTELDTKKQEARTNLDAANTNSDVTTAKDNGIAAINQVQAATTKKSDAKAEIAQKASERKTAIEAMNDSTTEEQQAAKDKVDQAVVTANADIDNAAANTDVDNAKTTNEATIAAITPDANVKPTAKQAIADKVQAQETAIDANNGATTEEKAAAKQQVQTEKTTADTAIDGAHTNAEVEAAKNAEIAKIEAIQPATTTKDNAKQAIATKANERKTAIAQTQDITAEEIAAANANVDNAVTQANNNIEAANSQNDVDQAKTTGEASIDQVTPTVNKKATAVTDAKNNITAATDDNGVDTAKDAGKNSIQSTQPATAVKSNAKNDVDQAVTTQNQAIDNTTGATTEEKNAAKDLVLKAKEKAYQDILNAQTTNDVTQIKDQAVADVQGITADTTIKDVAKDELATKAREQKALIAQTADATTEEKEQANQQVDAELTQGNQNIENAQSIDDVNTAKDNAIQAIDPIQASTDVKTNARAELLTEMQNKITEILNNNETTNEEKGNDIGPVRAAYEEGLNNINAATTTGDVTTAKDTAVQKVQQLHANPVKKPAGKTALDQAAADKKTQIEQTPNASQQEINDAKQEVDTELNQAKTNIDQSSTDEYVDNAVKEGKAKINAVKTFSEYKKDALAKIEAAYNAKVTEADNSNASTSSEIAEAKQKLAELKQTADQNVNQATSKDDIEVQIHNDLDNINDYTIPTGKKESATTDLYAYADQKKNNISADTNATQDEKQQAIKQVDQNVQTALESINNGVDNGDVDDALTQGKAAIDAIQVDATVKPKANQVIDAKAEETKESIDQSDQLTAEEKTEALAMIKQITDQAKQGITDATTTAEVEKAKAQGLEAFDNIQIDSTEKQKAIEELETALDQIEAGVNVDADATTEEKEAFTNALEDILSKATEDISDQTTNAEIATVKNSALEQLKAQRINPVVKKNALEAIREVVNKQIEIIKNADADASAKEIARTDLGRYFDRFADKLDKTQTNTEVAELQNVTIPAIEAIVPQNDPNANDTNSGSDNNDATANSNANATPENTGQPNVTESTDNANADTSSTTTNNQNDAATGETTATSANSSATDDANDKPQANNNSSADTSTNSPTMDNDVTSKPEVESTNNGTTDKPATEADNATPAESATNNNSTTTATNENAPTESTATAPTTASTGAESSADSKDNASVNDSKQNAEVNNSAESQSTNGKVAQPKSENKAKAEKDGRDSTNQSMVESTTETLPSADITEPKVSSNTSKDKEESTTSQTDAEQHNSDTNVASNEADKSEGNVDTDVSNKPSTSKPSEAKDKATSTEDSQKADMATADTKDNQASIGATADVNNKATQNDGANASPATVSKGSNSANQDMLNVTKTKENKANAKSAQQGKVNKPKQQAKTLPDTGMSHNDDLPYAELALGAGMAFLIRRFTKKDQQTEE

SEQ ID NO: 5636 - protein, 368 aa, Staphylococcus aureus
MKAVHFGAGNIGRGFIGYILADNNVKVTFADVNEEIINALAHDHQYDVILADESKTTTRVNNVDAINSMQPSEALKQAILEADIITTAVGVNILPIIAKSFAPFLKEKTNHVNIVACENAIMATDTLKKAVLDITGPLGHNIHFANSAVDRIVPLQKNENILDVMVEPFYEWVVEKDAWYGPELNHIKYVDDLTPYIERKLLTVNTGHAYLAYAGKFADKATVLDAVKDSSIEAGLRRVLAETSQYITNEFDFTEAEQAGYVEKIIDRFNNSYLSDEVTRVGRGTLRKIGPKDRIIKPLKYLYNKDLERTGLLNTAALLLKYDDTADQETVEKNNYIKEHGLKAFLSEYAKVDDGLADEIIEAYNSLS

SEQ ID NO: 5637 - protein, 144 aa, Staphylococcus aureus
MSELFSNDNIFLNVNVNSQNEAIEKAGKALVDSGAVTDAYIQAMKDREQVVSTFMGNGLAIPHGTDEAKTNVIHSGLTLLQIPEGVDWDGEVVKVVVGIAGKDGEHLDLLSKIAITFSEEENVDRIVQAKSAEEIKQVFEEADA

SEQ ID NO: 5638 - protein, 601 aa, Staphylococcus aureus
MCGIVGYIGYDNAKELLLKGLEKLEYRGYDSAGIAVVNDDNTTVFKEKGRIAELRKVADSSDFDGPVGIGHTRWATHGVPNHENSHPHQSSNGRFTLVHNGVIENYEELKGEYLQGVSFISETDTEVIVQLVEYFSNQGLSTEEAFTKVVSLLHGSYALGLLDAEDKDTIYVAKNKSPLLLGVGEGFNVIASDALAMLQVTSEYKEIHDHEIVIVKKDEVIIKDADGNVVERDSYIAEIDASDAEKGVYAHYMLKEIHEQPAVMRRIIQEYQDAEGNLKIDQDIINDVKEADRIYVIAAGTSYHAGLVGKEFLEKWAGVPTEVHVASEFVYNMPLLSEKPLFVYISQSGETADSRAVLVETNKLGHKSLTITNVAGSTLSREADHTLLLHAGPEIAVASTKAYTAQIAVLSILSQIVAKEHGREADIDLLRELAKVTTAIEAIVDDAPIMEQIATDFLETTRNAFFIGRTIDYNVSLEGALKLKEISYIQAEGFAGGELKHGTIALIEEGTPVVGLATQEKVNLSIRGNVKEVVARGAHPCIISMEGLEKEGDTYVIPHVHELLTPLVSVVTLQLISYYAALHRDLDVDKPRNLAKSVTVE

SEQ ID NO: 5639 - protein, 2086 aa, Staphylococcus aureus
GIAGTNNGITVTAGTFNPADTIQVVATQGSGETISDEQRSDDFTVVAPQPNHANTKIWQNGHIDITPNNPSGHLINPTQAMDIAYTEKMGNGAEHSKTINVVRGQNNQWTIANKPDYVTLDAHTGKVTFNANTVKPNSAITITPKAGTGHSASSNPSTLTAPATHTVNTTEIVKDYGSNVTAAEINNAVQVANKRTATIKNGTAMPTNLAGGSTTTIPVTVTYNDGSTEEVQESIFTKADKRELITAKNHLDDPVSTDGKKPGTITQYNNAIHNAQQQINTAKTEAQQVINNERATPQQVSDALTKVRAAQTKINEAKALLQNKEDNSQLVTSKNNLQSSVNQVPSTTGMTQQSIDNYNAKKREAETEITAAQRVIDNGDATAQQISDENTTAQRNDLTNQISQATNLAAVESVKQSANSLDGAMGNLQTAINDKSGTLASQNFLDADEQKRNAYNQAVSNAETILNKQTGPNTAKTAVEQALNNVNSAKHALNGTQNLNNAKQAAITAINGASDLNQKQKDALKAQANGAQRVSNAQDVQRNATELNTAMGTLKHAIADKTNTLASSKYVNADSTKQNAYTTKVTNAEHIISGTPTVVTTPSEVTAAANQVNSAKQELNGDERLRVAKQNANTAIDALTQLNTPQKAKLKEQVGQANRLEDIQTVQTNGQALNNAMKGLRDSIANETTVKASQNYTDASPNNQSTYNSAVSNAKGIINQTNNPTMDTSAITQATTQVNNAKNGLNGAENLRNAQNTAKQNLNTLSHLTNNQKSAISSQIDRAGHVSEVTAAKNAATELNTQMGNLEQAIHDQNTVKQGVNFTDADKAKRDAYTNAVSRAETILNKTQGANTSKQDVEAAIQNVTSAKNALNGDQNVTNAKNTAKHALNNLTSINNAQKRDLTTKIDQATTVAGVEAVSNTGTQLNTAMANLQNGINDKANTLASENYHDADSDKKTAYTQAVTNAENILNKNSGSNLDKAAVENALSQVTNAKGALNGNHNLEQAKSNANTTINGLQHLTTAQKDKLKQQVQQAQNVAGVDTVKSSANTLNGAMGTLRNSIQDNTATNNGQNYLDATESNKTNYNNAVDSANGVINATSNPNMDANAINQIATQVTSTKNALDGTHNLTQAKQTATNAIDGATNLNKAQKDALKAQVTSAQRVANVTSIQQTANELNTAMGQLQHGIDDENATKQTQKYRDAEQSKKTAYDQAVAAAKAILNKQTGSNSDKAAVDRALQQVTSTKDALNGDAKLAEAKAAAKQNLGTLNHITNAQRTALEGQINQATTVDGVNTVKTNANTLDGAMNSLQGSINDKDATLRNQNYLDADESKRNAYTQAVTAAEGILNKQTGGNTSKADVDNALNTVTRAKAALNGAENLRNTKTSATNTINGLPNLTQLQKDNLKHQVEQAQNVAGVNGVKDKGNTLNTAMGALRTSIQNDNTTKTSQNYLDASDSNKNNYNTAVNNANGVINVTNNPNMDANAINGMANQVNTTKAALNGAQNLAQAKTTAKNNLNNLTSINNAQKDALTRSIDGATTVAGVNQETAKATELNNAMHSLQNGINDETQTKQTQKYLDAGPSKKSAYDQAVNAAKAILTKASGQNVDKAAVEQALQNVNSTKTALNGDAKLNEAKAAAKQTLGTLTHINNAQRTALDNEITQATNVEGVNTVKAKAQQLDGAMGQLETSIRDKDTTLQSQNYQDADDAKRTAYSQAVNAAATILNKTAGGNTPKADVERAMQAVTQANTALNGIQNLERAKQAANTAITNASDLNTKQKEALKAQVTSAGRVSAANGVEHTATELNTAMTALKHAIADKAETKASGNYVNADANKRQAYDEKVTAAENIVSGTPTPTLTPSDVTNAATQVTNAKTQLNGNHNLEVAKQNANTAIDGLTSLNGPQKAKLKEQVGQATTLPNVQTVRDNAQTLNTAMKGLRDSIANEATIKADQNYTDASQNKQTDYNNAVTAAKAIIGQTTSPTMNAQEINQAKDQVTAKQQALNGQENLRTAQTNAKQHLNGLSDLTNAQKDAAKRQIEGATHVNEVTQAQNNADVLNTAMTNLKNGIQDQNTIKQGVNFTDAD

SEQ ID NO: 5640 - protein, 624 aa, Staphylococcus aureus
AQEYDVIVIGAGHAGVEAGLASARRGAKTLMLTINLDNIAFMPCNPSVGGPAKGIVVREIDALGGQMAKTIDKTHIQMRMLNTGKGPAVRALRAQADKVLYQQEMKRVIEDEENLHIMQGMVDELIIEDNEVKGVRTNIGTEYLSKAVIITTGTFLRGEIILGNMKYSSGPNHQLPSITLSDNLRELGFDIVRFKTGTPPRVNSKTIDYSKTEIQPGDDVGRAFSFETTEYILDQLPCWLTYTNAETHKVIDDNLHLSAMYSGMIKGTGPRYCPSIEDKFVRFNDKPRHQLFLEPEGRNTNEVYVQGLSTSLPEHVQRQMLETIPGLEKADMMRAGYAIEYDAIVPTQLWPTLETKMIKNLYTAGQINGTSGYEEAAGQGLMAGINAAGKVLNTGEKILSRSDAYIGVLIDDLVTKGTNEPYRLLTSRAEYRLLLRHDNADLRLTDMGYELGMISEERYARFNEKRQQIDSEIKRLSDIRIKPNEHTQAIIEQHGGSRLKDGILAIDLLRRPEMTYDIILEILEEKHQLNADIEEQVEIQTKYEGYINKSLQQVEKVKRMEEKKIPEDLDYSKIDSLATEAREKLSEVKPLNIAQASRISGVNPADISILLIYLEQGKLQRVSD

SEQ ID NO: 5641 - protein, 236 aa, Staphylococcus aureus
MTVEWLAEQLKEHNIELNETQKHQFQTYYRLLVEWNEKMNLTSITDEHDVYLKHFYDSIAPSFYFDFNQPISICDVGAGAGFPSIPLKIMFPQLKVTIVDSLNKRIQFLNHLASELQLQDVSFIHDRAETFGKGVYRESYDVVTARAVARLSVLSELCLPLVKKGGQFVALKSSKGEEELEEAKFAISVLGGNVTETHTFELPEDAGERQMFIIDKKRQTPKKYPRKPGTPNKTPL

SEQ ID NO: 5642 - protein, 249 aa, Staphylococcus aureus
MTILSVQHVSKTYGKKHTFQALKDINFDIQKGEFVAIMGPSGSGKTTLLNVLSSIDQISSGSVIANGQELNKLNQKALAKFRKESLGFIFQDYSILPTLTVKENIMLPLSVQKMSKATMEKNYKAITTALGIYDLGNKYPSELSGGQQQRTAAARAFVHKPQIIFADEPTGALDSKSANDLLQRLEEMNKSFDITIVMVTHDPVAASFAERVIMLKDGQIHTQLYQEGRSKQAFYEDIVHLQSVLGGVS

SEQ ID NO: 5643 - protein, 307 aa, Staphylococcus aureus
NYQVLLYYKYTTIDDPEQFAQDHLAFCKAHHLKGRILVSTEGINGTLSGTKEETEQYMAHMHADERFKDMVFKIDEAEGHAFKKMHVRPRKEIVALDLEEDVDPRHTTGQYLSPVEFRKALEDDDTVIIDARNDYEFDLGHFRGAIRPNITRFRDLPDWIKENKALFADKKVVTYCTGGIRCEKFSGWLLKEGFEDVAQLHGGIATYGKDPETKGQYWDGKMYVFDDRISVDINQVEKTIIGKDWFDGKPCERYINCANPECNKQILVSEENEAKYLGACSYECAKHERNRYVQANNISDNEWQQRL

SEQ ID NO: 5644 - protein, 496 aa, Staphylococcus aureus
MELLKHLSQRQYIDGEWVESANKNTRDIINPYNQEVIFTVSEGTEEDAERAILAARRAFESGEWSQETAETRGKKVRAIADKIKEHREALARLETLDTGKTLEESYADMDDIHNVFMYFAGLADKDGGEMIDSPIPDTESKIVKEPVGVVTQITPWNYPLLQASWKIAPALATGCSLVMKPSEITPLTTIRVFELMEEVGFPKGTINLILGAGSEVGDVMSGHKEVDLVSFTGGIETGKHIMKNAANNVTNIALELGGKNPNIIFDDADFELAVDQALNGGYFHAGQVCSAGSRILVQNSIKDKFEQALIDRVKKIKLGNGFDADTEMGPVISTEHRNKIESYMDVAKAEGATIAVGGKRPDRDDLKDGLFFEPTVITNCDTSMRIVQEEVFGPVVTVEGFETEQEAIQLANDSIYGLAGAVFSKDIGKAQRVANKLKLGTVWINDFHPYFAQAPWGGYKQSGIGRELGKEGLEEYLVSKHILTNTNPQLVNWFSK

SEQ ID NO: 5645 - protein, 558 aa, Staphylococcus aureus
KSYDYVIIGGGSAGSVLGNRLSEDKDKEVLVLEAGRSDYFWDLFIQMPAALMFPSGNKFYDWIYSTDEEPHMGGRKVAHARGKVLGGSSSINGMIYQRGNPMDYEGWAEPEGMETWDFAHCLPYFKKLEKTYGAAPYDKFRGHDGPIKLKRGPATNPLFQSFFDAGVEAGYHKTPDVNGFRQEGFGPFDSQVHRGRRMSASRAYLHPAMKRKNLTVETRAFVTEIHYEGRRATGVTYKKNGKLHTIDANEVILSGGAFNTPQLLQLSGIGDSEFLKSKGIEPRVHLPGVGENFEDHLEVYIQHKCKEPVSLQPSLDIKRMPFIGLQWIFTRTGAAASNHFEGGGFVRSNNEVDYPNLMFHFLPIAVRYDGQKAAVAHGYQVHVGPMYSNSRGSLKIKSKDPFEKPSIRFNYLSTEEDKKEWVEAIRVARNILSQKAMDPFNGGEISPGPEVQTDEEILDWVRRDGETALHPSCSAKMGPASDPMAVVDPLTMKVHGMENLRVVDASAMPRTTNGNIHAPVLMLAEKAADIIRGRKPLEPQYIDYYKHGVHDENEGAIE

SEQ ID NO: 5646 - protein, 116 aa, Staphylococcus aureus
QKNNDTAYYDVLEAINDLSNDSLCVLNHLYINEGQEETFEQKFLQRNKHLKNVDGFKALRFLRPRTAGRHYIIITLWENRQAFYHWQNSAEYKHTHKHRGTSKGADVKIINRELSY

SEQ ID NO: 5647 - protein, 295 aa, Staphylococcus aureus
MNKEQLEKMKNGKGFIAALDQSGGSTPKALKEYGVNEDQYSNEDEMFQLVHDMRTRVVTSPSFSPDKILGAILFEQTMDREVEGKYTADYLADKGVVPFLKVDKGLAEEQNGVQLMKPIDNLDSLLDRANERHIFGTKMRSNILELNEQGIKDVVEQQFEVAKQIIAKGLVPIIEPEVNINAKDKAEIEKVLKAELKKGLDSLNADQLVMLKLTIPTEANLYKDLAEHPNVVRIVVLSGGYSREKANELLKNNAELIASFSRALASDLRAGQSKEEFDKALGDAVESIYDASVNK

SEQ ID NO: 5648 - protein, 119 aa, Staphylococcus aureus
YFAYKTFITTADEIIEKYGMSRQHHRFLFFINKLPGITIKSLLEILEISKQGSHATLQKLKEQGLIIEKVLETDRRVKKLYSTDKGDQLIAELNKAQDELLQNIYQQVGSDWYDVMEAL

SEQ ID NO: 5649 - protein, 74 aa, Staphylococcus aureus
MKNTFLICDECQAVNIRTLQKKLEKLDPDAEIVIGCQSYCGPGRRKTFTFVNNRPLAALTEEELIEKVSQQLKK

SEQ ID NO: 5650 - protein, 320 aa, Staphylococcus aureus
RAHTNIALIKYWGKKDEALIIPMNNSISVTLEKFYTETKVTFNDQLTQDQFWLNGEKVSGKELEKISKYMDIVRNRAGIDWYAEIESDNFVPTAAGLASSASAYAALAAACNQALDLQLSDKDLSRLARIGSGSASRSIYGGFAEWEKGYNDETSYAVPLESNHFEDDLAMIFVVINQHSKKVPSRYGMSLTRNTSRFYQYWLDHIDEDLAEAKAAIQDKDFKRLGEVIEENGLRMHATNLGSTPPFTYLVQESYDVMALVHECREAGYPCYFTMDAGPNVKILVEKKNKQQIIDKLLTQFDNNQIIDSDIIATGIEIIE

SEQ ID NO: 5651 - protein, 261 aa, Staphylococcus aureus
WRYIDHSSGLEPMQSFAFDDTFCESVGKDISDNVVRTWIHQHTVILGIHDSRLPFLKDGIDYLTNEIGYNAIVRNSGGLGVVLDQGVLNISLMFKGQTETTIDEAFTVMYLLISKMFEDENVDIDTMEIEHSYCPGKFDLSIDGKKFAGISQRRVRGGIAVQIYLCVEGSGSERALMMQTFYEHALKGEVTKFKYPEIEPSCMASLETLLNKTITVQDVMFLLLYAIKDLGGVLNMTPITQEEWQRYDTYFDKMIERNKKM

SEQ ID NO: 5652 - protein, 327 aa, Staphylococcus aureus
MADLLNVLKDKLSGKNVKIVLPEGEDERVLTAATQLQATDYVTPIVLGDETKVQSLAQKLNLDISNIELINPATSELKAELVQSFVERRKGKATEEQAQELLNNVNYFGTMLVYAGKADGLVSGAAHSTGDTVRPALQIIKTKPGVSRTSGIFFMIKGDEQYIFGDCAINPELDSQGLAEIAVESAKSALSFGMDPKVAMLSFSTKGSAKSDDVTKVQEAVKLAQQKAEEEKLEAIIDGEFQFDAAIVPGVAEKKAPGAKLQGDANVFVFPSLEAGNIGYKIAQRLGGYDAVGPVLQGLNSPVNDLSRGCSIEDVYNLSIITAAQAL

SEQ ID NO: 5653 - protein, 287 aa, Staphylococcus aureus
LSTREGRWKHFGSVDPIEGTKPTTKNEMTDLQSTHKDFLFEIEEVGIKNLVYPVLVDQYQTAGTFSFSTSLTKDEKGINMSRIIESVEKHYDNGIELEFNTLYQVLRTLQTNMKQNAAGVDVSGKWFFDRYSPTTNIKAVGNADVTYGLAIDGDKVTRKELTIEATVTTLCPCSKEISEYSAHNQRGVVTVKTYINKDQDIVDDYKNKILDAMEANASSILYPILKRPDEKRVTERAYENPRFVEDLIRLIAADLVEFDWLDGFDIECRNEESIHQHDAFAKLKYRK

SEQ ID NO: 5654 - protein, 1668 aa, Staphylococcus aureus
KIIYNSAAYDLLSIETLSDLVRNIYLQITEENGNKRTTVDELNLMTERDIQLYDDINLSLPDLDDAQTVVTLFEQQVEATPNHVAVQFDGVFITYQTLNARANDLAHRLRNQYGVEPNDRVAVIAEKSIEMIIAMIGVLKAGGAYVPIDPNYPSDRQEYILKDATPKVVITYQALYENSKQNINHIDLNKIAWKNIDNLSECNTLEDHAYVIYTSGTTGNPKGTLIPHRGIVRLVHQNHYVPLNEETTILLSGTIAFDAATFEIYGALLNGGKLIVAKKEQLLNPIALEQLINENDVNTMWLTSSLFNQIASERIEVLVPLKYLLIGGEVLNAKWVDLLNQRPKHPQIINGYGPTENTTFTTTYNIPNKVPNRIPIGKPILGTHVYIMQGERRCGVGIPGELCTSGFGLAAGYLNQPELTADKFIKDSNINQLMYRSGDIVRLLPDGNIDYLYRKDKQVKIRGFRIELSEVEHALERIQGINKAVVIVQNHDQDQYIVAYYEAMHTLSHNKIKSQLRMTLPEYMIPVNFMHIEQIPITINGKLDKKALPIMDYVDTDAYVAPSTDTEHLLCQIFADILHVNQVGIHDNFFELGGHSLKATLVVNRIEASTGKRLQIGDLLQKPTVFELAQAIAKVQEQNYEVIPEAIVKDDYVLSSAQKRMYLLWKSNHKDTVYNVPFLWRLSSELNVAQLRQAVQHLIARHEILRTQYIVVDDEVRQRIVADVVADFEEVNTHFTDEQEIMRQFVAPFNLEKPSQIRVRYIRSPLHAYLFIDTHHIINDGMSNIQLMNDLNALYQHKLLLPLKLQYKDYSEWMSHRDMTKHRQYWLSQFKDEVPILSLPTDYVRPNIKTTNGAMMSFTMNQQTRQLLQKYVEKHQITDFMFFMSVVMTLLSRYARKDDVVVGSVMSARMHKGAEQMLGMFANTLVYRGQPSPDKMWTQFLQEVKEMSLEAYEHQEYPFECLVNDLDQSHDASRNPLFDVMLVLQNNETNHAHFGHSKLTHIQPKSVTAKFDLSFIIEEDRDDYTINIEYNTDLYHSETVRHMGNQCMIMIDYILKHQDTLQICDIPNGTEELLNWVNTHVNDRMLNVPGNKSIISYFNEVVSRQGNHVALVMNDLTMTYETLRNYVDAIAHILLSNGVGNGQRVALFTERSFEMIAAMLATVKVGASYIPIDIDFPKKRQGAILEDAKVTAVMSYGIEIETTLPVIQLENAKGFVESKENEQYDDLHGDQLENTAMLDNEMYAIYTSGTTGMPKGVAIRQRNLLNLVHAWSTELQLGDNEVFLQHANIVFDASVMEIYCCLLNGHTLVIPDREERVNPAQLQQLINKHRVTVASIPLQMCSVMEDFYIEKLITGGATSTASFVKYIEKHCGTYFNAYGPSESTVITSYWSHQCGDLIPETIPIGKPLSNIQVYIMSEGLLCGIGMPGELCIAGDSLAIGYINRPELMADKWQNNPFGKGKLYHSGDLARYTSDGQIEFLGRIDKQVKVNGYRIELDEIENAILAIRGISDCVVTVSHFDTHDILNAYYVGEQQVEQDLKQYLNDHLPKYMIPKTITHIDCMPLTTNDKVDTTRLPNPSPIQQSNKVYSEPSNEIEQTFVDVFGEVLKQNDVGVDDDFFELGGNSLEAMLVVSDLKRFGHHISMQTLYQYKTVRQIVNYMHQNQQSLV

SEQ ID NO: 5655 - protein, 391 aa, Staphylococcus aureus
IIELTDYYSSNNYAPLKLVITKGKGVKVWDTDGKQYIDCISGFSVANQGHCHPTIVKAMTEQASKLSIISRVLYSDNLGKWEEKICHLAKKDKVLPLNSGTEAVEAAIKIARKWGSEVKGINDGQVEIIAMNNNFHGRTLGSLSLSNHDAYKAGFHPLLQGTTTVDFGDIEQLTQAISPNTAAIILEPIQGEGGVNMPPKGYIQAVRQLCDKHQILLIADEIQVGLGRTGKWFAMEWEQVVPDIYILGKALGGGLYPVSAVLANNDVMRVLTPGTHGSTFGGNPLAIAISTAALDVLKDEQLVEQSERLGSFLLKELLQLKHPSIKEIRGRGLFIGIELNTDAAPFVDQLIQRGILCKDTHRTIIRLSPPLVIDKEEINQIVAAFQDVFKN

SEQ ID NO: 5656 - protein, 436 aa, Staphylococcus aureus
MKKKLTFKENMFIGSMLFGLFFGAGNLIFPIHLGQAAGSNVFIANLGFLITAIGLPFLGIIAIGISKTSGLFEIASRVNKTYAYIFTIALYLVIGPFFALPRLATTSFEIAFSPFLSPKQITLYLFIFSFVFFVIAWFFARKPSRILEYIGKFLNPVFLVLLAIILLFAFIHPLGGISDAPISKQYQSNALFNGFLDGYNTLDALASLAFGIIIVATIKKLGIENPTDIAKETIKSGTISIIMMGIIYTLLAIMGTLSIGHFKLSENGGIALAQITQYYLGNYGIVLLSLIVMVACLKTAIGLITAFSETFEHLFPKMNYLAIATVVSFISFLFANVGLTKIIMYSVPVLMFLYPLAIALIVLTLFSSKFHHSKIIYQCTIFFTMIAALVDGLKASPEFISSTSFSQTLINFSQKYLPLSDIGMGWVVLSLIGFII

SEQ ID NO: 5657 - protein, 180 aa, Staphylococcus aureus
INFNKTALVLIDLQQGILKMDYAPYTAEKVVQNANKLIDVFRKNNGFIVFVRVKFYDGKDALKPNSMVSLPPKEGDDYSRFHHLLDKRDGDFVIDKRQFSAFVGTDLDLQLRRRRIDTIVLGGVATHVGVDTTARDAYQLNYDQYFVTDMMSAQNETLHQFPIDNLFPIMGQTVTTSDIL

SEQ ID NO: 5658 - protein, 679 aa, Staphylococcus aureus
KKLFGQLQRIGKALMLPVAILPAAGLLLAIGTAIQGEALQHYLPFIQNGGVQNVAKLMTAAGSIIFENLPMIFALGVAIGLAGGDGVAAIAAFVGYIIMNKTMGDFLQVTPKNVTDPASGYASILGIPTLQTGVFGGIIIGALAAWCYNKFYNINLPSYLGFFAGKRFVPIMMATTSFILAFPMALIWPTIQTGLNAFSTGLLDSNTGVAVFLFGFIKRLLIPFGLHHIFHAPFWFEFGSWKNAAGEIIHGDQRIFIEQIREGAHLTAGKFMQGEFPVMMFGLPAAALAIYHSAKPENKKVVAGLMGSAALTSFLTGITEPLEFSFLFVAPLLFFIHAVLDGLSFLTLYLLDVHLGYTFSGGFIDYVLLGVLPNKTQWWLVIPVGLVYAVIYYFVFRFLIVKLKYKTPGREDKQSQAVTASATELPYAVLEAMGGKANIKHLDACITRLRVEVNDKSKVDVPGLKDLGASGVLEVGNNMQAIFGPKSDQIKHEMQQIMNGQVVENPTTMEDDKDETVVVAEDKSATSELSHIVHAPLTGEVTPLSEVPDQVFSEKMMGDGIAIKPSQGEVRAPFNGKVQMIFPTKHAIGLVSDSGLELLIHIGLDTVKLNGEGFTLHVEEGQEVKQGDLLINFDLDYIRNHAKSDITPIIVTQGNITNLDFKQGEHGNISFGDQLFEAK

SEQ ID NO: 5659 - protein, 332 aa, Staphylococcus aureus
MIKQGYQMIFTSVQIPEEDDETKYHYFTKLLNLLKHEQVTYLIDANPSILTPSFYEHLRQYDAQFMIRIDHSTSIEAIEAIMAQGLKCCLNASIISRELLTSLHQQLNDFTLLSFCHNYYPRPDTGLSVDLVNKKNELIYQFNPKAQIYGFIVGSGLRGPLHKGLPTIEATRHSHPVVAAKLLQETGVSEVLVGDSLIEMRQAKQLIDFCKHRHFTLCIEEVFDTTVTYLFDMCHKVRPDNPENVIRSETSRQICPHSIQPQFTTQRRIGSVTVDNLNNGRYQGEMQIVRQTLSAHDNVNVVAQIIKEDLPLLSCIEPNDTFDFQKTRECKK

SEQ ID NO: 5660 - protein, 439 aa, Staphylococcus aureus
MTKEQQLAERIIAAVGGMDNIDSVMNCMTRVRIKVLDENKVDDQELRHIDGVMGVIHDERIQVVVGPGTVNKVANHMAELSGVKLGDTIPHNHNDSEKMDYKSYAADKAKANKEAHKAKQKNGKLNKVLKSIANIFIPLIPAFIGAGLIGGIAAVLSNLMVAGYISGAWITQLITVFNVIKDGMLAYLAIFTGINAAKEFGATPGLGGVIGGTTLLTGIAGKNILMNVFTGEPLQPGQGGIIGVIFAVWILSIVEKRLHKIVPNAIDIIVTPTIALLIVGLLTIFIFMPLAGFVSDSLVSVVNGIISIGGVFSGFIIGASFLPLVMLGLHHIFTPIHIEMINQSGATYLLPIAAMAGAGQVGAALALWVRCKRNTTLRNTLKGALPVGFLGIGEPLIYGVTLPLGRPFLNCLYWRWYWWRCNRWNWTYWCQSNRPKWCV

SEQ ID NO: 5661 - protein, 230 aa, Staphylococcus aureus
MIGFVIKGEAHIYDEHNMMQCNSGDIFIINHRDLYRFQLQQDGIICYIQFQMKYLADKFDDVHCLYFHLTDATTTKNIHQLRNIMARLVSTHIRHNELSKLTEQQLVIQLLMHMIHYVPRTYHSNQSILNDDKVNQVCDYIELHFHEDLSLSELSEYVGWSESHLSKKFAESLGVGFQHFLNTTRIEHVKLDLTYTDETITDIALQNGFSSAASFARTFKHFTHQTPKQY

SEQ ID NO: 5662 - protein, 591 aa, Staphylococcus aureus
MYYSYGNYEAFARPKKPENVENKSAYLIGSGLASLAAACFLIRDGQMEGSKIHILEELPKAGGSIDGENIPLKGYVVRGGREMENHFECLWDLFRSIPSLEIDNASVLDEFYWLNKEDPNYSRCRVIEKQGQRLVTDGDFTLTKTAIKEILDLCLTNEEDLDDVKITDVFSDDFFNSNFWIYWKTMFAFEPWHFCYGNASLLMRFVHHIGGLADFSALKFTKYNQYESLVLPMVEYLKSHGVQFEYDVKVKDIKVDVTTSQKIAREILIDRNGKAESIKLTINDLVFVTNGSITESSTYGDNDTPAPPTDELGGSWTLWKNLARQSPEFGNPDKFCQNIPQKSWFVSATSTTNNKNIIDTIERICKRDPLAGKTVTGGIITINDSAWQISFTINRQQQFKDQPKNEISTWIYALYSDVNGDYIKKPITECSGNEICQEWLYHLGVPTDKIEDLAKHASNTIPVYMPYITSYFMTRAIGDRPLVVPHQSQNLAFIGNFAETERDTVFTTEYSVRTAMEAVYQLLNIDRGIPEVINSTFDLRVLLDAVYELNDHQDLREITKDSKMQKLALAGFLKKIKGTYIESLLKEHKLL

SEQ ID NO: 5663 - protein, 312 aa, Staphylococcus aureus
VDALTEALTAHAHNDFVQPLKPYLRQDPENGHIADRIIAMPSHIGGEHAISGIKWIGSKHDNPSKRNMERASGVIILNDPETNYPIAVMEASLISSMRTAAVSVIAAKHLAKKGFKDLTIIGCGLIGDKQLQSMLEQFDHIERVFVYDQFSEACARFVDRWQQQRPEINFIATENAKEAVSNGEVVITCTVTDQPYIEYDWLQRGAFISNISIMDVHKEVFIKADKVVVDDWSQCNREKKTINQLVLEGKFSKEALHAELGQLVTGDIPGREDDDEIILLNPMGMAIEDISSAYFIYQQAQQQNIGTTLNLY

SEQ ID NO: 5664 - protein, 437 aa, Staphylococcus aureus
LKDRPFHPLAKEKRGLREADYQVYQAELNQSFPLMVAAVKKTHMIHGDTANIDELESLTAPIKEQATDMLNDQALSIDDYVLFPVHPWQYQHILPNVFAKEISEKLVVLLPLKFGDYLSSSSMRSLIDIGAPYNHVKVPFAMQSLGALRLTPTRYMKNGEQAEQLLRQLIEKDEALAKYVMVCDETAWWSYMGQDNDIFKDQLGHLTVQLRKYPEVLAKNDTQQLVSMAALAANNRTLYQMICGKDNISKNDVMTLFEDIAQVFLKVTLSFMQYGALPELHGQNILLSFEDGRVQKCVLRDHDTVRIYKPWLTAHHLSLPKYVVREDTPNTLINEDLETFFAYFQTLAVSVNIYAIIDAIQDLFGVSEHELMSLLKQILKNEVATISWVTTDQLAVRHILFDKQTWPFKQILLPLLYQRDSGGGSMPSGLTTVPNPM

SEQ ID NO: 5665 - protein, 563 aa, Staphylococcus aureus
QHAAYAAIERILNEYFREENLYQVPPQNHQWSIQLSELETLTGQFAYWSAMGHHMYHSEVWLIDGKSKKLTTYKEAIARILQHMAQSADNQTAVQQHMAQIMSDIDNSIHRTARYLQSNTIDYAEDRYIVSEQSLYLGHPFHPTPKSASGFSEADLEKYAPECHTSFQLHYLAVHQDVLLTRYVEGKEDQVEKVLYQLADIDISEIPKDFILLPIHPYQINVLQQHPQYLQYSEQGLIKDLGVSGDSVYPTSSVRTVFSKALNIYLKLPIHVKITNFIRTNDLEQIERTIDAAQVIASVKDEVETPHFKLMFEEGYRALLPNPLGQTVEPEMDLLTNSAMIVREGIPNYHADKDIHVLASLFETMPDSPTSKLSQVIEQSGLAPEAWLECYLDRTLLPILKLYSNTGISLEAHVQNSLIELKDGIPDVCFVRDLEGICLSRTIATEKQLVPNVVAASSPVVYAHDEAWHRLKYYVVVNHLGHLVSTIGKATKNEVVLWQLVAHRLMTWKKEYANNAVFVDCVEDLYQTPTIAAKANLMSKLNDCGANPIYTHIPNPICHNKEV

SEQ ID NO: 5666 - protein, 237 aa, Staphylococcus aureus
GIFNSIPDPLMIEVIAASGYDFVVIDTEHVAINDETLAHLIRAAEAAHIIPIVRVTAVIDRDIIKVLDMGARGIIVPHVKDRETVEHIVKLSRYYPQGLRSLNGGRMARFGRTPLLDAMEMANEHIMVIAMIEDVEGVMAIDDIAQVEGLDMIVEGAADLSQSLGIPWQTRDDQVTSHVQHIFEVVNAHGKHFCALPREDEDIAKWQAQGVQTFILGDDRGKIYRHLSASLATSKQK

SEQ ID NO: 5667 - protein, 371 aa, Staphylococcus aureus
IEQLKAQSYPVCHYIYDLVGLEHHLQHITSSLPNNCQMYYAMKANSERTILDTISQYVEGFEVASQGEIAKGLAFKPANHIIFGGPGKTDEELRYAVSEGVQRIHVESMHELQRLNAILEDEDKTQHILLRVNLAGPFPNATLHMAGRPTQFGISEDEVDDVIEATLAMPNIHLDGFHFHSISNNLDSNLHVDVVKLYFKKAKAWSEKHQFPLKHINLGGGIGVNYADLTSQFEWDNFVENFKTLIVEQEMEDVTLNFECGRFIVAHIGYYVTEVLDIKKVHGAWYAILRGGTQQFRLPVSWQHNHPFDIYRYKDNPYSFEKVSISRQDTTLVGQLCTPKDVFAREVQIDAISTGDVIVFKYAGAYGWSIS

SEQ ID NO: 5668 - protein, 453 aa, Staphylococcus aureus
MSEKEIWEKVLEIAQEKLSAVSYSTFLKDTELYTIKDGEAIVLSSIPFNANWLNQQYAEIIQAILFDVVGYEVKPHFITTEELANYSNNETATPKETTKPSTETTEDNHVLGREQFNAHNTFDTFVIGPGNRFPHAASLAVAEAPAKAYNPLFIYGGVGLGKTHLMHAIGHHVLDNNPDAKVIYTSSEKFTNEFIKSIRDNEGEAFRERYRNIDVLLIDDIQFIQNKVQTQEEFFYTFNELHQNNKQIVISSDRPPKEIAQLEDRLRSRFEWGLIVDITPPDYETRMAILQKKIEEEKLDIPPEALNYIANQIQSNIRELEGALTRLLAYSQLLGKPITTELTAEALKDIIQAPKSKKITIQDIQKIVGQYYNVRIEDFSAKKRTKSIAYPRQIAMYLSRELTDFSLPKIGEEFGGRDHTTVIHAHEKISKDLKEDPIFKQEVENLEKEIRNV

SEQ ID NO: 5669 - protein, 376 aa, Staphylococcus aureus
MEFTIKRDYFITQLNDTLKAISPRTTLPILTGIKIDAKEHEVILTGSDSEISIEITIPKTVDGEDIVNISETGSVVLPGRFFVDIIKKLPGKDVKLSTNEQFQTLITSGHSEFNLSGLDPDQYPLLPQVSRDDAIQLSVKVLKNVIAQTNFAVSTSETRPVLTGVNWLIQENELICTATDSHRLAVRKLQLEDVSENKNVIIPGKALAELNKIMSDNEEDIDIFFASNQVLFKVGNVNFISRLLEGHYPDTTRLFPENYEIKLSIDNGEFYHAIDRASLLAREGGNNVIKLSTGDDVVELSSTSPEIGTVKEEVDANDVEGGSLKISFNSKYMMDALKAIDNDEVEVEFFGTMKPFILKPKGDDSVTQLILPIRTY

SEQ ID NO: 5670 - protein, 644 aa, Staphylococcus aureus
MVTALSDVNNTDNYGAGQIQVLEGLEAVRKRPGMYIGSTSERGLHHLVWEIVDNSIDEALAGYANQIEVVIEKDNWIKVTDNGRGIPVDIQEKMGRPAVEVILTVLHAGGKFGGGGYKVSGGLHGVGSSVVNALSQDLEVYVHRNETIYHQAYKKGVPQFDLKEVGTTDKTGTVIRFKADGEIFTETTVYNYETLQQRIRELAFLNKGIQITLRDERDEENVREDSYHYEGGIKSYVELLNENKEPIHDEPIYIHQSKDDIEVEIAIQYNSGYATNLLTYANNIHTYEGGTHEDGFKRALTRVLNSYGLSSKIMKEEKDRLSGEDTREGMTAIISIKHGDPQFEGQTKTKLGNSEVRQVVDKLFSEHFERFLYENPQVARTVVEKGIMAARARVAAKKAREVTRRKSALDVASLPGKLADCSSKSPEECEIFLVEGDSAGGSTKSGRDSRTQAILPLRGKILNVEKARLDRILNNNEIRQMITAFGTGIGGDFDLAKARYHKIVIMTDADVDGAHIRTLLLTFFYRFMRPLIEAGYVYIAQPPLYKLTQGKQKYYVYNDRELDKLKSELNPTPKWSIARYKGLGEMNADQLWETTMNPEHRALLQVKLEDAIEADQTFEMLMGDVVENRRQFIEDNAVYANLDF

SEQ ID NO: 5671 - protein, 491 aa, Staphylococcus aureus
LDGETLTIEDIKSFLQQQSKIEIIDDALERVKKSRAVVERIIENEETVYGITTGFGLFSDVRIDPTQYNELQVNLIRSHACGLGEPFSKEVALVMMILRLNTLLKGHSGATLELVRQLQFFINERIIPIIPQQGSLGASGDLAPLSHLALALIGEGKVLYRGEEKDSDDVLRELNRQPLNLQAKEGLALINGTQAMTAQGVISYIEAEDLGYQSEWIAALTHQSLNGIIDAYRHDVHAVRNFQEQINVAARMRDWLEGSTLTTRQAEIRVQDAYTLRCIPQIHGASFQVFNYVKQQLEFEMNAANDNPLIFEGANETFVISGGNFHGQPIAFALDHLKLGVSELANVSERRLERLVNPQLNGDLPAFLSPEPGLQSGAMIMQYAAASLVSENKTLAHPASVDSITSSANQEDHVSMGTTAARHGYQIIENARRVLAIECVIALQAAELKGVEGLSPKTRRKYDEFRSIVPSITHDRQFHKDIEAVAQYLKQ

SEQ ID NO: 5672 - protein, 635 aa, Staphylococcus aureus
PFVIMIITAIVLMGVWFIFNSLIALIASIVLVVMIIVSIVLFRQALMKMDSYVDGLSAQISTTNNKAIKHLPIGIIVLDENDHIEWVNQFMTDHMEANVISESVNEVFPNILKQLDRVKSVEIEYNQYHFQVRYSENDHCLYFFDITEQVQTNELYENSKPIIATLFLDNYDEITQNMNDTQRSEINSMVTRVISRWATEYNIFFKRYSSDQFVAYLNQKILADLEESKFDILSQLREKSVGYRAQLTLSIGVGEGTENLIDLGELSQSGLDLALGRGGDQVAIKSINGNVRFYGGKTDPMEKRTRVRARVISHALKDILAEGDKVIIMGHKRPDLDAIGAAIGVSRFAMMNNLEAYIVLNETDIDPTLRRVMNEIDKKPELRERFITSDDAWDMMTSKTTVVIVDTHKPELVLDENVLNKANRKVVIDHHRRGESFISNPLLVYMEPYASSTAELVTELLEYQPTEQRLTRLESTVMYAGIIVDTRNFTLRTGSRTFDAASYLRAHGADTILTQHFLKDDVDTYINRSELIRTVKVEDNGIAIAHGSEDKIYHPVTVAQAADELLSLEGIEASYVVARREDNLIGISARSLGSVNVQLTMEALGGGGHLTNAATQLKGVTVEEAIAQLQQAITE

SEQ ID NO: 5673 - protein, 148 aa, Staphylococcus aureus
MKVIFTQDVKGKGKKGEVKEVPVGYANNFLLKKNYAVEATPGNLKQLELQKKRAKQERQQEIEDAKALKETLSNIEVEVSAKTGEGGKLFGSVSTKQIAEALKAQHDIKIDKRKMDLPNGIHSLGYTNVPVKLDKEVEGTIRVHTVEQ

SEQ ID NO: 5674 - protein, 454 aa, Staphylococcus aureus
PHNNEAEQSVLGSIIIDPELINTTQEVLLPESFYRGAHQHIFRAMMHLNEDNKEIDVVTLMDQLSTEGTLNEAGGPQYLAELSTNVPTTRNVQYYTDIVSKHALKRRLIQTADSIANDGYNDELELDAILSDAERRILELSSSRESDGFKDIRDVLGQVYETAEELDQNSGQTPGIPTGYRDLDQMTAGFNRNDLIILAARPSVGKTAFALNIAQKVATHEDMYTVGIFSLEMGADQLATRMICSSGNVDSNRLRTGTMTEEDWSRFTIAVGKLSRTKIFIDDTPGIRINDLRSKCRRLKQEHGLDMIVIDYLQLIQGSGSRASDNRQQEVSEISRTLKALARELECPVIALSQLSRGVEQRQDKRPMMSDIRESGSIEQDADIVAFLYRDDYYNRGGDEDDDDDSGFEPQTNDENGEIEIIIAKQRNGPTGTVKLHFMKQYNKFTDIDYAHAD

SEQ ID NO: 5675 - protein, 427 aa, Staphylococcus aureus
MSSIVVVGTQWGDEGKGKITDFLAEQSDVIARFSGGNNAGHTIQFGGETYKLHLVPSGIFYKDKLAVIGNGVVVDPVALLKELDGLNERGIPTSNLRISNRAQLILPYHLAQDEYEERLRGENKIGTTKKGIGPAYVDKVQRIGIRMADLLEKETFERLLKSNIEYKQAYFKGMFNETCPSFDDIFEEYYAAGQRLKEFVTDTSKILDDAFVADEKVLFEGAQGVMLDIDHGTYPFVTSSNPIAGNVTVGTGVGPTFVSKVIGVCKAYTSRVGDGPFPTELFDEDGHHIREVGREYGTTTGRPRRVGWFDSVVLRHSRRVSGITDLSINSIDVLTGLDTVKICTAYELDGKEIAEYPANLDQLKRCKPIFEELPGWTEDVTSVRTLEELPENARKYLERISELCNVQISIFSVGPDREQTNLLKELW

SEQ ID NO: 5676 - protein, 233 aa, Staphylococcus aureus
MARKVVVVDDEKPIADILEFNLKKEGYDVYCAYDGNDAVDLIYEEEPDIVLLDIMLPGRDGMEVCREVRKKYEMPIIMLTAKDSEIDKVLGLELGADDYVTKPFSTRELIARVKANLRRHYSQPAQDTGNVTNEITIKDIVIYPDAYSIKKRGEDIELTHREFELFHYLSKHMGQVMTREHLLQTVWGYDYFGDVRTVDVTIRRLREKIEDDPSHPEYIVTRRGVGYFLQQHE

SEQ ID NO: 5677 - protein, 608 aa, Staphylococcus aureus
MKWLKQLQSLHTKLVIVYVLLIIIGMQIIGLYFTNNLEKELLDNFKKNITQYAKQLEISIEKVYDEKGSVNAQKDIQNLLSEYANRQEIGEIRFIDKDQIIIATTKQSNRSLINQKANDSSVQKALSLGQSNDHLILKDYGGGKDRVWVYNIPVKVDKKVIGNIYIESKINDVYNQLNNINQIFIVGTAISLLITVILGFFIARTITKPITDMRNQTVEMSRGNYTQRVKIYGNDEIGELALAFNNLSKRVQEAQANTESEKRRLDSVITHMSDGIIATDRRGRIRIVNDMALKMLGMAKEDIIGYYMLSVLSLEDEFKLEEIQENNDSFLLDLNEEEGLIARVNFSTIVQETGFVTGYIAVLHDVTEQQQVERERREFVANVSHELRTPLTSMNSYIEALEEGAWKDEELAPQFLSVTREETERMIRLVNDLLQLSKMDNESDQINKEIIDFNMFINKIINRHEMSAKDTTFIRDIPKKTIFTEFDPDKMTQVFDNVITNAMKYSRGDKRVEFHVKQNPLYNRMTIRIKDNGIGIPINKVDKIFDRFYRVDKARTRKMGGTGLGLAISKEIVEAHNGRIWANSVEGQGTSIFITLPCEVIEDGDWDE

SEQ ID NO: 5678 - protein, 430 aa, Staphylococcus aureus
KQVIISGLMLFSLFFGAGNLIFPPMLGHTAGQNMWIGMLGFALTGILLPFITVIVVAFYDEGVESVGNRIHPWFGFIFAVVIYMSIGAFYGIPRAANVAYEIGTRHILPVHNQWTLIIFAAVFFAIVYWISLNPSKIVDNLGKLLTPLLLLMVALLSIAVIFNPESALSAPKDKYITHPFISGSLEGYFTMDLVAALAFSVVIVNGYKFKGLTDRTKILKYVCFSGFIAAILLGMIYFALAYVGASTAPGNFKDGTDILTYNSLRVFGSFGNLVFGMTVILACLTTCIGLVNACATFTKKHVPKFSYKIFALVFSIIGFLFTTLGLEMILKIAVPLLTLIYPVSIALVLISFANMFSTFRFSWAYRLATVITLIISILQILNSFNLLHGVILKWFMMLPLADIDLAWLVPFILLAIIGFIIDVVIRRPKQ

SEQ ID NO: 5679 - protein, 299 aa, Staphylococcus aureus
IEYSREVQQARENNQPIVALESTIISHGMPYPQNVEMATTVEQIIRNNGAIPATIAIIEGKIKIGLESEDLEILATNKDVAKVSRRDLAEIVAMKRIGATTVATTMICAAMAGIQFFVTGGIGGVHKGAEHTMDISADLEELSKTNVTVICAGAKSILDLPKTMEYLETKGVPVIGYQTNELPAFFTRESGVKLTSSVETPERLADIHLTKQQLNLEGGIVVANPIPYEHALSKAYIEAIINEAVVEAENQGIKGKDATPFLLGKIVEKTNGKSLAANIKLVENNAALGAKIAVAVNKL

SEQ ID NO: 5680 - protein, 258 aa, Staphylococcus aureus
IAIDIGGTQIKSAVIDKQLNMFDYQQIPTPDNKSELITDKVYEIVTGYMKQYQLIQPVIGISSAGVVDEQKGEIVYAGPTIPNYKGTNFKRLLKSLSPYVKVKNDVNAALLGELKLHQYQAERIFCMTLGTGIGGAYKNNQGHIDNGELHKANEVGYLLYRPTENTTFEQRAATSALKKRMIDGGFTRSTHVPVLFEAAEEGDDIAKQILNEWAEDVAEGIAQIQVMYDPGLILIGGGISEQGDNLIKYIEPKVAHYL

SEQ ID NO: 5681 - protein, 227 aa, Staphylococcus aureus
TKTDKRIVNYIRQNGYSDAFSTINSLAHAIGTSPATMTRFSHKLDYENFQDLKFNIQQEMTETVIENSPIIQRIHKYHQQIIQQTGEFIDNDIIQTFIDKLQSSRHILFAGLGSSGLSATEFYYRMIRMGLKGNVTTDSHLMKISASLLSHSDMFIAMSNSGNTSELISAAEVAKSHGAYVVAITNFEGSKLTDCADLVLLTTDQSRNTDHQFINTQIATLFLIDIV

SEQ ID NO: 5682 - protein, 422 aa, Staphylococcus aureus
RFFVYSLVGILCFFIPFTINGNNTIFVDHVHLAIRSIIGPLMPYVALIMILIGTALPIVRRTFMTSITNLVITLFKVAGAIIGIMYVFKIGPSILFKANYGPFLFEKLMMPLSILIPVGAIALSLLVGYGLLEFVGVYMEPIMRPIFKTPGKSAVDAVASFVGSYSLGLLITNRVYKQGMYNKREATIIATGFSTVSATFMIIVAKTLGLMPHWNLYFWITLVITFVVTAITAWLPPITNESTEYYNGQEGEQEVAIEGSRLKTAYAEAMKQNALTPSLVKNVWDNLKDGLEMTVGILPSILSIGFLGLIVANYTPFIDWLGYIFYPFIYIFPIADQAVLAKASAISIVEMFLPSLLVTKAAMSTKFVVGVVSVSAIIFFSALVPCILATEIKIPVWKLIIIWFLRVALSLLITIPVALLIF

SEQ ID NO: 5683 - protein, 310 aa, Staphylococcus aureus
MYRYKPLLQSIHLPNGIKISNRFVLSPMTVNASTKEGYITKADLAYAARRSNSAGMQVTGAAYIEPYGQLFEYGFNIDHDACIPGLTNMASTMKQHGSLAIIQLAHAGRFSNQAILNFGKVYGPSPMTLHSPIEHDVIAMSQEKINSIIQQYRDATLRAIKAGFDGVEISIAQRLLIQTFFSTFSNKRTDHYGADSLKNRARLCLEVMRAVQEVIDKEAPDNFILGFRATPEETRGSDLGYTIDEFNQLIDWVMDVSNIQYLAIASWGRHIYQNTSRTPGEHFGRPVNQIVYEHLAGRIPLIASGGINSP

SEQ ID NO: 5684 - protein, 332 aa, Staphylococcus aureus
LVKLSVLDYALIDEGKDAQKALQDSVTLAKLADRLGFKRIWFTEHHNVPAFACSSPELLMMHTLAQTNHIRVGSGGVMLPHYRPYKIAEHFRMMTALYPNRIDLGIGNNPGTTMVKQALDGINPKYDSYDESISLLRDYLTIKDKPSAHMLGVQPHIDHFPEMWLLSSSATSAKIAAELGIGLSVGTFLLPDINAIHAAKDNIDIYKKHFRASMIKMDAKVMASVFVIVADNEAEVAALQHALDVWLLGKLQFAEFEHFPSVDTAQKYKLNDRDKEMIQAHQARIIAGTQEQVKAQLDDFIATFEVDEVLVAPLIPGIEERCKTLKLLAEIY

SEQ ID NO: 5685 - protein, 98 aa, Staphylococcus aureus
DKMKKLANYLWVEKVGDLYVFSMTPELQDDIGTVGYVEFVSPDEVKVDDEIVSIEASKTVIDVQTPLSGTIIERNTKAEEEPTILNSEKPEENWLFKL

SEQ ID NO: 5686 - protein, 437 aa, Staphylococcus aureus
FIVDILSQPAILVALIAFIGLIVQKKPAATITSGTIKTILGFLILSAGADVVVRSLEPFGKIFQHAFGVQGIVPNNEAIVSLALKDFGTTAALIMVCGMIVNILIARFTNLKYIFLTGHHTFYMAAFLAIILTVSHIKGWLTIVIGALVLGLIMAVLPALLQPTMRKITGNDQVALGHFGSISYFAAGAVGQLFKGKSKSTEEIKFPKGLSFLRESTISISITMALLYFIACLFAGVSYVHESISDGQNFIVFSLIQGVTFAAGVFIILTGVRLILAEIVPAFKGISEKLVPNSKPALDCPIVFPYAQNAVLIGFFVSFITGVIGMFILFLFGGVVILPGVVAHFFLGATAAVFGNARGGIKGAVAGAALNGILITFLPLLFLPFLGELGGAATTFSDTDFLAVGIVFGNAVKYMGLFGAILFIIIVGATAILLKGR

SEQ ID NO: 5687 - protein, 143 aa, Staphylococcus aureus
DILSTTRIIVKEQVNDWTEAITIASQPLLQEQIIEQGYVQAMIDSVNEFGPYIVIAPEIAIAHARPNNDVHQVGLSLLKLNQHVAFCDEDHYASLIFVLSAIDNHSHLSVLQNLATVLGDNQTVQQLLTATNAQDIKNILKEH

SEQ ID NO: 5688 - protein, 608 aa, Staphylococcus aureus
LSYRQIEILYLLIHEQTFIQINTIANQLGVSPRTIQYDIAYIEQYAETYHYQVSRNKAAGIKVTTANTTILNELEHNLTNQIHFSKDERLTHIALKLFETTDPVSTKQLAQDVNVSRRTIADDIKMIQAQLDQYHLKLNYVHNKGFNIIGEEDHYRKAYAHFIHQYMKQAAPFIEADIFNSESIALVRRAIIKTLNSENYHLVQSAIDGLIYHILIAIQRLNENFSFDIPINEIDKWRHTNQYAIALKMIENLERSCNVTFPESEIIFITLHLLGSKMTEHTASSITFEYHDLSQNIHELITYVSQELGIDMSKDNKLHTSLITHIKPAIHRIKYDMLQPNPLRQEVMRRYPQIIEAVSKHISPIEQDAAIRFNEDELTYITIHFASSIERVATHKQSMIKVVLLCGSGIGTSQLLKSKLNHLYPEFHIWDAYSIYQLEESRLLQDNIDYVISTVPCEISTVPVIHVDPFINQQSRQKLNQIINDSREQRVMKMATDGKSLSDLLPEHRIIINKQPLSIESAITVAVQPLINDGIVNSNYTAAILKQLEQFGSYMVISPHIALIHAGTDYVQNGVGFALTYFTERIIFGSKANDPVHLVITLATDHPN

SEQ ID NO: 5689 - protein, 251 aa, Staphylococcus aureus
LENKVAVVTGASTGIGQASAIALAQEGAYVLAVDIAEAVSETVDKIKSNGDKAKAYVVDIASEQQIDNFASEIREQFGHVDVLFNNAGVDNAAGRIHEYPTDVYDKIMNVDMRGTFLMTKMMLPLMMTKGGSIVNTSSFSGQAADLYRSGYNAAKGAVINFTKSIAIEYGRDGIRANAIAPGTIETPLVDKLTGTSEDKEGKAFRENQKWMTPLGRLGKPEEVGKLVVFLASDESSFITGETIRIDGGVMA

SEQ ID NO: 5690 - protein, 272 aa, Staphylococcus aureus
MNNFNNEIKLILQQYLEKFEAHYERVLQDDQYIEALETLMDDYSEFILNPIYEQQFNAWRDVEEKAQLIKSLQYITAQCVKQVEVIRARRLLDGQASTTGYFDNIEHCIDEEFGQCSIASNDKLLLVGSGAYPMTLIQVAKETGASVIGIDIDPQAVDLGRRIVNVLAPNEDITITDQKVSELKDIKDVTHIIFSSTIPLKYSILEELYDLTNENVVVAMRFGDGIKAIFNYPSQETAEDKWQCVNKHMRPQQIFDIALYKKAAIKVGITDV

SEQ ID NO: 5691 - protein, 433 aa, Staphylococcus aureus
MSKLLMIGTGPVAIQLANICYLKSDYEIDMVGRASTSEKSKRLYQAYKKEKQFEVKIQNEAHQHLEGKFEINRLYKDVKNVKGEYETVVMACTADAYYDTLQQLSLETLQSVKHVILISPTFGSQMIVEQFMSKFSQNIEVISFSTYLGDTRIVDKEAPNHVLTTGVKKKLYMGSTHSNSTMCKRISTLAEQLKIQLEVVESPLHAETRNSSLYVHPPLFMNDFSLKAIFEGTDVPVYVYKLFPEGPITMTLIREMRLMWKEMMAILQAFRVPSVNLLQFMVKENYPVRPETLDEGDIEHFEILPDILQEYLLYVRYTAILIDPFSQPDENGHYFDFSAVPFKQVYKNEQDVVQIPRMPSEDYYRTAMIQHIGKMLGIQTPMIDQFLARYEASCQAYKDMHQDQHLSSQFNTNLFEEDKALVTKFLEINRTLS

SEQ ID NO: 5692 - protein, 283 aa, Staphylococcus aureus
MSKIFVTGATGLIGIKLVQRLKEEGHEVAGFTTSENGQQKLAAVNVKAYIGDILKADTIDQALADFKPEIIINQITDLKNVDMAANTKVRIEGSKNLIDAAKKHDVKKVIAQSIAFMYEPGEGLANEETSLDFNSTGDRKVTVDGVVGLEEETARMDEYVVLRFGWLYGPGTWYGKDGMIYNQFMDGQVTLSDGVTSFVHLDDAVETSIQAIHFENGIYNVADDAPVIGSEFAEWYKEQLGVEPNIDIQPAQPFERGVSNEKFKAQGGTLIYKTWKDGMNPIK

SEQ ID NO: 5693 - protein, 144 aa, Staphylococcus aureus
MLLPKRVKYRRQHRPKTTGRSKGGNYVTFGEFGLQATTTSWITSRQIESARIAMTRYMKRGGKVWIKIFPHTPYTKKPLEVRMGAGKGAVEGWIAVVKPGRILFEVAGVSEEVAREALRLASHKLPVKTKFVKREELGGETNES

SEQ ID NO: 5694 - protein, 587 aa, Staphylococcus aureus
KMYSPRYLPGLDGLRAFAVIGIIIYHLNAQWLSGGFLGVDTFFVISGYLITSLLISEYYRTQKIDLLEFWKRRLKRLIPAVLFLICVVLMFTLIFKPELIIQMKRDAIAAIFYVSNWWYISQNVDYFNQFAIEPLKHLWSLAIEEQFYLLFPLVITFLLHRFKPRNIIQTLFIVSLISLGLMIVIHFITGDNSRVYFGTDTRLQTLLLGCILAFIWPPFALKKDISKKIVVSLDIIGISGFAVLMTLFFIVGDQDQWIYNGGFYIISFATLFIIAIAVHPSSLFAKFLSMKPLLIIGKRSYSLYLWHYPIIVFVNSYYVQGQIPVYVYIIEILLTALMAEISYRFIETPIRKKGFKAFAFLPKKKSQFARTVLVILLLIPSIIVLSGQFDALGKQHEAEKKEKKTEFKTTKKKVVKKDKQEDKQTANSKEDIKKSSPLLIGDSVMVDIGNVFTKKIPNAQIDGKVGRQLVDATPIVKSQYKDYAKKGQKVVVELGTNGAFTKDQLNELLDSFGKADIYLVSIRVPRDYEGRINKLIYEAAEKRSNVHLVDWYKASAGHPEYFAYDGIHLEYAGSKALTDLIVKTMET

SEQ ID NO: 5695 - protein, 163 aa, Staphylococcus aureus
MKTMKKYIKTAFFCSMYWLIVQLNIANLGTRIPDKYFRQKHIIFKSFNFEKHGKFWNKWFYVRKWKHKILDGHKLNRNIYNQRHLMTINTDEIEKMIIETKRAELIHWISILPVIIFNKGPRLVKYINVFYAMIANVPIIIVQRYNRPRLTQLLRILKRRGER

SEQ ID NO: 5696 - protein, 439 aa, Staphylococcus aureus
MTKHIIVIGGGLGGISAAIRMAQSGYSVSLYEQNNHIGGKVNRHESDGFGFDLGPSILTMPYIFEKLFEYSKKQMSDYVTIKRLPHQWRSFFPDGTTIDLYEGIKETDQHNAILSNKDIEELQNYLNYTRRIDRITEKGYFNYGLDTLSQIIKFHGPLNALINYDYVHTMQQAIDKRISNPFLRQMLGYFIKYVGSSSYDAPAVLSMLFHMQQEQGLWYVEGGIHHLANALEKLAREEGVTIHTGTRVDNIKTYQRRVTGVRLDTGEFVKADYIISNMEVIPTYKYLLHLGTQRLNKLEREFEPASSGYVMHLGVACQYPQLAHHNFFFTENAYLNYQQVFHEKVLPDDPTIYLVNTNKTDHTQAPVGYENIKVLPHIPYIQDQPFTTEDYAKFRDKILDKLEKMGLTDLRKYIIYEDVWTPEILKKIIVLIVVQYMVL

SEQ ID NO: 5697 - protein, 794 aa, Staphylococcus aureus
VANTKKTTLDITGMTCAACSNRIEKKLNKLDDVNAQVNLTTEKATVEYNPDQHDVQEFINTIQHLGYGVAVETVELDITGMTCAACSSRIEKVLNKMDGVQNATVNLTTEQAKVDYYPEETDADKLVTRIQKLGYDASIKDNNKDQTSRKAEALQHKLIKLIISAVLSLPLLMLMFVHLFNMHIPALFTNPWFQFILATPVQFIIGWQFYVGAYKNLRNGGANMDVLVAVGTSAAYFYSIYEMVRWLNGSTTQPHLYFETSAVLITLILFGKYLEARAKSQTTNALGELLSLQAKEARILKDGNEVMIPLNEVHVGDTLIVKPGEKIPVDGKIIKGMTAIDESMLTGESIPVEKNVDDTVIGSTMNKNGTITMTATKVGGDTALANIIKVVEEAQSSKAPIQRLADIISGYFVPIVVGIALLTFIVWITLVTPGTFEPALVASISVLVIACPCALGLATPTSIMVGTGRAAENGILFKGGEFVERTHQIDTIVLDKTGTITNGRPVVTDYHGDDQTLQLLATAEKDSEHPLAEAIVNYAKEKQLTLTETTTFKAVPGHGIEATIDHHHILVGNRKLMADNDISLPKHISDDLTHYERDGKTAMLIAVNYSLTGIIAVADTVKDHAKDAIKQLHDMGIEVAMLTGDNKNTAQAIAKQVGIDTVIADILPEEKAAQIAKLQQQGKKVVMVGDGVNDAPALVKADIGIAIGTGTEVAIEAADITILGGDLMLIPKAIYASKATIRNIRQNLFWAFGYNIAGIPIAALGLLAPWVAGAAMALSSVSVVTNALRLKKMR

SEQ ID NO: 5698 - protein, 185 aa, Staphylococcus aureus
MNSMMMQKECVFMVYKSYYDSPVGRLELVSDGVSLTAVLFENQQDDSTREENTSLAIFKEATQWLDAYFKGDNPEITIPLKPTGSHFQQCVWNELRQIPYGTLTTYGAIAKKVGKVLDKPKMSAQAVGGAVGSNPLSIIVPCHRVVGKTGSLTGFGGTINNKIKLLELENIDMSKLYVPKHSTKP

SEQ ID NO: 5699 - protein, 428 aa, Staphylococcus aureus
MSMQSLDKNFRHLSRQQKLQQLVDKQWLSEEQFNILLNHPLIDEEVANSLIENVIAQGALPVGLLPNIIVDDKAYVVPMMVEEPSVVAAASYGAKLVNQTGGFKTVSSERIMIGQIVFDGVDDTEKLSADIKALEKQIHKIADEAYPSIKARGGGYQRIAIDTFPEQQLLSLKVFVDTKDAMGANMLNTILEAITAFLKNEFPQSDILMSILSNHATVSVVKVQGEIDVKDLARGERTGEEVAKRMERASVLAQVDIHRAATHNKGVMNGIHAVVLATGNDTRGAEASAHAYASRDGQYRGIATWRYDQERQRLIGTIEVPMTLAIVGGGTKVLPIAKASLELLNVDSAQELGHVVAAVGLAQNFAACRALVSEGIQQGHMSLQYKSLAIVVGAKGDEIAQVAEALKQEPRANTQVAERILQDLRSQQ

SEQ ID NO: 5700 - protein, 367 aa, Staphylococcus aureus
MLVAVVKELKQGEGRVACTPENVRKLTAAGHKVIVEKNAGIGSGFSNDMYEKEGAKIVTHEQAWEADLVIKVKEPHESEYQYFKKNQIIWGFLHLASSKEIVEKMQEVGVTAISGETIIKNGKAELLAPMSAIAGQRSAIMGAYYSEAQHGGQGTLVTGVHENVDIPGSTYVIFGGGVAATNAANVALGLNAKVIIIELNDDRIKYLEDMYAEKDVTVVKSTPENLAEQIKKADVFISTILIPGAKPPKLVTREMVKSMKKGSVLIDIAIDQGGTIETIRPTTISDPVYEEEGVIHYGVPNQPGAVPRTSTMALAQGNIDYILEICDKGLEQTIKDNEALSTGVNIYQGQVTNQGLATSHDLDYKEI

SEQ ID NO: 5701 - protein, 79 aa, Staphylococcus aureus
MAGGPRRGGRRRKKVCYFTANGITHIDYKDTELLKRFISERGKILPRRVTGTSAKYQRMLTTAIKRSRHMALLPYVKEE

SEQ ID NO: 5702 - protein, 435 aa, Staphylococcus aureus
KNENINVEILTTSDMHSHFLNGDYGSNIYRAGTYVNQVRAQNHRVILLDSGGSLAGSLAAYYYAIVAPYKRHPMIKLMNRMHYDASGVSPSEFKFGLSFLTRSIALARFPWLSANIEYNVTKEPYFSTPYCIKHFGDLKIAIVGVTADGLMENEYSEMEQDVSIEKTLVASKRWIRYIHEVEEPDFLIVIYHGGLNKISNSTKNKKASSNEAEKLMEELGVIDLMITAHQHQTIVGQDHETYYVQAGQDAKELVHLSINFKKRTTTYDVESIDSKVIDLNEYEEDQELLDLTFYDRKAVAYWSQEIISDKGLMLSVNGLQDLVCQTHPFSQLLHDAIHLAFDNDITCVHVPMNGEKGLSGQIRNEDLYHAYPYPDKPMDMTISGQNIKDILEYSYSHLDFVNEQLSLTIIDETLCTMWQGFNYEIDMNQEPGQRV

SEQ ID NO: 5703 - protein, 2025 aa, Staphylococcus aureus
  VARIANT (1)...(2025): Xaa = Any Amino Acid
TKQCMAXEKVFKITQQLKQIANISTKINQNNKTTIKQVQAANSIINEQTATLDNNAINQAATTVNTTKAALHGDVKLQNDKDHAKQTVSQLAYLNNAQKHMEDTLIDSETTRIAVKQDLTEAQALDQLMNTLQQSIADKDATRASSAYVNAEPNKKQAYDEAVQNAESIIAGLNNPTINKGNVSSATQAVTTSKNGLDGVERLAQDKQTAGNSLNHLDQLTPAQQQALENQINNATTRDKVAEIIAQAQALNEAMKALKESIKDQPQTEASSKFINEDQAQKDAYTQAVQHAKDLINKTTDPTLVKSVIDQATQAVNDAKNNLHGDQKLAQDKQRATETLNNLSNLNTPQRQALENQINNAATRGEVAQKLTEAQALNQAMEALRNSIQDQQQTEAGSKFINEDKPQKDAYQAAVQHAKDLINQTSNPTLDKAQVEQLTQGVNQAKDNLHGDQKLADDKQHAVTDLNQLNSLNNPQRQALESQINNAATRDEVAQKLAEAQALDQAMQALRNSIQDQQQTESGSKFINEDKPQKDAYQAAVQHAKDLINQTGNPTLDKSQVEQLTQAVTTAKDNLHGDQKLARDQQQAVTTVNALPNLNHAQQQALTDAINAAPTRTEVAQHVQTATELDHAMETLKNKVDQVNTDKAQPNYTEASTDKKEAVDQALQAAESITDPTNGSNANKDAVEQALTKLQEKVNELNGNERVAEAKAQAKQTIDQLAHLNADQIATAKQNIDQATKLQPIAELVDQATQLNQSMDQLQQAVNEHANVEQTVDYTQADSDKQNAYKQAIAEAENVLKQNSNKQQVDQALQNILNAKQALNGDERVALAKTNGKHDIDQLNALNNAQQDGFKGRIDQSHDLNQIQQIVDEAKALNRAMDQLSQEISGNEGRTKGSTNYVNADTQVKQVYDEAVDKAKQALDKSTGQNLTAEQVIKLNDAVTAAKKALNGEERLNNRKSEALQRLDQLTHLNNAQRQLAIQQINNAETLNKASRAINRATKLDNAMGAVQQYIDEQHLGVISSTNYINADDNLKANYDNAIANAAHELDKVQGNAIAKAEAEQLKQNIIDAQNALNGDQNLANAKDKANAFVNSLNGLNQQQQDLAHNAINNADTVSDVTDIVNNQIDLNDAMETLKHLVDNEIPNAEQTVNYQNADDNAKTNFDDAKRLANTLLNSDNTNVNDINGAIQAVKDAIQNLNGEQRLQEAKDKAIQNVNKVLADKLKEIEASNATDQDKLIAKNKAEELANSIINNINKATSNQDVSQVQTAGNQAIEQVHANEIPKAKIDANKDVDKQVQALIDEIGRNPNLTDKEKQALKDRINQILQQGHNDINNALTKEAIEQAKERLAQALQDIKDLVKAKEDAKNKIKALANAKRDQINSNPDLTPEQKAKALKEIDEAEKRALQNVENAQTIDQLNRGLNLGLDDIRNTHVWEVDDQPAVNEISEATPEQLLVNGELIVHRDDIITEQDVLAHINLIDQLTAEVIDTPSTATISDSLTAKVEVTLLDGSKVIVNVPVKVVEKELSVVKQQAIESIENAVQQKINEINNSVTLTLEQKEAAIAEVNKLKQQAIDHINNAPDVHSVEEIQQQEQAHIEQFNPEQFTIEQAKSNAIKSIEDAIQHMIDEIKARTDLTDKEKQEAIAKLNQLKEQAIQLIQRAQSIDEITEQLEQFKAQMKAANPTAKELAKRKQEAISKIKDFSNEKMNSIRNSEIGTADEKQAAMNQINEIVLETIRDINNAHTLQQVEAALNNGIARISAVQIVTSDRAKQSSSTGNESNSHLTIGYGTANHPFNSSTIGHKKKLDEDDDIDPLHMRHFSNNFGNVIKNAIGVVGISGLLASFWFFIAKRRRKEDEEEELEIRDNNKDSIKETLDDTKHLPLLFAKRRRKEDEEDVTVEEKDSLNTGESLDKVKHTPFFLPKRRRKEDEEDVEVTNENTDEKVLKDNEHSPLLIAKRRKDKEEDVETTTSIESKDEDVPLLLAKKKNQKDNQSEDKKSASKNTSKKVAAKKKKKKSKKN

SEQ ID NO: 5704 - protein, 426 aa, Staphylococcus aureus
MNGDNQQILREIVLNPTIHGKELESIFGLSRRQLGYRIQKINLWLEQEGYPKLERTSQGNFIVSSEIMTLFKRDVSEQQMLNGNNVIFSIETRRYYLMLMLFSKENAMSLNHFSIDLQVSKNTVIHDINHVKEQLEDHGLSLKYSRKHGYEIVGDEFEVRRFFIKLIDQRLNHDITKSEVLKALNLTFEDIAYQKDKIKQVEQFLKSRFIDKSLSSLPYVLCVIRRRIQNGHVINPLNINYQYLRDTKEYQATEIMTQHEPDLPEAEKLYLTLHLLSTSVQWTDLQESDNISNLTMAIAQMIHHFEQITFINIEDKEKLSQQLLLHLTPAFYRIKYNLTDRDELINPLQGNYQSLFHMVKQSCQSLTEYFGKSLPDNEIAYLTMLFGGSLRRQDENFDGKIKAIIVCTQGTSVSQMMLYELRNLFP

SEQ ID NO: 5705 - protein, 343 aa, Staphylococcus aureus
VKALVKTREGHGNLELLDKEVATPLDDKVKIKVHYAGICGTDIHTYEGHYKVNFPVTLGHEFSGEIVEVGADVKDFKVGDRVTSETTFYVCNECEYCESKDYNLCNHRKGIGTQVDGAFTNYVIAREESLHHIPDEVSYQSAAMTEPLACAHHGVSKIQVNSGDVAVVMGPGPIGLLVAQVLKSKGATVVVTGLDNDKVRLDKAEALHMDYVVNLQQTDLKTYINGITDGYGADVVVECSGAVPAARQGLDILRKKGFYSQIGIFKDAEIPFDMEKVIQKEITVVGSRSQKPADWEPSLQLMADGLVNAEALVTKIYDISKWDEAYQHLKSGEGIKALLKPLD

SEQ ID NO: 5706 - protein, 305 aa, Staphylococcus aureus
VKALKLYGVEDLRYEDNEKPVIESVNDVIVKVRATGICGSDTSRYKKMGPYIKGMPFGHEFSGVVDAIGSDVTHVNVGDKVTGCPAIPCYQCEYCLKGEYARCEKLFVIGSYEPGSFAEYVKLPAQNVLKVPDNVDYIEAAMVEPSAIVAHGFYKSNIQPGMTVAVMGCGSIGLLAIQWARIFGAAHIIAIDIDAHKLDIATSLGAHQTINSKEENLEKFIENHYANQIDLAIESSGAKVTIGQILTLPKKGGEVVLLGIPYDDIEIERVHFEKILRNELTVCGSWNCLSSNFPGKEWTATLHYM

SEQ ID NO: 5707 - protein, 236 aa, Staphylococcus aureus
MEDNMIYAGILAGGIGSRMGNVPLPKQFLDIDNKPILIHTIEKFILVSEFNEIIIATPAQWISHTQDILKKYNITDQRVKVVAGGTDRNETIMNIIDHIRNTQGINDDDVIVTHDAVRPFLTQRIIKENIEVAAKYGAVDTVIEAIDTIVMSKDKQNIHSIPVRNEMYQGQTPQSFNIKLLQDSYRALSSAQKEILSDACKIIVESGHAVKLVRGELYNIKVTTPYDLKVANAIIQ

SEQ ID NO: 5708 - protein, 277 aa, Staphylococcus aureus
MAIKKYKPITNGRRNMTSLDFAEITKTTPEKSLLKPLPKKAGRNNQGKLTVRHHGGGHKRQYRVIDFKRNKDGINAKVDSIQYDPNRSANIALVVYADGEKRYIIAPKGLEVGQIVESGAEADIKVGNALPLQNIPVGTVVHNIELKPGKGGQIARSAGASAQVLGKEGKYVLIRLRSGEVRMILSTCRATIGQVGNLQHELVNVGKAGRSRWKGIRPTVRGSVMNPNDHPHGGGEGRAPIGRPSPMSPWGKPTLGKKTRRGKKSSDKLIVRGRKKK

SEQ ID NO: 5709 - protein, 372 aa, Staphylococcus aureus
SRSFLFKAIFNITKLLHIKRSKTILFTSDSRPNLSGNFKYVYDELLRQKVDFDYDIQTVFKANITDRRKWRDKFRLPYLLGKADYIFVDDFHPLIYTVRFRPSQEIIQVWHAVGAFKTVGFSRTGKKSGPFIDSLNHRSYTKAYVSSETDIPFYAEAFGIREENVVPTGVPRTDVLFDEAYATQIKQEMEDELPIIKGKKVILFAPTFRGNGHGTAHYPFFKIDFERLARYCEKNNAVVLFKMHPFVKNRLNISREHRQYFIDVSDYREVNDILFVTDLLISDYSSLIYEYAVFKKPMIFYAFDLEDYITTRDFYEPYESFVPGKIVQSFDALMDALDNEDYEVEKVVPFLDKHFKYQDGRSSERLVKDLFR

SEQ ID NO: 5710 - protein, 398 aa, Staphylococcus aureus
ITKTRRRYDMIKTTIKKLIEHSIYTTFKLLSKLPNKNLIYFESFHGKQYSDNPKALYEYLTEHSDAQLIWGVKKGYEHIFQQHNVPYVTKFSMKWFLAMPRAKAWMINTRTPDWLYKSPRTTYLQTWHGTPLKKIGLDISNVKMLGTNTQNYQDGFKKESQRWDYLVSPNPYSTSIFQHAFHVSRDKILETGYPRNDKLSHKRNDTEYINGIKTRLNIPLDKKVIMYAPTWRDDEAIREGSYQFNVNFDIEALRQALDDDYVILLRMHYLVVTRIDEHDDFVKDVSDYEDISDLYLISDALVTDYSSVMFDFGVLKRPQIFYAYDLDKYGDELRGFYMDYKKELPGPIVENQTALIDALKQIDETANEYIEARTVFYQKFCSLEDGHASQRICQTIFK

SEQ ID NO: 5711 - protein, 227 aa, Staphylococcus aureus
ILAGGIGSRMGNVPLPKQFLDLDNKPILIHTLEKFILINDFEKIIIATPQQWMTHTKDTLRKFKISDERIEVIQGGRDRNDTIMNIVKHIESTNGINDDDVIVTHDAVRPFLTHRIIKENIQAALEYGAVDTVIDAIDTIVTSKDNQTIDAIPVRNEMYQGQTPQSFNINLLKESYAQLSDEQKSVLSDACKIIVETNKPVRLVKGELYNIKVTTPYDLKVANAIIR

SEQ ID NO: 5712 - protein, 350 aa, Staphylococcus aureus
MLLFEVVLPMINQVYQLVAPRQFEVTYNNVDIYSDYVLVRPLYMSICAADQRYYTGSRDENVLSQKLPMSLIHEGVGEVVFDSKGVFNKGTKVVMVPNTPTEKDDVIAENYLKSSYFRSSGHDGFMQDFVLLNHDRAVPLPDDIDLSIISYTELVTVSLHAIRRFEKKSISNKNTFGIWGDGNLGYITAILLRKLYPESKIYVFGKTDYKLSHFSFVDDVFFINKIPEGLTFDHAFECVGGRGSQSAINQMIDYISPEGSIALLGVSEFPVEVNTRLVLEKGLTLIGSSRSGSKDFQDVVDLYIQYPDIVDKLALLKGQEFEIATINDLTEAFEADLSTSWGKTVLKWIM

SEQ ID NO: 5713 - protein, 385 aa, Staphylococcus aureus
IVRKYKELRKYFRKQSFNTRQFIFKAIFNTTKFFHLKKGNTVLFTSDSRPTMSGNFEYIYNEMLRQNLDKKYDIHTVFKANITDRRGIIDKFRLPYLLGKADYIFVDDFHPLIYTVRFRRSQEVIQVWHAVGAFKTVGFSRTGKKGGPFIDSLNHRSYTKAYVSSETDIPFYAEAFGIKEKNVVPTGVPRTDVLFDEAYATQIKQEMEDELPIIKGKKVILFAPTFRGSGHGTAHYPFFKIDFERLARYCEKNNAVVLFKMHPFVKNRLNIADKHKQYFVDVSDFREVNDILFITDLLISDYSSLIYEYAVFKKPMIFYAFDLEDYITTRDFYEPYESFVPGKIVQSFDALMDALDNEDYEGEKVIPFLDKHFKYQDGRSSERLV

SEQ ID NO: 5714 - protein, 358 aa, Staphylococcus aureus
FSVIVPTYNSEKYITELLNSLAKQDFPKTEFEVVVVDDCSTDQTLQIVEKYRNKLNLKVSQLETNSGGPGKPRNVALKQAEGEFVLFVDSDDYINKETLKDAAAFIDEHHSDVLLIKMKGVNGRGVPQSMFKETAPEVTLLNSRIIYTLSPTKIYRTALLKDNDIYFPEELKSAEDQLFTMKAYLNANRISVLSDKAYYYATKREGEHMSSAYVSPEDFYEVMRLIAVEILNADLEEAHKDQILAEFLNRHFSFSRTNGFSLKVKLEEQPQWINALGDFIQAVPERVDALVMSKLRPLLHYARAKDIDNYRTVEESYRQGQYYRFDIVDGKLNIQFNEGEPYFEGIDIAKPKVKMTAF

SEQ ID NO: 5715 - protein, 224 aa, Staphylococcus aureus
MINKNDIVADVVTDYPKAADIFRSVGIDFCCGGQVSIEAASLEKKNVDLNELLQRLNDIEQTNTPGSLNPKFLNVSSLIQYIQAAYHEPLREEFKNLTPYVMKLSKVHGPNHPYLVELKETYDTFKNGMLEHMQKEDDVDFPKLIKYEQGEVVDDINTVIDDLVSDHIATGQLLVKMSDLTSSYEPPIEACGTWRLVYQRLKALEVLTHEHVHLENHVLFKKVS

SEQ ID NO: 5716 - protein, 584 aa, Staphylococcus aureus
VLSLTMLLLERVGLIIILAYVLMNIPYFKNLMNRRRTWKARWQLCIIFSLFALMSNLTGIVIDHQHSLSGSVYFRLDDDVSLANTRVLTIGVAGLVGGPFVGLFVGVISGIFRVYMGGADAQVYLISSIFIGIIAGYFGLQAQRRKRYPSIAKSAVIGIVMEMIQMLSILTFSHDKAYAVDLISLIALPMIIVNSVGTAIFMSIIISTLKQEEQMKAVQTHDVLQLMNQTLPYFKEGLNRESAQQIAMIIKNLMKVSAVAITSKNEILSHVGAGSDHHIPTNEILTSLSKDVLKSGKLKEVHTKEEIGCSHPNCPLRAAIVIPLEMHGSIVGTLKMYFTNPNDLTFVERQLAEGLANIFSSQIELGEAETQSKLLKDAEIKSLQAQVSPHFFFNSINTISALVRINSEKARELLLELSYFFRANLQGSKQHTITLDKELSQVRAYLSLEQARYPGRFNININVEDKYRDVLVPPFLIQILVENAIKHAFTNRKQGNDIDVSVIKETATHVRIIVQDNGQGISKDKMHLLGETSVESESGTGSALENLNLRLKGLFGKSAALQFESTSSGTTFWCVLPYERQEEE

SEQ ID NO: 5717 - protein, 246 aa, Staphylococcus aureus
MKALIIDDEPLARNELTYLLNEIGGFEEINEAENVKETLEALLINQYDIIFLDVNLMDENGIELGAKIQKMKEPPAIIFATAHDQYAVQAFELNATDYILKPFGQKRIEQAVNKVRATKAKDDNSANAIANDMSANFDQSLPVEIDDKIHMLKQQNIIGIGTHNGITTIHTTNHKYETTEPLNRYEKRLNPTYFIRIHRSYIINTKHIKEVQQWFNYTYMVILTNGVKMQVGRSFMKDFKASIGLL

SEQ ID NO: 5718 - protein, 142 aa, Staphylococcus aureus
IAGRRILLKEVRDSIFREKMVGEGLAIKAHEESKVIAPFNGLVSMIVPTKHAVGIQSEDGVDIVIHIGVNTVDLEGKGFKCFVKQNDRVEAGQTLLQFDQQYIQEQGYNSDVIVVISNSADLGKVELTMNEIITTEDVIFKI

SEQ ID NO: 5719 - protein, 478 aa, Staphylococcus aureus
MTKLPQNFMWGGALAANQFEGGYDKGGKGLSVIDVMTSGAHGKARQITESIDPNHYYPNHEGIDFYHRYKEDIALFKEMGLKCLRTSIAWTRIFPNGDEDVPNEEGLAFYDRIFDELIAQGIEPVVTLSHFEMPLHLAKHYGGFRNREVVDYFVHFARVVFERYKDKVTYWMTFNEINNQMDTSNPIFLWTNSGVALTENDNPEEFLYQVAHHELLASALAVRLGKEINPKFKIGTMISHVPIYPYSCHPKDMMEAQIANRLRFFFPDVQVRGYYPSYAKKMLARKGYDFGWQEGDDSILQQGTVDYIGFSYYMSTAVKHDVDTTVENNIVNGGLNHSVENPHIATSDWGWAIDPDGLRYTLNVLYDRYQLPLFIVENGFGAVDEVVDGHIHDDYRIEYLKAHITAAIEAVDQDGVDLIGYTPWGIIDIVSFTTGEMKKRYGLIYVDRDNDGHGTMERLKKDSFYWYQQVIASNGDKL

SEQ ID NO: 5720 - protein, 327 aa, Staphylococcus aureus
MCTGFTIQTLNNQVLLGRTMDYDYPLDGSPAVTPRNYRWTSRTGTTGQTQYGFIGTGTDMEGFIYGDGVNEHGVAISTQYFRGYSSYGSTHKADAMNITQNEIVTWILGYTTSIEDMKQQASQIHVVAVYLNDIGEVPPLHYHVSDATGHSVEVSFKEGEVIIKDNPIGVLTNHPDLDWHYSNLRQYINISPYPATANLLEGETIEPLGNEAGTFGLPGGFTSTERFVRMAFMKANIAQNNDKEMDLMNAFYLLDAVNIPIGIVRPHDADNHYTMYQTVINLTTRTLYIKYYGSNEIVALKLTDDLINRKDMTIFKPEKHITIKKLN

SEQ ID NO: 5721 - protein, 168 aa, Staphylococcus aureus
VPRPIGWISTVSKDGKDNLAPYSQYQNLTWDPPMVMFAANQSVLGDHERKDTVKNAEETGWFVWNMATYDLREAVNLSSKALPPEEDEFEYAGVTKEACIEAPGYRVKESPVHFECEYVQTIRIPTGDPVSTVDIVIGRVAQVHIDDKVILDNGKLDIKSIKPIARLG

SEQ ID NO: 5722 - protein, 517 aa, Staphylococcus aureus
MKYFIPAWYDDQRWWQDTTVPYYQTQNKTEFDDMISLMGMHLENNLDYQLIVLNHAPNIRTFLHRYDLYETKYWSVFDEIQGFSHHAPQAINYHHLKWPDDVEFVYTPYLLKCVTSEQTYTNIYFSQEGYSIWFEEFERDQLQRRYIFDDRGYLSAIRYFDNQGEASYQEYLTINGDCVLYENFKNGRVTVSKRYQHHYQQTEYNNMAQLIEEKFQAMIAQQIHEDDHVIVASDARHNRQIANHIPAKLLSYSFFKNRNETVSDEEYQSIVKNAHLIVDSVQLERDLIRHQEKYQRENTMIRITPFETRQSPNISSQLMETFIGVWIDGMSDADLQQMMQRLVDYIAQEDNYRLILLTRHQNDIPMWLRECIASVNEEYQAKQNADVNVSALMTPEDQDDIIAVKTIHAEHDVVEALRTLRLVIDMSKEPDLYLQISAISAGIPQINGQQTDYVSDYDNGRIINTVDELDDALNYYLFYLKNWNYAYAYSLKLIDAYASKNIINQLDELIEGENDAT

SEQ ID NO: 5723 - protein, 523 aa, Staphylococcus aureus
MMPRKFRVLQIGGDDLEPIFQHKKGVSWDYFDIGLFEFDSGYVEAIEAIVEAEGRFDFIYIQAPYSETLTNLLQMISEPYNTYVDESFWSVEYEQDENVQKYVVQPLHYRNIEERNNKLEAVSFSGQYGDKVSPKLALVHPNFKGDVVYQGNSELTLSGEFGKEFKPIASWQNNLVYDKDKVIQIWPEFDIDGAVELQYTFRLIQTGADGALIEQIILTDEMLDSPLEIPTKPFDAYISVTVKARGNGTVHLGPIHKRWSRLDMGQFLLGGSRFVDSQRQEFIYYFHPGDMKPPLNVYFSGYRTAEGFEGYYMMKRMNAPFLLIGDPRVEGGSFYIGSSEYEQGIINVIDETLEKLNFKSHELILSGLSMGSFGALYYGAQLNPQAIIVGKPLVNIGTIAEHMRLLRPEEFGTALDVLVSNEGDTSQASIQALNQKFWQTFQKKSLSQTIFAIAYMQHDDYDPHAFQELLPVLTAHQARVMNRSIPGRHNDDSPTIASWFVNFYNIILEDKFGRVQHAEKQNI

SEQ ID NO: 5724 - protein, 792 aa, Staphylococcus aureus
  VARIANT (1)...(792): Xaa = Any Amino Acid
INXMLRXTNXDXSRLEKIVKRINTWSDEVKSYSDDALKQKTIEFKERLASGVDTLDTLLPEAYAVAREASWRVLGMYPKEVQLIGAIVLHEGNIAEMQTGEGKTLTATMPLYLNALSGKGTYLITTNDYLAKRDFEEMQPLYEWLGLTSSLGFVDIVDYEYQKGEKRNIYEHDIIYTTNGRLGFDYLIDNLADSAEGKFLPQLNYGIIDEVDSIILDAAQTPLVISGAPRLQSNLFHIVKEFVDTLIEDVHFKMKKTKKEIWLLNQGIEAAQSYFNVEDLYSEKAMVLVRNINLALRAQYLFESNVDYFVYNGDIVLIDRITGRMLPGTKLQAGLHQAIEAKEGMEVSTDKSVMATITFQNLFKLFGSFSGMTATGKLGESEFFDLYSKIVVQVPTDKAIQRIDEPDKVFRSVDEKNIAMIHDIVELHETGRPVLLITRTAEAAEYFSKVLFQMDIPNNLLIAQNVAKEAQMIAEAGQIGSMTVATSMAGRGTDIKLGEGVEALGGLAVIIHEHMENSRVDRQLRGRSGRQGDPGSSCIYISLDDYLVKRWSDSNLAENNQLYSLDAQRLSQSSLFNRKVKQIVVKAQRISEEQGVKAREMANEFEKSISIQRDLVYEERNRVLEIDDAENRDFKALAKDVFEMFVNEEKVLTKSRVVEYIYQNLSFQFNKDVACVNFKDKQAVVTFLLEQFEKQVALNRKNMQSAYYYNIFVQKVFLKAIDSCWLEQVDYLQQLKASVNQRQNGQRNAIFEYHRVALDSFEVMTRNIKKRMVKNICQSMITFDKEGMPVIH

SEQ ID NO: 5725 - protein, 175 aa, Staphylococcus aureus
MNKTSKVCVAATLALGTLIGVTVVENSAPTSKQAQAAITPYYTYNGYIGNNANFILDKNFINAIKYDNVKFNGIKLAKTNTIKKVEKYDQTFKGVSAKGNEASQLQFVVKNNISLKDIQKAYGKDLKKENGKTKEADSGIFYYQNAKKTLGIWFVVDHNRVVEVTVGHTPYKTSK

SEQ ID NO: 5726 - protein, 310 aa, Staphylococcus aureus
KEKIVIALGGNAIQTKEATAEAQQTAIRRAMQNLKPLFDSPARIVISHGNGPQIGSLLIQQAKSNSDTTPAMPLDTCGAMSQGMIGYWLETEINRILTEMNSDRTVGTIVTRVEVDKNDPRFDNPTKPIGPFYTKEEVEELQKEQPDSVFKEDAGRGYRKVVASPLPQSILEHQLIRTLADGKNIVIACGGGGIPVIKKENTYEGVEAVIDKDFASEKLATLIEADTLMILTNVENVFINFNEPNQQQIDDIDVATLKKYAAQGKFAEGSMLPKIEAAIRFVESGENKKVIITNLEQAYEALIGNKGTHI

SEQ ID NO: 5727 - protein, 338 aa, Staphylococcus aureus
KDILILAVETSCDETSVSVIKNDRDILSNTVLSQIESHKRFGGVVPEVASRHHVEGITTTINEALVDADVSMEDIDAIAVTEGPGLIGALLIGVNAAKALAFAYDKPLIPVHHIAGHIYANHIEEPLTFPLIALIVSGGHTELVYMKDHLTFEVIGETRDDAVGEAYDKVARTIGLNYPGGPQVDRLAAEGEDTYSFPRVWLDKDSYDFSFSGLKSAVINQLHNQRQKNIPIIEANVATSFQNSVVEVLTFKAIQACKEYGVQRLIVAGGVASNKGLRQSLADQCKVNDIQLTIPSPKLCTDNAAMIGVAGHYLYQQGRFADLGLNGHSNIDLEEYSA

SEQ ID NO: 5728 - protein, 554 aa, Staphylococcus aureus
SGSEVLVEALLKENVDYLFGYPGGAVLPLYDTFYDGKIKHILARHEQGAVHAAEGYARVSGKTGVVVVTSGPGATNVMTGITDAHCDSLPLVVFTGQVATPGIGKDAFQEADILSMTSPITKQNYQVKRVEDIPKIVHEAFHVANSGRKGPVVIDFPKDMGVLATNVDLCDEINIPGYEVVTEPENKDIDTFISLLKEAKKPVVLAGAGINQSKSNQLLTQFVNKHQIPTVTTLLGLGAVPYEDTLFLGMGGMHGSYASNMALTECDLLINLGSHFDDRLASKPDAFAPNAKIVHVDIDPSEINKVIHVDLGIIADCKRFLECLNDKNVETVEHSDWVKHCQNNKQKHPFKLGEEDQVFCKPQQTIEYIGKITNGEAIVTTDVGQHQMWAAQFYPFKNHGQWVTSGGLGTMGFGIPSSIGAKLADPDKTVVCFVGDGGFQMTNQEMALLPEYGLDVKIVLINNGTLGMVKQWQDKFFNQRFSHSVFNGQPDFMKMAEAYGVKGFLIDKPEQLEEQLDAAFAYQGPALIEVRISPTEAVNPMVPSGKSNHEMEGL

SEQ ID NO: 5729 - protein, 328 aa, Staphylococcus aureus
MTTVYYDQDVKTDALQGKKIAVVGYGSQGHAHAQNLKDNGYDVVIGIRPGRSFDKAKEDGFDVFPVAEAVKQADVIMVLLPDEIQGDVYKNEIEPNLEKHNALAFAHGFNIHFGVIQPPADVDVFLVAPKGPGHLVRRTFVEGSAVPSLFGIQQDASGQARNIALSYAKGIGATRAGVIETTFKEETETDLFGEQAVLCGGVSKLIQSGFETLVEAGYQPELAYFEVLHEMKLIVDLMYEGGMENVRYSISNTAEFGDYVSGPRVITPDVKENMKAVLTDIQNGNFSNRFIEDNKNGFKEFYKLREEQHGHQIEKVGRELREMMPFIK

SEQ ID NO: 5730 - protein, 644 aa, Staphylococcus aureus
  VARIANT (1)...(644): Xaa = Any Amino Acid
MGQTLFDKVWNRHVLYGKLGEPQLLYIDLHLIHEVTSPQAFEGLRLQNRKLRRPDLTFATLDHNVPTIDIFNIKDEIANKQITTLQKNAIDFGVHIFDMGSDEQGIVHMVGPETGLTQPGKTIVCGDSHTATHGAFGAIAFGIGTSEVEHVFATQTLWQTKPKNLKIDINGTLPTGVYAKDIILHLIKTYGVDFGTGYALEFTGETIKNLSMDGRMTICNMAIEGGAKYGIIQPDDITFEYVKGRPFADNFAKSVDKWRELYSDDDAIFDRVIELDVSTLEPQVTWGTNPEMGVNFSEPFPEISDINDQRAYDYMGLEPGQKAEDIDLGYVFLGSCTNARLSDLIEASHIVKGNKVHPNITAIVVPGSRTVKREAEKLGLDTIFKNAGFEWREPGCSMCLGMNPDQVPEGVHCASTSNRNFEGRQGKGARTHLVSPAMAAAAAIHGKFVDVRKVVVXMAAIKPITTYKGKIVPLFNDNIDTDQIIPKVHLKRISKSGFGPFAFDEWRYLPDGSDNPDFNPNKPQYKGASILITGDNFGCGSSREHAAWALKDYGFHIIIAGSFSDIFYMNCTKNAMLPIVLEKNAREHLAKYVEIEVDLPNQTVSSPDKSFHFEIDETWKNKLVNGLDDIAITLQYESLIEKYE

SEQ ID NO: 5731 - protein, 172 aa, Staphylococcus aureus
IAKDQTQINDKIRAKELRLIGQDGEQIGVKSKREALEMAERVDLDLVVVAPNAKPPVARIMDYGKFKFEQQKKEKEMKKKQKIINVKEIRLSPTIEEHDFQTKLKNGRKFLTKGDKCKVSIRFRGRAITHKEIGQRVLEKYADECKDIATVEQKPKMDGRQMFIMLAPTAEK

SEQ ID NO: 5732 - protein, 66 aa, Staphylococcus aureus
MPKMKTHRGAAKRVKRTASGQLKRSRAFTSHLFANKSTKQKRQLRKARLVSKSDMKRVKQLLAYKK

SEQ ID NO: 5733 - protein, 446 aa, Staphylococcus aureus
MPKRTFTKDDIRKFAEEENVRYLRLQFTDILGTIKNVEVPVSQLEKVLDNEMMFDGSSIEGFVRIEESDMYLHPDLDTWVIFPWTAGQGKVARLICDVYKTDGTPFEGDPRANLKRVLKEMEDLGFTDFNLGPEPEFFLFKLDEKGEPTLELNDDGGYFDLAPTDLGENCRRDIVLELEDMGFDIEASHHEVAPGQHEIDFKYADAVTACDNIQTFKLVVKTIARKHNLHATFMPKPLFGVNGSGMHFNVSLFKGKENAFFDPNTEMGLTETAYQFTAGVLKNARGFTAVCNPLVNSYKRLVPGYEAPCYIAWSGKNRSPLIRVPSSRGLSTRIEVRSVDPAANPYMALAAILEAGLDGIKNKLKVPEPVNQNIYEMNREEREAVGIQDLPSTLYTALKAMRENEVIKKALGNHIYNQFINSKSIEWDYYRTQVSEWERDQYMKQY

SEQ ID NO: 5734 - protein, 639 aa, Staphylococcus aureus
EQINIQFPDGNKKAFDKGTTTEDIAQSISPGLRKKAVAGKFNGQLVDLTKPLETDGSIEIVTPGSEEALEVLRHSTAHLMAHAIKRLYGNVKFGVGPVIEGGFYYDFDIDQNISSDDFEQIEKTMKQIVNENMKIERKVVSRDEAKELFSNDEYKLELIDAIPEDENVTLYSQGDFTDLCRGVHVPSTAKIKEFKLLSTAGAYWRGDSNNKMLQRIYGTAFFDKKELKAHLQMLEERKERDHRKIGKELELFTNSQLVGAGLPLWLPNGATIRREIERYIVDKEVSMGYDHVYTPVLANVDLYKTSGHWDHYQEDMFPPMQLDETESMVLRPMNCPHHMMIYANKPHSYRELPIRIAELGTMHRYEASGAVSGLQRVRGMTLNDSHIFVRPDQIKEEFKRVVNMIIDVYKDFGFEDYSFRLSYRDPEDKEKYFDDDDMWNKAENMLKEAADELGLSYEEAIGEAAFYGPKLDVQVKTAMGKEETLSTAQLDFLLPERFDLTYIGQDGEHHRPVVIHRGVVSTMERFVAFLTEETKGAFPTWLAPKQVQIIPVNVDLHYDYARQLQDELKSQGVRVSIDERNEKMGYKIREAQMQKIPYQIVVGDKEVENNQVNVRQYGSQDQETVEKDEFIWNLVDEIR

SEQ ID NO: 5735 - protein, 520 aa, Staphylococcus aureus
  VARIANT (1)...(520): Xaa = Any Amino Acid
MNLKQEVESRKTFAIISHPDAGKTTLTEKLLYFSGAIREAGTVKGKKLVNLRQVTGMKVEQERGISVTSSVMQFDYDDYKINILDTPGHEDFSEDTYRTLMAVDSAVMVIDCAKGIEPQTLKLFKVCKMRGIPIFTFINKLDRVGKEPFELLDEIEETLNIETYPMNWPIGMGQSFFGIIDRKSKTIEPFRDEENILHLNDDFELEEDHAITNDSAFEQAIEELMLVEEAGEAFDNDALLSGDLTPVFFGSALANFGVQNFLNAYVDFAPMPNARQTKEEVEVSPFDDSFSGFIFKIQANMDPKHRDRIAFMRVVSGAFERGMMLLCNVLIKSKRSHVQRHLWQTIKKLXIMAVAGDIIGLYDTGNYQIGDTLVGGKQTYSFQDLPQFTPEIFMKVSAKNVMKQKHFHKGIEQLVQEGAIQYYKTLHTNQIILGAVGQLQFEVFEHRMKNEYNVDVVMEPVGRKIARWIENEDQITDKMNTSRSILVKDRYDDLVFLFENEFATRWFEEKFPEIKLYSLL

SEQ ID NO: 5736 - protein, 107 aa, Staphylococcus aureus
  VARIANT (1)...(107): Xaa = Any Amino Acid
LVKTLRMNYLFDFYQSLLTNKQRNYLELFYLEDYSLSEIADTFNVSRQAVYDNIRRTGDLVEDYEKKLELYQKFEQRREIYDEMKQHLSNPEQIQRYIQQLEDLEXI

SEQ ID NO: 5737 - protein, 314 aa, Staphylococcus aureus
  VARIANT (1)...(314): Xaa = Any Amino Acid
DSLLDSVGQTPMVQLHQLFPKHEVFAKLEYMNPGGSMKDRPAKYIIEHGIKHGLITENTHLIESTSGNLGIALAMIAKIKGLKLTCVVDPKISPTNLKIIKSYGANVEMVEEPDAHGGYLMTRIAKVQELLATIDDAYWINQYANELNWQSHYHGAGTEIVETIKQPIDYFVAPVSTTGSIMGMSRKIKEVHPNAQIIAVDAKGSVIFGDKPINRELPGIGASRVPRNIEXIRNXSSDPCRXLSICFGLSKTDXLXRHICGGSTGSIIAAIEQLITSIEEGATIVTILPDRGDRYLDLVYSDTWLEKMKSRQGV

SEQ ID NO: 5738 - protein, 272 aa, Staphylococcus aureus
IVKEKHIKWDKIFYGDDWVNNVVETIRTKDILQSVYLKRYLLRAMMAGFIIGIITVFVLSVKATHEPDLPPGIVNMASAITFSFALVLILFTNSELLTSNFMYFTVGLYYKVIKPTRVLKIFLLCFAGNILGAAILFSFMRFSNVMTPDMLNQLSAVIEHKTLSTGFVSILMKAIFANFFINISLVIAMQIDDVLAKMFVMMFGVTIFAFMGYEHVVYNSCLFMGGLIYQVDTLHFIPAISNIAAAFIGNYIGGGLIIGLFYAYLNDHHQFY

SEQ ID NO: 5739 - protein, 67 aa, Staphylococcus aureus
VSGPIPLPTEKSVYTIIRAVHKYKDSREQFEQRTHKRLIDIVNPTPKTVDALMGLNLPSGVDIEIKL

SEQ ID NO: 5740 - protein, 87 aa, Staphylococcus aureus
ARDILKRPVITEKSSEAMAEDKYTFDVDTRVNKTQVKMAVEEIFNVKVASVNIMNYKPKKKRMGRYQGYTNKRRKAIVTLKEGSIDL

SEQ ID NO: 5741 - protein, 50 aa, Staphylococcus aureus
MEVFCMVKRTYQPNKRKHSKVHGFRKRMSTKNGRKVLARRRRKGRKVLSA

SEQ ID NO: 5742 - protein, 770 aa, Staphylococcus aureus
QVTNQVSVEDTYKARYDVTILINGLPLVQVELKRRGIDINEAFNQVKRYRKQNYTGLFRYIQMFIISNGVETRYFSNNDSELLKSHMFYWSDKQNNRINTLQSFAESFMRPCQLAKMISRYMIINETDRILMAMRPYQVYAVEALIQQATETGNNGYIWHTTGSGKTLTSFKASQILSQQDDIKKVIFLVDRKDLDSQTEEEFNKFAKGAVDKTFNTSQLVRQLNDKSLPLIVTTIQKMAKAIQGNAHLLEQYKTNKVVFIIDECHRSQFGDMHRLVKQHFKNAQYFGFTGTPRFPENSSQDGRTTADIFGRCLHTYLIRDAIHDGNVLGFSVDYINTFKNKALKAEDNSMVEAIDTEEVWLADKRVELVTRHITNNHDKYTRNRQYSSIFTVQSIHALIKYYETFKRLNKKLEQPLTVAGIFTFKPNEDDRDGEVPYHSREKLEKMISDYNKKFETNFSTDTTNEYFNHISKNVKKGVKDSKIDILIVVNMFLTGFDSKVLNTLYVDKNLMYHDLIQAYSRTNRVEKESKPFGKIVNYRDLKKETDDALRVFSQTNDTDTILMRSYEEYKKEFMDAYRELKMIVPTPHMVDDIQDEEELKRFVEAYRLLAKIILRLKAFDEFEFTIDEIGMDEQENEDYKSKYLAVYDQVKRATAEKNKVSILNDIDFEIEMMRNDTINVNYIMNILRQIDLEDKAEQRRNQEQIRRILDHADDPTLRLKRDLIREFIDNVVPSLNKDDDIDQEYVNFESIKKEAEFKGFAGERAIDEQ

SEQ ID NO: 5743 - protein, 290 aa, Staphylococcus aureus
ISAKLVKELREKTGAGMMDCKKALTETDGDIDKAIDYLREKGIAKAAKKADRIAAEGLVHVETKGNDAVIVEINSETDLVARNEGFQELVKEIANQVLDTKAETVEALMETTLPNGKSVDERIKEAISTIGEKLSVRRFAIRTKTDNDAFGAYLHMGGRIGVLTVVEGSTDEEAARDVAMHIAAINPKYVSSEQVSEEEINHEREVLKQQALNEGKPENIVEKMVEGRLRKYLQEICAVDQDFVKNPDVTVEAFLKTKGGKLVDFVRYEVGEGMEKREENFADEVKGQMK

SEQ ID NO: 5744 - protein, 167 aa, Staphylococcus aureus
MLNRVVLVGRLTKDPEYRTTPSGVSVATFTLAVNRTFTNAQGEREADFINCVVFRRQADNVNNYLSKGSLAGVDGRLQSRNYENQEGRRVFVTEVVCDSVQFLEPKNAQQNGGQRQQNEFQDYGQGFGGQQSGQNNSYNNSSNTKQSDNPFANANGPIDISDDDLPF

SEQ ID NO: 5745 - protein, 280 aa, Staphylococcus aureus
  VARIANT (1)...(280): Xaa = Any Amino Acid
VKAIFLDMDGTILHENNQASTYTKDVINRLIEKGYKVFLATGRSHSGIHQLVPQDFAGNGIISSNGTIGEVDGEIIFKHGLSLSQVQQIINLAKRQQIYYEVFPFEGNRVSLKRRXNMDARYDSXSRSYXWRKSXXVVFKTRCACGKIDWVTKFPEGEYSKIYLFSSNLEKITAFRDELKQNHVQLQISVSNSSRFNAETMAYQTDKGTGIKEMIEHFGINQEETLVIGDSDNDRAMFEFGHYTVAMKNARPEIQALTSDVTAYTNEEDGAAKYLAKHFL

SEQ ID NO: 5746 - protein, 411 aa, Staphylococcus aureus
QKFLSFLGPGLLVAVGYMDPGNWITSMQGGAQYGYTLLFVILISSLSAMLLQSMTVRLGIATGMDLAQMTRHYLSRTYCYIFWIIAELAIIATDIAEVIGSAIALNLLFNIPLIVGALITVLDVFLLLFIMKYGFRKIEAIVGTLIFTVLFIFIFEVYISSPQLNAVLNGFIPHSEIITNNGILYIALGIIGATIMPHNLYLHSSIVQSRTYSRHNNEEKAQAIKFATIDSNIQLSIAFVVNCLLLVLGASLFFNSNADDLGGFYDLYHALKTEPVLGATMGAIMSTLFAVALLASGQNSTITGTLAGQIVMDCFLRLHIPNWLRRLITRSLAVIPVIVCLIIFRGNAAKIEQLLVFSQVFLSIALPFCLIPLQLATSNKDLMGPFYNKTWVNIISWTLIIILSILNVYLI

SEQ ID NO: 5747 - protein, 94 aa, Staphylococcus aureus
  VARIANT (1)...(94): Xaa = Any Amino Acid
VNYTGSSSAWVEHLVWDQGVAGSNPVFPIYCNYYGGLAQLGERLLCTQRSAVRSRXSPPYYLQTIXGGVAQLARAYGSYPXGRGFDPLPPPLFI

SEQ ID NO: 5748 - protein, 402 aa, Staphylococcus aureus
MKNQLIDRLTRYTTIDTQSDPKSTTTPSTEKQWDLLHLLDKELQQLGLPTDLDENGYLFATLESNIDADVPTVGFLAHVDTSPDFNASNVKPQIIENYDGKPYKLGNTKRVLDPKVFPELNSLVGHTLMVTDGTSLLGADDKAGIVEIMEAICYLKEHPEIKHGTIRIGFTPDEEIGRGPHKFDVDRFNADFAYTMDGSQYGELQYESFNAAEAVITCHGVNVHPGSAKNAMVNAIRLGEQFDSLLPDSEVPERTEGYEGFYHLMNFEGTVEKATLQYIIRDHDKKQFELRKKRILEIRDDINAHFDNYPVKVDISDQYFNMAEKILPLPHIIDIPKRVFAKLDIPANTEPIRGGTDGSQLSFMGLPTPNIFTGCGNFHGPYEYASIDVMEKAVQVIIGIVE

SEQ ID NO: 5749 - protein, 350 aa, Staphylococcus aureus
MPLFKVILPMINQVYQLVAPRQFDVTYNNVDIYGNHVIVRPLYLSICAADQRYYTGRRDENVLRKKLPMSLVHEAVGEVVFDSKGVFEKGTKVVMVPNTPTEQHHIIAENYLASSYFRSSGYDGFMQDYVVMAHDRIVPLPNDIDLSTISYTELVSVSYHAIQRFERKSIPLKTSFGIWGDGNLGYITAILLRKLYPEAKIYVFGKTDYKLSHFSFVDDIFTVNQIPDDLKIDHAFECVGGKGSQVALQQIVEHISPEGSIALLGVSELPVEVNTRLVLEKGLTLIGSSRSGSKDFEQVVDLYRKYPDIVEKLALLKGHEINVCTMQDIVQAFEMDLSTSWGKTVLKWTI

SEQ ID NO: 5750 - protein, 507 aa, Staphylococcus aureus
LVTFLNEVVWSKPLVYGLLITGVLFTLRMRFFQVRHFKEMIRLMFQGEKSPNGISSFQAIAMSLAGRVGTGNIVGVSTAIFIGGPGAVFWMWITAFLGASSAFIESTLGQIFKRVENNEYRGGPAYYIEYGIGGKFGKIYGIIFAIVTIISVGLLLPGVQSNAIASSMHNAIHVTQWLMGGIVVVILGLIIFGGVRSIANVATAIVPFMAIIYILMAVIIICINIQEVPALFALIFKSAFGLQSAFGGIVGAMIEIGVKRGLYSNEADQGTGPHAAAAAEVSHPSKQGLVQAFSVYIDTLFVCTATALIILISGTYNVTDGTLNANGTPHLIKDGGIYVENATGKDYSGTAMYAQAGIDKAFHGSGYQFDPTFSGVGSYFIAFALFFFAFTTILSYYYITETNVAYLTRNQNNQVSSVFINIARVIILFATFYGAVKTADVAWAFGDLGVGLMAWLNIIAIWILHKPAVNALKDYEIQKKRLGNGYNAVYQPDPNKLPNAVFWLKTY

SEQ ID NO: 5751 - protein, 206 aa, Staphylococcus aureus
MKKWTNRLMTIAGVVLILVAAYLFAKPHIDNYLHDKDKDEKIEQYDKNVKEQASKDKKQQAKPQIPKDKSKVAGYIEIPDADIKEPVYPGPATPEQLNRGVSFAEENESLDDQNISIAGHTFIDRPNYQFTNLKAAKKGSMVYFKVGNETRKYKMTSIRDVKPTDVEVLDEQKGKDKQLTLITCDDYNEKTGVWETRKIFVATEVK

SEQ ID NO: 5752 - protein, 117 aa, Staphylococcus aureus
MPRVKGGTVTRARRKKTIKLAKGYFGSKHTLYKVAKQQVMKSGQYAFRDRRQRKRDFRKLWITRINAAARQHEMSYSRLMNGLKKAGIDINRKMLSEIAISDEKAFAQLVTKAKDAL

SEQ ID NO: 5753 - protein, 350 aa, Staphylococcus aureus
MKLAIKEIMFYKFRYILITLIILLLSIMVLFISGLAQGLGRENISLFEHFDNDEYVVQKMKEPQIEKSQLSDTQQNQIKKVIHQEPHKMNVQTLKLSNKEQDVITMNDVKQQRLQLKKGDYPKNAHEVAINDKLAADNIRVGDRLHFKNNSTSYRVSGILNDTMYAHSSIVLLNDNGFNALNKVNTAFYPVKNLTQQQRDALNKINDVQVVSEKDLTGNIASYQAEQAPLNMMIVSLFAITAIVLSAFFYVMTIQKISQIGILKAIGIKTRHLLSALVLQILTLTIIGVGIAVIIIVGLSFMMPVTMPFYLTTQNILLMVGIFILVAILGASLSFIKLFKVDPIEAIGGA

SEQ ID NO: 5754 - protein, 122 aa, Staphylococcus aureus
IPSCEDYCALRINAGMSPKTREAAEKGLPNALFTVTLYDKDRLIGMGRVIGDGGTVFQIVDIAVLKSYQGQGYGSQIMEHIMKYIKNVSVESAYVSLIADYPADKLYAKFGFMPTEPDSGGM

SEQ ID NO: 5755 - protein, 209 aa, Staphylococcus aureus
MKRLVTGLLALSLFLAACGQDSDQQKDSNKEIDDKAKTEQQDKKTNDSSKDKKDNKDDSKDVNKDNKDNSANDNQQQSNSNATNNDQNQTNNNQSSNNQANNNQKSSYVAPYYGQNAAPIARQIYPFNGNKTQALQQLPNFQTALNAANNEANKFGSNNKVYNDYSIEEHNGNYKYVFSFKDPNANGKYSIVTVDYTGQAMVTDPNYQQ

SEQ ID NO: 5756 - protein, 169 aa, Staphylococcus aureus
MIRLGKMSDLDQILNLVEEAKELMKEHDNEQWDDQYPLLEHFEEDIAKDYLYVLEENDKIYGFIVVDQDQAEWYDDIDWPVNREGAFVIHRLTGSKEYKGAATELFNYVIDVVKARGAEVILTDTFALNKPAQGLFAKFGFHKVGEQLMEYPPYDKGEPFYAYYKNLKE

SEQ ID NO: 5757 - protein, 51 aa, Staphylococcus aureus
KATPGITGLSPPRVHIDGEVWHLDVGSSHPGAVVGPKGWAVRPLKRYASWV

SEQ ID NO: 5758 - protein, 209 aa, Staphylococcus aureus
  VARIANT (1)...(209): Xaa = Any Amino Acid
GSFRPVAGNLHLHRTMISPSLSLRQCPNRYAFRAGRNLPDKEFRYLRTVIVTAAVYWGFDSXLRRSXPLLLTFQHRAGVSPYTSPYGLAETCVFDKQSLGPIHCGSSGRXPXRAPLLPKLRGHFAEFLNESSLAHLRILILTTCVGLRYGHLFSIXRLFSAVXNQRLEDTMSSPHHSSALTSTGFAXYSALLLRRAIQSHASPILLRPP

SEQ ID NO: 5759 - protein, 318 aa, Staphylococcus aureus
MLTKEFAQRVELSEKQVRKIVQHLEERGYQLSKTEYRGREATDFKEEDIELFKDIADKVKQTNSYDLAFDELEKEKDFLQVIVKNDDKNLPTNQNVAQLVEDLRLEIQKMREERHLLGQMMNQVHQQQQELKELQNQLTTKINSNSESLKAIQTSQEAIQEAQASQAKVLAESTNKVESNAVTEDKADSKDSKVAGVNTSTDAKMDTKAENAGDGTATKVDKEDQISATEAIEKASVEQSKNDKAAETSSKEATVDAEAQHDAEQQVAEAHAEASKQATSNDSLEAKAENDSTASQSEMAEPKPQEEKKGFFARLFNL

SEQ ID NO: 5760 - protein, 231 aa, Staphylococcus aureus
MNAIELSNVSYSSDQFNLKNISFKVPQGFVTGFIGRNGAGKTTIIRLIMDLYQPQTGVIRVLEEDMALNPIELKNRIGFVYAENYFNERWTTKQLEKMIAPFYRTWDHQVFEFYLAKFELPINQSIKTFSTGMKMKLSLAVAFSHHAELYIFDEPTSGLDPLARNELLEIIQQELIDENKTIFMSTHIISDLEKIADYIIHLSDGEVILNGSKEQLLQRYQVVSGAIEDLD

SEQ ID NO: 5761 - protein, 341 aa, Staphylococcus aureus
AEVIIPNNTIDFKGERDDVRTRETNLGNAIADAMEAYGVKNFSKKTDFAVTNGGGIRASIAKGKVTHYDLISVLPFGNTIAQIDVKGSDVWTAFEHSLGAPTTQKDGKTVLTANGGLLHISDSIRVYYDMNKPSGKRINAIQILNKETGKFENIDLKRVYHVTMNDFTASGGDGYSMFGGPREEGISLDQVLASYLKTANLAKYDPTEPQRMLLGKPAVSEQPAKGQQSSKGSKSGKDAQPIGKDKVMNPAKQPAPSKVVLLPTHRGTDSSGREGSDRALEGTAVSSKSGKQLASMSAPKGSTHEKQLPKTGNDQSSSPAAMFVLVAGIGLIATVRRRKAS

SEQ ID NO: 5762 - protein, 617 aa, Staphylococcus aureus
  VARIANT (1)...(617): Xaa = Any Amino Acid
LEQIGRNLTQEARDGLLDPVIGRDKEIQETAEVLSRRTKNNPILVGEAGVGKTAIVEGLAQAIVEGNVPAAIKDKEIISIDISSLEAGTQYRGAFEENIQKLVEGVKSSQNAVLFFDEIHQIIGSGATGSDSGSKGLSDILKPALSRGXISIIGATTQDEYRNNIMKDAALTRRFNEVLVNEPSARDTVEILKGIREKFEAHHQVKLPDDVLKACVDLSIQYIPQRLLPDKAIDVLDITAAHLSAQSPAIDKVATEKRISELEHDKRKAVSAEEYKKADDIQNEIKSLQDKLENSNGEHTAVATVHDISDTIQRLTGIPVSQMDANDIERLKNISSRLRSKIIGQDKAVEMVSRAIRRNRAGFDDGNRPIGSFLFVGPTGVGKTELAKQLAIDLFGNKEALIRLDMSEYSDTTAVSKMIGTTAGYVGYDDNSNTLTEKVRRNPYSVILFDEIEKANPQILTLLLQVMDDGNLTDGQGNVINFKNTIIICTSNAGFGNGTDQEYDDIMQEMKKFFRPEFLNRFNGIVEFLHLDKESLQEIINLLLDDVQVTFDKKGITMNVSQDAKDWLIEEGYDEELGARPLRRIVEQQVRDKITDYYLDHTDVKHVDLDIEDNELV

SEQ ID NO: 5763 - protein, 234 aa, Staphylococcus aureus
TQVTNIELNVRDLDLMTTFYKNILGLSVKSSDDNTTVLSVGTGGHTLTLHLLEDGRQTSPREAGLFHIAFLLPTTEDLANFLYFVAQKNMGIGAGDHLVSEALYFNDPEGNGIEVYRDRPSSSWEWQNGKVKMDTLEVDSQTLLTHRTDEGWQGMPAKGMIGHLHLKTHDLDAAYQCYIEQLGFQHVSDFPRALFMSTNHYHHHIAANTWQSNQARQNNAQSYGLTHVDIYQPD

SEQ ID NO: 5764 - protein, 495 aa, Staphylococcus aureus
RFLNSVEKIGNKLPDPSVLFFLMCVGLAIMTWVISLFNVSVKHPGTHQTIYIKNIISHDGFTMIMNDTIKNFSEFPALGLVLAVMIGIGVAEKTGYFDKLMISVVNRAPRFLILPTIILIGILGSTAGDAATIILPPLAAMLFIKIGYHPIAGLTMAYASAVGGFAANIVVGMQDVLVYSFTEPATRIVSDSIKTNVAMNWYFIAASVVVLLPTILLVTTKLIIPRLGQYDDRLMHDDHEETSSHITDKEAHALKWANISFIVTIILLIITAIPEHSFLRNAKTGSLLDDAPLINGVGLIILVVFLVPGLVYGILSKEIKNTKDLGKMFGDAVGSMGTFIVIVFFAAQLLAYLKWSNLGIIAAVKGAKLLEHQNGIVLILGIIVLSAMVNMLIGSASAKWGILGPIFVPMLILIGFHPAFTQVIYRVGDSITNPITPMMPYLPLLLTYAQKYDKRMKLGALLSSLMPYSIALSIVWTVFVIIWFLLGIPVGPGGP

SEQ ID NO: 5765 - protein, 56 aa, Staphylococcus aureus
MKMKERINMVESMLTFMLGPLRQITDFYMEHLLVSNSIVIAGYFATGIFKKKKVVN

SEQ ID NO: 5766 - protein, 134 aa, Staphylococcus aureus
  VARIANT (1)...(134): Xaa = Any Amino Acid
GTGISTCYPSPTPVGLSLGPDXPRADEPSSGNLSQSVDGILTRLFATHTGILTSKRSTCPYDHASTPLERSPTIVKGQSTASVICLAPVHFRRSVTRLVSYYALFKXWLLLSQHPSCLGNATSFSTXHIFWDLS

SEQ ID NO: 5767 - protein, 66 aa, Staphylococcus aureus
MTNEEKVLAIREKLNIVNQGLLDPEKYTNANEEELTDIYDFVQSRERLSPSEVTAIADALGQLRHD

SEQ ID NO: 5768 - protein, 130 aa, Staphylococcus aureus
ATYDQSTGVVTLTQDTTSQKGAITLGTRIDSNKSFHFSGKVNLGNKYEGHGNGGDGIGFAFSPGVLGETGLNGAAVGIGGLSNAFGFKLDTYHNTSTPNSSAKAKADPSNVAGGGAFGAFVTTDSYGVAS

SEQ ID NO: 5769 - protein, 893 aa, Staphylococcus aureus
  VARIANT (1)...(893): Xaa = Any Amino Acid
GNGMAGIRTIEEILERANDLYDITVIGKEPYPNYNRIMLSNILQNKMTVEETIMNPYEWYEEHGIELITNDPVIEVDRANQSVTTANGIEVSYDKLIFATGSKAFVIPVPGSTLPSVIGWRTIDDTEQMMNIAKTKKKAIVIGGGLLGLECARGLLDQGMEVTVLHLAEWLMEMQLDRKAGNMLKADLEKQGMKFEMQANTTEILGEDDVEGVKLADGREIPADLVVMSVGIRPYTEVAKESGLDVNRGIVVNDVMQTSDSNVYAVGECAEHNGKVYGLVAPLYEQGKVLADHLTNKETNGYKGSTTFTSLKVSGCDLYSAGQIVENAEIKGIEIFNSVDNNYKKIFLKDGNVVGAVLYGDIDDGSRFYNMMKKGESTEDYTLVSLLTKGGEEASLSIADMADDETICGCNGVDKGTIVNAITENGFTTVEEVTAKTKAGNSCGKCKPQIAQILQHTLGDDFVAAKPAGICGCTDLTRDQIVTQIRAKGLKTSKEVRHVLNFKNKGGCPKCRPAINYYLNMVYPHDHEDERESRFANERYHANIQNDGTFSVIPQMRGGVTDADQLIRLGEVAKKYHVPLVKVTGSQRVGLYGVKKEELPNIWEDLGMRSASAYGKKTRSVKSCVGKEFCRFGTQYTTRLGIRLEKTFEYIDTPHKFKMGVSGCPRSCVESGVKDFGIISVENGFQIYIGGNGGTEVEKAEFLTTVETEDEVIKLCGALMQYYRETGIYAERTAPWLRRLGFENVKEVLLNPERQNELFERIMDAKKAVEAEPWEAITSNAQARKIFEVEKVXYMETKEKIKVTTIDELTPLIGKKVIVKGKEVGLFLTESGKIHAIHNICPHKQGPLSEGTVSGEYVFCPLHDQKIDLNTGIVQEPDEGCVDVYEVEVTDGN

SEQ ID NO: 5770 - protein, 390 aa, Staphylococcus aureus
MLEFEQGFNHLATLKVIGVGGGGNNAVNRMIDHGMNNVEFIAINTDGQALNLSKAESKIQIGEKLTRGLGAGANPEIGKKAAEESREQIEDAIQGADMVFVTSGMGGGTGTGAAPVVAKIAKEMGALTVGVVTRPFSFEGRKRQTQAAAGVEAMKAAVDTLIVIPNDRLLDIVDKSTPMMEAFKEADNVLRQGVQGISDLIAVSGEVNLDFADVKTIMSNQGSALMGIGVSSGENRAVEAAKKAISSPLLETSIVGAQGVLMNITGGESLSLFEAQEAADIVQDAADEDVNMIFGTVINPELQDEIVVTVIATGFDDKPTSHGRKSGSTGFGTSVNTSSNATSKDESFTSNSSNAQATDSVSVRTHTTKEDDIPSFIRNREERRSRRTRR

SEQ ID NO: 5771 - protein, 321 aa, Staphylococcus aureus
MNLKLNRKKVISMIKNKILTATLAVGLIAPLANPFIEISKAENKIEDIGQGAEIIKRTQDITSKRLAITQNIQFDFVKDKKYNKDALVVKMQGFISSRTTYSDLKKYPYIKRMIWPFQYNISLKTKDSNVDLINYLPKNKIDSADVSQKLGYNIGGNFQSAPSIGGSGSFNYSKTISYNQKNYVTEVESQNSKGVKWGVKANSFVTPNGQVSAYDQYLFAQDPTGPAARDYFVPDNQLPPLIQSGFNPSFITTLSHERGKGDKSEFEITYGRNMDATYAYVTRHRLAVDRKHDAFKNRNVTVKYEVNWKTHEVKIKSITPK

SEQ ID NO: 5772 - protein, 86 aa, Staphylococcus aureus
MRLDKYLKVSRLIKRRTLAKEVSDQGRITINGNVAKAGSDMKVEDVLTIRFGQKLVTVKVTALNEHASKDNAKGMYEIIEERRLEE

SEQ ID NO: 5773 - protein, 267 aa, Staphylococcus aureus
MRYTILTKGDSKSNALKHKMMNYMRDFRMIEDSENPEIVISVGGDGTLLQAFHQYSHMLSKVAFVGVHTGHLGFYADWLPHEVEKLIIEINNSEFQVIEYPLLEIIMRYNDNGYETRYLALNEATMKTENGSTLVVDVNLRGKHFERFRGDGLCVSTPSGSTAYNKALGGALIHPSLEAMQITEIASINNRVFRTVGSPLVLPKHHTCLISPVNHDTIRMTIDHVSIKHKNVNSIQYRVANEKVRFARFRPFPFWKRVHDSFISSDE

SEQ ID NO: 5774 - protein, 257 aa, Staphylococcus aureus
  VARIANT (1)...(257): Xaa = Any Amino Acid
TVKTFLARHDFSKKTVSAIKNNGALIVNDEPVTVRXQLMTNDILEIHLPREIPSVNLIPYARKLEVLYEDAFIIIVTKPNNQNCTPSREHPHESLIEQVLYHCQEHGENINPHIVTRLDRNTTGIVIFAKYGHIHHLFSKVNLKKIYTCLVYGKTHTSGIIEANIRRSKDRIITREVASDGKYAKTSYEVINQNDKYSLCKVHLHTGRTHQIRVHFQHIGHPIVGDSLYDGFHDKIHGQVLQCTQIYFVHPINKNNI

SEQ ID NO: 5775 - protein, 91 aa, Staphylococcus aureus
MAVKIRLTRLGSKRNPFYRIVVADARSPRDGRIIEQIGTYNPTSANAPEIKVDEALTLKWLNDGAKPTDTVHNILSKEGIMKKFDEQKKAK

SEQ ID NO: 5776 - protein, 209 aa, Staphylococcus aureus
KMNSAKLIDHTLLKPESTRTQIDQIIDEAKAYHFKSVCVNPTHVKYAAERLADSEVLVCTVIGFPLGASTTATKAFETEDAIQNGADEIDMVINIGALKDGRFDDVQQDIEAVVKAAKGHTVKVIIETVLLDHDEIVKASELTKAAGADFVKTSTGFAGGGATAEDVKLMKDTVGADIEVKASGGVRNLEYFNKMVEAGATRIGAAQAF

SEQ ID NO: 5777 - protein, 686 aa, Staphylococcus aureus
MALLEAFLIFIFAVIISSVINNRFPQIPTAFIQIALGVVIFIIPIQVDFQFNSEVFMFAVIAPLLFVEGTHVSRTKLLEYRKPILLMSMALVFATVVGVGYFIHWIWPALPMPAAFAIAAILCPTDAVAVSAITRGKLLPKGSMTILEGESLLNDAAGIISFKIAVTALVTGTFSLFQAVEQFIISTILGVLIGAIIGFVVVRIRIDLTANKGLKDNNTLTFIQLLTPFVVYFLAEEVHASGIIAVVIAGLIHGLERDRLIRAQTELQMNYHQIWNTFSYALNGFVFVVLGFMIPTVVIDIFQTEPDNFSFLIVITILIAIAIYACRFVWVYFWYKDFYFPKNIQSYLDEEHDSHETPPSRVRYAFIMTMCGIHGTISLSMALTLPFIITKGQAFEYRNDLLFIASFMVLISLILAQIVLPLITPSAEDTTFKGMTYQSAKIFIVQKVIQHFKNESKKDKNDTNYRPVLNQYYGELLFLLNSEPDNQNTKELKRLEDIAQVIETSTLERLIDKGKATYQDINNYRNIVELTETHRTASFVEKFANFFKMLWLRLKAMKHYKALNKESKKQEFENSFKDVQKIMRIVNHNIILRLKEEQNSTNVLEVSLVINHYYDMSRSLKWRAQRRKERQENSNQIIPQAMFHNHKLEALYLQRHLLDELIRKNKINNIVAAQIRENINYNEIVL

SEQ ID NO: 5778 - protein, 553 aa, Staphylococcus aureus
MTDKKYTAADMVIDTLKNNGVEYVFGIPGAKIDYLFNALIDDGPELIVTRHEQNAAMMAQGIGRLTGKPGVVLVTSGPGVSNLTTGLLTATSEGDPVLALGGQVKRNDLLRLTHQSIDNAALLKYSSKYSEEVQDPESLSEVMTNAIRIATSGKNGASFISIPQDVISSPVESKAISLCQKPNLGVPSEQDINDVIEAIKNASFPVLLAGMRSSSAEETNAIRKLVERTNLPVVETFQGAGVISRELENHFFGRVGLFRNQVGDELLRKSDLVATIGYDPIEYEASNWNKELETQIINIDEVQAEITNYMQPKKELIGNIAKTIEMISEKVDEPFINQQHLDELEQLRTHIDEETGIKATHEEGILHPVEIIESMQKVLTDDTTVTVDVGSHYIWMARNFRSYNPRHLLFSNGMQTLGVALPWAISAALVRPNTQVVSVAGDGGFLFSSQDLETAVRKNLNIIQLIWNDGKYNMVEFQEEMKYKRSSGVDFGPVDFVKYAESFGAKGLRVTNQEELEAAIKEGYETDGPVLIDIPVNYKDNIKLSTNMLPDVF

SEQ ID NO: 5779 - protein, 841 aa, Staphylococcus aureus
MNNKKTATNRKGMIPNRLNKFSIRKYSVGTASILVGTTLIFGLSGHEAKAAEHTNGELNQSKNETTAPSENKTTKKVDSRQLKDNTQTATADQPKVTMSDSATVKETSSNMQSPQNATANQSTTKTSNVTTNDKSSTTYSNETDKSNLTQAKDVSTTPKTTTIKPRTLNRMAVNTVAAPQQGTNVNDKVHFSNIDIAIDKGHVNQTTGKTEFWATSSDVLKLKANYTIDDSVKEGDTFTFKYGQYFRPGSVRLPSQTQNLYNAQGNIIAKGIYDSTTNTTTYTFTNYVDQYTNVRGSFEQVAFAKRKNATTDKTAYKMEVTLGNDTYSEEIIVDYGNKKAQPLISSTNYINNEDLSRNMTAYVNQPKNTYTKQTFVTNLTGYKFNPNAKNFKIYEVTDQNQFVDSFTPDTSKLKDVTDQFDVIYSNDNKTATVDLMKGQTSSNKQYIIQQVAYPDNSSTDNGKIDYTLDTDKTKYSWSNSYSNVNGSSTANGDQKKYNLGDYVWEDTNKDGKQDANEKGIKGVYVILKDSNGKELDRTTTDENGKYQFTGLSNGTYSVEFSTPAGYTPTTANVGTDDAVDSDGLTTTGVIKDADNMTLDSGFYKTPKYSLGDYVWYDSNKDGKQDSTEKGIKGVKVTLQNEKGEVIGTTKTDENGKYRFDNLDSGKYKVIFEKPAGLTQTVTNTTEDDKDADGGEVDVTITDHDDFTLDNGYFEEDTSDSDSDSDSDSDSDSDSDSDSDSDSDSDSDSDSDSDSDSDSDSDSDSDSDSDSDSDSDSDSDSDAGKHTPVKPMSTTKDHHNKAKALPETGSENNGSNNATLFGGLFAALGSLLLFGRRKKQNK

SEQ ID NO: 5780 - protein, 414 aa, Staphylococcus aureus
  VARIANT (1)...(414): Xaa = Any Amino Acid
RTVIYKIVLHTFFNKSLFXGKXISEILFERSFKLSIMRLFTFILSIFIVGMVEMMVAGIMNLMSQDLHVSEAVVGQLVTMYALTFAICGPILVKLTNRFSSRPVLLWTLLIFIIGNGIIAVAPNFSILVVGRIISSAAAALIIVKVLAITAMLSAPKNRGKMIGLVYTGFSGANVFGVPIGTVIGDLVGWRYTFLFLIIVSIIVGFLMMIYLPKDQEIQRGPVNHETPSHENHVTSKILRPAEVAKYLIITFLVLIANSVTFVFINPLILSNGHDMSFVSLALLVNGIAGVIGTSLGGIFSDKITSKRWLMISVSIFIVMMLLMNLILPGSGLLLAGLFIWNIMQWSTNPAVQSGVIQHVEGDTSQVMSWNMSSLNAGIGVGGIIGGLVMTHVSVQAITYTSAIIGALGLIVVF

SEQ ID NO: 5781 - protein, 465 aa, Staphylococcus aureus
QQIGVIGLAVMGKNLAWNIESRGYSVSVFNRSSEKTDLMVEESKGKNIHPTYSLEEFVNSLEKPRKILLMVQAGKATDATIDSLLPLLDDGDILIDGGNTNYQDTIRRNKALAQSAINFIGMGVSGGEIGALTGPSLMPGGQEEAYNKVADILDAIAAKAKDGASCVTYIGPNGAGHYVKMVHNGIEYADMQLIAESYAMMKELLGMSHEDIAQTFKDWNAGELESYLIEITGDIFMKLDENKEALVEKILDTAGQKGTGKWTSINALELGIPLTIITESVFARFISSIKEERVNASKELNGPKASFDGDKKDFLEKIRKALYMSKICSYAQGFAQMRKASEDNEWNLKLGDLAMIWREGCIIRAQFLQKIKDAYDNNPGLQNLLLDPYFKNIVTEYQDALRDDVATGVQNGVPTPGFSSSINYYDSYRAADLPANLIQAQRDYFGAHTYERKDKEGVFHTQWIE

SEQ ID NO: 5782 - protein, 727 aa, Staphylococcus aureus
MTENKGSSQLKKNGNNGGKSNSKKNRNVKRTIIKIIGFMIIAFFVVLLLGILLFAYYAWKAPAFTEAKLQDPIPAKIYDKNGELVKTLDNGQRHEHVNLKDVPKSMKDAVLATEDNRFYEHGALDYKRLFGAIGKNLTGGFGSEGASTLTQQVVKDAFLSQHKSIGRKAQEAYLSYRLEQEYSKDDIFQVYLNKIYYSDGVTGIKAAAKYYFNKDLKDLNLAEEAYLAGLPQVPNNYNIYDHPKAAEDRKNTVLYLMHYHKRITDKQWEDAKKIDLKANLVNRTPEERQNIDTNQDSEYNSYVNFVKSELMNNKAFKDENLGNVLQSGIKIYTNMDKDVQKTLQNDVDNGSFYKNKDQQVGATILDSKTGGLVAISGGRDFKDVVNRNQATDPHPTGSSLKPFLAYGPAIENMKWATNHAIQDESSYQVDGSTFRNYDTKSHGTVSIYDALRQSFNIPALKAWQSVKQNAGNDAPKKFAAKLGLNYEGDIGPSEVLGGSASEFSPTQLASAFAAIANGGTYNNAHSIQKVVTRDGETIEYDHTSHKAMSDYTAYMLAEMLKGTFKPYGSAYGHGVSGVNMGAKTGTGTYGAETYSQYNLPDNAAKDVWINGFTPQYTMSVWMGFSKVKQYGENSFVGHSQQEYPQFLYENVMSKISSRDGEDFKRPSSVSGSIPSINVSGSQDNNTTNRSTHGGSDTSANSSGTAQSNNNTRSQQSRNSGGLTGIFN

SEQ ID NO: 5783 - protein, 325 aa, Staphylococcus aureus
MKMNKLVKSSVATSMALLLLSGTANAEGKITPVSVKKVDDKVTLYKTTATADSDKFKISQILTFNFIKDKSYDKDTLVLKATGNINSGFVKPNPNDYDFSKLYWGAKYNVSISSQSNDSVNVVDYAPKNQNEEFQVQNTLGYTFGGDISISNGLSGGLNGNTAFSETINYKQESYRTTLSRNTNYKNVGWGVEAHKIMNNGWGPYGRDSFHPTYGNELFLAGRQSSAYAGQNFIAQHQMPLLSRSNFNPEFLSVLSHRQDGAKKSKITVTYQREMDLYQIRWNGFYWAGANYKNFKTRTFKSTYEIDWENHKVKLLDTKETENNK

SEQ ID NO: 5784 - protein, 318 aa, Staphylococcus aureus
MNLAKRILQGEQLTKETVLKIYEDTNIDTLDLLNEAYILRKHYFGKKVKLNMILNAKSGICPENCGYCGQSRDIKQKQRYALIPEEQIIDGAKVAHDNHIGTYCIVMSGRGPSDKEVDHISNTVRTIKSQHPQLKICACLGLTNDEQAKKLKSAGVDRYNHNINTSENYHDNVVTTHSYKDRTDTIELMKANNISPCSGVICGMGESNQDIVDMAFALKEMDADSIPINFLHPIKGTKFGSMDDLTPMKCLRIVALFRLINPTKEIRIAGGREVNLRSLQPLALKAANSIFVGDYLITGGQPNQLDYDMINDLGFEID

SEQ ID NO: 5785 - protein, 444 aa, Staphylococcus aureus
TQQLKQKDSEYVWHPFTQMGVYSKEEAIIIEKGKGSYLYDTNGNKYLDGYASLWVNVHGHNNKYLNKVIKKQLNKIAHSTLLGSSNIPSIELAEKLIEITPSNLRKVFYSDTGSASVEIAIKMAYQYWKNIDREKYAKKNKFITLNHGYHGDTIGAVSVGGIKTFHKIFKDLIFENIQVESPSFYRSNYDTENEMMTAILTNIEQILIERNDEIAGFILEPLIQGATGLFVHPKGFLKEVEKLCKKYDVLLICDEVAVGFGRTGKMFACNHEDVQPDIMCLGKAITGGYLPLAATLTSKKIYNAFLSDSHGVNTFFHGHTYTGNQIVCTVALENIRLYEKRKLLSHIETTSSTLEKQLHALKRHRNVGDVRGRGLMFGVELVTDKDSKTPLEIEKVERIVRNCKENGLMIRNLENVITFVPVLSMSNKEVKTMVRIFKKAVHNI

SEQ ID NO: 5786 - protein, 229 aa, Staphylococcus aureus
MAKKGKKYQEAASKVDRTQHYSVEEAIKLAKETSIANFDASVEVAFRLGIDTRKNDQQIRGAVVLPNGTGKSQSVLVFAKGDKIAEAEAAGADYVGEAEYVQKIQQGWFDFDVVVATPDMMGEVGKLGRVLGPKGLMPNPKTGTVTMDVKKAVEEIKAGKVEYRAEKAGIVHASIGKVSFTDEQLIENFNTLQDVLAKAKPSSAKGTYFKSVAVTTTMGPGVKIDTASF

SEQ ID NO: 5787 - protein, 465 aa, Staphylococcus aureus
ITLYNTLTRQKEVFKPIEPGKVKMYVCGPTVYNYIHIGNARPAINYDVVRRYFEYQGYNVEYVSNFTDVDDKLIKRSQELNQSVPEIAEKYIAAFHEDVGALNVRKATSNPRVMDHMDDIIQFIKDLVDQGYAYESGGDVYFRTRKFEGYGKLSHQSIDDLKVGARIDAGEHKEDALDFTLWKKAKPGEISWDSPFGEGRPGWHIECSVMAFHELGPTIDIHAGGSDLQFPHHENEIAQSEAHNHAPFANYWMHNGFINIDNEKMSKSLGNFILVHDIIKEVDPDVLRFFMISVHYRSPINYNLELVESARSGLERIRNSYQLIEERAQIATNIENQQTYIDQIDAILNRFETVMNDDFNTANAITAWYDLAKLANKYVLENTTSTEVIDKFKAVYQIFSDVLGVPLKSKNADELLDEDVEKLIEERNEARKNKDFARADEIRDMLKSQNIILEDTPQGVRFKRG

SEQ ID NO: 5788 - protein, 223 aa, Staphylococcus aureus
SIEETLIQKINHRIDAIDVLELRIDQIENVTVDQVAEMITKLKVMQDSFKLLVTYRTKLQGGYGQFTNDSYLNLISDLANINGIDMIDIEWQADIDIEKHQRIITHLQQYNKEVVISHHNFESTPPLDELQFIFFKMQKFNPEYVKLAVMPHNKNDVLNLLQAMSTFSDTMDCKVVGISMSKLGLISRTAQGVFGGALTYGCIGVPQAPGQIDVTDLKAQVTL

SEQ ID NO: 5789 - protein, 399 aa, Staphylococcus aureus
MEEHYYVSIDIGSSSVKTIVGEKFHNGINVIGTGQTYTSGIKNGLIDDFDIARQAIKDTIKKASIASGVDIKEVFLKLPIIGTEVYDESNEIDFYEDTEINGSHIEKVLEGIREKNDVQETEVINVFPIRFIVDKENEVSDPKELIARHSLKVEAGVIAIQKSILINMIKCVEACGVDVLDVYSDAYNYGSILTATEKELGACVIDIGEDVTQVAFYERGELVDADSIEMAGRDITRRYCTRIKHLLMKLLKKLNTNMVMHSMILLQIKISSLLNRLIVMKQYSILKKDLSDFIEARVDEIFFEVFDVLQDLGLTKVNGGFIGTGGSANLLGVKELLSDMVSEKVRIHTPSQMGIRKPEFSSAISTISSSIAFDELLDYVTINYHDNEETEEDVIDVKD

SEQ ID NO: 5790 - protein, 294 aa, Staphylococcus aureus
YILLIIHYFIICYFVFSVHPMLSLFFFYSAFAVPFTFKNNVKKTATNLFILTMIICTIITYLLYNNYFVAMMVYYVVISLIMLDNFKKMKNREYQKEIAEKNRHINTLIAEQERHRIGQDLHDTLGHVFASLSLKSELAYKLIDADVEKVKAELLAINKLSRESLNKVREIIDDVKLPSFIEEIDSIRKVLKDADIDFTFENKELAQVLSPTKQSMLVMITREAINNVIKHANASKVHGKLKTVNNHKLLLMIEDDGKGIDSDCEVKSISQRVQHLNGTLAVDSTNGTKIIIEI

SEQ ID NO: 5791 - protein, 259 aa, Staphylococcus aureus
YLNKIRIENPLTICYTNDVVKNFTANGLLSIGASPAMSEAPEEAEEFYKVAQALLINIGTLTAENEQDIIAIAQTANEAGLPIVFDPVAVGASTYRKQFCKLLLKSAKVSVIKGNASEILALIDDTATMKGTDSDANLDAVAIAKKAYATYKTAIVITGKEDVIVQDNKAFVLANGSPLLARVTGAGCLLGGVIAGFLFRETEPEIEALIEAVSVFNIAAEVAAENENCGGPGTFSPLLLDTLYHLNETTYQQRIRIQE

SEQ ID NO: 5792 - protein, 386 aa, Staphylococcus aureus
MKIATLNKGKETKYFNGYPLIEEEDIYSQDHLKEGDIFQIVTDKSQYVATAYVGRQHKGLGWVLTYDKAQQINTAFFVKLFNTALAERDYYSNIDGTTAFRLFNAEGDGVGGLTIDNYDGHLLIQWYSKGIYKFKYAILEAVRKVFDYKSIYEKVRFKDSEYSGGFVEGDAPEFPIVIEENFTFYNVDLEDGLMTGIFLDQKEVRKKLRDQYAKERHVLNLFSYTGAFSAIAASEASSTTSVDLANRSRSLTEENFGLNAIDPKSQYIYVMDTFDFYKYAARHGHSYDTIVIDPPSFARNKKRTFSVQKDYDKLINGALNILSSEGTLLLCTNASVYPLKQFKNTIKKTLEESGVDYELTEVMGLPKDFKTHPHYKPSKYLKAVFV

SEQ ID NO: 5793 - protein, 308 aa, Staphylococcus aureus
MMAKIVVALGGNALGNHLKQLELVKNTAKSLVGLITKGHEIVISHGNGPQVGSINLGLNYAAEHNQGPAFPFAECGAMSQAYIGYQLQESLQNELHSIGMDKQVVTLVTQVEVDENDPAFNNPSKPIGLFYNKEEAEQIQKEKGFIFVEDAGRGYRRVVPSPQPISIIELESIKTLIKNDTLVIAAGGGGIPVIREQHDGFKGIDAVIDKDKTSALLGANIQCDQLIILTAIDYVYINFNTENQQPLKTTNVDELKRYIDENQFAKGSMLPKIEAAISFIENNPKGSVLITSLNELDAALEGKVGTVI

SEQ ID NO: 5794 - protein, 628 aa, Staphylococcus aureus
MQKAFRNVLVIVIIGVIIFGLFSYLNGNGNMPKQLTYNQFTEKLEKGDLKTLEIQPQQNVYMVSGKTKNDEDYSSTILYNNEKELQKITDAAKKQNGVKLTIKEEEKQSVFVSILSTLIPVVVIALLFIFFLSQAQGGGSGGRMMNFGKSKAKMYDNNKRRVRFSDVAGADEEKQELIEIVDFLKDNKKFKEMGSRIPKGVLLVGPPGTGKTLLARAVAGEAGAPFFSISGSDFVEMFVGVGASRVRDLFDNAKKNAPCIIFIDEIDAVGRQRGAGVGGGHDEREQTLNQLLVEMDGFGENEGIIMIAATNRPDILDPALLRPGRFDRQIQVGRPDVKGREAILHVHAKNKPLDETVDLKAISQRTPGFSGADLENLLNEASLIAVREGKKKIDMRDIEEATDRVIAGPAKKSRVISKKERNIVAHHEAGHTIIGMVLDEAEVVHKVTIVPRGQAGGYAMMLPKQDRFLMTEQELLDKICGLLGGRVSEDINFNEVSTGASNDFERATQIARSMVTQYGMSKKLGPLQFGHSNGQVFLGKDMQGEPNYSSQIAYEIDKEVQRIVKEQYERCKQILLEHKEQLILIAETLLTEETLVAEQIQSLFYEGKLPEIDYDAAKVVKDEDSEFN

SEQ ID NO: 5795 - protein, 508 aa, Staphylococcus aureus
LKKKNIYSIRKLGVGIASVTLGTLLISGGVTPAANAAQHDEAQQNAFYQVLNMPNLNADQRNGFIQSLKDDPSQSANVLGEAQKLNDSQAPKADAQQNNFNKDQQSAFYEILNMPNLNEAQRNGFIQSLKDDPSQSTNVLGEAKKLNESQAPKADNNFNKEQQNAFYEILNMPNLNEEQRNGFIQSLKDDPSQSANLLSEAKKLNESQAPKADNKFNKEQQNAFYEILHLPNLNEEQRNGFIQSLKDDPSQSANLLAEAKKLNDAQAPKADNKFNKEQQNAFYEILHLPNLTEEQRNGFIQSLKDDPSVSKEILAEAKKLNDAQAPKEEDNNKPGKEDNNKPGKEDNNKPGKEDNNKPGKEDGNKPGKEDNKKPGKEDGNKPGKEDNKKPGKEDGNKPGKEDGNKPGKEDGNGVHVVKPGDTVNDIAKANGTTADKIAADNKLADKNMIKPGQELVVDKKQPANHADANKAQALPETGEENPFIGTTVFGGLSLALGAALLAGRRREL

SEQ ID NO: 5796 - protein, 509 aa, Staphylococcus aureus
IMKYMIGVDIGTTSTKSVLYDENGTFIMKHQIGYDLHTPNVDVSEENPDELFDAVLMTIKYVMRESKVNKDDIKFVSFSAQMHSLIAMDQQHQRLTNNITWADNRAAKYATVINEVHDGNAIYQRTGTPIHPMSPLAKIFWMKHEWQDVFQRTAKFADIKTYIFYHLFDTYIIDYSMASATGMFNLETLDWDVEALELLGISKEMLPELVPTTYVMKGMKERYATLMGLNKDTPFVIGASDGVLSNLGVNSVGKGEVAVTIGTSGAIRTVIDKPRTDYQGRIFCYVLAEDHYVIGGPVNNGGVVLRWLRDELLASEVETAKRLGVDPYDVLTQIAKRVKPGADGLIFHPYLAGERAPLWNANARGSFFGLTLSHKKEHMIRAALEGVLYNLYTVYLALIEVMNETPKMIKATGGFAKSEVWRQMMSDIFDTELVVPESYESSCLGACVLGLKAVGDIEDFSIVSSMVGATNNHTPIEENVTVYQEIVSIFINLSRSLTENYEQIADFQR

SEQ ID NO: 5797 - protein, 1018 aa, Staphylococcus aureus
VKNNLRYGIRKHKLGAASVFLGTMIVVGMGQDKEAAASEQKTTTVEENGNSATDNKTSETQTTATNVNHIEETQSYNATVTEQPSNATQVTTEEAPKAVQAPQTAQPANIETVKEEVVKEEAKPQVKETTQSQDNSGDQRQVDLTPKKATQNQVAETQVEVAQPRTASESKPRVTRSADVAEAKEASNAKVETGTDVTSKVTVEIGSIEGHNNTNKVEPHAGQRAVLKYKLKFENGLHQGDYFDFTLSNNVNTHGVSTARKVPEIKNGSVVMATGEVLEGGKIRYTFTNDIEDKVDVTAELEINLFIDPKTVQTNGNQTITSTLNEEQTSKELDVKYKDGIGNYYANLNGSIETFNKANNRFSHVAFIKPNNGKTTSVTVTGTLMKGSNQNGNQPKVRIFEYLGNNEDIAKSVYANTTDTSKFKEVTSNMSGNLNLQNNGSYSLNIENLDKTYVVHYDGEYLNGTDEVDFRTQMVGHPEQLYKYYYDRGYTLTWDNGLVLYSNKANGNGKNGPIIQNNKFEYKEDTIKETLTGQYDKNLVTTVEEEYDSSTLDIDYHTAIDGGGGYVDGYIETIEETDSSAIDIDYHTAVDSEAGHVGGYTESSEESNPIDFEESTHENSKHHADVVEYEEDTNPGGGQVTTESNLVEFDEESTKGIVTGAVSDHTTVEDTKEYTTESNLIELVDELPEEHGQAQGPVEEITENNHHISHSGLGTENGHGNYDVIEEIEENSHVDIKSELGYEGGQNSGNQSFEEDTEEDKPKYEQGGNIVDIDFDSVPQIHGQNKGNQSFEEDTEKDKPKYEHGGNIIDIDFDSVPHIHGFNKHTEIIEEDTNKDKPSYQFGGHNSVDFEEDTLPKVSGQNEGQQTIEEDTTPPIVPPTPPTPEVPSEPETPTPPTPEVPSEPETPTPPTPEVPSEPETPTPPTPEVPAEPGKPVPPAKEEPKKPSKPVEQGKVVTPVIEINEKVKAVAPTKKPQSKKSELPETGGEESTNKGMLFGGLFSILGLALLRRNKKNHKA

SEQ ID NO: 5798 - protein, 1057 aa, Staphylococcus aureus
LIDVNNFHYMKIGLASPEKIRSWSFGEVKKPETINYRTLKPEKDGLFCERIFGPTKDWECSCGKYKRVRYKGMVCDRCGVEVTKSKVRRERMGHIELAAPVSHIWYFKGIPSRMGLLLDMSPRALEEVIYFASYVVVDPGPTGLEKKTLLSEAEFRDYYDKYPGQFVAKMGAEGIKDLLEEIDLDEELKLLRDELESATGQRLTRAIKRLEVVESFRNSGNKPSWMILDVLPIIPPEIRPMVQLDGGRFATSDLNDLYRRVINRNNRLKRLLDLGAPGIIVQNEKRMLQEAVDALIDNGRRGRPVTGPGNRPLKSLSHMLKGKQGRFRQNLLGKRVDYSGRSVIAVGPSLKMYQCGLPKEMALELFKPFVMKELVQREIATNIKNAKSKIERMDDEVWDVLEEVIREHPVLLNRAPTLHRLGIQAFEPTLVEGRAIRLHPLVTTAYNADFDGDQMAVHVPLSKEAQAEARMLMLAAQNILNPKDGKPVVTPSQDMVLGNYYLTLERKDAVNTGAIFNNTNEVLKAYANGFVHLHTRIGVHASSFNNPTFTEEQNKKILATSVGKIIFNEIIPDSFAYINEPTQENLERKTPNRYFIDPTTLGEGGLKEYFENEELIEPFNKKFLGNIIAEVFNRFSITDTSMMLDRMKDLGFKFSSKAGITVGVADIVVLPDKQQILDEHEKLVDRITKQFNRGLITEEERYNAVVEIWTDAKDQIQGELMQSLDKTNPIFMMSDSGARGNASNFTQLAGMRGLMAAPSGKIIELPITSSFREGLTVLEYFISTHGARKGLADTALKTADSGYLTRRLVDVAQDVIVREEDCGTDRGLLVSDIKEGTEMIEPFIERIEGRYSKETIRHPETDEIIIRPDELITPEIAKKITDAGIEQMYIRSAFTCNARHGVCEKCYGKNLATGEKVEVGEAVGTIAAQSIGEPGTQLTMRTFHTGGVAGSDITQGLPRIQEIFEARNPKGQAVITEIEGVVEDIKLAKDRQQEIVVKGANETRSYLASGTSRIIVEIGQPVQRGEVLTEGSIEPKNYLSVAGLNATESYLLKEVQK

SEQ ID NO: 5799 - protein, 378 aa, Staphylococcus aureus
MLSIKHLTKIYSGNKKAVDDISLDIQSGEFIAFIGTSGSGKTTALRMINRMIEATEGQIEIDGKDVRSMNPVELRRNIGYVIQQIGLMPHMTIKENIVLVPKLLKWTKEEKDKRAKELIKLVDLPESFLERYPAELSGGQQQRIGVVRALAAEQDIILMDEPFGALDPITRDTLQDLVKTLQRKLGKTFIFVTHDMDEAIKLADKICIMSEGKVVQFDTPDNILRHPANDFVRDFIGQNRLIQDRPNDKTVEGVMIKPITIQAEATLNDAVHIMRQKRVDAIFVVDSNNHLLGFLDIEDINQGIRGHKSLRDTMQQHIYTVQIDSKLQDSVRTILKRNVRNVPVVDDQQRLVGLITRANVVDIVYDTIWGDSEDTVQT

SEQ ID NO: 5800 - protein, 436 aa, Staphylococcus aureus
MKNKYISKLLVGAATITLATMISNGEAKASENTQQTSTKHQTTQNNYVTDQQKAFYQVLHLKGITEEQRNQYIKTLREHPERAQEVFSESLKDSKNPDRRVAQQNAFYNVLKNDNLTEQEKNNYIAQIKENPDRSQQVWVESVQSSKAKERQNIENADKAIKDFQDNKAPHDKSAAYEANSKLPKDLRDKNNRFVEKVSIEKAIVRHDERVKSANDAISKLNEKDSIENRRLAQREVNKAPMDVKEHLQKQLDALVAQKDAEKKVAPKVEAPQIQSPQIEKPKVESPKVEVPQIQSPKVEVPQSKLLGYYQSLKDSFNYGYKYLTDTYKSYKEKYDTAKYYYNTYYKYKGAIDQTVLTVLGSGSKSYIQPLKVDDKNGYLAKSYAQVRNYVTESINTGKVLYTFYQNPTLVKPAIKAQETASSIVNTLSNLVSVWE

SEQ ID NO: 5801 - protein, 170 aa, Staphylococcus aureus
ITVLFGGSRPNGNTAQLTKFALQDLEYQWIDVTQHQFKPIRDVRHTAETITSYDDDYLPILDKILASDTIIFASPVYWYSISAPLKAFIEHWSETLQDKRYPNFKAQMAEKDFRVILVGGDCPKIKSEAAITQMKYSLDFLGATLNGYIIGTAEKPGDIMKDNYALARAT

SEQ ID NO: 5802 - protein, 430 aa, Staphylococcus aureus
VAFEFRLPDIGEGIHEGEIVKWFVKAGDTIEEDDVLAEVQNDKSVVEIPSPVSGTVEEVMVEEGTVAVVGDVIVKIDAPDAEDMQFKGHDDDSSSKEEPAKEEAPAEQAPVATQTEEVDENRTVKAMPSVRKYAREKGVNIKAVSGSGKNGRITKEDVDAYLNGGAPTASNESAASATSEEVAETPAAPAAVTLEGDFPETTEKIPAMRRAIAKAMVNSKHTAPHVTLMDEIDVQALWDHRKKFKEIAAEQGTKLTFLPYVVKALVSALKKYPALNTSFNEEAGEIVHKHYWNIGIAADTDRGLLVPVVKHADRKSIFQISDEINELAVKARDGKLTADEMKGATCTISNIGSAGGQWFTPVINHPEVAILGIGRIAQKPIVKDGEIVAAPVLALSLSFDHRQIDGATGQNAMNHIKRLLNNPELLLMEG

SEQ ID NO: 5803 - protein, 991 aa, Staphylococcus aureus
TMKNAFKLFKMDLKKVAKTPAVWIILAGLAILPSFYAWFNLWAMWDPYGNTGHIKVAVVNEDKGDTIRGKKVNVGNTMVNTLKKNKSFDWQFVSREKADHEIKMGKYFAGIYIPSKFTHEITGTLRKQPQKADVEFKVNQKINAVASKLTDTGSSVVVEKANEQFNKTVTRALLEEANKAGLTIEENVPTINKITNAGYSADKALPKINDFANRIVYLNNHQADLDKYASDFRQLGSYEGDILDASEKIKRINGAIPQLNEKAKLILALNNYMPKIEKALNFAADDVPAQFPKINQGLNIASQGIDQANGQLNDAKGFVTQVRSRVGDYQDAIRRAQDLNRRNQQQIPQNSAANNETSNSAPAAGNGVASTPPSAPSGDTAPNNNVTQNTAPNSNNAPVSTTPQSTSGKKDGQSFVDITTTQVSTANENTQNITDKDVKSMEAALTGSLLSLSNNLDTQAKAAQKDSQALRNISYGILASDKPSDFRESLDNVKSGLEYTTQYNQQFIDTLKEIEKNENVDLSKEIDKVKAANNRINESLRLVNQLSNALKNGSSGTAEATKLLDQLSKLDSSLSSFRDYVKKDLNSSLVSISQRIMDELNKGQTALSNVQSKLNTIDQVINSGQAILKNGKTRIDRLQTVLPSIEQQYISAVKNAQANFSKVKSDVAKAANFVRNDLPQLEQRLTNATASVNKNLPTLLNGYDQAVGLLNKNQPQAKKALSDLADFSQNKLPDVEKDLKKANKIFKKLDKDDAVDKLIDTLKNDLKKQAGIIANPINKKTVDVFPVKDYGSGMTPFYTALSVWVGALLMVSLLTVDNKHKSLESVLTTRQVFLGKAGFFIMLGMLQALIVSVGDLLILKAGVESPVLFVLITIFCSIIFNSIVYTCVSLLGNPGKAIAIVLLVLQIAGGGGTFPIQTTPQFFQNISPYLPFTYAIDSLRETVGGIVPEILITKLIILTLFGIGFFVVGLILKPVTDPLMKRVSEKVDQSN

SEQ ID NO: 5804 - protein, 313 aa, Staphylococcus aureus
LTMALFLQPVFKDRIWGGHALKAFNYDIPNETTGECWAISAHPNGPNTIINGPYKDMTLDQLWSQHRELFDNDSRDSFPLLTKVLDANDKLSVQVHPDDDYALKHEGELGKTECWYILDAAPGAEIIYGVHAHNKQTLIDMIDNHEFDSLFKRIPVKPGDFYYVPAGTVHAIGSGILILETQQSSDTTYRIYDYDRRDQNGQLRDLHLEQSKDVIELGNHEPNTTPITTHIDTHTVTQFVDNQYFAVYKWDIHGDLKFNKPHAYCLVTIIDGTGTLTVNDKHYDIQKGSSFILTTEDEDIHFVGNISAIVSHP

SEQ ID NO: 5805 - protein, 142 aa, Staphylococcus aureus
MLNRAVLVGRLTKDPELRSAPNGVNVGTFTLAVNRTFTNAQGEREADFINVVVFKKQAENVKNYLSKGSLAGVDGRLQTRSYENKVGQRVFVTEVVADSVQFLEPKNNNQQPNNNYHQQRQTQTGNNPFDNTTAITDDDLPF

SEQ ID NO: 5806 - protein, 448 aa, Staphylococcus aureus
  VARIANT (1)...(448): Xaa = Any Amino Acid
IMKKVLIANRGEIAVRIIRACRDLGIQTVAIYSEGDKDALHTQIADEAYCVGPTLSKDSYLNIPNILSIATSTGCDGVHPGYGFLAENADFAELCEHANXSFIGPSYQSIQKMGIKDVAKAEMIKANVPVVPGSDGLMKDVSEAKKIAKKIGYPVIIKATAGGGGKGIRVARDEKELETGFRMTEQEAQTAFGNGGLYMEKFIENFRHIEIQIVGDSYGNVIHLGERDCTIQRRMQKLVEEAPSPILDDETRREMGNAAVRAAKAVNYENAGTIEFIYDLNDNKFYFMEMNTRIQVEHPVTEMVTGIDLVKLQLQVAMGDVLPYKQEDIKLTGHAIEFRINAENPYKNFMPSPGKIEQYLAPGGYGVRIESACYTNYTIPPYYDSMVAKLIIHEPTRDEAIMAGIRALSEFVVLGIDTTIPFHIKLLNNDIFRSGKFNTNFLEQNSIM

SEQ ID NO: 5807 - protein, 541 aa, Staphylococcus aureus
  VARIANT (1)...(541): Xaa = Any Amino Acid
ERANDSLVKHFYEQQSDIEQREGFESKLTFGTAGIRGKFGLGEGRLNKFTIEKLALGLARYLNAQTNSPTIVIHYDIRHLSTEFAQIIANVLANHQITVYLPDTYKTTPELSFAVRNLNTTAGIMITASHNPKDYNGIKVYGSDGAQLSTDASELASRYIEEVGDPLQIDIPISKQNTSYIKPFPKSVTDDYMKHIQNMIGYIPKSDLQVVFTSLHGTSVPIVPELLQSLNFNQFNLVEAQCKPDPNFSSVQSANPEDHRAFDQAVELANKSHADLLISTDPDADRLGIAERDAHGHITYFNGNQIGALLLNYRIQQTSQLRHRLMIQSIVSSELTKSLARYNNVEYKEVLTGFKFIAQEIRQLDDHQNMIFAFEESYGFLSEPFVRDKDAVQIVPLIIKYASELKLYGKTLKDELEQIYQTVGRHEDTLFSHTLEGFEGKKKINAIMTKFRSNPPQEIQGLKVKAIEDYLTSEVYHLDKDTTSQINSPKSNVIRVLFDEGFIALRPSGTEPKIKLYVSLKCPNFDDVAQKINAMIFSXLK

SEQ ID NO: 5808 - protein, 492 aa, Staphylococcus aureus
MQVRCLKKVKVKRVLGSLEQQIDDITTDSRTAREGSIFVASVGYTVDSHKFCQNVADQGCKLVVVNKEQSLPANVTQVVVPDTLRVASILAHTLYDYPSHQLVTFGVTGTNGKTSIATMIHLIQRKLQKNSAYLGTNGFQINETKTKGANTTPETVSLTKKIKEAVDAGAESMTLEVSSHGLVLGRLRGVEFDVAIFSNLTQDHLDFHGTMEAYGHAKSLLFSQLGEDLSKEKYVVLNNDDSFSEYLRTVTPYEVFSYGIDEEAQFMAKNIQESLQGVSFDFVTPFGTYPVKSPYVGKFNISNIMAAMIAVWSKGTSLETIIKAVENLEPVEGRLEVLDPSLPIDLIIDYAHTADGMNKLIDAVQPFVKQKLIFLVGMAGERDLTKTPEMGRVACRADYVIFTPDNPANDDPKMLTAELAKGATHQNYIEFDDRAEGIKHAIDIAEPGDTVVLASKGREPYQIMPGHIKVPHRDDLIGLEAAYKKFGGGPVD

SEQ ID NO: 5809 - protein, 993 aa, Staphylococcus aureus
MNTIYEPSSICMIRTPLLSVEFFNLFLNTEQIKYSDLQLNAQMKESILTTTFNLYCTLQEINFDGDNKKVRDAKESLLKYLIRMSTRPTPFGLLSGINLGHFVNEPTRLKVGNSIQKYVKVDGEWLYKLVSYIESIDEYYQNLKVIWNSKAHIINDRIYLNEQSAIYLNNNKDTSFSIKNSELLVFIKTTVTNNNITFSNLAEKINQEFEINDITKVKVYIHNLVSKEIIYSTIRPPLSYSDNLNYILNKLSLHNDDFVKKIREIQKLILAYEKTEIGFGEELYKDIIHHMKALFKCKNYLQIDTKIDMINNYLHQDIATNISEAAYLLWLLSRNNIGFTDLKVLHNRFIEKYGFEQLVNIKDLISDITGFGTTIFQEEETDGNNIVMLKQKFLHALRNNDEIVINEKDVESLINDNEINHYHAPMSADVYAELYLGRFYNQYNELIVISPLTASFNAGATFGRFHHLIDTETLAKLEHEKGHYYQKMICDDNVEMISINNIPKYPRNHNVLTNHDSYEYSLNLGSSNSYSKYELTLDDIYVGATFNKLYLYSSQLNKRVLFESNNMYNFLKECNLYRLLREISMESVKCIEPMNDVSIDSFSYSPRIRYKNVILKPAYWKINEMVLPLPKNEEWDQQFLKYQEQFNIPNIVNLVYGDNKLLLNLSLANHRYLLMKEYKKHKRVRLVESFLPQSKNDHVYEIVTPIYKKSSYRGPEIEIPKYKNTDIEYDKDWFALHIHIDKPSQDTFIIDNLYPFVKHLKDKGDIDQYFLMRYIKQGDILKLRLFRNDENYAEIYSILKNWLPHVRQTTEVSDYEFVSYEPEFFRYGGKNTINEIEAFFEYDTNLAVNIIENDFKFDRPYIVAISIMYLFEMFSISNEERMEIVNNYVPTSFKSKDIRPFKNELVTICNPANNFEYMAKHYSGIYRILKDGNQILSKLNEGLKKTLTTKRSRIIGSLIHMRCNRIFGIDKDQETFVLSIVKEIVKTQKHWCG

SEQ ID NO: 5810 - protein, 180 aa, Staphylococcus aureus
INFNKTALVLIDLQEGILKMDYAPYTAENVVQNANKLIDVFRKNNGFIAFVRVNFYDGKDVLQPNAMISLPPKEGDDYSRFHHLLDKRDDDFVIDKRHFSAFVGTDLDLQLRRRGIDTIVLGGVATHIGVDTTARDAYQLNYNQFFVTDMMSAQNETLHQFPIDNVFPLMGQTITTNDFL

SEQ ID NO: 5811 - protein, 515 aa, Staphylococcus aureus
VNIIVVGFMLTVIVIGLIWLIKDKRQSQHSVLRNYPLLARIRYISEKMGPELRQYLFSGDNEGKPFSRNDYKNIVLAGKYNSRMTSFGTTKDYQDGFYIQNTMFPMQRNEISVDNTTLLSTFIYKIANERLFSREEYRVPTKIDPYYLSDDHAIKLGEHLKHPFILKRIVGQSGMSYGALGKNAITALSKGLAKAGTWMNTGEGGLSEYHLKGNGDIIFQIGPGLFGVRDKEGNFSEGLFKEVAQLSNVRAFELKLAQGAKTRGGHMEAEKVNEEIAKIRNVEPYKTINSPNRYEFIHNAEDLIRFVDQLQQLGQKPVGFKIVVSKVSEIETLVRTMVELDKYPSFITIDGGEGGTGATFQELQDGVGLPLFTALPIVSGMLEKYGIRDKVKLAASGKLVTPDKIAIALGLGADFVNIARGMMISVGCIMSQQCHMNTCPVGVATTDAKKEKALIVGEKQYRVTNYVTSLHEGLFNIAAAVGVSSPTEITADHIVYRKVDGELQTIHDYKLKLIS

SEQ ID NO: 5812 - protein, 486 aa, Staphylococcus aureus
MNPHVYGGSMSAESMIYEPLVRNTKDGIKPLLAKKWDVSEDGKTYTFHLRDDVKFHDGTPFDADAVKKNIDAVQENKKLHSWLKISTLIDNVKVKDKYTVELNLKEAYQPALAELAMPRPYVFVSPKDFKNGTTKDGVKKFDGTGPFKLGEHKKDESADFNKNDQYWGEKSKLNKVQAKVMPAGETAFLSMKKGETNFAFTDDRGTDSLDKDSLKQLKDTGDYQVKRSQPMNTKMLVVNSGKKDNAVSDKTVRQAIGHMVNRDKIAKEILDGQEKPATQLFAKNVTDINFDMPTRKYDLKKAESLLDEAGWKKGKDSDVRQKDGKNLEMAMYYDKGSSSQKEQAEYLQAEFKKMGIKLNINGETSDKIAERRTSGDYDLMFNQTWGLLYDPQSTIAAFKAKNGYESATSGIENKDKIYNSIDDAFKIQNGKERSDAYKNILKQIDDEGIFIPISHGSMTVVAPKDLEKVSFTQSQYELPFNEMQYK

SEQ ID NO: 5813 - protein, 261 aa, Staphylococcus aureus
  VARIANT (1)...(261): Xaa = Any Amino Acid
MKRLENKVAVVTGASTGIGQASAIALAQXGAYVLAVDIAEAVSETVDKIKSNGDNAKAYNVDNASEQQVVDFVSDIKEQFGRIDVLFNNAGVDNAADRIHEYPIDVYDKIMNVDMRGTFLMTKMMLPLMMNQGGSIVNTSSFSGQAADLYRSGYNAAKGAVINFTKSIAIEYGRDSIRANAIAPGTIETPLVDKLTGTSEDDAGKTFRENQNGXLRWDVXVNQKKLLNXXSSXHLTTVHSXLERRFELMVVXWLTHGLARC

SEQ ID NO: 5814 - protein, 191 aa, Staphylococcus aureus
NLDIKKLNFRKVKNAIHLSLSGDKYQFLEDGKTINNTYFLAVYDNAINIFEDLFSPSDSINLVHVVYVYSEPYKKTNVIKKFTSLTIDELYYFKEYKKEKDDNILCEEFSYKCSIKDIKYKKLLKAISNQDFKGLVPNINQNDNYSEIYIINNTKNLIYHLYDDRGLWLAFNNNEDYARYSEKYNDLISEF

SEQ ID NO: 5815 - protein, 2076 aa, Staphylococcus aureus
MNLLKKNKYSIRKYKVGIFSTLIGTVLLLSNPNGAQALTTDNNVQSDTNQATPVNSQDKDVANNRGLANSAQNTPNQSATTNQATNQALVNHNNGSIVNQATPTSVQSSTPSAQNNNHTDGNTTATETVSNANNNDVVSNNTALNVPTKTNENGSGGHLTLKEIQEDVRHSSNKPELVAIAEPASNRPKKRSRRAAPADPNATPADPAAAAVGNGGAPVAITAPYTPTTDPNANNAGQNAPNEVLSFDDNGIRQSTNRSVPTVNVVNNLPGFTLINGGKVGVFSHAMVRTSMFDSGDNKNYQAQGNVIALGRIHGTDTNDHGDFNGIEKALTVNPNSELIFEFNTMTTKNGQGATNVIIKNADTNDTIAEKTVEGGPTLRLFKVPDNVRNLKIQFVPKNDAITDARGIYQLKDGYKYYSFVDSIGLHSGSHVFVERRTMDPTATNNKEFTVTTSLKNNGNSGASLDTNDFVYQVQLPEGVEYVNNSLTKDFPSNNSGVDVNDMNVTYDAANRVITIKSTGGGTANSPARLMPDKILDLRYKLRVNNVPTPRTVTFNETLTYKTYTQDFINSAAESHTVSTNPYTIDIIMNKDALQAEVDRRIQQADYTFASLDIFNGLKRRAQTILDENRNNVPLNKRVSQAYIDSLTNQMQHTLIRSVDAENAVNKKVDQMEDLVNQNDELTDEEKQAAIQVIEEHKNEIIGNIGDQTTDDGVTRIKDQGIQTLSGDTATPVVKPNAKKAIRDKATKQREIINATPDVTEDEIQDALNQLATDETDAIDNVTNATTNADVETAKNNGINTIGAVVPQVTHKKAARDAINQATATKRQQINSNREATQEEKNAALNELTQATNHALEQINQATTNADVDNAKGDGLNAINPIAPVTVVKQAARDAVSHDAQQHIAEINANPDATQEERQAAIDKVNAAVTAANTNILNANTNADVEQVKTNAIQGIQAITPATKVKTDAKNAIDKSAETQHNTIFNNNDATLEEQQAAQQLLDQAVATAKQNINAADTNQEVAQAKDQGTQNIVVIQPATQVKTDTRNVVNDKAREAITNINATTGATREEKQEAINRVNTLKNRALTDIGVTSTTAMVNSIRDDAVNQIGAVQPHVTKKQTATGVLNDLATAKKQEINQNTNATTEEKQVALNQVDQELATAINNINQADTNAEVDQAQQLGTKAINAIQPNIVKKPAALAQINQHYNAKLAEINATPDATNDEKNAAINTLNQDRQQAIESIKQANTNAEVDQAATVAENNIDAVQVDVVKKQAARDKITAEVAKRIEAVKQTPNATDEEKQAAVNQINQLKDQAINQINQNQTNDQVDTTTNQAVNAIDNVEAEVVIKPKAIADIEKAVKEKQQQIDNSLDSTDNEKEVASQALAKEKEKALAAIDQAQTNSQVNQAATNGVSAIKIIQPETKVKPAAREKINQKANELRAKINQDKEATAEERQVALDKINEFVNQAMTDITNNRTNQQVDDTTSQALDSIALVTPDHIVRAAARDAVKQQYEAKKREIEQAEHATDEEKQVALNQLANNEKRALQNIDQAIANNDVKRVETNGIATLKGVQPHIVIKPEAQQAIKASAENQVESIKDTPHATVDELDEANQLISDTLKQAQQEIENTNQDAAVTDVRNQTIKAIEQIKPKVRRKRAALDSIEENNKNQLDAIRNTLDTTQDERDVAIDTLNKIVNTIKNDIAQNKTNAEVDRTETDGNDNIKVILPKVQVKPAARQSVGVKAEAQNALIDQSDLSTEEERLAAKHLVEQALNQAIDQINHADKTAQVNQDSINAQNIISKIKPATTVKATALQQIQNIATNKINLIKANNEATDEEQNIAIAQVEKELIKAKQQIASAVTNADVAYLLHDEKNEIREIEPVINRKASAREQLTTLFNDKKQAIEANIQATVEERNSILAQLQNIYDTAIGQIDQDRSNAQVDKTASLNLQTIHDLDVHPIKKPDAEKTINDDLARVTALVQNYRKVSNRNKADALKAITALKLQMDEELKTARTNADVDAVLKRFNVALSDIEAVITEKENSLLRIDNIAQQTYAKFKAIATPEQLAKVKV

SEQ ID NO: 5816 - protein, 2478 aa, Staphylococcus aureus
MNLFRQQKFSIRKFNVGIFSALIATVTFISTNPTTASAAEQNQPAQNQPAQPADANTQPNANAGAQANPTAQPAAPANQGQPAVQPANQGGQANPAGGAAQPNTQPAGQGNQADPNNAAQAQPGNQATPANQAGQGNNQATPNNNATPANQTQPANAPAAAQPAAPVAANAQTQDPNASNTGEGSINTTLTFDDPAISTDENRQDPTVTVTDKVNGYSLINNGKIGFVNSELRRSDMFDKNNPQNYQAKGNVAALGRVNANDSTDHGNFNGISKTVNVKPDSELIINFTTMQTNSKQGATNLVIKDAKKNTELATVNVAKTGTAHLFKVPTDADRLDLQFIPDNTAVADASRITTNKDGYKYYSFIDNVGLFSGSHLYVKNRDLAPKATNNKEYTINTEIGNNGNFGASLKADQFKYEVTLPQGVTYVNNSLTTTFPNGNEDSTVLKNMTVNYDQNANKVTFTSQGVTTARGTHTKEVLFPDKSLKLSYKVNVANIDTPKNIDFNEKLTYRTASDVVINNAQPEVTLTADPFSVAVEMNKDALQQQVNSQVDNSHYTTASIAEYNKLKQQADTILNEDANHVKTANRASQADIDGLVTKLQAALIDNQAAIAELDTKAQEKVTAAQQSKKVTQDEVAALVTKINNDKNNAIAEINKQTTAQGVTTEKDNGIAVLEQDVITPTVKPQAKQDIIQAVTTRKQQIKKSNASLQDEKDVANDKIGKIETKAIKDIDAATTNAQVEAIKTKAINDINQTTPATTAKAAALEEFDEVVQAQIDQAPLNPDTTNEEVAEAIERINAAKVSGVKAIEATTTAQDLERVKNEEISKIENITDSTQTKMDAYNEVKQAATARKAQNATVSNATNEEVAEADAAVDAAQKQGLHDIQVVKSKQEVADTKSKVLDKINAIQTQAKVKPAADTEVENAYNTRKQEIQNSNASTTEEKQAAYTELDTKKQEARTNLDAANTNSDVTTAKDNSIAAINQVQAATTKKSDAKAEIAQKASERKTAIEAMNDSTTEEQQAAKDKVDQAVVTANADIDNAAANNDVDNAKTTNEATIAAITPDANVKPAAKQAIADKVQAQETAIDGNNGSTTEEKAAAKQQVQTEKTTADAAIDAAHTNAEVEAAKKAAIAKIEAIQPATTTKDNAKEAIATKANERKTAIAQTQDITAEEIAAANADVDNAVTQANSNIEAANSQNDVDQAKTTGENSIDQVTPTVNKKATARNEITAILNNKLQEIQATPDATDEEKQAADAEANTENGKANQAISAATTNAQVDEAKANAEAAINAVTPKVVKKQAAKDEIDQLQATQTNVINNDQNATTEEKEAAIQQLATAVTDAKNNITAATDDNGVDQAKDAGKNSIQSTQPATAVKSNAKNDVDQAVTTQNQAIDNTTGATTEEKNAAKDLVLKAKEKAYQDILNAQTTNDVTQIKDQAVADIQGITADTTIKDVAKDELATKANEQKALIAQTADATTEEKEQANQQVDAQLTQGNQNIENAQSIDDVNTAKDNAIQAIDPIQASTDVKTNARAELLTEMQNKITEILNNNETTNEEKGNDIGPVRAAYEEGLNNINAATTTGDVTTAKDTAVQKVQQLHANPVKKPAGKKELDQAAADKKTQIEQTPNASQQEINDAKQEVDTELNQAKTNVDQSSTNEYVDNAVKEGKAKINAVKTFSEYKKDALAKIEDAYNAKVNEADNSNASTSSEIAEAKQKLAELKQTADQNVNQATSKDDIEVQIHNDLDNINDYTIPTGKKESATTDLYAYADQKKNNISADTNATQDEKQQAIKQVDQNVQTALESINNGVDNGDVDDALTQGKAAIDAIQVDATVKPKANQAIEVKAEDTKESIDQSDQLTAEEKTEALAMIKQITDQAKQGITDATTTAEVEKAKAQGLEAFDNIQIDSTEKQKAIEELETALDQIEAGVNVNADATTEEKEAFTNALEDILSKATEDISDQTTNAEIATVKNSALEQLKAQRINPEVKKNALEAIREVVNKQIEIIKNADADASAKEIARTDLGRYFDRFADKLDKTQTNAEVAELQNVTIPAIEAIVPQNDPDANDTNNGIDNNDATANSNANATPENTGQPNVSETTANGKADASPTTPNNSDAATGETTATSATDDANDKPQANNNSSVDASTNSPTMDNDVTSKPEVESTNNGTTDKPVTETDNATPAESTTNNNSTTTATNENAPTGSTATAPTTASTEAASSADSKDNASVNDSKQNAEVNNSAESQSTNDKVAQPKSENKAKAEKDGSDSTNQSMVESTTETLPSADITEPNVPSNTSKDKEESTTNQTDAGQLKSETNVASNEADKSPSKADTEVSNKPSTSASSEAKEKMTSTNVSQKDDTATADTNDTQKSVGSAANNKATQNDGANASPATVSNGSNSANQDMLNVTNTDDHQAKTKSAQQGKVNKAKQQAKTLPDTGMSHNDDLPYAELALGAGMAFLIRRFTKKDQQTEE

SEQ ID NO: 5817 - protein, 423 aa, Staphylococcus aureus
  VARIANT (1)...(423): Xaa = Any Amino Acid
MTKAIKDKNKAELESLNNSLNQIWTSNETVIRNYDANQYGQIEVALLQLRIAIHKSPLDTAKVSHAWTTFKSNIDHVDKKSNTSANDQYHVSQLNDALEKAIKAIDDNQLSDADAALTHFIETWPYVEGQIQTKDGALYTKIEDKIPYYQSVLDEHNKAHVKDGLVDLNNQIKEVVGHSYSFVDVMIIFLREGLEVLLIVMTLTTMTRNVKDKKGTASVIGGAIAGLVLSIILAITFVETLGNSGILRESMEAGLGIVAVILMFIVGVWMHKRSNAKRWNDMIKNMYANAISNGNLVLLATIGLISVLREGVEVIIFYMGMIGELATKDFIIGIALAIVILIIFALLFRFIVKLIPIFYIFRVLSIFIFIMGFKMLGVSIQKLQLLGAMPRHVIEGFPTINWLGFYPSYEPLIAQVLILWXLL

SEQ ID NO: 5818 - protein, 1229 aa, Staphylococcus aureus
MGKFGLNFFKPTEKFNGNWSILESKSREWEKMYRERWSHDKEVRTTHGVNCTGSCSWKVFVKNGVITWENQQTDYPSCGPDMPEYEPRGCPRGASFSWYEYSPLRIKYPYIRGKLWDLWTEALEENNGNRVAAWASIVENEDKAKQYKQARGMGGHVRSNWKDVTEIIAAQLLYTIKKYGPDRIAGFTPIPAMSMISYAAGARFINLLGGEMLSFYDWYADLPPASPQIWGEQTDVPESSDWYNASYIIMWGSNVPLTRTPDAHFMTEVRYKGTKVISVAPDYAENVKFADNWLAPNPGSDAAIAQAMTHVILQEHYVNQPNERFINYAKQYTDMPFLIMLDEDENGYKAGRFLRASDLGQTTEQGEWKPVIHDAISDSLVVPNGTMGQRWEEGKKWNLKLETEDGSKINPTLSMTEGGYELETIQFPYFDSDGDGIFNRPIPTRQVTLANGDKVRIATIFDLMASQYGVRRFDHKLESKGYDDAESKYTPAWQEAISGVKQSVVIQVAKEFAQNAIDTEGRSMIIMGAGINHWFNSDTIYRSILNLVMLCGCQGVNGGGWAHYVGQEKCRPIEGWSTVAFAKDWQGPPRLQNGTSWFYFATDQWKYEESNVDRLKSPLAKTEELKYQHPADYNVLAARLGWLPSYPQFNKNSLLFAEEAKDEGIDSNEAILQRAIDEVKSKQTQFAIEDPDLKKNHPKSLFIWRSNLISSSAKGQEYFMKHLLGTKSGLLATPNEDEKPEEITWREETTGKLDLVVSLDFRMTATPLYSDIVLPAATWYEKHDLSSTDMHPYVHPFNPAIDPLWESRSDWDIYKTLAKAFSEMAKDYLPGTFKDVVTTPLSHDTKQEISTPYGVVKDWSKGEIEAVPGRTMPNFAIVERDYTKIYDKYVTLGPVLEKGKVGAHGVSFGVSEQYEELKSMLGTWSDTNDDSVRANRPRIDTARNVADAILSISSATNGKLSQKSYEDLEEQTGMPLKDISSERAAEKISFLNITSQPREVIPTAVFPGSNKQGRRYSPFTTNIERLVPFRTLTGRQSYYVDHEVFQQFGESLPVYKPTLPPMVFGNRDKKIKGGTDALVLRYLTPHGKWNIHSMYQDNKHMLTLFRGGPTVWISNEDAEKHDIQDNDWLEVYNRNGVVTARAVISHRMPKGTMFMYHAQDKHIQTPGSEITDTRGGSHNAPTRIHLKPTQLVGGYAQISYHFNYYGPIGNQRDLYVAVRKMKEVNWLED

SEQ ID NO: 5819 - protein, 312 aa, Staphylococcus aureus
MSVEEYGKVYLIGAGPGNPNYLTKKAERLIREADVILYDRLVNPLILQYANLTTEIIDVGKKPYAKHIQQEKINDCIVEAARRYNKVVRLKGGDPAIFGRVQEEVDTLNEHHIAFEIVPGVTSASAAVATMQTGLTMRTVAKSVTFSTGHFKDSEENEVDVNSLVNGGTLAIYMGVKRLGKIITQIQQYTDIDYPIAIVFQASCFNEFVVKGRLSNIISKLQHYSIEAKPGICIIGEVVDYTENTPKSYDPMKQFYVVSGSKHDALMLCEHLYDEGYGCLLNPNDTSNGTYHSSQYDYYDAFIKQQENVTYI

SEQ ID NO: 5820 - protein, 292 aa, Staphylococcus aureus
  VARIANT (1)...(292): Xaa = Any Amino Acid
YNNILKAPINDRDSIFTKEILVPFKKKFEVQHMPIYNDDKQTMSAIQFLDAFQISPKDLRMSDQMSIQYLNNDFWSNCEKYLKVAIDQFSNYSISSQVSNYHFTVLLGDRQKPLMYLNKNRGGDGGIPGYIMIYLVPSTSTINSMKSLIAHEVNHNMRYQYIDWDGGSLIELIIAEGLAENYVESLYGKAHIGPWVTNTNXSRDNVKIKNTIYNHLHLKHIFESMPYLYGDDINKLQGRPIVGLSHAAGYACGYHLVKYFLQKTNIPIEVATTLPAQKIINEVTEFWHTHTL

SEQ ID NO: 5821 - protein, 579 aa, Staphylococcus aureus
MAKIKANEALVKALQAWDIDHLYGIPGDSIDAVVDSLRTVRDQFKFYHVRHEEVASLAAAGYTKLTGKIGVALSIGGPGLIHLLNGMYDAKMDNVPQLILSGQTNSTALGTKAFQETNLQKLCEDVAVYNHQIEKGDNVFEIVNEAIRTAYEQKGVAVVICPNDLLTEKIKDTTNKPVDTSRPTVVSPKYKDIKKAVKLINKSKKPVMLIGVGAKHAKDELREFIEMAKIPVIHSLPAKTILPDDHPYSIGNLGKIGTKTSYQTMQEADLLIMVGTNYPYVDYLPKKNIKAIQIDTNPKNIGHRFNINVGIVGDSKIALHQLTENIKHVAERPFLNKTLERKAVWDKWMEQDKNNNSKPLRPERLMASINKFIKDDAVISADVGTATVWSTRYLNLGVNNKFIISSWLGTMGCGLPGAIASKIAYPNRQAIAIAGDGAFQMVMQDFATAVQYDLPLTVFVLNNKQLAFIKYEQQAAGELEYAVDFSDMDHAKFAEAAGGKGYTIKSASEVDAIVEEALAQDVPTIVDVYVDPNAAPLPGKIVNEEALGYGKWAFRSITEDKHLDLDQIPPISVAAKRFL

SEQ ID NO: 5822 - protein, 687 aa, Staphylococcus aureus
MFKKLFGQLQRIGKALMLPVAILPAAGILLAFGNAMHNEQLVEIAPWLKNDIIVMISSVMEAAGQVVFDNLPLLFAVGTALGLAGGDGVAALAALVGYLIMNATMGKVLHITIDDIFSYAKGAKELSQAAKEPAHALVLGIPTLQTGVFGGIIMGALAAWCYNKFYNITLPPFLGFFAGKRFVPIVTSVVAIATGVLLSFAWPPIQDGLNSLSNFLLNKNLTLTTFIFGIIERSLIPFGLHHIFYSPFWFEFGSYTNHAGELVRGDQRIWMAQLKDGVPFTAGAFTTGKYPFMMFGLPAAAFAIYKNARPERKKVVGGLMLSAGLTAFLTGITEPLEFSFLFVAPVLYGIHVLLAGTSFLVMHLLGVKIGMTFSGGFIDYILYGLLNWDRSHALLVIPVGIVYAIVYYFLFDFAIRKFKLKTPGREDEETEIRNSSVAKLPFDVLDAMGGKENIKHLDACITRLRVEVVDKSKVDVAGIKALGASGVLEVGNNMQAIFGPKSDQIKHDMAKIMSGEITKPSETTVTEEMSDEPVHVEALGTTDIYAPGIGQIIPLSEVPDQVFAGKMMGDGVGFIPEKGEIVAPFDGTVKTIFPTKHAIGLESESGVEVLIHIGIDTVKLNGEGFESLINVDEKVTQGQPLMKVNLAYLKAHAPSIVTPMIITNLENKELVIEDVQDADPGKLIMTV

SEQ ID NO: 5823 - protein, 645 aa, Staphylococcus aureus
SKVNVPELKPVQSKQAVSERMPASQATPSSRSDSQESNTNAYKTNNMTSNNVENNQLIGHAETENDYQNAQQYSEQKPSVDSTQTEIFEESQDDNQLENEQVDQSTSSSVSEVSDITEESEETTHPNNTSGQQDNDDQQKDLQSSFSNKNEDTANENRPRTNQQDVATNQAVQTSKPMIRKGPNIKLPSVSLLEEPQVIESDEDWITDKKKELNDALFYFNVPAEVQDVTEGPSVTRFELSVEKGVKVSRITALQDDIKMALAAKDIRIEAPIPGTSRVGIEVPNQNPTTVNLRSIIESPSFKNAESKLTVAMGYRINNEPLLMDIAKTPHALIAGATGSGKSVCINSILMSLLYKNHPEELRLLLIDPKMVELAPYNGLPHLVAPVITDVKAATQSLKWAVEEMERRYKLFAHYHVRNITAFNKKAPYDERMPKIVIVIDELADLMMMAPQEVEQSIARIAQKARACGIHMLVSTQRPSVNVITGLIKANIPTRIAFMVSSSVDSRTILDSGGAERLLGYGDMLYLGSGMNKPIRVQGTFVSDDEIDDVVDFIKQQREPDYLFEEKELLKKTQTQSQDELFDDVCAFMVNEGHISTSLIQRHFQIGYNRAARIIDQLEQLGYVSSANGSKPRDVYVTEADLNKE

SEQ ID NO: 5824 - protein, 887 aa, Staphylococcus aureus
MAELPQSRINERNITSEMRESFLDYAMSVIVARALPDVRDGLKPVHRRILYGLNEQGMTPDKSYKKSARIVGDVMGKYHPHGDASIYKAMVRMAQDFSYRYPLVDGQGNFGSMDGDGAAAMRYTEARMTKITLELLRDINKDTIDFIDNYDGNEREPSVLPARFPNLLANGASGIAVGMATNIPPHNLTELINGVLSLSKNPDISIAELMEDIEGPDFPTAGLILGKSGIRRAYETGRGSIQMRSRAVIEERGGGRQRIVVTEIPFQVNKARMIEKIAELVRDKKIDGITDLRDETSLRTGVRVVIDVRKDANASVILNNLYKQTPLQTSFGVNMIALVNGRPKLINLKEALVHYLEHQKTVVRRRTQYNLRKAKDRAHILEGLRIALDHIDEIISTIRESDTDKVAMESLQQRFKLSEKQAQAILDMRLRRLTGLERDKIEAEYNELLNYISELEAILADEEVLLQLVRDELTEIRDRFGDDRRTEIQLGGFENLEDEDLIPEEQIVITLSHNNYIKRLPVSTYRAQNRGGRGVQGMNTLEEDFVSQLVTLSTHDHVLFFTNKGRVYKLKGYEVPELSRQSKGIPVVNAIELENDEVISTMIAVKDLESEDNFLVFATKRGVVKRSALSNFSRINRNGKIAISFREDDELIAVRLTSGQEDILIGTSHASLIRFPESTLRPLGRTATGVKGITLREGDEVVGLDVAHANSVDEVLVVTENGYGKRTPVNDYRLSNRGGKGIKTATITERNGNVVCITTVTGEEDLMIVTNAGVIIRLDVADISQNGRAAQGVRLIRLGDDQFVSTVAKVKEDAEDETNEDEQSTSTVSEDGTEQQREAVVNDETPGNAIHTEVIDSEENDEDGRIEVRQDFMDRVEEDIQQSSDEE

SEQ ID NO: 5825 - protein, 607 aa, Staphylococcus aureus
MAHLSVKLRLLILALIDSLIVTFSVFVSYYILEPYFKTYSVKLLILAAISLFISHHISAFIFNMYHRAWEYASVSELILIVKAVTTSIVITMVVVTIVTGNRPFFRLYLITWMMHLILIGGSRLFWRIYRKYLGGKSFNKKPTLVVGAGQAGSMLIRQMLKSDEMKLEPVLAVDDDEHKRNITITEGVKVQGKIADIPELVRKYKIKKIIIAIPTIGQERLKEINNICHMDGVELLKMPNIEDVMSGELEVNQLKKVEVEDLLGRDPVELDMDMISNELTNKTILVTGAGGSIGSEICRQVCNFYPERIILLGHGENSIYLINRELRNRFGKNVDIVPIIADVQNRARMFEIMETYKPYAVYHAAAHKHVPLMEDNPEEAVRNNILGTKNTAEAAKNAEVKKFVMISTDKAVNPPNVMGASKRIAEMIIQSLNDETHRTNFVAVRFGNVLGSRGSVIPLFKSQIEEGGPVTVTHPEMTRYFMTIPEASRLVLQAGALAEGSEVFVLDMGEPVKIVDLARNLIKLSGKKEDDIRITYTGIRPGEKMFEELMNKDEVHPEQVFEKIYRGKVQHMKCNEVEAIIQDIVNDFSKEKIINYANGKKGDNYVR

SEQ ID NO: 5826 - protein, 208 aa, Staphylococcus aureus
MRIAIEKIIGLLKNQSSKESNVKIHRLAYITNSKFDGNNYIDRWCKIRNSHIGEYSYIGFGSDFNNVEVGRYCSISSDVKIGLGKHPTHFFSSSPIFYSNNNPFNIKQKFIDFNDQPSRTTIKNDVWIGANVIIMDGLTINTGAVIAAGSVVTKNVGAYEVVGGVPAKVIKKRFDNKTIEKLLESKWWEKTPDKLKGFSVEYLNKKDT

SEQ ID NO: 5827 - protein, 241 aa, Staphylococcus aureus
SLNMETLELQGAKLRYHQVGQGPVLIFIPGANGTGDIFLPLAEQLKDHFTVVAVDRRDYGESELTEPLPDSASNPDSDYRVKRDAQDIAELAKSLSDEPVYILGSSSGSIVAMHVLKDYPEVVKKIAFHEPPINTFLPDSTYWKDKNDDIVHQILTEGLEKGMKTFGETLNIAPIDAKMMSQPADTEEGRIEQYKRTMFWSEFEIRQYTHSDITLDDFTKYSDKITLLNGTDSRRLLPTRC

SEQ ID NO: 5828 - protein, 261 aa, Staphylococcus aureus
LKTVSQLIDMKQKQTKISMVTAYDFPSAKQVEAAGIDMILVGDSLGMTVLGYESTVQVTLADMIHHGRAVRRGAPNTFVVVDMPIGAVGISMTQDLNHALKLYQETNANAIKAEGAHITPFIEKATAIGIPVVAHLGLTPQSVGVMGYKLQGATKEAAEQLILDAKNVEQAGAVALVLEAIPNDLAEEISKHLTIPVIGIGAGKGTDGQVLVYHDMLNYGVEHKAKFVKQFADFSVGVDGLKQYDQEVKSGAFPSEEYTYK

SEQ ID NO: 5829 - protein, 111 aa, Staphylococcus aureus
KEQQFSNLVRSYRKEYVGKGPNSIRVSFKDNWAIAHMTGVLSKVESFYLNDKRNESMLHYTRTEKIKQMYKEIDVNEMESLVGAKFVKLFTDIDLNDDEVISIFVFDKSIE

SEQ ID NO: 5830 - protein, 335 aa, Staphylococcus aureus
KIVALFPEAVEGQENQLLNTKKALGLKTFLEERGHEFIILADNGEDLDKHLPDMDVIISAPFYPAYMTRERIEKAPNLKLAITAGVGSDHVDLAAASEHNIGVVEVTGSNTVSVAEHAVMDLLILLRNYEEGHRQSVEGEWNLSQVGNHAHELQHKTIGIFGFGRIGQLVAERLAPFNVTLQHYDPINQQDHKLSKFVSFDELVSTSDAITIHAPLTPETDNLFDKDVLSRMKKHSYLVNTARGKIVNRDALVEALASEHLQGYAGDVWYPQPAPADHPWRTMPRNAMTVHYSGMTLEAQKRIEDGVKDILERFFNHEPFQDKDIIVASGRIASK

SEQ ID NO: 5831 - protein, 230 aa, Staphylococcus aureus
  VARIANT (1)...(230): Xaa = Any Amino Acid
IGIIGAMEEEVTILKNKLTQLSEISVAHVKFYTGILKDREVVITQSGIGKVNAAISTTLLINKFKPDVIINTGSAGALDESLNVGDVLISDDVKYHDADATAFGYEYGQIPQMPVAFQSSKPLIEKVSQVVQQQQLTAKVGLIVSGDSFIGSVEQRQKIKKAFPNAMAVEMEATAIAQTCYQFNVPFVVVRAVSDLANGDSEMSFEAFLEKAAVSSSQTVEALVSQLXKG

SEQ ID NO: 5832 - protein, 751 aa, Staphylococcus aureus
LFDYSMIKGTVEAILFQNSDNFYTVLKVDTIETNEDFDTMPTVVGFLPNIVEGDVYTFKGQVVDHPRYGKQLKAETFEKEMPQTKEAIISYLSSDLFKGVGKKTAQNIVNTLGDNAINDILDDHSVLEKVSGLSQKKQKQIAEQISANQESEKIMIRLHDLGFGPKLSMAIYQFYLGDTLTILDRNPYQLIYDIKGIGFNKADQLARNIGIAYNDNERLKAALLYTLEEECIKQGHTYLPINVVIDLTVDVLNYQDEEVIEPEKLDEMLQYLNEEKRLIIDNEQVAIPSLYYSEIKSVQNLFRIKTHTNKLTEIEQSDLQMHIGEIEDANQVNYAASQKEALQTAINSKVMLLTGGPGTGKTTVIKGIVELYAEIHGLSLDYDDYVNDDYPVVLAAPTGRASKRLQESTGLEAMTIHRLIGWNQDTKPEDILENEINARLIIIDEMSMVDTWLFHQFLSAVPLDAQLIFVGDEDQLPSVGPGQVFKDLIESKAIPRVNLTEVYRQQDGSSIIELAHRMKLGQKIDITQRFHDRSFINCQANQIPTVVEKVVTSAVNKGYTMADIQVLAPMYKGNAGIKRLNQVLQDILNPKKKDTREIEFGDVVFRKGDKVLQLVNRPNDNIFNGDIGVIVGIFWAKENALNKDVLVVDFEGNEITFTKQDMMELTHAYCTSIHKSQGSEFPIVIMPIVKQYFRMLQRPILYTGLTRAKTSLVLLGDPEAFDIGLKTNGQARLTQLCTLLKNYFNSEDEEM

SEQ ID NO: 5833 - protein, 183 aa, Staphylococcus aureus
MNIEKAKRLAKEKLPEKRYNHSLRVAETAIKLAEIYDGDTSKVELAGVLHDFCKYDDLGKMYQIVRQYELGNDLLSYGSEILHGPVCAAIMEHEYGINDEEVLMAIKYHTTGRQQMTKTEKLIFIADYIEPGRTIPGVDDIRDMAYNQGSLDKTIYEISKRTVLFLIQKDITVYNKTIDCLNY

SEQ ID NO: 5834 - protein, 2437 aa, Staphylococcus aureus
IINQTTNPTLNPDEITRALTQVTDAKNGLNGEAKLATEKQNAKDAVSGMTHLNDAQKQALKGQIDQSPEIATVNQVKQTATSLDQAMDQLSQAINDKAQTLADGNYLNADPDKQNAYKQAVAKAEALLNKQSGTNEVQAQVESITNEVNAAKQALNGNDNLANAKQQAKQQLANLTHLNDAQKQSFESQITQAPLVTDVTTINQKAQTLDHAMELLRNSVADNQTTLASEDYHDATAQRQNDYNQAVTAANNIINQTTSPTMNPDDVNGATTQVNNTKVALDGDENLAAAKQQANNRLDQLDHLNNAQKQQLQSQITQSSDIAAVNGHKQTAESLNTAMGNLINAIADHQAVEQRGNFINADTDKQTAYNTAVNEAAAMINKQTGQNANQTEVEQAITKVQTTLQALNGDHNLQVAKTNATQAIDALTSLNDPQKTALKDQVTAATLVTAVHQIEQNANTLNQAMHGLRQSIQDNAATKANSKYINEDQPEQQNYDQAVQAANNIINEQTATLDNNAINQAATTVNTTKAALHGDVKLQNDKDHAKQTVSQLAHLNNAQKHMEDTLIDSETTRTAVKQDLTEAQALDQLMDALQQSIADKDATRASSAYVNAEPNKKQSYDEAVQNAESIIAGLNNPTINKGNVSSATQAVISSKNALDGVERLAQDKQTAGNSLNHLDQLTPAQQQALENQINNATTRGEVAQKLTEAQALNQAMEALRNSIQDQQQTEAGSKFINEDKPQKDAYQAAVQNAKDLINQTNNPTLDKAQVEQLTQAVNQAKDNLHGDQKLADDKQHAVTDLNQLNGLNNPQRQALESQINNAATRGEVAQKLAEAKALDQAMQALRNSIQDQQQTESGSKFINEDKPQKDAYQAAVQNAKDLINQTGNPTLDKSQVEQLTQAVTTAKDNLHGDQKLARDQQQAVTTVNALPNLNHAQQQALTDAINAAPTRTEVAQHVQTATELDHAMETLKNKVDQVNTDKAQPNYTEASTDKKEAVDQALQAAESITDPTNGSNANKDAVDQVLTKLQEKENELNGNERVAEAKTQAKQTIDQLTHLNADQIATAKQNIDQATKLQPIAELVDQATQLNQSMDQLQQAVNEHANVEQTVDYTQADSDKQNAYKQAIADAENVLKQNANKQQVDQALQNILNAKQALNGDERVALAKTNGKHDIDQLNALNNAQQDGFKGRIDQSNDLNQIQQIVDEAKALNRAMDQLSQEITDNEGRTKGSTNYVNADTQVKQVYDETVDKAKQALDKSTGQNLTAKQVIKLNDAVTAAKKALNGEERLNNRKAEALQRLDQLTHLNNAQRQLAIQQINNAETLNKASRAINRATKLDNAMGAVQQYIDEQHLGVISSTNYINADDNLKANYDNAIANAAHELDKVQGNAIAKAEAEQLKQNIIDAQNALNGDQNLANAKDKANAFVNSLNGLNQQQQDLAHKAINNADTVSDVTDIVNNQIDLNDAMETLKHLVDNEIPNAEQTVNYQNADDNAKTNFDDAKRLANTLLNSDNTNVNDINGAIQAVNDAIHNLNGDQRLQDAKDKAIQSINQALANKLKEIEASNATDQDKLIAKNKAEELANSIINNINKATSNQAESQVQTAGNHAIEQVHANEIPKAKIDANKDVDKQVQALIDEIDRNPNLTDKEKQALKDRINQILQQGHNGINNAMTKEEIEQAKAQLAQALQDIKDLVKAKEDAKQDVDKQVQALIDEIDQNPNLTDKEKQALKDRINQILQQGHNDINNALTKEEIEQAKAQLAQALQDIKDLVKAKEDAKNAIKALANAKRDQINSNPDLTPEQKAKALKEIDEAEKRALQNVENAQTIDQLNRGLNLGLDDIRNTHVWEVDEQPAVNEIFEATPEQILVNGELIVHRDDIITEQDILAHINLIDQLSAEVIDTPSTATISDSLTAKVEVTLLDGSKVIVNVPVKVVEKELSVVKQQAIESIENAAQQKINEINNSVTLTLEQKEAAIAEVNKLKQQAIDHVNDAPDVHSVEEIQQQEQAHIEQFNPEQFTIEQAKSNAIKSIEDAIQHMIDEIKARTDLTDKEKQEAIAKLNQLKEQAIQAIQRAQSIDEISEQLEQFKAQMKAANPTAKELAKRKQEAISRIKDFSNEKINSIRNSEIGTADEKQAAMNQINEIVLETIRDINNAHTLQQVEAALNNGIARISAVQIVTSDRAKQSSSTGNESNSHLTIGYGTANHPFNSSTIGHKKKLDEDDDIDPLHMRHFSNNFGNVIKNAIGVVGISGLLASFWFFIAKRRRKEDEEEELEIRDNNKDSIKETLDDTKHLPLLFVKRRRKEDEEDVTVEEKDSLNNGESLDKVKHTPFFLPKRRRKEDEEDVEVTNENTDEKVLKDNEHSPLLFAKRRKDKEEDVETTTSIESKDEDVPLLLAKKKNQKDNQSKDKKSASKNTSKKVAAKKKKKKAKKN

SEQ ID NO: 5835 - protein, 2434 aa, Staphylococcus aureus
MGALRTSIQNDNTTKTSQNYLDASDSNKNNYNTAVNNANGVINATNNPNMDANAINGMANQVNTTKAALNGAQNLAQAKTNATNTINNAHDLNQKQKDALKTQVNNAQRVSDANNVQHTATELNSAMTALKAAIADKERTKASGNYVNADQEKRQAYDSKVTNAENIISGTPNATLTVNDVNSAASQVNAAKTALNGDNNLRVAKEHANNTIDGLAQLNNAQKAKLKEQVQSATTLDGVQTVKNSSQTLNTAMKGLRDSIANEATIKAGQNYTDASPNNRNEYDSAVTAAKAIINQTSNPTMEPNTITQVTSQVTTKEQALNGARNLAQAKTTAKNNLNNLTSINNAQKDALTRSIDGATTVAGVNQETAKATELNNAMHSLQNGINDETQTKQTQKYLDAEPSKKSAYDQAVNAAKAILTKASGQNVDKAAVEQALQNVNSTKTALNGDAKLNEAKAAAKQTLGTLTHINNAQRTALDNEITQATNVEGVNTVKAKAQQLDGAMGQLETSIRDKDTTLQSQNYQDADDAKRTAYSQAVNAAATILNKTAGGNTPKADVERAMQAVTQANTALNGIQNLDRAKQAANTAITNASDLNTKQKEALKAQVTSAGRVSAANGVEHTATELNTAMTALKRAIADKAETKASGNYVNADANKRQAYDEKVTAAENIVSGTPTPTLTPADVTNAATQVTNAKTQLNGNHNLEVAKQNANTAIDGLTSLNGPQKAKLKEQVGQATTLPNVQTVRDNAQTLNTAMKGLRDSIANEATIKAGQNYTDASQNKQTDYNSAVTAAKAIIGQTTSPSMNAQEINQAKDQVTAKQQALNGQENLRTAQTNAKQHLNGLSDLTDAQKDAVKRQIEGATHVNEVTQAQNNADALNTAMTNLKNGIQDQNTIKQGVNFTDADEAKRNAYTNAVTQAEQILNKAQGPNTSKDGVETALENVQRAKNELNGNQNVANAKTTAKNALNNLTSINNAQKEALKSQIEGATTVAGVNQVSTTASELNTAMSNLQNGINDEAATKAAQKYTDADREKQTAYNDAVTAAKTLLDKTAGSNDNKAAVEQALQRVNTAKTALNGDERLNEAKNTAKQQVATMSHLTDAQKANLTSQIESGTTVAGVQGIQANAGTLDQAMNQLRQSIASKDATKSSEDYQDANADLQNAYNDAVTNAEGIISATNNPEMNPDTINQKASQVNSAKSALNGDEKLAAAKQTAKSDIGRLTDLNNAQRTAANAEVDQAPNLAAVTAAKNKATSLNTAMGNLKHALAEKDNTKRSVNYTDADQPKQQAYDTAVTQAEAITNANGSNANETQVQAALNQLNQAKNDLNGDNKVAQAKESAKRALASYSNLNNAQSTAATSQIDNATTVAGVTAAQNTANELNTAMGQLQNGINDQNTVKQQVNFTDADQGKKDAYTNAVTNAQGILDKAHGQNMTKAQVEAALNQVTTAKNALNGDANVRQAKSDAKANLGTLTHLNNAQKQDLTSQIEGATTVNGVNGVKTKAQDLDGAMQRLQSAIANKDQTKASENYIDADPTKKTAFDNAITQAESYLNKDHGANKDKQAVEQAIQSVTSTENALNGDANLQRAKTEAIQAIDNLTHLNTPQKTALKQQVNAAQRVSGVTDLKNSATSLNNAMDQLKQAIADHDTIVASGNYTNASPDKQGAYTDAYNAAKNIVNGSPNVITNAADVTAATQRVNNAETGLNGDTNLATAKQQAKDALRQMTHLSDAQKQSITGQIDSATQVTGVQSVKDNATNLDNAMNQLRNSIANKDDVKASQPYVDADRDKQNAYNTAVTNAENIINATSQPTLDPSAVTQAANQVSTNKTALNGAQNLANKKQETTANINQLSHLNNAQKQDLNTQVTNAPNISTVNQVKTKAEQLDQAMERLINGIQDKDQVKQSVNFTDADPEKQTAYNNAVTAAENIINQANGTNANQSQVEAALSTVTTTKQALNGDRKVTDAKNNANQTLSTLDNLNNAQKGAVTGNINQAHTVAEVTQAIQTAQELNTAMGNLKNSLNDKDTTLGSQNFADADPEKKNAYNEAVHNAENILNKSTGTNVPKDQVEAAMNQVNATKAALNGTQNLEKAKQHANTAIDGLSHLTNAQKEALKQLVQQSTTVAEAQGNEQKANNVDAAMDKLRQSIADNATTKQNQNYTDASQNKKDAYNNAVTTAQGIIDQTTSPTLDPTVINQAAGQVSTTKNALNGNENLEAAKQQASQSLGSLDNLNNAQKQTVTDQINGAHTVDEANQIKQNAQNLNTAMGNLKQAIADKDATKATVNFTDADQAKQQAYNTAVTNAENIISKANGGNATQAEVEQAIKQVNAAKQALNGNANVQHAKDEATALINSSNDLNQAQKDALKQQVQNATTVAGVNNVKQTAQELNNAMTQLKQGIADKEQTKADGNFVNADPDKQNAYNQAVAKAEAL

SEQ ID NO: 5836 - protein, 1113 aa, Staphylococcus aureus
TNKVETEEAPTAEETNKAATEETPAVEDTNAKSNSNAQPSETERTQVVDTVAKDLYKKSEVTEAEKAEIEKVLPKDISNLSNEEIKKIALSEVLKETANKENAQPRATFRSVSSNARTTNVNYSATALRAAAQDTVTKKGTGNFTAHGDIIHKTYKEEFPNEGKLTAFNTNFNPDTGTKGALEYNDKIDFNKDFTITVPVANNNQGNTTGADGWGFMFTQGNGQDFLNQGGILRDKGMANASGFKIDTAYNNVNGKVDKLDADKTNNLSQIGAAKVGYGTFVKNGADGVTNQVGQNALNTKDKPVNKIIYADNTTNHLDGQFHGQRLNDVVLNYDAATSTITATYAGKTWKATTDDLGIDKSQKYNFLITSSHMQNRYSNGIMRTNLEGVTITTPQADLIDDVEVTKQPIPHKTIREFDPTLEPGSPDVIVQKGEDGEKTTTTPTKVDPDTGDVVERGEPTTEVTKNPVDEIVHFAPEEVPQGHKDEFDPNLPIDGTEEVPGKPGIKNPETGKVVTPPVDDVTKHGPKAGEPEVTKEEIPFEKKREFNPDLKPGEEKVTQEGQTGEKTTTTPTTINPLTGEKVGEGEPTTEVTKEPVDEITQFGGEEVPQGHKDEFDPNLPIDGTEEVPGKPGIKNPETGKVVTPPVDDVTKHGPKAGEPEVTKEEIPFEKKREFNPDLKPGEEKVTQEGQTGEKTTTTPTTINPLTGEKVGEGEPTTEVTKEPVDEITQFGGEEVPQGHKDEFDPNLPIDGTEEVPGKPGIKNPETGKVVTPPVDDVTKHGPKAGEPEVTKEEIPYETKRVLDPTMEPGSPDKVAQKGENGEKTTTTPTTINPLTGEKVGEGEPTTEVTKEPIDEIVNYAPEIIPHGTREEIDPNLPEGETKVIPGKDGLKDPETGEIIEEPQDEVIIHGAKDDSDSDADSDSDADSDSDADSDSDSDSDSDADSDSDADSDSDADSDSDADSDSDADSDSDADSDSDADSDSDADSDSDSDSDSDADSDSDADSDSDADSDSDADSDSDADSDSDADSDSDSDSDSDADSDSDADSDSDADSDSDADRDHNDKTDKPNNKELPDTGNDAQNNGTLFGSLIRALGGLFLVGRRRKNKNNEEK

SEQ ID NO: 5837 - protein, 591 aa, Staphylococcus aureus
FNSDFDSIFRRMMKDMQGSNQVGNKKYYINGKEVSPEELAQLTQQGGNHSAEQSAQAFQQAAQRQQGQQGGNGNYLEQIGRNLTQEARDGLLDPVIGRDKEIQETAEVLSRRTKNNPILVGEAGVGKTAIVEGLAQAIVEGNVPAAIKDKEIISVDISSLEAGTQYRGAFEENIQKLIEGVKSSQNAVLFFDEIHQIIGSGATGSDSGSKGLSDILKPALSRGEISIIGATTQDEYRNNILKDAALTRRFNEVLVNEPSAKDTVEILKGIREKFEEHHQVKLPDDVLKACVDLSIQYIPQRLLPDKAIDVLDITAAHLSAQSPAVDKVETEKRISELENDKRKAVSAEEYKKADDIQNEIKSLQDKLENSNGEHTAVATVHDISDTIQRLTGIPVSQMDDNDIERLKNISNRLRSKIIGQDQAVEMVSRAIRRNRAGFDDGNRPIGSFLFVGPTGVGKTELAKQLAIDLFGNKDALIRLDMSEYSDTTAVSKMIGTTAGYVGYDDNSNTLTEKVRRNPYSVILFDEIEKANPQILTLLLQVMDDGNLTDGQGNVINFKNTIIICTSNAGFGNGNDAEEKDIMHEMKKFFRP

SEQ ID NO: 5838 - protein, 636 aa, Staphylococcus aureus
MKKQIISLGALAVASSLFTWDNKADAIVTKDYSGKSQVNAGSKNGTLIDSRYLNSALYYLEDYIIYAIGLTNKYEYGDNIYKEAKDRLLEKVLREDQYLLERKKSQYEDYKQWYANYKKENPRTDLKMANFHKYNLEELSMKEYNELQDALKRALDDFHREVKDIKDKNSDLKTFNAAEEDKATKEVYDLVSEIDTLVVSYYGDKDYGEHAKELRAKLDLILGDTDNPHKITNERIKKEMIDDLNSIIDDFFMETKQNRPKSITKYNPTTHNYKTNSDNKPNFDKLVEETKKAVKEADDSWKKKTVKKYGETETKSPVVKEEKKVEEPQAPKVDNQQEVKTTAGKAEETTQPVAQPLVKIPQGTITGEIVKGPEYPTMENKTVQGEIVQGPDFLTMEQSGPSLSNNYTNPPLTNPILEGLEGSSSKLEIKPQGTESTLKGTQGESSDIEVKPQATETTEASQYGPRPQFNKTPKYVKYRDAGTGIREYNDGTFGYEARPRFNKPSETNAYNVTTHANGQVSYGARPTYKKPSETNAYNVTTHANGQVSYGARPTQNKPSKTNAYNVTTHGNGQVSYGARPTQNKPSKTNAYNVTTHANGQVSYGARPTYKKPSKTNAYNVTTHADGTATYGPRVTK

SEQ ID NO: 5839 - protein, 610 aa, Staphylococcus aureus
FLTQLKDNVLVADGAIGTILYSEGLDTCPEAYNLSHPDKVERIHRSYIEAGADVIQTNTYGANFEKLKRFGLEDKVKAIHQAAVRIAKKAANKDTYILGTVGGFRGIKQEDISLQTILYHTEIQIDTLIEEGVDALLFETYYDLEELTNVISRTRKKYDIPIIAQLTASNTNYLVNGQAINEGLKQLVQCGANIVGLNCHHGPHHMQESFTHIELPEHAFLSCYPNASLLDIENSEFKYSDNAQYFGQVAQNLIREGVRLIGGCCGTTPEHIKFIKESIQTLKPVNDKKVIPIPTKALFNPSQNKVRQSLTSKVQERPTVIIELDTPKHLDTDRFFENIAKLDKANVDAVTLADNSLATVRISNIAAASLIKQYYNIEPLVHITCRDRNLIGLQSHLLGLSLIGVNEILAITGDPSKVGHLPGATNVYDVNSKGLTELALRFNQGINTDGDALKKRTHFNIAGAFNPNVRKLYGAVKRLEKKIESGMSYFITQPVYSKEKIIEIYHATKHLNKPFFIGIMPIASYKNALFLHNEVPGIKMSDEILQQFEAVKDDKAKTRELSLKLSKDLIDTVHEYFNGLYIITPFQNVEDSLELAAYSKSITAHKEAIL

SEQ ID NO: 5840 - protein, 56 aa, Staphylococcus aureus
YGINDIVEMKKQHACGTNRFKIIRMGADIRIKCENCQRSIMIPRQTFDKKLKKIIE

SEQ ID NO: 5841 - protein, 690 aa, Staphylococcus aureus
MLRGQEERKYSIRKYSIGVVSVLAATMFVVSSHEAQASEKTSTNAAAQKETLNQPGEQGNAITSHQMQSGKQLDDMHKENGKSGTVTEGKDTLQSSKHQSTQNSKTIRTQNDNQVKQDSERQGSKQSHQNNATNNTERQNDQVQNTHHAERNGSQSTTSQSNDVDKSQPSIPAQKVIPNHDKAAPTSTTPPSNDKTAPKSTKAQDATTDKHPNQQDTHQPAHQIIDAKQDDTVRQSEQKPQVGDLSKHIDGQNSPEKPTDKNTDNKQLIKDALQAPKTRSTTNAAADAKKVRPLKANQVQPLNKYPVVFVHGFLGLVGDNAPALYPNYWGGNKFKVIEELRKQGYNVHQASVSAFGSNYDRAVELYYYIKGGRVDYGAAHAAKYGHERYGKTYKGIMPNWEPGKKVHLVGHSMGGQTIRLMEEFLRNGNKEEIAYHKAHGGEISPLFTGGHNNMVASITTLATPHNGSQAADKFGNTEAVRKIMFALNRFMGNKYSNIDLGLTQWGFKQLPNESYIDYIKRVSKSKIWTSDDNAAYDLTLDGSAKLNNMTSMNPNITYTTYTGVSSHTGPLGYENPDLGTFFLMATTSRIIGHDAREEWRKNDGVVPVISSLHPSNQPFVNVTNDEPATRRGIWQVKPIIQGWDHVDFIGVDFLDFKRKGAELANFYTGIINDLLRVEATESKGTQLKAS

SEQ ID NO: 5842 - protein, 135 aa, Staphylococcus aureus
VTTPILVKAPIAGRRILLKEVRDSIFREKMVGEGLAIKAHEESKVIAPFNGLISMIVPTKHAVGIQSEDGVDIVIHIGVNTVDLEGKGFKCFVKQNDHVEAGQTLLQFDQQYIQQQGYNADVIVVISNSADLGKV

SEQ ID NO: 5843 - protein, 276 aa, Staphylococcus aureus
NYLVLQSDFGLSDGAVSAMYGVAYTVSDDIRVENLTHDIPPYDIWVASYRLYQTVKYWPKGTVFVSVVDPGVGSDRRTIACLTYSGHYIITPDNGSLSHIKHYEGIKKVIEIDEVKSRLPHSEESHTFHGRDVYAYNGARLAANKIAFERLGQAINVDSIEALEIREVTKNEDSVTGSIDILDIRFGSLWTNIPLAFLKSLEIVHGNNLVVTIYHQDKKVYQNIIKFARSFADVNVGEPLVYVNSLVNIGVAVNQDSFSDLYHIGTGNDWTIHLSK

SEQ ID NO: 5844 - protein, 117 aa, Staphylococcus aureus
  VARIANT (1)...(117): Xaa = Any Amino Acid
HLAADEISMGDYVXTGGELPAMTMTDAIVRLIPGVLGNEQSHQDDSFSDGLLEFPQYTRPREFKGLTVPDVLLSGNHANIDAWRHEQKLIRTYNKRPDLIEKYPLTNADKQILERYK

SEQ ID NO: 5845 - protein, 1016 aa, Staphylococcus aureus
EAEAAENNIENPTTLKDNVQSKEVKIEEVTNKDTAPQGVEAKSEVTSNKDTIEHEPSVKAEDISKKEDTPKEVADVAEVQPKSSVTHNAETPKVRKARSVDEGSFDITRDSKNVVESTPITIQGKEHFEGYGSVDIQKKPTDLGVSEVTRFNVGNESNGLIGALQLKNKIDFSKDFNFKVRVANNHQSNTTGADGWGFLFSKGNAEEYLTNGGILGDKGLVNSGGFKIDTGYIYTSSMDKTEKQAGQGYRGYGAFVKNDSSGNSQMVGENIDKSKTNFLNYADNSTNTSDGKFHGQRLNDVILTYVASTGKMRAEYAGKTWETSITDLGLSKNQAYNFLITSSQRWGLNQGINANGWMRTDLKGSEFTFTPEAPKTITELEKKVEEIPFKKERKFNPDLAPGTEKVTREGQKGEKTITTPTLKNPLTGVIISKGEPKEEITKDPINELTEYGPETIAPGHRDEFDPKLPTGEKEEVPGKPGIKNPETGDVVRPPVDSVTKYGPVKGDSIVEKEEIPFEKERKFNPDLAPGTEKVTREGQKGEKTITTPTLKNPLTGVIISKGESKEEITKDPINELTEYGPETITPGHRDEFDPKLPTGEKEEVPGKPGIKNPETGDVVRPPVDSVTKYGPVKGDSIVEKEEIPFEKERKFNPDLAPGTEKVTREGQKGEKTITTPTLKNPLTGVIISKGEPKEEITKDPINELTEYGPETITPGHRDEFDPKLPTGEKEEVPGKPGIKNPETGDVVRPPVDSVTKYGPVKGDSIVEKEEIPFKKERKFNPDLAPGTEKVTREGQKGEKTITTPTLKNPLTGEIISKGESIEEITKDPINELTEYGPETITPGHRDEFDPKLPTGEKEEVPGKPGIKNPETGDVVRPPVDSVTKYGPVKGDSIVEKEEIPFEKERKFNPDLAPGTEKVTREGQKGEKTITTPTLKNPLTGEIISKGESKEEITKDPVNELTEFGGEKIPQGHKDIFDPNLPTDQTEKVPGKPGIKNPDTGKVIEEPVDDVIKHGPK

SEQ ID NO: 5846 - protein, 159 aa, Staphylococcus aureus
GTPETKTVEIPFETKREFNPKLQPGEERVKQEGQPGSKTITTPITVNPLTGEKVGEGQPTEEITKQPVDKIVEFGGEKPKDPKGPENPEKPSRPTHPSGPVNPNNPGLSKDRAKPNGPVHSMDKNDKVKKSKIAKESVANQEKKRAELPKTGLESTQKG

SEQ ID NO: 5847 - protein, 127 aa, Staphylococcus aureus
MKERGYIEQLWREEKYHVLLHSQQSYQMIRNALKTDLSLHQVQQMIDVALLIEPSIGSVCNAFDHMWGYLKKCANEEERQQSKLLKADFINGKIDTQTLLDFLAELANKYDVQYLLQSRVLNTKRKR

SEQ ID NO: 5848 - protein, 255 aa, Staphylococcus aureus
MKRLNKLVLYISFLILVISFTAGCGIGKEAEVKKSFEKTLSMYPIKNLEDLYDKEGYRDDEFDKNDKGTWIIGSEMVVQPKGERMKSKGMVLYMNRNTKTTTGKYIVSETLHDEDGRPKSKDKEYPVKMVDNKIIPTKGIKDENIKKEIENFKFFAQYGSFKDLSKYKDGDISYNPEVPSYSAKYQLTNDDYNVKQLRKRYKIPTNKAPKLLLKGSGDLKGSSVGYKDIEFTFVEKKGENTFFTDSLHLEPSEDK

SEQ ID NO: 5849 - protein, 209 aa, Staphylococcus aureus
VEVFADGADIEEMKAAYKNKQVDGFTTNPSLMAKAGVTDYKAFAEEAVKEIPDASISFEVFADDLETMEKEAAILKQYGENVFVKIPIVNTRGESTIPLIKKLSADNVRLNVTAVYTIEQVKEITEAVTEGVPTYVSVFAGRIADTGVDPLPLMKEAVKVTHSKDGVKLLWASCRELFNVIQADEIGADIITCPADVVKKVNTNLGRDI

SEQ ID NO: 5850 - protein, 489 aa, Staphylococcus aureus
  VARIANT (1)...(489): Xaa = Any Amino Acid
IKSLEIYGYGQFVQRKIEFNKNFTEIFGENEAGKSTIQAFIHSILFGFPTKKSKEPRLEPRLGNQYGGKLVLILDDGLEIEVERIKGSAQGDVKVYLPNGAVRDDAWLQKKLNYISKKTYQGIFSFDVLGLQDIHRNLNEKQLQDYLLQAGALGSTEFTSMREVINRKKDELYKKSGKNPIINQQIEQLKQLESQIREEEAKLETYHRLVDDRDKSSRRLENLKHNLNQLSKMHEEKQKEVALHDHSQEWKSLEQQLNIEPITFPEKGVDRYEKARAHKQSLERDIGLRNERLAQLKEEATQLEPVKQLILTPSLVXINKKMKLKIKNLNLLQSKRILRINNVIKMNCNQILVGLKRIMDVDSSEAMKSYVSEQIKNKQEQAAYIKQLERSLEENKIEDNAVHSELDSVEEKIVPEETFEKKKEYSQQVIELNEKENLYSKLKERFEIEQQEKQKRQKLLRTTFILLTLVGIGLTAFSFISNNMLFGII

SEQ ID NO: 5851 - protein, 271 aa, Staphylococcus aureus
MTLLTVKHLTITDTWTDQPLVSDVNFTLTKGETLGVIGESGSGKSITCKSIIGLNPERLGVTGEIIFDGTSMLSLSESQLKKYRGKDIAMVMQQGSRAFDPSTTVGKQMFETMKVHTSMSTQEIEKTLIEYMDYLSLKDPKRILKSYPYMLSGGMLQRLMIALALALKPKLIIADEPTTALDTITQYDVLEAFIDIKKHFDCAMIFISHDLTVINKIADRVVVMKNGQLIEQGTRESVLHHPEHVYTKYLLSTKKKINDHFKHVMRGDVHD

SEQ ID NO: 5852 - protein, 91 aa, Staphylococcus aureus
  VARIANT (1)...(91): Xaa = Any Amino Acid
LTAIIEANXQLVDDIAVVLSNSVSTVIVDYRGLTVAEVTDLRSQLREAGVESKVSLNTMVRRAAEKAGIEGLAEFLTGPTAIATSSDDAVA

SEQ ID NO: 5853 - protein, 182 aa, Staphylococcus aureus
MMGYIKRMALYMSVFLLIIFIVGCRNMKDEQKKEEQTNKTDSKEEQIKKSFEKTLDMYPIKNLEELYDKEGYRDGEFKKGDKGMWTIYTDFAKSNKQGGLSNEGMVLYLDRNTRTAKGHYFVKTFYNKGKFPDRKNYKVEMKNNKIILLDKVEDTNLKKRIENFKFFGQYANLKELKNFNKV

SEQ ID NO: 5854 - protein, 345 aa, Staphylococcus aureus
VKAPGKLYIAGEYAVTEPGYKSVLIALDRFVTATIEETDQYKGTIHSKALHHNPVTFSRDEDSIVISDPHAAKQLNYVVTAIEIFEQYAKSCDIAMKHFHLTIDSNLDDSNGHKYGLGSSAAVLVSVIKVLNEFYDMKLSNLYIYKLAVIANMKLQSLSSCGDIAVSVYSGWLAYSTFDHEWVKHQIEDTTVEEVLIKNWPGLHIEPLQAPENMEVLIGWTGSPASSPHFVSEVKRLKSDPSFYGDFLEDSHRCVEKLIHAFKTNNIKGVQKMVRQNRTIIQRMDKEATVDIETEKLKYLCDIAEKYHGASKTSGAGGGDCGITIINKDVDKEKIYDEWTKHGIK

SEQ ID NO: 5855 - protein, 157 aa, Staphylococcus aureus
MAERISSKIRRLEKSEEQIKLESLNEVTEAIAANKDSILKAIKLIKTLDDAKLLDALNGAIRGRQVIINKFAVELNKDIYTGLLSNMASMVFLLGELNVSDLSDFLNKVNKGLHVANQASPNAKTTIRSLLGVLKDDDMNRSLTYMLNMLKGMSREE

SEQ ID NO: 5856 - protein, 267 aa, Staphylococcus aureus
MKYFEKRWECMKAHKIFWLNLAAIIIISIVVSGDMFLAMKWEQIHLKDGLKKVLSTYPIKNLETLYEIDGHDNPHYENNDQDTWYIESSYSVVGSDELLKEDRMLLKVDKNTHKITGEYDTTTNDKKNATDSTYKSYPVKVVNNKIVFTKDVKDPALKQKIENNQFLIQSGDLTSILNSNDLKVTHDPTTDYYNLSGKLSNDNPNVKQLKRRYNIPKNASTKVELKGMSDLKGNNHQDQKLYFYFSSPGKDQIIYKESLTYNKISEH

SEQ ID NO: 5857 - protein, 505 aa, Staphylococcus aureus
MTASTWKKFEVYEVDKNLPVELVSYDSDKDYAYTLFPVSNGTREVKIVSSIEYGECIHEDYDYTLMVFAQPITNNPDDYVDEETYNLQKLLAPYHKAKTLERQVYELEKLQEKLPEKYKAEYKKKLDQTRVELADQVKSAVTEFENVTPTNDQLTDLQEAHFVVFESEENSESVMDGFVEHPFYTATLNGQKYVVMKTKDDSYWKDLIVEGKRVTTVSKDPKNNSRTLIFPYIPDKAVYNAIVKVVVANIGYEGQYHVRIINQDINTKDDDTSQNNTSEPLNVQTGQEGKVADTDVAENSSTATNPKDASDKADVIEPESDVVKDADNNIDKDVQHDVDHLSDMSDNNHFDKYDLKEMDTQIAKDTDRNVDKDADNSVGMSSNVDTDKDSNKNKDKVIQLNHIADKNNHTGKAAKLDVVKQNYNNTDKVTDKKTTEHLPSDIHKTVDKTVKTKEKAGTPSKENKLSQSKMLPKTGETTSSQSWWGLYALLGMLALFIPKFRKESK

SEQ ID NO: 5858 - protein, 637 aa, Staphylococcus aureus
MLMAKYRGKPFQLYVKLSCSTMMATSIILTNILPYDAQAASEKDTEITKEILSKQDLLDKVDKAIRQIEQLKQLSASSKEHYKAQLNEAKTASQIDEIIKRANELDSKDNKSSHTEMNGQSDIDSKLDQLLKDLNEVSSNVDRGQQSGEDDLNAMKNDMSQTATTKHGEKDDKNDEAMVNKALEDLDHLNQQIHKSKDASKDTSEDPAVSTTDNNHEVAKTPNNDGSGHVVLNKFLSNEENQSHSNRLTDKLQGSDKINHAMIEKLAKSNASTQHYTYHKLNTLQSLDQRIANTQLPKNQKSDLMSEVNKTKERIKSQRNIILEELARTDDKKYATQSILESIFNKDEAVKILKDIRVDGKTDQQIADQITRHIDQLSLTTSDDLLTSLIDQSQDKSLLISQILQTKLGKAEADKLAKDWTNKGLSNRQIVDQLKKHFASTGDTSSDDILKAILNNAKDKKQAIETILATRIERQKAKLLADLITKIETDQNKIFNLVKSALNGKADDLLNLQKRLNQTKKDIDYILSPIVNRPSLLDRLNKNGKTTDLNKLANLMNQGSDLLDSIPDIPTPKPEKTLTLGKGNGLLSGLLNADGNVSLPKAGETIKEHWLPISVIVGAMGVLMIWLSRRNKLKNKA

SEQ ID NO: 5859 - protein, 265 aa, Staphylococcus aureus
MMIHSKKLTLGICLVLLIILIVGYVIMTKTNGRNAQIKDTFNQTLKLYPTKNLDDFYDKEGFRDQEFKKGDKGTWIVNSEMVIEPKGKDMETRGMVLYINRNTRTTKGYYFISEMTDDSNGRPKDDEKRYPVKMEHNKIIPTKPLPNDKLKKEIENFKFFVQYGNFKDINDYKDGDISYNPNVPSYSAKYQLNNDDYNVQQLRKRYDIPTKQAPKLLLKGDGDLKGSSVGSRSLEFTFVENKEENIYFTDSVQYTPSEDTRYESN

SEQ ID NO: 5860 - protein, 262 aa, Staphylococcus aureus
MMIHSKKLTLGICLVLLIILIGGCVIMTKTNGRNAQIKENFNKTLSVYPTKNLDDFYDKEGFRDQEFDKRDKGTWIIYSEMVIEPKGKNMESRGMVLYINRNTRTTKGNFIVTEITEDSKGYSRSKEKKYPVKMENNRIIPTKPIPDDKLKKEIENFKFFVQYGNFKDFKDYKNGDISYNPNVPSYSAKYQLNNDDYNVQQLRKRYHIPTKQAPELKLKGSGNLKGSSVGSKDLEFTFVENQEENIYFSDSVEFTPSEDDKS

SEQ ID NO: 5861 - protein, 79 aa, Staphylococcus aureus
MSLSHYPIQDCSDLVFEWKAFMNTIADFDDETLCCIAKTYEDDTRFKDYFNSYDNQNLASYISEAVNYFLSNVNKSDNF

SEQ ID NO: 5862 - protein, 189 aa, Staphylococcus aureus
MKVGIDAGGTLIKIVQEQDNQRTFKTELTKNIDQVVEWLNQQQIEKLCLTGGNAGVIAENINIPAQIFVEFDAASQGLGILLKEQGHDLADYIFANVGTGTSLHYFDGQSQRRVGGIGTGGGMIQGLGYLLSQITDYKQLTDMAQHGDRNTIDLKVRHIYKDTEPPIPGDLTAANFGHVLHHLDADFTP

SEQ ID NO: 5863 - protein, 67 aa, Staphylococcus aureus
MDKESVVASLARNKKIAVETMAGQRYIIERILHTNDEKHIHILKPKDVVLDVDSIKEIDENHLNDAT

SEQ ID NO: 5864 - protein, 419 aa, Staphylococcus aureus
MKHNKISGFQWAMTIFVFFVITMALSIMLRDFQSIIGVKHFIFEVTDLAPLIAAIICILVFKYKKVQLAGLKFSISLKVIERLLLALILPLIILIIGMYSFNTFADSFILLQSTGLSVPITHILIGHILMAFVVEFGFRSYLQNIVETKMNTFFASIVVGLMYSVFSANTTYGTEFAAYNFLYTFSFSMILGELIRATKGRTIYIATTFHASMTFGLIFLFSEEIGDLFSIKVIAISTAIVAVGYIGLSLIIRGIAYLTTRRNLEELEPNNYLDHVNDDEETNHTEAEKSSSNIKDAEKTGVATASTVGVAKNDTENTVADEPSIHEGTEKTEPQHHIGNQTESNHDEDHDITSESVESAESVKQAPQSDDLTNDSNEDEIEQSLKEPATYKEDRRSSVVIDAEKHIEKTEEQSSDKNK

SEQ ID NO: 5865 - protein, 137 aa, Staphylococcus aureus
  VARIANT (1)...(137): Xaa = Any Amino Acid
PNALWGEQKQFVAIASVLATNPSVIILDEATSMLDRHARQYLLDLVRTVKSEHNITIISMTHDLSEAMXSDHVIVMNKGTVYKEGSATEIFVNAEEFPRIGLDLPFPININQMLGHHTSFLTYEGLVDQLXLYGLPM

SEQ ID NO: 5866 - protein, 178 aa, Staphylococcus aureus
  VARIANT (1)...(178): Xaa = Any Amino Acid
MSRVGKKIIDIPSDVTVTFDGNHVTVKGPKGELSRTLNERMTFKQEDNTIEVVRPSDSKEDRTNHGTTRALLNNMVQGVSQGYVXVLELVGVGYRAQMQGKDLILNVGYSHPVEIKAEENITFSVEKNTVVKVEGISKEQVGALASNIRSVRPPEPYKGKGIRYQGEYVRRKAAKTGK

SEQ ID NO: 5867 - protein, 89 aa, Staphylococcus aureus
NINSVIENAKRVITPLSPISIFAARNPWEGLEADTFEDVAKWLRDVRDVDIFPNKALIESAVARGELDESVFNQLVTDMLLEHHYNIPQ

SEQ ID NO: 5868 - protein, 185 aa, Staphylococcus aureus
RTRKLQMFKDHELLIKKNRLVDHLEAQFIKPHCPYTHNPHKIVAGDEVKVLSYGSTGYSFEIVNDEEAIVQMGIIKMKLPIEDLEKKQKEKVKPTKMVTRQNRQTIKTELDLRGYRYEDALIELDQYLDQAVLSNYEQVYIIHGKGTGALQKGVQQHLKKHKSVSDFRGGMPSEGGFGVTVATLK

SEQ ID NO: 5869 - protein, 66 aa, Staphylococcus aureus
  VARIANT (1)...(66): Xaa = Any Amino Acid
IRRTDLAQYKSSVFRXXRAIIPSSGEXVQIWIANDVLSTYGHGAIKPVPAQGASNQLFDIKYELPL

SEQ ID NO: 5870 - protein, 130 aa, Staphylococcus aureus
  VARIANT (1)...(130): Xaa = Any Amino Acid
IKILKXNGXKYHDNRKPLXEIFVEKTKYINAKYIPQVMYDHYPGISLDTIYRNLHLFKDLGIIENTELDGEMKFRIACTNHHHHHFICEKCVDTKVIDYCPIDQIKLSLPGVNIHKHKLEVNGVCESCQD

SEQ ID NO: 5871 - protein, 73 aa, Staphylococcus aureus
  VARIANT (1)...(73): Xaa = Any Amino Acid
AIGPTHLRYIEWDVRAAGIXHAIDIAELGETVVLAXKERELYRISPGHIKVPHQDDLIGLEAANKKFGGGRVD

SEQ ID NO: 5872 - protein, 44 aa, Staphylococcus aureus
VKNNLRYGIRKHKLGAASVFLGTMIVVGMGQTKKLQHQNKRQLQ

SEQ ID NO: 5873 - protein, 423 aa, Staphylococcus aureus
FEYFTLNDKRLKKQQKENITVIIGNTPYSAGQSSVNNDNKKMNYEKLNAKIANTYANFSTANLKKSLYDSYIQAFRWATDRVGKKGIIGFVTNGSFIDSQSTDGFRKVLYDEFNYLYIINLRGDQRTQGEKSRKEGGKIFGSGSRAPIAISILVKDGSYNHDIYYNDIGEYLTREQKLDTLMKHQSIVNLKSLNVLPDKNNDWINQRDINYENYLPMYDSKDIENSIYLDQFNGVNSARDNWVTNFSNEKALVNAKLLVDNYNSEIDRLIDILDSRERINLVNKDETFISWTRGLTQKFSKGKNISINPERIVKFMHRPFTKKWIVYDKNIMEMPSRYYNIMENTGQVIYIQGQGMNKEFSAMITDILPNFQFIGNGKGFATYKGKDSLRLVDNISNSFKKKINLNSEEIVYYIYAILHHKYY

SEQ ID NO: 5874 - protein, 313 aa, Staphylococcus aureus
  VARIANT (1)...(313): Xaa = Any Amino Acid
MLTTEKLVETLKLDLIAGEEGLSKPIKNADISRPGLEMAGYFSHYASDRIQLLGTTELSFYNLLPDKDRAGRMRKLCRPETPAIIVTRGLQPPEELVEAAKELNTPLIVAKDATTSLMSRLTTFLEHALAKTTSLHGVLVDVYGVGVLITGDSGIGKSETALELVKRGHRLVADDNVEIRQINKDELIGKPPKLIEHLLEIRGLGIINVMTLFGAGSILTEKRIRLNINLENWNKQKLYDRVGLNEETLSILDTEITKKTIPVRPGRNVAVIIEVAAMNYRLNIMGINTAEEFSERLNEEIIKNSHKSEEXVE

SEQ ID NO: 5875 - protein, 411 aa, Staphylococcus aureus
LLLGIVLGVITFWLFAQSLVNLVVPLQSTYSSDVGTINIAVSLSALFAGLFIVGAGDVADKFGRVKITYVGLILNVVGSLLIIITPLPAFLIIGRIIQGLSAACIMPSTLAIINEYYIGTRRQRALSYWSIGSWGGSGICTLFGGLMATYIGWRSIFVVSILLTLLAMYLIKHAPETKAEPIKGMKAEAKKFDVIGLVILVVTMLSLNVIITQTSHFGLVSPLILGLIVVFICSLVGFVYYENKIKHPLVDFSIFKNRGYSGATISNFLLNGVAGGALIVINTYYQQQLGFNSSQTGYISLTYLITVLSMIRVGEKILSQHGPKRPLLLGSGFTVIGLILLSLTFLPEVWYIISSIVGYLLFGTGLGLYATPSTDTAVASAPDDKSGVASSVYKMASSLGNAFGVAISGTV

SEQ ID NO: 5876 - protein, 310 aa, Staphylococcus aureus
CLLVILIATAYISFVTGTIKLSFNDLFTKFTTGSNEAVDSIIDLRLPRILIALMVGAMLAVSGALLQAALQNPLAEANIIGVSSGALIMRALCMLFIPQLYFYLPLLSFIGGLIPFLIIILLHSKFRFNAVSMILVGVALFVLLNGVLEILTQNPLMKIPQGLTMKIWSDVYILAVSALLGLILTLLLSPKLNLLNLDDIQARSIGFNIDRYRWLTGLLAVFLASATVAIVGQLAFLGIIVAHVVRKLVGGNYRVLIPFSTVIGAWLLLVADLLGRVIQPPLEIPANAILMIVGGPMLIYLICQSQRNRI

SEQ ID NO: 5877 - protein, 190 aa, Staphylococcus aureus
WKEKVQQYEDQIINDLKGLLAIESVRDDAKASEDAPVGPGPRKALDYMYEIAHRDGFTTHDVDHIAGRIEAGKGNDVLGILCHVDVVPAGDGWDSNPFEPVVTEDAIIARGTLDDKGPTIAAYYAIKILEDMNVDWKKRIHMIIGTDEESDWKCTDRYFKTEEMPTLGFAPDAEFPCIHGEKGITTFDLV

SEQ ID NO: 5878 - protein, 256 aa, Staphylococcus aureus
  VARIANT (1)...(256): Xaa = Any Amino Acid
QRKNEHVEIAMAQSDAMHSDFDKMRFVHHSIPSINVNDIDLTSQTPDLTMAYPVYINAMTGGSEWTKNINEKLAVVARETGLAMAVGSTHAALRNPRMAETFTIARKMNPEGMIFSNVGADVPVEKALEAVELLEAQALQIHVNSPQELVMPEGNREFVTWLDNIAWIVSRVSVPVIIKEVGFGMSKELMHDLQQIGVKYVDVSGKGGTNFVDIENERRANKDMDYLSSWGQSTVESLLETTAYQSKIXYFTSGTL

SEQ ID NO: 5879 - protein, 58 aa, Staphylococcus aureus
  VARIANT (1)...(58): Xaa = Any Amino Acid
MTMMQRLIAQIEKGKPFFQKLSRTIYLTPIGEGYSSAPPVVLLSSIFLVSAXGANIIG

SEQ ID NO: 5880 - protein, 181 aa, Staphylococcus aureus
PGKEANTKPGKVDGFQGWVKKTTENPGTEDGNKPGKEDTKKPGKEDGNKPGKEDGNKPGKEDGNGVHVVKPGDTVNDIAKANGTTADKIAADNKLADKNMIKPGQELVVDKKQPANHADANKAQALPETGEENPFIGTTVFGGLSLALGAALLAGRRRNYKNKQYTTIDIILSKPILTYIR

SEQ ID NO: 5881 - protein, 208 aa, Staphylococcus aureus
LTIYHFMSDKLNLYSDIGNIIALRQRAKKRNIKVNVVEINETEGITFDECDIFFIGGGSDREQALATKELSKIKTPLKEAIEDGMPGLTICGGYQFLGKKYITPDGTELEGLGILDFYTESKTNRLTGDIVIESDTFGTIVGFENHGGRTYHDFGTLGHVTFGYGNNDEDKKEGIHYKNLLGTYLHGPISPKNYEITDYLLEKACERK

SEQ ID NO: 5882 - protein, 820 aa, Staphylococcus aureus
LNLHEKAHGPHGLVAGTTGSGKSEIIQSYILSLAINFHPHEVAFLLIDYKGGGMANLFKDLVHLVGTITNLDGDEAMRALTSIKAELRKRQRLFGEHDVNHINQYHKLFKEGIATEPMPHLFIISDEFAELKSEQPDFMKELVSTARIGRSLGIHLILATQKPSGVVDDQIWSNSKFKLALKVQDRQDSNEILKTPDAADITLPGRAYLQVGNNEIYELFQSAWSGATYDIEGDKLEVEDKTIYMINDYGQLQAINKDLSGLEDEETKENQTELEAVIDHIESITTRLEIEEVKRPWLPPLPENVYQEDLVETDFRKLWSDDAKEVELTLGLKDVPEEQYQGPMVLQLKKAGHIALIGSPGYGRTTFLHNIIFDVARHHRPDQAHMYLFDFGTNGLMPVTDIPHVADYFTVDQEDKIAKAIRIFNDEIDRRKKILSQYRVTSISEYRKLTGETIPHVFILIDNFDAVKDSPFQEVFENMMIKMTREGLALDMQVTLTASRANAMKTPMYINMKTRIAMFLYDKSEVSNVVGQQKFAVKDVVGRALLSSDDNVSFHIGQPFKHDETKSYNDQINDEVSAMTEFYKGETPNDIPMMPDEIKYEDYRESLNLPDIVANGALPIGLDYEGVTLQKIKLTEPAMISSENPREIAHIAEIMMKEIDILNEKYAICIADSSGEFKAYRHQVANFAEEREDIKAIHQLMIEDLKQREMDGPFEKDSLYIINDFKTFIDCTYIPEDDVKKLITKGPELGLNILFVGIHKELIDAYDKQIDVARKMINQFSIGIRISDQQFFKFRFIQREPVIKENEAYMVANQAYQKIR

SEQ ID NO: 5883 - protein, 837 aa, Staphylococcus aureus
ALKAQVTSAGRVSAANGVEHTATELNTAMTALKRAIADKAETKASGNYVNADANKRQAYDEKVTAAENIVSGTPTPTLTPADVTNAATQVTNAKTQLNGNHNLEVAKQNANTAIDGLTSLNGPQKAKLKEQVGQATTLPNVQTVRDNAQTLNTAMKGLRDSIANEATIKAGQNYTDASQNKQTDYNSAVTAAKAIIGQTTSPSMNAQEINQAKDQVTAKQQALNGQENLRTAQTNAKQHLNGLSDLTDAQKDAVKRQIEGATHVNEVTQAQNNADALNTAMTNLKNGIQDQNTIKQGVNFTDADEAKRNAYTNAVTQAEQILNKAQGPNTSKDGVETALENVQRAKNELNGNQNVANAKTTAKNALNNLTSINNAQKEALKSQIEGATTVAGVNQVSTTASELNTAMSNLQNGINDEAATKAALNGTQNLEKAKQHANTAIDGLSHLTNAQKEALKQLVQQSTTVAEAQGNEQKANNVDAAMDKLRQSIADNATTKQNQNYTDASQNKKDAYNNAVTTAQGIIDQTTSPTLDPTVINQAAGQVSTTKNALNGNENLEAAKQQASQSLGSLDNLNNAQKQTVTDQINGAHTVDEANQIKQNAQNLNTAMGNLKQAIADKDATKATVNFTDADQAKQQAYNTAVTNAENIISKANGGNATQAEVEQAIKQVNAAKQALNGNANVQHAKDEATALINSSNDLNQAQKDALKQQVQNATTVAGVNNVKQTAQELNNAMTQLKQGIADKEQTKADGNFVNADPDKQNAYNQAVAKAEALISATPDVVVTPSEITAALNKVTQAKNDLNGNTNLATAKQNVQHAIDQLPNLNQAQRDEYSKQI

SEQ ID NO: 5884 - protein, 422 aa, Staphylococcus aureus
  VARIANT (1)...(422): Xaa = Any Amino Acid
MMKLIKNGKVLQNGELQQADILIDGKVIKQIAPAIEPSNGVDIIDAKGHFVSPGFVDVHVHLREPGGEYKETIETGTKAAARGGFTTVCPMPNTRPVPDSVEHFEALQKLIDDNAQVRVLPYASITTRQLGKELVDFPALVKEGAFAFTDDGVGVQTASMMYEGMIEAAKVNKAIVAHCEDNSLIYGGAMHEGKRSKELGIPGIPNICESVQIARDVLLAEAAGCHYHVCHVSTKESVRVIRDAKRAGIHVTAEVTPHHLLLTEDDIPGNNAIYKMNPPLRSTEDREALLEGLLDGTIDCIATDHAPHARDEKAQPMEKAPFRNCWXXNSIPIIIYAFCKKWXLDITTLVDYLTIKPCETFNLEYGTLKENGYADLTIIDLDSEQEIKGEDFLSKADNTPFIGYKVYGNPILTMVEGEVKFE

SEQ ID NO: 5885 - protein, 1029 aa, Staphylococcus aureus
TMSVDDVNRATSAVTSNKNALNGYEKLAQSKTDAARAIDALPHLNNAQKADVKSKINAASNIAGVNTVKQQGTDLNTAMGNLQGAINDEQTTLNSQNYQDATPSKKTAYTNAVQAAKDILNKSNGQNKTKDQVTEAMNQVNSAKNNLDGTRLLDQAKQTAKQQLNNMTHLTTAQKTNLTNQINSGTTVAGVQTVQSNANTLDQAMNTLRQSIANKDATKASEDYVDANNDKQTAYNNAVAAAETIINANSNPEMNPSTITQKAEQVNSSKTALNGDENLTAAKQNAKTYLNTLTSITDAQKNNLISQITSATRVSGVDTVKQNAQHLDQAMASLQNGINNESQVKSSEKYRDADTNKQQEYDNAITAAKAILNKSTGPNTAQNAVEAALQRVNNAKDALNGDAKLIAAQNAAKQHLGTLTHITTAQRNDLTNQISQATNLAGVESVKQNANSLDGAMGNLQTAINDKSGTLASQNFLDADEQKRNAYNQAVSAAETILNKQTGPNTAKTAVEQALNNVNNAKHALNGTQNLNNAKQAAITAINGASDLNQKQKDALKAQANGAQRVSNAQDVQHNATELNTAMGTLKHAIADKTNTLASSKYVNADSTKQNAYTTKVTNAEHIISGTPTVVTTPSEVTAAANQVNSAKQELNGDERLREAKQNANTAIDALTQLNTPQKAKLKEQVGQANRLEDVQTVQTNGQALNNAMKGLRDSIANETTVKTSQNYTDASPNNQSTYNSAVSNAKGIINQTNNPTMDTSAITQATTQVNNAKNGLNGAENLRNAQNTAKQNLNTLSHLTNNQKSAISSQIDRAGHVSEVTATKNAATELNTQMGNLEQAIHDQNTVKQSVKFTDADKAKRDAYTNAVSRAEAILNKTQGANTSKQDVEAAIQNVSSAKNALNGDQNVTNAKNAAKNALNNLTSINNAQKRDLTTKIDQATTVAGVEAVSNTSTQLNTAMANLQNGINDKTNTLASENYHDADSDKKTAYTQAVTNAENILNKNSGSNLDKTAVENALSQVANAKGAL

SEQ ID NO: 5886 - protein, 294 aa, Staphylococcus aureus
TTEARNEATMHLDEMTVEEALITMNKEDQQVPLAVRKAIPQLTKVIKKTIAQYKKGGRLIYIGAGTSGRLGVLDAAECVPTFNTDPHEIIGIIAGGQHAMTMAVEGAEDHKKLAEEDLKNIDLTSKDVVIGIAASGKTPYVIGGLTFANTIGATTVSISCNEHAVISEIAQYPVEVKVGPEVLTGSTRLKSGTAQKLILNMISTITMVGVGKVYDNLMIDVKATNQKLIDRSVRIIQEICAITYDEAMALYQVSEHDVKVATVMGMCGISKEEATRRLLNNGDIVKRAIRDRQP

SEQ ID NO: 5887 - protein, 388 aa, Staphylococcus aureus
  VARIANT (1)...(388): Xaa = Any Amino Acid
NGLRLFIIPTRRFSKDICHVTLHNFGSXNNQFKPLGQDQFVTVPDGVAHFLEHKLFEKEEEDLFTAFAEDNAQANAFTSFDRTSYLFSATDNIENNIKRLLTMVETPYFTKETVDKEKGIIAEEIKMYQEQPGYKLMFNTLRAMYQQHPIRVDIAGSVESIYDITKDDLYLCYETFYHPSNMVLFVVGDVDPEAICRIVKQHEDARNKVNQPKIERGLVDEPEDVKEAFVTESMKIQSPRLMLGFKNKPLQEAPQKYVQRDLEMSLFFELIFGEETDFYQNLLNEGLIDDTFGYQFVLEPTYSFSIVTSATEEPDKLKKLLLDELRDKKGNFQDAEAFELLKKQFIGEFISSLNSLEYIANQYTKLYFEGVSVFDMLDIVENITLDSI

SEQ ID NO: 5888 - protein, 111 aa, Staphylococcus aureus
  VARIANT (1)...(111): Xaa = Any Amino Acid
NREXAPGTERVQEGQSGKVTMCTPTLENPLNGGIISKGESREEIPXDPMNEXAEYGPGTITPGHRDEFDPKLPTGEKEEVPGKPGIKNPETGDVVRPPVDSVTKYGPVKGD

SEQ ID NO: 5889 - protein, 224 aa, Staphylococcus aureus
LRVKDNLQQISTQINDKSEKNNFSTKPNVIAVTKYVTIERAKEAYEAGIRHFGENRLEGFFQKKEALPSDAVIHFIGSLQSRKVKDVINDVDYFHALDRLSLAKEINKRAEHKIKCFLQVNVSGEASKHGIALEDVDQFIDDLKKYDKIEIVGLMTMAPLTDDEAYIRSLFKQLRLKKEEIQRLNLEYAPCDELSMGMSNDYLIAVEEGATFVRIGTKLVGEEE

SEQ ID NO: 5890 - protein, 86 aa, Staphylococcus aureus
EYQLISCPLHIHYDFSRTILMRQSTDLFARGVGDSTDVVQKEMYTFKDKGDRSITLRPEGTAAVARSYIEHKMQGYPNQPIELYYN

SEQ ID NO: 5891 - protein, 323 aa, Staphylococcus aureus
KNITICTLALSTTFTVLPATSFAKINSEIKQVSEKNLDGDTKMYTRTATTSDSQKNITQSLQFNFLTEPNYDKETVFIKAKGTIGSGLRILDPNGYWNSTLRWPGSYSVSIQNVDDNNNTNVTDFAPKNQDESREVKYTYGYKTGGDFSINRGGLTGNITKESNYSETISYQQPSYRTLLDQSTSHKGVGWKVEAHLINNMGHDHTRQLTNDSDNRTKSEIFSLTRNGNLWAKDNFTPKDKMPVTVSEGFNPEFLAVMSHDKKDKGKSQFVVHYKRSMDEFKIDWNRHGFWGYWSGENHVDKKEEKLSALYEVDWKTHNVKFV

SEQ ID NO: 5892 - protein, 309 aa, Staphylococcus aureus
LDFEKPLFEIRNKIESLKESQDKNDVDLQEEIDMLEASLERETKKIYTNLKPWDRVQIARLQERPTTLDYIPYIFDSFMELHGDRNFRDDPAMIGGIGFLNGRAVTVIGQQRGKDTKDNIYRNFGMAHPEGYRKALRLMKQAEKFNRPIFTFIDTKGAYPGKAAEERGQSESIAQNLIEMASLKVPVIAIVIGEGGSGGALGIGIANKVLMLENSTYSVISPEGAAALLWKDSNLAKIAAETMKITAHDIKQLGIIDDVISEPLGGAHKDIEQQALAIKSAFVAQLDSLESLSRDEIANDRFEKFRNIG

SEQ ID NO: 5893 - protein, 433 aa, Staphylococcus aureus
QTVNVIGAGLAGSEAAYQLAERGIKVNLIEMRPVKQTPAHHTDKFAELVCSNSLRGNALTNGVGVLKEEMRRLNSIIIEAADKARVPAGGALAVDRHDFSGYITENLKNHENITVINEEINAIPDGYTIIATGPLTTETLAQEIVDITGKDQLYFYDAAAPIIEKESIDMDKVYLKSRYDKGEAAYLNCPMTEDEFNRFYDAVLEAEVAPVNSFEKEKYFEGCMPFEVMAERGRKTLLFGPMKPVGLEDPKTGKRPYAVVQLRQDDAAGTLYNIVGFQTHLKWGAQKEVIKLIPGLENVDIVRYGVMHRNTFINSPDVLNEKYELISQPNIQFAGQMTGVEGYVESAASGLVAGINLAHKILGKGEVVFPRETMIGSMAYYISHAKNNKNFQPMNANFGLLPSLETRIKDKKERYEAQANRALDYLENFKKTL

SEQ ID NO: 5894 - protein, 258 aa, Staphylococcus aureus
  VARIANT (1)...(258): Xaa = Any Amino Acid
MLRGQEERKYSIRKYSIGVVSVLAATMFVVSSHEAQASEKTSTNAAAQKETLNQPGEQGNAITSHQMQSGKQLDDMHKENGKSGTVTEGKDTLQSSKHQSTQNSKTIRTQNDNQVKQDSERQGSKQSHQNNATNNTERQNDQGQNTHHAEPNGSQSTTSQSNDVDKSQPSFPGQKVIPNPDKAAPTLTTPPFNDKTGPKLTKAQNAPPANLPNHQIPPEPGPXILSPSPNDLGAQGNGNPQLGNXSNPFAGANSPEKP

SEQ ID NO: 5895 - protein, 306 aa, Staphylococcus aureus
  VARIANT (1)...(306): Xaa = Any Amino Acid
GVSSLSACSVDSXGSPGFKEGLSKDYIQPRMTMITPIDKNDDELLNSFERRNRSKVRLALKRGTTVERSDREGLKTFAELMKITGERDGFLTRDISYFENIYDALHEDGDAELFLVKLDPKENIAKVNQELNELHAEIAKWQQKMKTSEKQAKKAQNMINDAQNKIAKNEDLKRDLEALEKEHPEGIYLSGALLMFAGSKSYYLYGASSNEFRDFLPNHHMQYTMMKYAREHGATTYDFGGTDNDPDKDSEHYGLWAFKKVWGTYLSEKIGEFDYVLNQPLYQLIEQVKPRLTKAKIKISRKLKRK

SEQ ID NO: 5896 - protein, 652 aa, Staphylococcus aureus
  VARIANT (1)...(652): Xaa = Any Amino Acid
LYXATPIYYHSGNLHIGHAYSTVAGDVIARYKRMQGYDVRYLTGTDEHGQKIQEKAQKAGKTEIEYLDEMIAGIKQLWAKLEISNDDFIRTTEERHKHVVEQVFERLLKQGDIYLGEYEGWYSVPDETYYTESQLVDPQYENGKIIGGKSPDSGHEVELVKEESNFFNISKYTDRFLEFYDQNPDFIQPPSRKNEMINNFIKPGLADLAVSRTSFNWGVHVPSNPKHVVYVWIDALVNYISALGYLSDDESLFNKYWPADIHLMAKEIVRFHSIIWPILLMALDLPLPKKVFAHGWILMKDGKMSKSKGNVVDPNILIDRYGLDATRYYLMRELPFGSDGVFTPEAFVERTNFDLANDLGNLVNRTISMVNKYFDGELPAYQGPLHELDEEMEAMALETVKSYTESMESLQFSVALSTVWKFISRTNKYIDETTPWVLAKDDSQKDMLGNVMAHLVENIRYAAVLLRPFLTHAPKEIFEQLNINNPQFMEFSSLEQYGVLNESIMVTGQPKPIFPRLDSEAEIAYIKESMQPPATKEEKEEIPSKPQIDIKDFDKVEIKAATIIDAEHVKKSDKLLKIQVDLDSEQRQIVSGIAKFYTPDDIIGKKVAVVTNLKPAKLMGQKSEGMILSAEKDGVLTLVSLPSAIPNGAVIK

SEQ ID NO: 5897 - protein, 243 aa, Staphylococcus aureus
MTSKHQQKGSIVNRFLNSVEKIGNKLPDPSVLFFLMCVGLAIMTWVISLFNVSVKHPGTHQTIYIKNIISHDGFTMIMNDTIKNFSEFPALGLVLAVMIGIGVAEKTGYFDKLMISVVNRAPRFLILPTIILIGILGSTAGDAATIILPPLAAMLFIKIGYHPIAGLTMAYASAVGGFAANIVVGMQDALVYSFTEPATRIVSDSIKTNVAMNWYFIAASVVVLLPTILLVTTKLIIPRLGKY

SEQ ID NO: 5898 - protein, 1349 aa, Staphylococcus aureus
MLNRENKTAITRKGMVSNRLNKFSIRKYTVGTASILVGTTLIFGLGNQEAKAAESTNKELNEATTSASDNQSSDKVDMQQLNQEDNTKNDNQKEMVSSQGNETTSNGNKLIEKESVQSTTGNKVEVSTAKSDEQASPKSTNEDLNTKQTISNQEALQPDLQENKSVVNVQPTNEENKKVDAKTESTTLNVKSDAIKSNDETLVDNNSNSNNENNADIILPKSTAPKRLNTRMRIAAVQPSSTEAKNVNDLITSNTTLTVVDADKNNKIVPAQDYLSLKSQITVDDKVKSGDYFTIKYSDTVQVYGLNPEDIKNIGDIKDPNNGETIATAKHDTANNLITYTFTDYVDRFNSVQMGINYSIYMDADTIPVSKNDVEFNVTIGNTTTKTTANIQYPDYVVNEKNSIGSAFTETVSHVGNKENPGYYKQTIYVNPSENSLTNAKLKVQAYHSSYPNNIGQINKDVTDIKIYQVPKGYTLNKGYDVNTKELTDVTNQYLQKITYGDNNSAVIDFGNADSAYVVMVNTKFQYTNSESPTLVQMATLSSTGNKSVSTGNALGFTNNQSGGAGQEVYKIGNYVWEDTNKNGVQELGEKGVGNVTVTVFDNNTNTKVGEAVTKEDGSYLIPNLPNGDYRVEFSNLPKGYEVTPSKQGNNEELDSNGLSSVITVNGKDNLSADLGIYKPKYNLCDYVWEDTNKNGIQDQDEKGISGVTVTLKDENGDVLKTVTTDADGKYKFTDLHNGNYKVEFTTPEGYTPTTVTSGSDIEKDSNGLTTTGVINGADNMTLDSGFYKTPKYNLGNYVWEDTNKDGKQDSTEKGISGVTVTLKNENGEVLQTTKTDKDGKYQFTGLENGTYKVEFETPSGYTPTQVGSGTDEGIDSNGTSTTGVIKDKDNDTIDSGFYKPTYNLGDYVWEDTNKNGVQDKDEKGISGVTVTLKDENDKVLKTVTTDENGKYQFTDLNNGTYKVEFETPSGYTPTSVTSGNDTEKDSNGLTTTGVIKDADNMTLDSGFYKTPKYSLGDYVWYDSNKDGKQDSTEKGIKDVKVTLLNEKGEVIGTTKTDENGKYCFDNLDSGKYKVIFEKPAGLTQTVTNTTEDDKDADGGEVDVTITDHDDFTLDNGYFEEDTSDSDSDSDSDSDSDSDSDSDSDSDSDSDSDSDSDSDSDSDSDSDSDSDSDSDSDSDSDSDSDSDSDSDSDSDSDSDSDSDSDSDSDSDSDSDSDSDSDSDSDSDSDSDSDSDSDSDSDSDSDSDSDSDSDSDSDSDSDSDSDSDSDSDSDSDSDSDSDSDSDSDSDAGKRTPVKPMSTTKDHHNKAKALPETGSENNGSNNATLFGGLFAALGSLLLFGRRKKQNK

SEQ ID NO: 5899 - protein, 767 aa, Staphylococcus aureus
VKSNLRYGIRKHKLGAASVFLGTMIVVGMGQEKEAAASEQNNTTVEESGSSATESKASETQTTTNNVNTIDETQSYSATSTEQPSQSTQVTTEEAPKTVQAPKVETSRVDLPSEKVADKETTGTQVDIAQPSNVSEIKPRMKRSTDVTAVAEKEVVEETKATGTDVTNKVEVEEGSEIVGHKQDTNVVNPHNAERVTLKYKWKFGEGIKAGDYFDFTLSDNVETHGISTLRKVPEIKSTDGQVMATGEIIGERKVRYTFKEYVQEKKDLTAELSLNLFIDPTTVTQKGNQNVEVKLGETTVSKIFNIQYLGGVRDNWGVTANGRIDTLNKVDGKFSHFAYMKPNNQSLSSVTVTGQVTKGNKPGVNNPTVKVYKHIGSDDLAESVYAKLDDVSKFEDVTDNMSLDFDTNGGYSLNFNNLDQSKNYVIKYEGYYDSNASNLEFQTHLFGYYNYYYTSNLTWKNGVAFYSNNAQGDGKDKLKEPIIEHSTPIELEFKSEPPVEKHELTGTIEESNDSKPIDFEYHTAVEGAEGHAEGTIETEEDSIHVDFEESTHENSKHHADVVEYEEDTNPGGGQVTTESNLVEFDEDSTKGIVTGAVSDHTTIEDTKEYTTESNLIELVDELPEEHGQAQGPIEEITENNHHISHSGLGTENGHGNYGVIEEIEENSHVDIKSELGYEGGQNSGNQSFEEDTEEDKPKYEQGGNIVDIDFDSVPQIHGQNNGNQSFEEDTEKDKPKYEQGGNIIDIDFDSVPHIHGFNKHTEIIKK

SEQ ID NO: 5900 - protein, 226 aa, Staphylococcus aureus
MKFKAIAKASLALGMLATGVITSNVQSVQAKAEVKQQSESELKHYYNKPILERKNVTGFKYTDEGKHYLEVTVGQQHSRITLLGSDKDKFKDGENSNIDVFILREGDSRQATNYSIGGVTKSNSVQYIDYINTPILEIKKDNEDVLKDFYYISKEDISLKELDYRLRERAIKQHGLYSNGLKQGQITITMNDGTTHTIDLSQKLEKERMGESIDGTKINKILVEMK

SEQ ID NO: 5901 - protein, 327 aa, Staphylococcus aureus
MKMKKLVKSSVASSIALLLLSNTVDAAQHITPVSEKKVDDKITLYKTTATSDNDKLNISQILTFNFIKDKSYDKDTLVLKAAGNINSGYKKPNPKDYNYSQFYWGGKYNVSVSSESNDAVNVVDYAPKNQNEEFQVQQTLGYSYGGDINISNGLSGGLNGSKSFSETINYKQESYRTTIDRKTNHKSIGWGVEAHKIMNNGWGPYGRDSYDPTYGNELFLGGRQSSSNAGQNFLPTHQMPLLARGNFNPEFISVLSHKQNDTKKSKIKVTYQREMDRYTNQWNRLHWVGNNYKNQNTVTFTSTYEVDWQNHTVKLIGTDSKETNPGV

SEQ ID NO: 5902 - protein, 525 aa, Staphylococcus aureus
NLLEVNSLNVQFNYDETTVQAVKNVSFELRKKHILGIVGESGSGKSITDCIYFRLIPDYPDHTLTGEIIFNGQSLNNLSTSALQQIRGKDISMIFQDPLSSLNPRLTIGKQITEVIFQHKRVSKSEAKSMTIDILEKVGIKHATRQFDAYPHELSGGMRQRVMIAMALILKPQILIADEPTTALDASTQNQLLQLMKSLYEYTETSIIFITHDLGAVYQFCDDVIVMKDGSVVESGTVESIFKSPQHTYTKRLIDAIPDIHQTRPPRPLNNDILLKFDRVSVDYTSPSGSLYRAVNDINLAIRKGETLGIVGESGSGKSTLAKTVVGLKEVSEGFIWYNELPLSLFKDDELKSLRQEIQMIFQDPFASINPRFKVIDVIKRPLIIHGKVKDNDDIIKTVVSLLEKVGLDQTFLYRYPHELSGGQRQRVSIARALAVEPKVIVCDEAVSALDVSIQKDIIELLKQLQLDFGITYLFITHDMGVINEICDRVAVMKNGEIVELNNTEDIIKHPQSDYAKQLISEVAV

SEQ ID NO: 5903 - protein, 217 aa, Staphylococcus aureus
AYRLLAKIILRLKAFDEFEFTIDEIGMDEQENEDYKSKYLAVYDQVKRATAEKNKVSILNDIDFEIEMMRNDTINVNYIMNILRQIDLEDKAEQRRNQEQIRRILDHADDPTLRLKRDLIREFIDNVVPSLNKDDDIDQEYVNFESIKKEAEFKGFAGERSIDEQALKTISNDYQYSGVVNPHHLKKMIGDLPLKEKRKARKAIESFVAETTEKYGV

SEQ ID NO: 5904 - protein, 502 aa, Staphylococcus aureus
MSTSTSLSDSTSLSTSLSDSTSDSKSDSLSTSMSTSDSISTSKSDSISTSTSLSGSTSESESDSTSSSESKSDSTSMSISMSQSTSGSTSTSTSTSLSDSTSTSLSLSASMNQSGVDSNSASQSASNSTSTSTSESDSQSTSSYTSQSTSQSESTSTSTSLSDSTSISKSTSQSGSVSTSASLSGSESESDSQSISTSASESTSESASTSLSDSTSTSNSGSASTSTSLNNSASASESDLSSTSLSDSTSASMQSSESDSQSTSASLSDSLSTSTSNRMSTIASLSTSVSTSESGSTSESTSESDSTSTSLSDSQSTSRSTSASGSASTSTSTSDSRSTSASTSTSMRTSTSDSQSMSLSTSTSTSMSDSTSLSDSVSDSTSDSTSASTSGSMSVSISLSDSTSTSTSASEVMSASISDSQSMSESVNDSESVSESNSESDSKSMSGSTSVSDSGSLSVSTSLRKSESVSESSSLSCSQSMSDSVSTNDSSSLSVSTLLRSL

SEQ ID NO: 5905 - protein, 248 aa, Staphylococcus aureus
MPQRQQTSRRSNRIQTRSVESRAAEPRSVSDYQNANSSYYVENANDGSGYPVGTYINASSKGAPYNLPTTPWNTLKASDSKEIALMTAKQTGDGYQWVIKFNKGHAPHQNMIFWFALPADQVPVGRTDFVTVNSDGTNVQWSHGAGAGANKPLQQMWEYGVNDPHRSHDFKIRNRSGQVIYDWPTVHIYSLEDLSRASDYSSEAGATPATKAFGRQNYEYINGQKPAESPGVPKVYTFIRPSDASYPI

SEQ ID NO: 5906 - protein, 265 aa, Staphylococcus aureus
MAASKAKKHSNDAQNKSNSGKANNSTEDKASQDKSKDHHNGKKGAAIGAGTAGLAGGAASKSASAASKPHASNNASQNHDEHDNHDRDKERKKGGMAKVLLPLIAAVLIIGALAIFGGMALNNHNNGTKENKIANTNKNNADESKDKDTSKDASKDKSKSTDSDKSKEDQDKATKDESDNDQNNANQANNQAQNNQNQQQANQNQQQQQQRQGGGQRHTVNGQENLYRIAIQYYGSGSPENVEKIRRANGLSGNNIRNGQQIVIP

SEQ ID NO: 5907 - protein, 308 aa, Staphylococcus aureus
MKKFIGSVLATTLILGGCSTMENESKKDTKTETKSVPEEMEASKYVGQGFQPPAEKNAIEFAKKHRKEFEKVGEQFFKDNFGLKVKATNVVGKDDGVEVYVHCEDHGIVFNASLPLYKDAIHQKGSMRSNDNGDDMSMMVGTVLSGFEYRAQKEKYDNLYKFLKENEKQYQYTGFTKEAINKTQNVGYQNEYFYITYLSRNLKEYRKYYEPLIHKNDKEFKEGMQRARKELNYTANTNTVATLFSTNDERNRKEKINNVIDLSEKIERTKDMPIKNTITTQLGNKLIGTKKARFDDKKVVSFGAFEDE

SEQ ID NO: 5908 - protein, 1215 aa, Staphylococcus aureus
MGTLKQQIQANSQVPQSVDFTQADQDKQQAYNNAANQAQQIANGIPTPVLTPDTVTQAVTTMNQAKDALNGDEKLAQAKQEALANLDTLRDLNQPQRDALRNQINQAQALATVEQTKQNAQNVNTAMSNLKQGIANKDTVKASENYHDADADKQTAYTNAVSQAEGIINQTTNPTLNPDEITRALTQVTDAKNGLNGEAKLATEKQNAKDAVSGMTHLNDAQKQALKGQIDQSPEIATVNQVKQTATSLDQAMDQLSQAINDKAQTLADGNYLNADPDKQNAYKQAVAKAEALLNKQSGTNEVQAQVESITNEVNAAKQALNGNDNLANAKQQAKQQLANLTHLNDAQKQSFESQITQAPLVTDVTTINQKAQTLDHAMELLRNSVADNQTTLASEDYHDATAQRQNDYNQAVTAANNIINQTTSPTMNPDDVNGATTQVNNTKVALDGDENLAAAKQQANNRLDQLDHLNNAQKQQLQSQITQSSDIAAVNGHKQTAESLNTAMGNLINAIADHQAVEQRGNFINADTDKQTAYNTAVNEAAAMINKQTGQNANQTEVEQAITKVQTTLQALNGDHNLQVAKTNATQAIDALTSLNDPQKTALKDQVTAATLVTAVHQIEQNANTLNQAMHGLRQSIQDNAATKANSKYINEDQPEQQNYDQAVQAANNIINEQTATLDNNAINQAATTVNTTKAALHGDVKLQNDKDHAKQTVSQLAHLNNAQKHMEDTLIDSETTRTAVKQDLTEAQALDQLMDALQQSIADKDATRASSAYVNAEPNKKQSYDEAVQNAESIIAGLNNPTINKGNVSSATQAVISSKNALDGVERLAQDKQTAGNSLNHLDQLTPAQQQALENQINNATTRDKVAEIIAQAQALNEAMKALKESIKDQPQTEASSKFINEDQAQKDAYTQAVQHAKDLINKTTDPTLAKSIIDQATQAVTDAKNNLHGDQKLAQDKQRATETLNNLSNLNTPQRQALENQINNAATRGEVAQKLTEAQALNQAMEALRNSIQDQQQTVAGSKFIHVDKPQKDAYQAAVQNAKDLINQTNNPTLDKAQVEQLTQAVNQAKDNLHGDQKLADDKQHAVTDLNQLNGLNNPQRQALESQINNAATRGEVAQKLAEAKALDQAMQALRNSIQDQQQTESGSKFINEDKPQKDAYQAAVQNAKDLINQTGNPTLDKSQVEQLTQAVTTAKDNLHGDQKLARDQQQA

SEQ ID NO: 5909 - protein, 267 aa, Staphylococcus aureus
MKSIPEKESDEMIKRVNKLVLGISLLFLVISITAGCGMGKEAEIKKSFEKTLSMYPIKNLEDLYDKEGYRDDQFDKNDKGTWIVNSQMAIQNKGEALKIKGMLLKIDRNTRSAKGFYYTNEIKTEKYEVAQDNQKKYPVKMINNKFISTEEVKEENIKKEIENFKFFAQYSNFKDLMNYKDGDISYNPEVPSYSAQYQLTNDDYNVKQLRKRYDIPTNKAPKLLLKGTGNLKGSSVGYKKIEFTFLENKNENIYFTDSLHLEPSEDK

SEQ ID NO: 5910 - protein, 256 aa, Staphylococcus aureus
MMKRLNKLVLGIIFLFLVISITAGCGIGKEAKIKKSFEKTLSMYPIKNLEDLYDKEGYRDDEFDKNDKGTWIIGSEMATQNKGEALKVKGMVLYMNRNTKTTKGYYYVNAIKNDKDGRPQENEKRYPVKMVDNKIIPTKEIKDKNIKKEIENFKFFVQYGNFKDLSKYKDGDISYNPEVPSYSAKYQLTNDDYNVKQLRKRYDIPTNKAPKLLLKGTGNLKGSSVGYKDIEFTFVEKKEENIYFSDGLIFKPSEDK

SEQ ID NO: 5911 - protein, 59 aa, Staphylococcus aureus
MDKNDKVKKSKIAKESVANQEKKRAELPKTGLESTQKGLIFSSIIGIAGLMLLARRRKN

SEQ ID NO: 5912 - protein, 331 aa, Staphylococcus aureus
MSNQFKSEEERRQWEQFQAFQNQQNQQNQQYGQKKSKKGWFWGCGGCLVLFILIIIGISACTAGITGNLGGNSSKETNKTHKIGETVKNGDLEVTVNSVETMKSVGPSLAPTNAKGIFVVADVTIKNKGKEALTIDSSMFKLKSGDKTFEADNTGSMSANQSDNGSIENSFFLQRINPDSTAQGKIVFDVSENIANAKDKKLEVISSLFSVKKITFDLSDAKKTSKAKKDKQDTEVAVASSNSDNVSYEASATTPATTSSADTDSEDSEKSSKDEDKQNASKSDKSSVEKSESNEETAPVEPMPHSKPTTSEAPPSQNIHNEDSMYDASTE

SEQ ID NO: 5913 - protein, 132 aa, Staphylococcus aureus
MSWFDKLFGEDNDSNDDLIHRKKKRRQESQNIDNDHDSLLPQNNDIYSRPRGKFRFPMSVAYENENVEQSADTISDEKEQYHRDYRKQSHDSRSQKRHRRRRNQTTEEQNYSEQRGNSKISQQSMGTELKRH

SEQ ID NO: 5914 - protein, 91 aa, Staphylococcus aureus
MTKETDNKKTVATSDNKDTQQQNQPEEDERQGLNGYRKTDLDLEIEQELREMMKTGENETKNDYKKFKVFSLISTLVIVILAIIRFVHKMM

SEQ ID NO: 5915 - protein, 84 aa, Staphylococcus aureus
MTRILKLQVADQVSTLNRITSAFVRLQYNIDTLHVTHSEQPGISNMEIQVDIQDDTSLHILIKKLKQQINVLTVECYDLVDNEA

SEQ ID NO: 5916 - DNA, 933 bp, Escherichia coli
  CDS (1)...(933)
atggttaaagtttatgccccggcttccagtgccaatatgagcgtcgggtttgatgtgctcggggcggcggtgacacctgttgatggtgcattgctcggagatgtagtcacggttgaggcggcagagacattcagtctcaacaacctcggacgctttgccgataagctgccgtcagaaccacgggaaaatatcgtttatcagtgctgggagcgtttttgccaggaactgggtaagcaaattccagtggcgatgaccctggaaaagaatatgccgatcggttcgggcttaggctccagtgcctgttcggtggtcgcggcgctgatggcgatgaatgaacactgcggcaagccgcttaatgacactcgtttgctggctttgatgggcgagctggaaggccgtatctccggcagcattcattacgacaacgtggcaccgtgttttctcggtggtatgcagttgatgatcgaagaaaacgacatcatcagccagcaagtgccagggtttgatgagtggctgtgggtgctggcgtatccggggattaaagtctcgacggcagaagccagggctattttaccggcgcagtatcgccgccaggattgcattgcgcacgggcgacatctggcaggcttcattcacgcctgctattcccgtcagcctgagcttgccgcgaagctgatgaaagatgttatcgctgaaccctaccgtgaacggttactgccaggcttccggcaggcgcggcaggcggtcgcggaaatcggcgcggtagcgagcggtatctccggctccggcccgaccttgttcgctctgtgtgacaagccggaaaccgcccagcgcgttgccgactggttgggtaagaactacctgcaaaatcaggaaggttttgttcatatttgccggctggatacggcgggcgcacgagtactggaaaactaa

SEQ ID NO: 5917 - DNA, 1431 bp, Escherichia coli
  CDS (1)...(1431)
atgccagattttttctccttcattaacagcgtcctttggggatcggtaatgatttacctgctcttcggcgcaggttgttggttcacttttcgcaccggatttgtgcagtttcgctacatccgccagtttggcaaaagtcttaaaaatagcattcatccacagccaggcggtttaacctcatttcagtcattgtgtaccagtcttgcggcgcgcgtgggtagcggcaacctggccggcgttgcgctggctattaccgccggtggacctggagccgtcttttggatgtgggttgccgcgtttatcggcatggcgacctcgtttgccgaatgttctctggcacaactttataaagaacgtgacgtcaatgggcagtttcgtggcggaccggcatggtatatggcgcgcgggctggggatgcgctggatgggcgttctgttcgccgtctttttgctcatcgcctatggcataattttcagcggagttcaagcgaacgccgttgcccgcgccctgagtttttcttttgattttcccccgctggtgacaggcattattctcgctgtctttactctgctggcaatcactcgcggtcttcatggcgtcgcccggctcatgcagggctttgtcccgttgatggcgataatctgggtactgaccagcctggtaatttgcgtaatgaatatcgggcaacttccccacgtcatttggtctatttttgagagtgcttttggctggcaggaagcggcaggcggcgcggcgggatataccttaagccaggcgattactaacggttttcagcgcagtatgttttccaatgaggcgggaatgggttcgacgccaaacgcggcagcggcagcggcgtcctggcctccgcatccggcagcgcaagggattgtccagatgattggcatttttatcgacaccctggtcatctgtacggcaagcgccatgctgatattactggcgggtaacggcacaacctacatgccgctggaaggtattcagcttatccagaaggcgatgcgggtgctaatgggttcctggggtgctgagtttgttacccttgtggttattctgtttgccttcagctccatcgttgccaactacatttatgccgaaaacaatctcttctttttacgcctgaacaaccctaaagcgatctggtgtttgcggatctgcaccttcgcaacggtcatcggcggcaccttgctaagccttccgctgatgtggcaactggcagatatcataatggcctgcatggctattaccaatttgaccgccattttactgctctcgcctgtggttcataccattgccagtgattatctacgccagcgtaaactcggcgtgcgcccggtgtttgatccattgcgttatccggatatcggtcgccagctttctccggacgcgtgggatgatgtttcgcaggagtaa

SEQ ID NO: 5918 - DNA, 1917 bp, Escherichia coli
  CDS (1)...(1917)
atgggtaaaataattggtatcgacctgggtactaccaactcttgtgtagcgattatggatggcaccactcctcgcgtgctggagaacgccgaaggcgatcgcaccacgccttctatcattgcctatacccaggatggtgaaactctagttggtcagccggctaaacgtcaggcagtgacgaacccgcaaaacactctgtttgcgattaaacgcctgattggtcgccgcttccaggacgaagaagtacagcgtgatgtttccatcatgccgttcaaaattattgctgctgataacggcgacgcatgggtcgaagttaaaggccagaaaatggcaccgccgcagatttctgctgaagtgctgaaaaaaatgaagaaaaccgctgaagattacctgggtgaaccggtaactgaagctgttatcaccgtaccggcatactttaacgatgctcagcgtcaggcaaccaaagacgcaggccgtatcgctggtctggaagtaaaacgtatcatcaacgaaccgaccgcagctgcgctggcttacggtctggacaaaggcactggcaaccgtactatcgcggtttatgacctgggtggtggtactttcgatatttctattatcgaaatcgacgaagttgacggcgaaaaaaccttcgaagttctggcaaccaacggtgatacccacctggggggtgaagacttcgacagccgtctgatcaactatctggttgaagaattcaagaaagatcagggcattgacctgcgcaacgatccgctggcaatgcagcgcctgaaagaagcggcagaaaaagcgaaaatcgaactgtcttccgctcagcagaccgacgttaacctgccatacatcactgcagacgcgaccggtccgaaacacatgaacatcaaagtgactcgtgcgaaactggaaagcctggttgaagatctggtaaaccgttccattgagccgctgaaagttgcactgcaggacgctggcctgtccgtatctgatatcgacgacgttatcctcgttggtggtcagactcgtatgccaatggttcagaagaaagttgctgagttctttggtaaagagccgcgtaaagacgttaacccggacgaagctgtagcaatcggtgctgctgttcagggtggtgttctgactggtgacgtaaaagacgtactgctgctggacgttaccccgctgtctctgggtatcgaaaccatgggcggtgtgatgacgacgctgatcgcgaaaaacaccactatcccgaccaagcacagccaggtgttctctaccgctgaagacaaccagtctgcggtaaccatccatgtgctgcagggtgaacgtaaacgtgcggctgataacaaatctctgggtcagttcaacctagatggtatcaacccggcaccgcgcggcatgccgcagatcgaagttaccttcgatatcgatgctgacggtatcctgcacgtttccgcgaaagataaaaacagcggtaaagagcagaagatcaccatcaaggcttcttctggtctgaacgaagatgaaatccagaaaatggtacgcgacgcagaagctaacgccgaagctgaccgtaagtttgaagagctggtacagactcgcaaccagggcgaccatctgctgcacagcacccgtaagcaggttgaagaagcaggcgacaaactgccggctgacgacaaaactgctatcgagtctgcgctgactgcactggaaactgctctgaaaggtgaagacaaagccgctatcgaagcgaaaatgcaggaactggcacaggtttcccagaaactgatggaaatcgcccagcagcaacatgcccagcagcagactgccggtgctgatgcttctgcaaacaacgcgaaagatgacgatgttgtcgacgctgaatttgaagaagtcaaagacaaaaaataa

SEQ ID NO: 5919 - DNA, 2817 bp, Escherichia coli
  CDS (1)...(2817)
atgagtgactataaatcaaccctgaatttgccggaaacagggttcccgatgcgtggcgatctcgccaagcgcgaacccggaatgctggcgcgttggactgatgatgatctgtacggcatcatccgtgcggctaaaaaaggcaaaaaaaccttcattctgcatgatggccctccttatgcgaatggcagcattcatattggtcactcggttaacaagattctgaaagacattatcgtgaagtccaaagggctttccggttatgactcgccgtatgtgcctggctgggactgccacggtctgccgatcgagctgaaagtcgagcaagaatacggtaagccgggtgagaaattcaccgccgccgagttccgcgccaagtgccgcgaatacgcggcgacccaggttgacggtcaacgcaaagactttatccgtctgggcgtgctgggcgactggtcgcacccgtacctgaccatggacttcaaaactgaagccaacatcatccgcgcgctgggcaaaatcatcggcaacggtcacctgcacaaaggcgcgaagccagttcactggtgcgttgactgccgttctgcgctggcggaagcggaagttgagtattacgacaaaacttctccgtccatcgacgttgctttccaggcagtcgatcaggatgcactgaaagcaaaatttgccgtaagcaacgttaacggcccaatctcgctggtaatctggaccaccacgccgtggactctgcctgccaaccgcgcaatctctattgcaccagatttcgactatgcgctggtgcagatcgacggtcaggccgtgattctggcgaaagatctggttgaaagcgtaatgcagcgtatcggcgtgaccgattacaccattctcggcacggtaaaaggtgcggagcttgagctgctgcgctttacccatccgtttatgggcttcgacgttccggcaatcctcggcgatcacgttaccctggatgccggtaccggtgccgttcacaccgcgcctggccacggcccggacgactatgtgatcggtcagaaatacggcctggaaaccgctaacccggttggcccggacggcacttatctgccgggcacttatccgacgctggatggcgtgaacgtcttcaaagcgaacgacatcgtcgttgcgctgctgcaggaaaaaggcgcgctgctgcacgttgagaaaatgcagcacagctatccgtgctgctggcgtcacaaaacgccgatcatcttccgcgcgacgccgcagtggttcgtcagcatggatcagaaaggtctgcgtgcgcagtcactgaaagagatcaaaggcgtgcagtggatcccggactggggccaggcgcgtatcgagtcgatggttgctaaccgtcctgactggtgtatctcccgtcagcgcacctggggtgtaccgatgtcactgttcgtgcacaaagacacggaagagctgcatccgcgtacccttgaactgatggaagaagtggcaaaacgcgttgaagtcgatggcatccaggcgtggtgggatctcgatgcgaaagagatcctcggcgacgaagctgatcagtacgtgaaagtgccggacacattggatgtatggtttgactccggatctacccactcttctgttgttgacgtgcgtccggaatttgccggtcacgcagcggacatgtatctggaaggttctgaccaacaccgcggctggttcatgtcttccctaatgatctccaccgcgatgaagggtaaagcgccgtatcgtcaggtactgacccacggctttaccgtggatggtcagggccgcaagatgtctaaatccatcggcaataccgtttcgccgcaggatgtgatgaacaaactgggcgcggatattctgcgtctgtgggtggcatcaaccgactacaccggtgaaatggccgtttctgacgagatcctgaaacgtgctgccgatagctatcgtcgtatccgtaacaccgcgcgcttcctgctggcaaacctgaacggttttgatccagcaaaagatatggtgaaaccggaagagatggtggtactggatcgctgggccgtaggttgtgcgaaagcggcacaggaagacatcctcaaggcgtacgaagcatacgatttccacgaagtggtacagcgtctgatgcgcttctgctccgttgagatgggttccttctacctcgacatcatcaaagaccgtcagtacaccgccaaagcggacagtgtggcgcgtcgtagctgccagactgcgctatatcacatcgcagaagcgctggtgcgctggatggcaccaatcctctccttcaccgctgatgaagtgtggggctacctgccgggcgaacgtgaaaaatacgtcttcaccggtgagtggtacgaaggcctgtttggcctggcagacagtgaagcgatgaacgatgcgttctgggacgagctgttgaaagtgcgtggcgaagtgaacaaagtcattgagcaagcgcgtgccgacaagaaagtgggtggctcgctggaagcggcagtaaccttgtatgcagaaccggaactgtcggcgaaactgaccgcgctgggcgatgaattacgatttgtcctgttgacctccggcgctaccgttgcagactataacgacgcacctgctgatgctcagcagagcgaagtactcaaagggctgaaagtcgcgttgagtaaagccgaaggtgagaagtgcccacgctgctggcactacacccaggatgtcggcaaggtggcggaacacgcagaaatctgcggccgctgtgtcagcaacgtcgccggtgacggtgaaaaacgtaagtttgcctga

SEQ ID NO: 5920 - DNA, 822 bp, Escherichia coli
  CDS (1)...(822)
atgcatgatgcaaacatccgcgttgccatcgcgggagccggggggcgtatgggccgccagttgattcaggcggcgctggcattagagggcgtgcagttgggcgctgcgctggagcgtgaaggatcttctttactgggcagcgacgccggtgagctggccggagccgggaaaacaggcgttaccgtgcaaagcagcctcgatgcggtaaaagatgattttgatgtgtttatcgattttacccgtccggaaggtacgctgaaccatctcgctttttgtcgccagcatggcaaagggatggtgatcggcactacggggtttgacgaagccggtaaacaagcaattcgtgacgccgctgccgatattgcgattgtctttgctgccaattttagcgttggcgttaacgtcatgcttaagctgctggagaaagcagccaaagtgatgggtgactacaccgatatcgaaattattgaagcacatcatagacataaagttgatgcgccgtcaggcaccgcactggcaatgggagaggcgatcgcccacgcccttgataaagatctgaaagattgcgcggtctacagtcgtgaaggccacaccggtgaacgtgtgcctggcaccattggttttgccaccgtgcgtgcaggtgacatcgttggtgaacataccgcgatgtttgccgatattggcgagcgtctggagatcacccataaggcgtccagccgtatgacatttgctaacggcgcggtaagatcggctttgtggttgagtggtaaggaaagcggtctttttgatatgcgagatgtacttgatctcaataatttgtaa

SEQ ID NO: 5921 - DNA, 480 bp, Escherichia coli
  CDS (1)...(480)
atgatcagtctgattgcggcgttagcggtagatcgcgttatcggcatggaaaacgccatgccgtggaacctgcctgccgatctcgcctggtttaaacgcaacaccttaaataaacccgtgattatgggccgccatacctgggaatcaatcggtcgtccgttgccaggacgcaaaaatattatcctcagcagtcaaccgggtacggacgatcgcgtaacgtgggtgaagtcggtggatgaagccatcgcggcgtgtggtgacgtaccagaaatcatggtgattggcggcggtcgcgtttatgaacagttcttgccaaaagcgcaaaaactgtatctgacgcatatcgacgcagaagtggaaggcgacacccatttcccggattacgagccggatgactgggaatcggtattcagcgaattccacgatgctgatgcgcagaactctcacagctattgctttgagattctggagcggcggtaa

SEQ ID NO: 5922 - DNA, 822 bp, Escherichia coli
  CDS (1)...(822)
atgaataatcgagtccaccagggccacttagcccgtaaacgcttcgggcaaaactttctcaacgatcagttcgtgatcgacagtattgtgtctgccattaacccgcaaaagggccaggcgatggtcgaaatcggccccggtctggcggcattgaccgaaccggtcggcgaacgtctggaccagctgacggtcatcgaacttgaccgcgatctggcggcacgtctgcaaacgcatccattcttaggcccgaaactgacgatttatcagcaggatgcgatgacctttaactttggtgaactggccgagaaaatgggtcagccgctgcgtgttttcggcaacctgccttataacatctccacgccgttgatgttccatctgtttagctatactgatgccattgccgacatgcactttatgttgcaaaaagaggtggtgaatcgtctggttgcaggaccgaacagcaaagcgtatggtcgattaagcgtcatggcgcaatactattgcaatgtgatcccggtactggaagtaccgccgtcagcctttacaccaccacccaaagtggattccgccgtcgtgcgcctggttcctcatgcaacgatgcctcacccggttaaagatgttcgtgtgttgagccgcatcaccaccgaagcctttaaccagcgtcgtaaaaccattcgtaacagcctcggcaacctgtttagcgtcgaggtgttaacgggaatggggatcgacccggcgatgcgagcggaaaatatctctgtcgcgcaatattgccagatggcgaactatctggcggagaacgcgcctttgcaggagagttaa

SEQ ID NO: 5923 - DNA, 606 bp, Escherichia coli
  CDS (1)...(606)
atggcagagaaatttatcaaacacacaggcctggtggttccgctggatgccgccaatgtcgataccgatgcaatcatcccgaaacagtttttgcagaaagtgacccgtacgggttttggcgcgcatctgtttaacgactggcgttttctggatgaaaaaggccaacagccaaacccggacttcgtgctgaacttcccgcagtatcagggcgcttccattttgctggcacgagaaaacttcggctgtggctcttcgcgtgagcacgcgccctgggcattgaccgactacggttttaaagtggtgattgcgccgagttttgctgacatcttctacggcaatagctttaacaaccagctgctgccggtgaaattaagcgatgcagaagtggacgaactgtttgcgctggtgaaagctaatccggggatccatttcgacgtggatctggaagcgcaagaggtgaaagcgggagagaaaacctatcgctttaccatcgatgccttccgccgccactgcatgatgaacggtctggacagtattgggcttaccttgcagcacgacgacgccattgccgcttatgaagcaaaacaacctgcgtttatgaattaa

SEQ ID NO: 5924 - DNA, 1401 bp, Escherichia coli
  CDS (1)...(1401)
atggctaagacgttatacgaaaaattgttcgacgctcacgttgtgtacgaagccgaaaacgaaaccccactgttatatatcgaccgccacctggtgcatgaagtgacctcaccgcaggcgttcgatggtctgcgcgcccacggtcgcccggtacgtcagccgggcaaaaccttcgctaccatggatcacaacgtctctacccagaccaaagacattaatgcctgcggtgaaatggcgcgtatccagatgcaggaactgatcaaaaactgcaaagaatttggcgtcgaactgtatgacctgaatcacccgtatcaggggatcgtccacgtaatggggccggaacagggcgtcaccttgccggggatgaccattgtctgcggcgactcgcataccgccacccacggcgcgtttggcgcactggcctttggtatcggcacttccgaagttgaacacgtactggcaacgcaaaccctgaaacagggccgcgcaaaaaccatgaaaattgaagtccagggcaaagccgcgccgggcattaccgcaaaagatatcgtgctggcaattatcggtaaaaccggtagcgcaggcggcaccgggcatgtggtggagttttgcggcgaagcaatccgtgatttaagcatggaaggtcgtatgaccctgtgcaatatggcaatcgaaatgggcgcaaaagccggtctggttgcaccggacgaaaccacctttaactatgtcaaaggccgtctgcatgcgccgaaaggcaaagatttcgacgacgccgttgcctactggaaaaccctgcaaaccgacgaaggcgcaactttcgataccgttgtcactctgcaagcagaagaaatttcaccgcaggtcacctggggcaccaatcccggccaggtgatttccgtgaacgacaatattcccgatccggcttcgtttgccgatccggttgaacgcgcgtcggcagaaaaagcgctggcctatatggggctgaaaccgggtattccgctgaccgaagtggctatcgacaaagtgtttatcggttcctgtaccaactcgcgcattgaagatttacgcgcggcagcggagatcgccaaagggcgaaaagtcgcgccaggcgtgcaggcactggtggttcccggctctggcccggtaaaagcccaggcggaagcggaaggtctggataaaatctttattgaagccggttttgaatggcgcttgcctggctgctcaatgtgtctggcgatgaacaacgaccgtctgaatccgggcgaacgttgtgcctccaccagcaaccgtaactttgaaggccgccaggggcgcggcgggcgcacgcatctggtcagcccggcaatggctgccgctgctgctgtgaccggacatttcgccgacattcgcaacattaaataa

SEQ ID NO: 5925 - DNA, 1815 bp, Escherichia coli
  CDS (1)...(1815)
gtgtttatgtctctggctgccaattgcttaagcaagatcggacggttaatgtgttttacacattttttccgtcaaacagtgaggcaggccatggagatgttgtctggagccgagatggtcgtccgatcgcttatcgatcagggcgttaaacaagtattcggttatcccggaggcgcagtccttgatatttatgatgcattgcataccgtgggtggtattgatcatgtattagttcgtcatgagcaggcggcggtgcatatggccgatggcctggcgcgcgcgaccggggaagtcggcgtcgtgctggtaacgtcgggtccaggggcgaccaatgcgattactggcatcgccaccgcttatatggattccattccattagttgtcctttccgggcaggtagcgacctcgttgataggttacgatgcctttcaggagtgcgacatggtggggatttcgcgaccggtggttaaacacagttttctggttaagcaaacggaagacattccgcaggtgctgaaaaaggctttctggctggcggcaagtggtcgcccaggaccagtagtcgttgatttaccgaaagatattcttaatccggcgaacaaattaccctatgtctggccggagtcggtcagtatgcgttcttacaatcccactactaccggacataaagggcaaattaagcgtgctctgcaaacgctggtagcggcaaaaaaaccggttgtctacgtaggcggtggggcaatcacggcgggctgccatcagcagttgaaagaaacggtggaggcgttgaatctgcccgttgtttgctcattgatggggctgggggcgtttccggcaacgcatcgtcaggcactgggcatgctgggaatgcacggtacctacgaagccaatatgacgatgcataacgcggatgtgattttcgccgtcggggtacgatttgatgaccgaacgacgaacaatctggcaaagtactgcccaaatgccactgttctgcatatcgatattgatcctacttccatttctaaaaccgtgactgcggatatcccgattgtgggggatgctcgccaggtcctcgaacaaatgcttgaactcttgtcgcaagaatccgcccatcaaccactggatgagatccgcgactggtggcagcaaattgaacagtggcgcgctcgtcagtgcctgaaatatgacactcacagtgaaaagattaaaccgcaggcggtgatcgagactctttggcggttgacgaagggagacgcttacgtgacgtccgatgtcgggcagcaccagatgtttgctgcactttattatccattcgacaaaccgcgtcgctggatcaattccggtggcctcggcacgatgggttttggtttacctgcggcactgggcgtcaaaatggcgttgccagaagaaaccgtggtttgcgtcactggcgacggcagtattcagatgaacatccaggaactgtctaccgcgttgcaatacgagttgcccgtactggtggtgaatctcaataaccgctatctggggatggtgaagcagtggcaggacatgatctattccggccgtcattcacaatcttatatgcaatcgctacccgatttcgtccgtctggcggaagcctatgggcatgtcgggatccagatttctcatccgcatgagctggaaagcaaacttagcgaggcgctggaacaggtgcgcaataatcgcctggtgtttgttgatgttaccgtcgatggcagcgagcacgtctacccgatgcagattcgcgggggcggaatggatgaaatgtggttaagcaaaacggagagaacctga

SEQ ID NO: 5926 - DNA, 492 bp, Escherichia coli
  CDS (1)...(492)
atgcgccggatattatcagtcttactcgaaaatgaatcaggcgcgttatcccgcgtgattggccttttttcccagcgtggctacaacattgaaagcctgaccgttgcgccaaccgacgatccgacattatcgcgtatgaccatccagaccgtgggcgatgaaaaagtacttgagcagatcgaaaagcaattacacaaactggtcgatgtcttgcgcgtgagtgagttggggcagggcgcgcatgttgagcgggaaatcatgctggtgaaaattcaggccagcggttacgggcgtgacgaagtgaaacgtaatacggaaatattccgtgggcaaattatcgatgtcacaccctcgctttataccgttcaattagcaggcaccagcggtaagcttgatgcatttttagcatcgattcgcgatgtggcgaaaattgtggaggttgctcgctctggtgtggtcggactttcgcgcggcgataaaataatgcgttga

SEQ ID NO: 5927 - DNA, 942 bp, Escherichia coli
  CDS (1)...(942)
atgatggaaaactataaacatactacggtgctgctggatgaagccgttaatggcctcaatatccgtcctgatggcatctacattgatgggacttttggtcgcggtggtcactcacgtctgatcctctcgcagcttggcgaagaggggcgtttgctggcgatcgatcgcgacccgcaggctatcgccgttgcgaagactattgatgatccgcgcttctccatcatccacggacctttctccgcgctgggcgaatacgttgccgagcgcgatcttatcggcaagatcgacggcattctcctcgatcttggcgtctcttcaccgcaacttgatgatgctgaacgtggcttttcctttatgcgcgatggtccgctggacatgcgtatggacccaacccgtgggcagtcagccgctgaatggctacaaaccgcagaagaagccgatatcgcctgggtattgaaaacctatggtgaagagcgttttgccaaacgcattgcccgcgccattgtcgagcgtaaccgcgaacagccgatgacccgcaccaaagaactggcggaagtcgtggctgctgcaacgccggtgaaagataagtttaaacatcccgcgacccgtaccttccaggcggtgcgcatttgggtaaacagtgaactggaggagatagagcaggcgctaaaaagctcgctcaacgtgctggccccgggtgggcggctttcgatcatcagcttccactcgctggaagaccgtattgtgaaacgttttatgcgtgaaaacagccgcggtccgcaagttccggcagggttaccgatgactgaagagcagctcaaaaaactgggtggccgtcagctgcgagcactaggcaagttaatgccgggcgaagaagaggtggctgagaaccctcgtgcccgtagttcagttctgcgtattgcagagaggacgaatgcatga

SEQ ID NO: 5928 - DNA, 1767 bp, Escherichia coli
  CDS (1)...(1767)
atgaaagcagcggcgaaaacgcagaaaccaaaacgtcaggaagaacatgccaactttatcagttggcgttttgcgttgttatgcggctgtattctcctggcgctggcttttctgctcggacgcgtagcgtggttacaagttatctccccggatatgctggtgaaagagggcgacatgcgttctcttcgcgttcagcaagtttccacctcccgcggcatgattactgaccgttctggtcgcccgttagcggtgagcgtgccggtaaaagcgatttgggctgacccgaaagaagtgcatgacgctggcggtatcagcgtcggtgaccgctggaaggcgctggctaacgcgctcaatattccgctggatcagctttcagcccgcattaacgccaacccgaaagggcgctttatttatctggcgcgtcaggtgaaccctgacatggcggactacatcaaaaaactgaaactgccggggattcatctgcgtgaagagtctcgccgttactatccgtccggcgaagtgactgctcacctcatcggctttactaacgtcgatagtcaagggattgagggcgttgagaagagtttcgataaatggcttaccgggcagccgggtgagcgcattgtgcgtaaagaccgctatggtcgcgtaattgaagatatttcttctactgacagccaggcagcgcacaacctggcgctgagtattgatgaacgcctgcaggcgctggtttatcgcgaactgaacaacgcggtggcctttaacaaggctgaatctggtagcgccgtgctggtggatgtcaacaccggtgaagtgctggcgatggctaacagcccgtcatacaaccctaacaatctgagcggcacgccgaaagaggcgatgcgtaaccgtaccatcaccgacgtgtttgaaccgggctcaacggttaaaccgatggtggtaatgaccgcgttgcaacgtggcgtggtgcgggaaaactcggtactcaataccattccttatcgaattaacggccacgaaatcaaagacgtggcacgctacagcgaattaaccctgaccggggtattacagaagtcgagtaacgtcggtgtttccaagctggcgttagcgatgccgtcctcagcgttagtagatacttactcacgttttggactgggaaaagcgaccaatttggggttggtcggagaacgcagtggcttatatcctcaaaaacaacggtggtctgacatagagagggccaccttctctttcggctacgggctaatggtaacaccattacagttagcgcgagtctacgcaactatcggcagctacggcatttatcgcccactgtcgattaccaaagttgaccccccggttcccggtgaacgtgtcttcccggaatccattgtccgcactgtggtgcatatgatggaaagcgtggcgctaccaggcggcggcggcgtgaaggcggcgattaaaggctatcgtatcgccattaaaaccggtaccgcgaaaaaggtcgggccggacggtcgctacatcaataaatatattgcttataccgcaggcgttgcgcctgcgagtcagccgcgcttcgcgctggttgttgttatcaacgatccgcaggcgggtaaatactacggcggcgccgtttccgcgccggtctttggtgccatcatgggcggcgtattgcgtaccatgaacatcgagccggatgcgctgacaacgggcgataaaaatgaatttgtgattaatcaaggcgaggggacaggtggcagatcgtaa

SEQ ID NO: 5929 - DNA, 1488 bp, Escherichia coli
  CDS (1)...(1488)
gtggcagatcgtaatttgcgcgaccttcttgctccgtgggtgccagacgcaccttcgcgagcactgcgagagatgacactcgacagccgtgtggctgcggcgggcgatctctttgtagctgtagtaggtcatcaggcggacgggcgtcgatatatcccgcaggcgatagcgcaaggtgtggctgccattattgcagaggcgaaagatgaggcgaccgatggtgaaatccgtgaaatgcacggcgtaccggtcatctatctcagccagctcaacgagcgtttatctgcactggcgggccgcttttaccatgaaccctctgacaatttacgtctcgtgggcgtaacgggcaccaacggcaaaaccacgactacccagctgttggcgcagtggagccaactgcttggcgaaatcagcgcggtaatgggcaccgttggtaacggcctgctggggaaagtgatcccgacagaaaatacaaccggttcggcagtcgatgttcagcatgagctggcggggctggtggatcagggcgcgacgttttgcgcaatggaagtttcctcccacgggctggtacagcaccgtgtggcggcattgaaatttgcggcgtcggtctttaccaacttaagccgcgatcaccttgattatcatggtgatatggaacactacgaagccgcgaaatggctgctttattctgagcatcattgcggtcaggcgattattaacgccgacgatgaagtgggccgccgctggctggcaaaactgccggacgcggttgcggtatcaatggaagatcatattaatccgaactgtcacggacgctggttgaaagcgaccgaagtgaactatcacgacagcggtgcgacgattcgctttagctcaagttggggcgatggcgaaattgaaagccatctgatgggcgcttttaacgtcagcaacctgctgctcgcgctggcgacactgttggcactcggctatccactggctgatctgctgaaaaccgccgcgcgtctgcaaccggtttgcggacgtatggaagtgttcactgcgccaggcaaaccgacggtggtggtggattacgcgcatacgccggatgcactggaaaaagccttacaggcggcgcgtctgcactgtgcgggcaagctgtggtgtgtctttggctgtggtggcgatcgcgataaaggtaagcgtccactgatgggcgcaattgccgaagagtttgctgacgtggcggtggtgacggacgataacccgcgtaccgaagaaccgcgtgccatcatcaacgatattctggcgggaatgttagatgccggacatgccaaagtgatggaaggccgtgctgaagcggtgacttgcgccgttatgcaggctaaagagaatgatgtggtactggtcgcgggcaaaggccatgaagattaccagattgttggcaatcagcgtctggactactccgatcgcgtcacggtggcgcgtctgctgggggtgattgcatga

SEQ ID NO: 5930 - DNA, 1359 bp, Escherichia coli
  CDS (1)...(1359)
atgattagcgtaacccttagccaacttaccgacattctcaacggtgaactgcaaggtgcagatatcacccttgatgctgtaaccactgatacccgaaaactgacgccgggctgcctgtttgttgccctgaaaggcgaacgttttgatgcccacgattttgccgaccaggcgaaagctggcggcgcaggcgcactactggttagccgtccgctggacatcgacctgccgcagttaatcgtcaaggatacgcgtctggcgtttggtgaactggctgcatgggttcgccagcaagttccggcgcgcgtggttgctctgacggggtcctccggcaaaacctccgttaaagagatgacggcggcgattttaagccagtgcggcaacacgctttatacggcaggcaatctcaacaacgacatcggtgtaccgatgacgctgttgcgcttaacgccggaatacgattacgcagttattgaacttggcgcgaaccatcagggcgaaatagcctggactgtgagtctgactcgcccggaagctgcgctggtcaacaacctggcagcggcgcatctggaaggttttggctcgcttgcgggtgtcgcgaaagcgaaaggtgaaatctttagcggcctgccggaaaacggtatcgccattatgaacgccgacaacaacgactggctgaactggcagagcgtaattggctcacgcaaagtgtggcgtttctcacccaatgccgccaacagcgatttcaccgccaccaatatccatgtgacctcgcacggtacggaatttaccctacaaaccccaaccggtagcgtcgatgttctgctgccgttgccggggcgtcacaatattgcgaatgcgctggcagccgctgcgctctccatgtccgtgggcgcaacgcttgatgctatcaaagcggggctggcaaatctgaaagctgttccaggccgtctgttccccatccaactggcagaaaaccagttgctgctcgacgactcctacaacgccaatgtcggttcaatgactgcagcagtccaggtactggctgaaatgccgggctaccgcgtgctggtggtgggcgatatggcggaactgggcgctgaaagcgaagcctgccatgtacaggtgggcgaggcggcaaaagctgctggtattgaccgcgtgttaagcgtgggtaaacaaagccatgctatcagcaccgccagcggcgttggcgaacattttgctgataaaactgcgttaattacgcgtcttaaattactgattgctgagcaacaggtaattacgattttagttaagggttcacgtagtgccgccatggaagaggtagtacgcgctttacaggagaatgggacatgttag

SEQ ID NO: 5931 - DNA, 1083 bp, Escherichia coli
  CDS (1)...(1083)
atgttagtttggctggccgaacatttggtcaaatattattccggctttaacgtcttttcctatctgacgtttcgcgccatcgtcagcctgctgaccgcgctgttcatctcattgtggatgggcccgcgtatgattgctcatttgcaaaaactttcctttggtcaggtggtgcgtaacgacggtcctgaatcacacttcagcaagcgcggtacgccgaccatgggcgggattatgatcctgacggcgattgtgatctccgtactgctgtgggcttacccgtccaatccgtacgtctggtgcgtgttggtggtgctggtaggttacggtgttattggctttgttgatgattatcgcaaagtggtgcgtaaagacaccaaagggttgatcgctcgttggaagtatttctggatgtcggtcattgcgctgggtgtcgccttcgccctgtaccttgccggcaaagacacgcccgcaacgcagctggtggtcccattctttaaagatgtgatgccgcagctggggctgttctacattctgctggcttacttcgtcattgtgggtactggcaacgcggtaaacctgaccgatggtctcgacggcctggcaattatgccgaccgtatttgtcgccggtggttttgcgctggtggcgtgggcgaccggcaatatgaactttgccagctacttgcatataccgtatctgcgacacgccggggaactggttattgtctgtaccgcgatagtcggggcaggactgggcttcctgtggtttaacacctatccggcgcaggtctttatgggcgatgtaggttcgctggcgttaggtggtgcgttaggcattatcgccgtactgctacgtcaggaattcctgctggtgattatggggggcgtgttcgtggtagaaacgctttctgtcatcctgcaggtcggctcctttaaactgcgcggacaacgtattttccgcatggcaccgattcatcaccactatgaactgaaaggctggccggaaccgcgcgtcattgtgcgtttctggattatttcgctgatgctggttctgattggtctggcaacgctgaaggtacgttaa

SEQ ID NO: 5932 - DNA, 1317 bp, Escherichia coli
  CDS (1)...(1317)
atggctgattatcagggtaaaaatgtcgtcattatcggcctgggcctcaccgggctttcctgcgtggactttttcctcgctcgcggtgtgacgccgcgcgttatggatacgcgtatgacaccgcctggcctggataaattacccgaagccgtagaacgccacacgggcagtctgaatgatgaatggctgatggcggcagatctgattgtcgccagtcccggtattgcactggcgcatccatccttaagcgctgccgctgatgccggaatcgaaatcgttggcgatatcgagctgttctgtcgcgaagcacaagcaccgattgtggcgattaccggttctaacggcaaaagcacggtcaccacgctagtgggtgaaatggcgaaagcggcgggggttaacgttggtgtgggtggcaatattggcctgcctgcgttgatgctactggatgatgagtgtgaactgtacgtgctggaactgtcgagcttccagctggaaaccacctccagcttacaggcggtagcagcgaccattctgaacgtgactgaagatcatatggatcgctatccgtttggtttacaacagtatcgtgcagcaaaactgcgcatttacgaaaacgcgaaagtttgcgtggttaatgctgatgatgccttaacaatgccgattcgcggtgcggatgaacgctgcgtcagctttggcgtcaacatgggtgactatcacctgaatcatcagcagggcgaaacctggctgcgggttaaaggcgagaaagtgctgaatgtgaaagagatgaaactttccgggcagcataactacaccaatgcgctggcggcgctggcgctggcagatgctgcagggttaccgcgtgccagcagcctgaaagcgttaaccacattcactggtctgccgcatcgctttgaagttgtgctggagcataacggcgtacgttggattaacgattcgaaagcgaccaacgtcggcagtacggaagcggcgctgaatggcctgcacgtagacggcacactgcatttgttgctgggtggcgatggtaaatcggcggactttagcccactggcgcgttacctgaatggcgataacgtacgtctgtattgtttcggtcgtgacggcgcgcagctggcggcgctacgcccggaagtggcagaacaaaccgaaactatggaacaggcgatgcgcttgctggctccgcgtgttcagccgggcgatatggttctgctctccccagcctgtgccagccttgatcagttcaagaactttgaacaacgaggcaatgagtttgcccgtctggcgaaggagttaggttga

SEQ ID NO: 5933 - DNA, 1245 bp, Escherichia coli
  CDS (1)...(1245)
atgcgtttatctctccctcgcctgaaaatgccgcgcctgccaggattcagtatcctggtctggatctccacggcgctaaagggctgggtgatgggctcgcgggaaaaagataccgacagcctgatcatgtacgatcgcaccttactgtggctgaccttcggcctcgcggcgattggctttatcatggtgacctcggcgtcaatgcccatagggcaacgcttaaccaacgatccgttcttcttcgcgaagcgtgatggtgtctatctgattttggcgtttattctggcgatcattacgctgcgtctgccgatggagttctggcaacgctacagtgccacgatgctgctcggatctatcatcctgctgatgatcgtcctggtagtgggtagctcggttaaaggggcatcgcgttggatcgatctcggtttgctgcgtatccagcctgcggagctgacaaaactgtcgctgttttgctatatcgccaactatctggtgcgtaaaggcgacgaagtacgtaataacctgcgcggcttcctgaaaccgatgggcgtgattctggtgttggcagtgttactgctggcacagccagaccttggtacggtggtggtgttgtttgtgactacgctggcgatgttgttcctggcgggagcgaaattgtggcagttcattgccattatcggtatgggcatttcagcggttgtgttgctgatactcgccgaaccgtaccgtatccgccgtgttaccgcattctggaacccgtgggaagatccctttggcagcggctatcagttaacgcaatcgctgatggcgtttggtcgcggcgaactttgggggcaaggtttaggtaactcggtacaaaaactggagtatctgccggaagcgcacactgactttattttcgccattatcggcgaagaactggggtatgtcggtgtggtgctggcacttttaatggtattcttcgtcgcttttcgcgcgatgtcgattggccgtaaagcattagaaattgaccaccgtttttccggttttctcgcctgttctattggcatctggtttagcttccaggcgctggttaacgtaggcgcggcggcggggatgttaccgaccaaaggtctgacattgccgctgatcagttacggtggttcgagcttactgattatgtcgacagccatcatgatgctgttgcgtattgattatgaaacgcgtctggagaaagcgcaggcgtttgtacgaggttcacgatga

SEQ ID NO: 5934 - DNA, 1068 bp, Escherichia coli
  CDS (1)...(1068)
atgagtggtcaaggaaagcgattaatggtgatggcaggcggaaccggtggacatgtattcccgggactggcggttgcgcaccatctaatggctcagggttggcaagttcgctggctggggactgccgaccgtatggaagcggacttagtgccaaaacatggcatcgaaattgatttcattcgtatctctggtctgcgtggaaaaggtataaaagcactgatagctgccccgctgcgtatcttcaacgcctggcgtcaggcgcgggcgattatgaaagcgtacaaacctgacgtggtgctcggtatgggaggctacgtgtcaggtccaggtggtctggccgcgtggtcgttaggcattccggttgtacttcatgaacaaaacggtattgcgggcttaaccaataaatggctggcgaagattgccaccaaagtgatgcaggcgtttccaggtgctttccctaatgcggaagtagtgggtaacccggtgcgtaccgatgtgttggcgctgccgttgccgcagcaacgtttggctggacgtgaaggtccggttcgtgtgctggtagtgggtggttctcagggcgcacgcattcttaaccagacaatgccgcaggttgctgcgaaactgggtgattcagtcactatctggcatcagagcggcaaaggttcgcaacaatccgttgaacaggcgtatgccgaagcggggcaaccgcagcataaagtgacggaatttattgatgatatggcggcggcgtatgcgtgggcggatgtcgtcgtttgccgctccggtgcgttaacggtgagtgaaatcgccgcggcaggactaccggcgttgtttgtgccgtttcaacataaagaccgccagcaatactggaatgcgctaccgctggaaaaagcgggcgcagccaaaattatcgagcagccacagcttagcgtggatgctgtcgccaacaccctggccgggtggtcgcgagaaaccttattaaccatggcagaacgcgcccgcgctgcatccattccggatgccaccgagcgagtggcaaatgaagtgagccgggttgcccgggcgtaa

SEQ ID NO: 5935 - DNA, 1476 bp, Escherichia coli
  CDS (1)...(1476)
atgaatacacaacaattggcaaaactgcgttccatcgtgcccgaaatgcgtcgcgttcggcacatacattttgtcggcattggtggtgccggtatgggcggtattgccgaagttctggccaatgaaggttatcagatcagtggttccgatttagcgccaaatccggtcacgcagcagttaatgaatctgggtgcgacgatttatttcaaccatcgcccggaaaacgtacgtgatgccagcgtggtcgttgtttccagcgcgatttctgccgataacccggaaattgtcgccgctcatgaagcgcgtattccggtgatccgtcgtgccgaaatgctggctgagttaatgcgttttcgtcatggcatcgccattgccggaacgcacggcaaaacgacaaccaccgcgatggtttccagcatctacgcagaagcggggctcgacccaaccttcgttaacggcgggctggtaaaagcggcgggggttcatgcgcgtttggggcatggtcggtacctgattgccgaagcagatgagagtgatgcatcgttcctgcatctgcaaccgatggtggcgattgtcaccaatatcgaagccgaccacatggatacctaccagggcgactttgagaatttaaaacagacttttattaattttctgcacaacctgccgttttacggtcgtgcggtgatgtgtgttgatgatccggtgatccgcgaattgttaccgcgagtggggcgtcagaccacgacttacggcttcagcgaagatgccgacgtgcgtgtagaagattatcagcagattggcccgcaggggcactttacgctgctgcgccaggacaaagagccgatgcgcgtcaccctgaatgcgccaggtcgtcataacgcgctgaacgccgcagctgcggttgcggttgctacggaagagggcattgacgacgaggctattttgcgggcgcttgaaagcttccaggggactggtcgccgttttgatttcctcggtgaattcccgctggagccagtgaatggtaaaagcggtacggcaatgctggtcgatgactacggccaccacccgacggaagtggacgccaccattaaagcggcgcgcgcaggctggccggataaaaacctggtaatgctgtttcagccgcaccgttttacccgtacgcgcgacctgtatgatgatttcgccaatgtgctgacgcaggttgataccctgttgatgctggaagtgtatccggctggcgaagcgccaattccgggagcggacagccgttcgctgtgtcgcacaattcgtggacgtgggaaaattgatcccattctggtgccggatccggcgcgggtagccgagatgctggcaccggtattaaccggtaacgacctgattctcgttcagggggctggtaatattggaaaaattgcccgttctttagctgaaatcaaactgaagccgcaaactccggaggaagaacaacatgactga

SEQ ID NO: 5936 - DNA, 1152 bp, Escherichia coli
  CDS (1)...(1152)
atgtttgaaccaatggaacttaccaatgacgcggtgattaaagtcatcggcgtcggcggcggcggcggtaatgctgttgaacacatggtgcgcgagcgcattgaaggtgttgaattcttcgcggtaaataccgatgcacaagcgctgcgtaaaacagcggttggacagacgattcaaatcggtagcggtatcaccaaaggactgggcgctggcgctaatccagaagttggccgcaatgcggctgatgaggatcgcgatgcattgcgtgcggcgctggaaggtgcagacatggtctttattgctgcgggtatgggtggtggtaccggtacaggtgcagcaccagtcgtcgctgaagtggcaaaagatttgggtatcctgaccgttgctgtcgtcactaagcctttcaactttgaaggcaagaagcgtatggcattcgcggagcaggggatcactgaactgtccaagcatgtggactctctgatcactatcccgaacgacaaactgctgaaagttctgggccgcggtatctccctgctggatgcgtttggcgcagcgaacgatgtactgaaaggcgctgtgcaaggtatcgctgaactgattactcgtccgggtttgatgaacgtggactttgcagacgtacgcaccgtaatgtctgagatgggctacgcaatgatgggttctggcgtggcgagcggtgaagaccgtgcggaagaagctgctgaaatggctatctcttctccgctgctggaagatatcgacctgtctggcgcgcgcggcgtgctggttaacatcacggcgggcttcgacctgcgtctggatgagttcgaaacggtaggtaacaccatccgtgcatttgcttccgacaacgcgactgtggttatcggtacttctcttgacccggatatgaatgacgagctgcgcgtaaccgttgttgcgacaggtatcggcatggacaaacgtcctgaaatcactctggtgaccaataagcaggttcagcagccagtgatggatcgctaccagcagcatgggatggctccgctgacccaggagcagaagccggttgctaaagtcgtgaatgacaatgcgccgcaaactgcgaaagagccggattatctggatatcccagcattcctgcgtaagcaagctgattaa

SEQ ID NO: 5937 - DNA, 2706 bp, Escherichia coli
  CDS (1)...(2706)
atgctaatcaaattgttaactaaagttttcggtagtcgtaacgatcgcaccctgcgccggatgcgcaaagtggtcaacatcatcaatgccatggaaccggagatggaaaaactctccgacgaagaactgaaagggaaaaccgcagagtttcgtgcacgtctggaaaaaggcgaagtgctggaaaatctgatcccggaagctttcgccgtggtacgtgaggcaagtaagcgcgtctttggtatgcgtcacttcgacgttcagttactcggcggtatggttcttaacgaacgctgcatcgccgaaatgcgtaccggtgaaggaaaaaccctgaccgcaacgctgcctgcttacctgaacgcactaaccggtaaaggcgtgcacgtagttaccgtcaacgactacctggcgcaacgtgacgccgaaaacaaccgtccgctgtttgaattccttggcctgactgtcggtatcaacctgccgggcatgccagcaccggcaaagcgcgaagcttacgcagctgacatcacttacggtacgaacaacgaatacggctttgactacctgcgcgacaacatggcgttcagccctgaagaacgtgtacagcgtaaactgcactatgcgctggtggacgaagtggactccatcctgatcgatgaagcgcgtacaccgctgatcatttccggcccggcagaagacagctcggaaatgtataaacgcgtgaataaaattattccgcacctgatccgtcaggaaaaagaagactccgaaaccttccagggcgaaggccacttctcggtggacgaaaaatctcgccaggtgaacctgaccgaacgtggtctggtgctgattgaagaactgctggtgaaagagggcatcatggatgaaggggagtctctgtactctccggccaacatcatgctgatgcaccacgtaacggcggcgctgcgcgctcatgcgctgtttacccgtgacgtcgactacatcgttaaagatggtgaagttatcatcgttgacgaacacaccggtcgtaccatgcagggccgtcgctggtccgatggtctgcaccaggctgtggaagcgaaagaaggtgtgcagatccagaacgaaaaccaaacgctggcttcgatcaccttccagaactacttccgtctgtatgaaaaactggcggggatgaccggtactgctgataccgaagctttcgaatttagctcaatctacaagctggataccgtcgttgttccgaccaaccgtccaatgattcgtaaagatctgccggacctggtctacatgactgaagcggaaaaaattcaggcgatcattgaagatatcaaagaacgtactgcgaaaggccagccggtgctggtgggtactatctccatcgaaaaatcggagctggtgtcaaacgaactgaccaaagccggtattaagcacaacgtcctgaacgccaaattccacgccaacgaagcggcgattgttgctcaggcaggttatccggctgcggtgactatcgcgaccaatatggcgggtcgtggtacagatattgtgctcggtggtagctggcaggcagaagttgccgcgctggaaaatccgaccgcagagcaaattgaaaaaattaaagccgactggcaggtacgtcacgatgcggtactggaagcaggtggcctgcatatcatcggtaccgagcgtcacgaatcccgtcgtatcgataaccagttgcgcggtcgttctggtcgtcagggggatgctggttcttcccgtttctacctgtcgatggaagatgcgctgatgcgtatttttgcttccgaccgagtatccggcatgatgcgtaaactgggtatgaagccaggcgaagccattgaacacccgtgggtgactaaagcgattgccaacgcccagcgtaaagttgaaagccgtaacttcgacattcgtaagcaactgctggaatatgatgacgtggctaacgatcagcgtcgcgccatttactcccagcgtaacgaactgttggatgtcagcgatgtgagcgaaaccattaacagcattcgtgaagatgtgttcaaagcgaccattgatgcctacattccaccacagtcgctggaagaaatgtgggatattccggggctgcaggaacgtctgaagaacgatttcgacctcgatttgccaattgccgagtggctggataaagaaccagaactgcatgaagagacgctgcgtgagcgcattctggcgcagtccatcgaagtgtatcagcgtaaagaagaagtggttggtgctgagatgatgcgtcacttcgagaaaggcgtcatgctgcaaacgcttgactccctgtggaaagagcacctggcagcgatggactatctgcgtcagggtatccacctgcgtggctacgcacagaaagatccgaagcaggaatacaaacgtgaatcgttctccatgtttgcagcgatgctggagtcgttgaaatatgaagttatcagtacgctgagcaaagttcaggtacgtatgcctgaagaggttgaggagctggaacaacagcgtcgtatggaagccgagcgtttagcgcaaatgcagcagcttagccatcaggatgacgactctgcagccgcagctgcactggcggcgcaaaccggagagcgcaaagtaggacgtaacgatccttgcccgtgcggttctggtaaaaaatacaagcagtgccatggccgcctgcaataa

SEQ ID NO: 5938 - DNA, 1044 bp, Escherichia coli
  CDS (1)...(1044)
atgcgtattgaagaagatctgaagttaggttttaaagacgttctcatccgccctaaacgctccactcttaaaagccgttccgatgttgaactggaacgtcaattcaccttcaaacattcaggtcagagctggtccggcgtgccgattatcgccgcaaatatggacaccgtaggcacattttctatggcctctgcgctggcttcttttgatattttgactgctgtgcataaacactattctgtcgaagagtggcaagcgtttatcaacaattcttccgctgatgtgctgaaacatgtgatggtttctaccggtacgtctgatgcggatttcgaaaaaactaaacagattctcgacctgaacccggcattaaacttcgtttgtattgacgtggcgaatggttattccgaacacttcgtgcagttcgttgcgaaagcgcgtgaagcgtggccgaccaaaaccatttgtgctggtaacgtagtgactggtgaaatgtgtgaggagcttatcctctcaggtgccgatatcgttaaagttggcattggcccaggttctgtttgtacaactcgcgtcaaaacaggcgtcggttatccgcaactttctgcggtaatcgaatgtgccgatgctgcgcacggtctgggcggaatgatcgtcagcgatggtggctgcaccacgccgggcgatgtggcgaaagcctttggcggcggtgccgatttcgtcatgcttggcggcatgctggcgggccacgaagagagcggcggtcgcatcgttgaggagaacggcgagaaatttatgctgttctacggcatgagctccgagtctgcgatgaaacgtcacgttggcggcgttgcggaatatcgcgcagcagaaggtaaaaccgttaagctgccgctgcgaggcccggttgaaaataccgcgcgagatattttgggcggcctgcgttcagcttgtacatacgttggggcttcacgcctgaaagagctgaccaagcgcaccacgtttattcgtgtgcaggaacaagaaaaccgcatcttcaacaacctgtaa

SEQ ID NO: 5939 - DNA, 1893 bp, Escherichia coli
  CDS (1)...(1893)
atggctatcgaaatcaaagtaccggacatcggggctgatgaagttgaaatcaccgagatcctggtcaaagtgggcgacaaagttgaagccgaacagtcgctgatcaccgtagaaggcgacaaagcctctatggaagttccgtctccgcaggcgggtatcgttaaagagatcaaagtctctgttggcgataaaacccagaccggcgcactgattatgattttcgattccgccgacggtgcagcagacgctgcacctgctcaggcagaagagaagaaagaagcagctccggcagcagcaccagcggctgcggcggcaaaagacgttaacgttccggatatcggcagcgacgaagttgaagtgaccgaaatcctggtgaaagttggcgataaagttgaagctgaacagtcgctgatcaccgtagaaggcgacaaggcttctatggaagttccggctccgtttgctggcaccgtgaaagagatcaaagtgaacgtgggtgacaaagtgtctaccggctcgctgattatggtcttcgaagtcgcgggtgaagcaggcgcggcagctccggccgctaaacaggaagcagctccggcagcggcccctgcaccagcggctggcgtgaaagaagttaacgttccggatatcggcggtgacgaagttgaagtgactgaagtgatggtgaaagtgggcgacaaagttgccgctgaacagtcactgatcaccgtagaaggcgacaaagcttctatggaagttccggcgccgtttgcaggcgtcgtgaaggaactgaaagtcaacgttggcgataaagtgaaaactggctcgctgattatgatcttcgaagttgaaggcgcagcgcctgcggcagctcctgcgaaacaggaagcggcagcgccggcaccggcagcaaaagctgaagccccggcagcagcaccagctgcgaaagcggaaggcaaatctgaatttgctgaaaacgacgcttatgttcacgcgactccgctgatccgccgtctggcacgcgagtttggtgttaaccttgcgaaagtgaagggcactggccgtaaaggtcgtatcctgcgcgaagacgttcaggcttacgtgaaagaagctatcaaacgtgcagaagcagctccggcagcgactggcggtggtatccctggcatgctgccgtggccgaaggtggacttcagcaagtttggtgaaatcgaagaagtggaactgggccgcatccagaaaatctctggtgcgaacctgagccgtaactgggtaatgatcccgcatgttactcacttcgacaaaaccgatatcaccgagttggaagcgttccgtaaacagcagaacgaagaagcggcgaaacgtaagctggatgtgaagatcaccccggttgtcttcatcatgaaagccgttgctgcagctcttgagcagatgcctcgcttcaatagttcgctgtcggaagacggtcagcgtctgaccctgaagaaatacatcaacatcggtgtggcggtggataccccgaacggtctggttgttccggtattcaaagacgtcaacaagaaaggcatcatcgagctgtctcgcgagctgatgactatttctaagaaagcgcgtgacggtaagctgactgcgggcgaaatgcagggcggttgcttcaccatctccagcatcggcggcctgggtactacccacttcgcgccgattgtgaacgcgccggaagtggctatcctcggcgtttccaagtccgcgatggagccggtgtggaatggtaaagagttcgtgccgcgtctgatgctgccgatttctctctccttcgaccaccgcgtgatcgacggtgctgatggtgcccgtttcattaccatcattaacaacacgctgtctgacattcgccgtctggtgatgtaa

SEQ ID NO: 5940 - DNA, 1425 bp, Escherichia coli
  CDS (1)...(1425)
atgagtactgaaatcaaaactcaggtcgtggtacttggggcaggccccgcaggttactccgctgccttccgttgcgctgatttaggtctggaaaccgtaatcgtagaacgttacaacacccttggcggtgtttgcctgaacgtcggctgtatcccttctaaagcactgctgcacgtagcaaaagttatcgaagaagccaaagcgctggctgaacacggtatcgtcttcggcgaaccgaaaaccgatatcgacaagattcgtacctggaaagagaaagtgatcaatcagctgaccggtggtctggctggtatggcgaaaggccgcaaagtcaaagtggtcaacggtctgggtaaattcaccggggctaacaccctggaagttgaaggtgagaacggcaaaaccgtgatcaacttcgacaacgcgatcattgcagcgggttctcgcccgatccaactgccgtttattccgcatgaagatccgcgtatctgggactccactgacgcgctggaactgaaagaagtaccagaacgcctgctggtaatgggtggcggtatcatcggtctggaaatgggcaccgtttaccacgcgctgggttcacagattgacgtggttgaaatgttcgaccaggttatcccggcagctgacaaagacatcgttaaagtcttcaccaagcgtatcagcaagaaattcaacctgatgctggaaaccaaagttaccgccgttgaagcgaaagaagacggcatttatgtgacgatggaaggcaaaaaagcacccgctgaaccgcagcgttacgacgccgtgctggtagcgattggtcgtgtgccgaacggtaaaaacctcgacgcaggcaaagcaggcgtggaagttgacgaccgtggtttcatccgcgttgacaaacagctgcgtaccaacgtaccgcacatctttgctatcggcgatatcgtcggtcaaccgatgctggcacacaaaggtgttcacgaaggtcacgttgccgctgaagttatcgccggtaagaaacactacttcgatccgaaagttatcccgtccatcgcctataccgaaccagaagttgcatgggtgggtctgactgagaaagaagcgaaagagaaaggcatcagctatgaaaccgccaccttcccgtgggctgcttctggtcgtgctatcgcttccgactgcgcagacggtatgaccaagctgattttcgacaaagaatctcaccgtgtgatcggtggtgcgattgtcggtactaacggcggcgagctgctgggtgaaatcggcctggcaatcgaaatgggttgtgatgctgaagacatcgcactgaccatccacgcgcacccgactctgcacgagtctgtgggcctggcggcagaagtgttcgaaggtagcattaccgacctgccgaacccgaaagcgaagaagaagtaa

SEQ ID NO: 5941 - DNA, 795 bp, Escherichia coli
  CDS (1)...(795)
atgaaaccgaccaccatctccttactgcagaagtacaaacaggaaaaaaaacgtttcgcgaccatcaccgcttatgactatagcttcgccaaactctttgctgatgaagggcttaacgtcatgctggtgggcgattcgctgggcatgacggttcaggggcacgactccaccctgccagttaccgttgccgatatcgcctaccacactgccgccgtacgtcgcggcgcaccaaactgcctgctgctggctgacctgccgtttatggcgtatgccacgccggaacaagccttcgaaaacgccgcaacggttatgcgtgccggtgctaacatggtcaaaattgaaggcggtgagtggctggtagaaaccgtacaaatgctgaccgaacgtgccgttcctgtatgtggtcacttaggtttaacaccacagtcagtgaatattttcggtggctacaaagttcaggggcgcggcgatgaagcgggcgatcaactgctcagcgatgcattagccttagaagctgctggggcacagctgctggtgctggaatgcgtgccggttgaactggcaaaacgtattaccgaagcactggcgatcccggttattggcattggcgcaggcaacgtcactgacgggcagatcctcgtgatgcacgacgcctttggtattaccggcggtcacattcctaaattcgctaaaaatttcctcgccgaaacgggcgacatccgcgcggctgtgcggcagtatatggctgaagtggagtccggcgtttatccgggcgaagaacacagtttccattaa

SEQ ID NO: 5942 - DNA, 2535 bp, Escherichia coli
  CDS (1)...(2535)
atggccgggaatgaccgcgagccaattggacgcaaagggaaaccgacgcgtccggtcaaacaaaaggtaagccgtcgtcgttacgaagatgacgatgattacgacgattatgatgactatgaggatgaagaaccgatgccgcgcaaaggtaagggcaaaggcaaagggcgtaagcctcgtggcaaacgcggctggctatggctactgctaaaactggctatcgtttttgccgtgctgatcgccatttacggcgtttatctcgatcaaaaaattcgtagccgtattgatggcaaggtctggcaactgcctgcggcagtttatggccgaatggtcaatcttgagccagacatgaccatcagcaagaacgagatggtgaagctgctggaggcgacccagtatcgtcaggtgtcgaaaatgacccgtcctggcgaatttaccgtgcaggccaacagcattgagatgattcgccgtccgtttgatttcccggacagtaaagaaggacaggtgcgcgcgcgtctgacctttgatggcgatcatctggcgacgatcgtcaatatggagaacaaccgtcagttcggtttcttccgtcttgatccgcgtctgatcaccatgatctcttcgccaaacggtgagcagcgtctgtttgtgccgcgcagtggtttcccggatttgctggtggatactttgctggcgacagaagaccgtcatttttacgagcatgatggaatcagtctctactcaatcggacgtgcggtgctggcaaacctgaccgccggacgcacggtacagggtgcgagtacgctgacgcaacagctggtgaaaaacctgttcctctccagcgagcgttcttactggcgtaaagcgaacgaagcttacatggcgctgatcatggacgcgcgttacagcaaagaccgtattcttgagctgtatatgaacgaggtgtatctcggtcagagcggcgacaacgaaatccgcggcttcccgctggcaagcttgtattactttggtcgcccggtagaagagctaagcctcgaccagcaggcgctgttagtcggtatggtgaaaggggcgtccatctacaacccgtggcgtaacccaaaactggcgctggagcgacgtaatctggtgctgcgtctgctgcaacagcaacagattattgatcaagaactctatgacatgttgagtgcccgtccgctgggggttcagccgcgcggtggggtgatctctcctcagccagcctttatgcaactggtgcgtcaggagctgcaggcaaaactgggcgataaggtaaaagatctctccggcgtgaagatcttcactacctttgactcggtggcccaggacgcggcagaaaaagccgccgtggaaggcattccggcactgaagaaacagcgtaagttgagcgatcttgaaactgcgattgtggtcgtcgaccgctttagtggtgaagttcgtgcgatggtcggaggttctgagccgcagtttgcgggctacaaccgtgcgatgcaggcgcgtcgttcgattggttcccttgcaaaaccagcgacttatctgacggccttaagccagccgaaaatctatcgtctgaatacgtggattgcggatgcgccaattgcgctgcgtcagccgaatggccaggtctggtcaccgcagaatgatgaccgtcgttatagcgaaagcggcagagtgatgctggtggatgcgttgacccgttcgatgaacgtgccgacggtaaatctggggatggcgctggggctgcctgcggttacggagacctggattaaactgggcgtaccgaaagatcagttgcatccggttccggcaatgctgctgggggcgttgaacttaacgccaatcgaagtggcgcaggcattccagaccatcgccagcggtggtaaccgtgcaccgctttctgcgctgcgttcggtaatcgcggaagatggcaaagtgctgtatcagagcttcccgcaggcggaacgcgctgttccggcgcaggcggcgtatctgacactatggaccatgcagcaggtggtacaacgcggtacgggtcgtcagcttggggcgaaatacccgaacctgcatctggcagggaaaacagggactaccaacaataacgtagatacctggtttgcgggcattgacggcagcacggtgaccatcacctgggtcggccgtgataacaaccagccgaccaaactgtatggtgccagcggggcaatgtcgatttatcagcgttatctggctaaccagacgccaacgccgctgaatcttgttccgccagaagatattgcagatatgggcgtggactacgacggcaactttgtttgcagcggtggcatgcgtatcttgccggtctggaccagcgatccgcaatcgctgtgccagcagagcgagatgcagcagcagccgtcaggcaatccgtttgatcagtcttctcagccgcagcaacagccgcaacagcaacctgctcagcaagagcagaaagacagcgacggtgtagccggttggatcaaggatatgtttggtagtaattaa

SEQ ID NO: 5943 - DNA, 1281 bp, Escherichia coli
  CDS (1)...(1281)
atgagtaagtctgaaaatctttacagcgcagcgcgcgagctgatccctggcggtgtgaactcccctgttcgcgcctttactggcgtgggcggcactccactgtttatcgaaaaagcggacggcgcttatctgtacgatgttgatggcaaagcctatatcgattatgtcggttcctgggggccgatggtgctgggccataaccatccggcaatccgcaatgccgtgattgaagccgccgagcgtggtttaagctttggtgcaccaaccgaaatggaagtgaaaatggcgcaactggtgaccgaactggtcccgaccatggatatggtgcgcatggtgaactccggcactgaagcgaccatgagcgccatccgcctggcccgtggttttaccggtcgcgacaaaattattaaatttgaagggtgttaccatggtcacgctgactgcctgctggtgaaagccggttctggcgcactcacgttaggccagccaaactcgccgggcgttccggcagatttcgccaaatataccttaacctgtacttataatgatctggcttctgtacgcgccgcatttgagcaatacccgcaagagattgcctgtattatcgtcgagccggtggcaggcaatatgaactgtgttccgccgctgccagagttcctgccaggtctgcgcgcgctgtgcgacgaatttggcgcgttgctgatcatcgatgaagtgatgaccggtttccgcgtagcgctagctggcgcacaggattattacggcgtagtgccagatttaacctgcctcggcaaaatcatcggcggtggaatgccggtaggcgcattcggtggtcgtcgtgatgtaatggatgcgctggccccgacgggtccggtctatcaggcgggtacgctttccggtaacccgattgcgatggcagcgggtttcgcctgtctgaatgaagtcgcgcagccgggcgttcacgaaacgctggatgagctgacaacacgtctggcagaaggtctgctggaagcggcagaagaagccggaattccgctggtcgttaaccacgttggcggcatgttcggtattttctttaccgacgccgagtccgtgacgtgctatcaggatgtgatggcctgtgacgtggaacgctttaagcgtttcttccatatgatgctggacgaaggtgtttacctggcaccgtcagcgtttgaagcgggctttatgtccgtggcgcacagcatggaagatatcaataacaccatcgatgctgcacgtcgggtgtttgcgaagttgtga

SEQ ID NO: 5944 - DNA, 726 bp, Escherichia coli
  CDS (1)...(726)
atggcaactgtttccatgcgcgacatgctcaaggctggtgttcacttcggtcaccagacccgttactggaacccgaaaatgaagccgttcatcttcggtgcgcgtaacaaagttcacatcatcaaccttgagaaaactgtaccgatgttcaacgaagctctggctgaactgaacaagattgcttctcgcaaaggtaaaatccttttcgttggtactaaacgcgctgcaagcgaagcggtgaaagacgctgctctgagctgcgaccagttcttcgtgaaccatcgctggctgggcggtatgctgactaactggaaaaccgttcgtcagtccatcaaacgtctgaaagacctggaaactcagtctcaggacggtactttcgacaagctgaccaagaaagaagcgctgatgcgcactcgtgagctggagaaactggaaaacagcctgggcggtatcaaagacatgggcggtctgccggacgctctgtttgtaatcgatgctgaccacgaacacattgctatcaaagaagcaaacaacctgggtattccggtatttgctatcgttgataccaactctgatccggacggtgttgacttcgttatcccgggtaacgacgacgcaatccgtgctgtgaccctgtacctgggcgctgttgctgcaaccgtacgtgaaggccgttctcaggatctggcttcccaggcggaagaaagcttcgtagaagctgagtaa

SEQ ID NO: 5945 - DNA, 852 bp, Escherichia coli
  CDS (1)...(852)
atggctgaaattaccgcatccctggtaaaagagctgcgtgagcgtactggcgcaggcatgatggattgcaaaaaagcactgactgaagctaacggcgacatcgagctggcaatcgaaaacatgcgtaagtccggtgctattaaagcagcgaaaaaagcaggcaacgttgctgctgacggcgtgatcaaaaccaaaatcgacggcaactacggcatcattctggaagttaactgccagactgacttcgttgcaaaagacgctggtttccaggcgttcgcagacaaagttctggacgcagctgttgctggcaaaatcactgacgttgaagttctgaaagcacagttcgaagaagaacgtgttgcgctggtagcgaaaattggtgaaaacatcaacattcgccgcgttgctgcgctggaaggcgacgttctgggttcttatcagcacggtgcgcgtatcggcgttctggttgctgctaaaggcgctgacgaagagctggttaaacacatcgctatgcacgttgctgcaagcaagccagaattcatcaaaccggaagacgtatccgctgaagtggtagaaaaagaataccaggtacagctggatatcgcgatgcagtctggtaagccgaaagaaatcgcagagaaaatggttgaaggccgcatgaagaaattcaccggcgaagtttctctgaccggtcagccgttcgttatggaaccaagcaaaactgttggtcagctgctgaaagagcataacgctgaagtgactggcttcatccgcttcgaagtgggtgaaggcatcgagaaagttgagactgactttgcagcagaagttgctgcgatgtccaagcagtcttaa

SEQ ID NO: 5946 - DNA, 558 bp, Escherichia coli
  CDS (1)...(558)
gtgattagcgatatcagaaaagatgctgaagtacgcatggacaaatgcgtagaagcgttcaaaacccaaatcagcaaaatacgcacgggtcgtgcttctcccagcctgctggatggcattgtcgtggaatattacggcacgccgacgccgctgcgtcagctggcaagcgtaacggtagaagattcccgtacactgaaaatcaacgtgtttgatcgttcaatgtctccggccgttgaaaaagcgattatggcgtccgatcttggcctgaacccgaactctgcgggtagcgacatccgtgttccgctgccgccgctgacggaagaacgtcgtaaagatctgaccaaaatcgttcgtggtgaagcagaacaagcgcgtgttgcagtacgtaacgtgcgtcgtgacgcgaacgacaaagtgaaagcactgttgaaagataaagagatcagcgaagacgacgatcgccgttctcaggacgatgtacagaaactgactgatgctgcaatcaagaaaattgaagcggcgctggcagacaaagaagcagaactgatgcagttctga

SEQ ID NO: 5947 - DNA, 762 bp, Escherichia coli
  CDS (1)...(762)
gtgatgttgtctgctactcaaccacttagcgaaaaattgccagcgcatggctgccgtcatgttgcgatcattatggacggcaatggccgctgggcaaaaaagcaagggaagattcgtgcctttgggcataaagccggggcaaaatccgtccgccgggctgtctcttttgcggccaacaacggtattgaggcgttaacgctgtatgcctttagtagtgaaaactggaaccgaccagcgcaggaagtcagtgcgttaatggaactgtttgtgtgggcgctcgatagcgaagtaaaaagtctgcaccgacataacgtgcgtctgcgtattattggcgataccagtcgctttaactcgcgtttgcaagaacgtattcgtaaatctgaagcgctaacagccgggaataccggtctgacgctgaatattgcggcgaactacggtggacgttgggatatagtccagggagtcaggcaactggctgaaaaggtgcagcaaggaaacctgcaaccagatcagatagatgaagagatgctaaaccagcatgtctgtatgcatgaactggcccctgtagatttagtaattaggactgggggggagcatcgcattagtaactttttgctttggcaaattgcctatgccgaactttactttacagatgttctctggcccgatttcgatgaacaagactttgaaggggcgttaaatgcctttgctaatcgagagcgtcgtttcggcggcaccgagcccggtgatgaaacagcctga

SEQ ID NO: 5948 - DNA, 456 bp, Escherichia coli
  CDS (1)...(456)
ttgactactaacactcatactctgcagattgaagagattttagaacttctgccgcaccgtttcccgttcttactggtggatcgcgtgctggattttgaagaaggtcgttttctgcgcgcagtaaaaaatgtctctgtcaatgagccattcttccagggccatttccctggaaaaccgattttcccgggtgtgctgattctggaagcaatggcacaggcaacaggtattctggcgtttaaaagcgtaggaaaactggaaccgggtgagctgtactacttcgctggtattgacgaagcgcgcttcaagcgcccggtcgtgcctggcgatcaaatgatcatggaagtcactttcgaaaaaacgcgccgcggcctgacccgttttaaaggggttgctctggtcgatggtaaagtagtttgcgaagcaacgatgatgtgtgctcgtagccgggaggcctga

SEQ ID NO: 5949 - DNA, 1149 bp, Escherichia coli
  CDS (1)...(1149)
atgactgaacagcgtccattaacgattgccctggtcgccggagaaacctccggcgatatcctgggggccggtttaatccgcgctctgaaagaacatgtgcccaacgcccgctttgttggtgttgccgggccacgaatgcaggctgaaggctgcgaagcctggtacgaaatggaagaactggcggtgatgggcattgttgaagtgctcggtcgtctgcgtcgcttactgcatattcgtgccgatctgacaaagcgttttggcgaactgaagccagatgtttttgttggtattgatgcgcctgacttcaatattactcttgaaggtaacctcaaaaagcagggtatcaaaaccattcattacgtcagtccgtcagtctgggcgtggcgacagaaacgtgttttcaaaataggcagagccaccgatctggtgctcgcatttctgcctttcgaaaaagcgttttatgacaaatacaacgtaccgtgccgctttatcggtcataccatggctgatgccatgccattagatccagataaaaatgccgcccgtgatgtgctggggatccctcacgatgcccactgcctggcgttgctaccggggagccgtggtgcagaagttgaaatgcttagtgccgatttcctgaaaacggcccagcttttgcgccagacatatccggatctcgaaatcgtggtgccactggtgaatgccaaacgccgcgagcagtttgaacgcatcaaagctgaagtcgcgccagacctttcagttcatttgctggatgggatgggccgtgaggcgatggtcgccagcgatgcggcgctactggcgtcgggtacggcagccctggagtgtatgctggcgaaatgcccgatggtggtgggatatcgcatgaagccttttaccttctggttggcgaagcggctggtgaaaactgattatgtctcgctgccaaatctgctggcgggcagagagttagtcaaagaattattgcaggaagagtgtgagccgcaaaaactggctgcggcgctgttaccgctgttggcgaacgggaaaaccagccacgcgatgcacgataccttccgtgaactgcatcagcagatccgctgcaatgccgatgagcaggcggcacaagccgttctggagttagcacaatga

SEQ ID NO: 5950 - DNA, 3483 bp, Escherichia coli
  CDS (1)...(3483)
atgtctgaaccacgtttcgtacacctgcgggtgcacagcgactactcgatgatcgatggcctggccaaaaccgcaccgttggtaaaaaaggcggcggcgttgggtatgccagcactggcgatcaccgatttcaccaacctttgtggtctggtgaagttctacggagcgggacatggcgcagggattaagcctatcgtcggggcagattttaacgtccagtgcgacctgctgggtgatgagttaacccacctgacggtactggcggcgaacaataccggctatcagaatctgacgttgctgatctcaaaagcgtatcagcgcgggtacggtgccgccgggccgatcatcgatcgcgactggcttatcgaattaaacgaagggttgatccttctttccggcggacgcatgggcgacgtcggacgcagtcttttgcgtggtaacagcgcgctggtagatgagtgtgtcgcgttttatgaagaacacttcccggatcgctattttctcgagctgatccgcaccggcaggccggatgaagaaagctatctgcacgcggcggtggaactggcggaagcgcgcggtttgcccgtcgtggcgaccaacgacgtgcgctttatcgacagcagcgactttgacgcacacgaaatccgcgtcgcgatccacgacggctttaccctcgacgatcctaaacgcccgcgtaactattcgccgcagcaatatatgcgtagcgaagaggagatgtgtgagctgtttgccgacatccccgaagcccttgccaacaccgttgagatcgccaaacgctgtaacgtaaccgtgcgtcttggtgaatacttcctgccgcagttcccgaccggggacatgagcaccgaagattatctggtcaagcgtgcaaaagagggcctggaagagcgtctggcctttttattccctgatgaggaagaacgtcttaagcgccgcccggaatatgacgaacgtctggagactgaacttcaggttatcaaccagatgggcttcccgggctacttcctcatcgttatggaatttatccagtggtcgaaagataacggcgtaccggtagggccaggccgtggctccggtgcgggttcactggtggcctacgcgctgaaaatcaccgacctcgatccgctggaatttgacctgctgttcgaacgtttccttaacccggaacgtgtctccatgcctgacttcgacgttgacttctgtatggagaaacgcgatcaggttatcgagcacgtagcggacatgtacggtcgtgatgcggtatcgcagatcatcaccttcggtacaatggcggcgaaagcggtgatccgcgacgtaggccgcgtgctggggcatccgtacggctttgtcgatcgtatctcgaaactgatcccgcccgatccggggatgacgctggcgaaagcgtttgaagccgagccgcagctgccggaaatctacgaagcggatgaagaagttaaggcgctgatcgacatggcgcgcaaactggaaggggtcacccgtaacgccggtaagcacgccggtggggtggttatcgcgccgaccaaaattaccgattttgcgccgctttactgcgatgaagagggcaaacatccggtcacccagtttgataaaagcgacgttgaatacgccggactggtgaagttcgacttccttggtttgcgtacgctcaccatcatcaactgggcgctggagatgatcaacaagcggcgggcgaagaatggcgagccgccgctggatatcgctgcgatcccgctggatgataagaaaagcttcgacatgctgcaacgctcggaaaccacggcggtattccagcttgaatcgcgcggcatgaaggacctgatcaagcgtctacaacctgactgcttcgaagatatgatcgccctagtggcactgttccgccccggtccgttgcaatcagggatggtggataactttatcgaccgtaaacatggtcgtgaagagatctcctatccggacgtacagtggcagcatgaaagcctgaaaccggtactggagccaacctacggcattatcctgtatcaggaacaggtcatgcagattgcgcaggtgctttctggttataccctcggtggcgcggatatgctgcgtcgtgcgatgggtaagaaaaagccggaagagatggctaagcaacgttctgtatttgctgaaggtgcagaaaagaacggaatcaacgctgaactggcgatgaaaatcttcgacctggtggagaaattcgctggttacggatttaacaaatcgcactctgcggcctatgctttggtgtcatatcaaacgttatggctgaaagcgcactatcctgcggagtttatggcggcggtaatgaccgccgatatggacaacaccgagaaggtggtgggtctggtggatgagtgctggcggatggggctgaaaatcctgccaccagatataaactccggtctttaccatttccacgtcaacgacgacggcgaaatcgtgtatggtattggcgcgatcaaaggggtcggtgaaggtccgattgaggccatcatcgaagcccgtaataaaggcggctacttccgcgaactgtttgatctctgcgcccgtaccgacaccaaaaagttgaaccgtcgcgtgctggaaaaactgatcatgtccggggcgtttgaccgtcttgggccacatcgcgcagcgctgatgaactcgctgggcgatgcgttaaaagcggcagatcaacacgcgaaagcggaagctatcggtcaggccgatatgttcggcgtgctggccgaagagccggaacaaattgaacaatcctacgccagctgccaaccgtggccggagcaggtggtattagatggggaacgtgaaacgttaggcctgtacctgaccggacaccctatcaaccagtatttaaaagagattgagcgttatgtcggaggcgtaaggctgaaagacatgcacccgacagaacgtggtaaagtcatcacggctgcggggctcgttgttgccgcgcgggttatggtcaccaagcgcggcaatcgtatcggtatctgcacgctggatgaccgttccgggcggctggaagtgatgttgtttactgacgccctggataaataccagcaattgctggaaaaagaccgcatacttatcgtcagcggacaggtcagctttgatgacttcagcggtgggcttaaaatgaccgctcgcgaagtgatggatattgacgaagcccgggaaaaatatgctcgcgggcttgctatctcgctgacggacaggcaaattgatgaccagcttttaaaccgactccgtcagtctctggaaccccaccgctctgggacaattccagtacatctctactatcagagggcggatgcacgcgcgcggttgcgttttggcgcgacgtggcgtgtctctccgagcgatcgtttattaaacgatctccgtggcctcattggttcggagcaggtggaactggagtttgactaa

SEQ ID NO: 5951 - DNA, 960 bp, Escherichia coli
  CDS (1)...(960)
atgagtctgaatttccttgattttgaacagccgattgcagagctggaagcgaaaatcgattctctgactgcggttagccgtcaggatgagaaactggatattaacatcgatgaagaagtgcatcgtctgcgtgaaaaaagcgtagaactgacacgtaaaatcttcgccgatctcggtgcatggcagattgcgcaactggcacgccatccacagcgtccttataccctggattacgttcgcctggcatttgatgaatttgacgaactggctggcgaccgcgcgtatgcagacgataaagctatcgtcggtggtatcgcccgtctcgatggtcgtccggtgatgatcattggtcatcaaaaaggtcgtgaaaccaaagaaaaaattcgccgtaactttggtatgccagcgccagaaggttaccgcaaagcactgcgtctgatgcaaatggctgaacgctttaagatgcctatcatcacctttatcgacaccccgggggcttatcctggcgtgggcgcagaagagcgtggtcagtctgaagccattgcacgcaacctgcgtgaaatgtctcgcctcggcgtaccggtagtttgtacggttatcggtgaaggtggttctggcggtgcgctggcgattggcgtgggcgataaagtgaatatgctgcaatacagcacctattccgttatctcgccggaaggttgtgcgtccattctgtggaagagcgccgacaaagcgccgctggcggctgaagcgatgggtatcattgctccgcgtctgaaagaactgaaactgatcgactccatcatcccggaaccactgggtggtgctcaccgtaacccggaagcgatggcggcatcgttgaaagcgcaactgctggcggatctggccgatctcgacgtgttaagcactgaagatttaaaaaatcgtcgttatcagcgcctgatgagctacggttacgcgtaa

SEQ ID NO: 5952 - DNA, 1719 bp, Escherichia coli
  CDS (1)...(1719)
atgcgtactagccaatacctgctctccactctcaaggagacacctgccgacgccgaggtgatcagccatcagctgatgctgcgcgccgggatgatccgcaagctggcctccgggttatatacctggctgccgaccggcgtgcgcgttctgaaaaaagtcgaaaacatcgtgcgtgaagagatgaacaacgccggtgcgatcgaggtgtcgatgccggtggttcagccagccgatttgtggcaagagagtggtcgttgggaacagtacggtccggaactgctgcgttttgttgaccgtggcgagcgtccgttcgtactcggcccaactcatgaagaagttatcactgacctgattcgtaacgagcttagctcttacaaacagctgccgctgaacttctatcagatccagaccaagttccgcgacgaagtgcgtccgcgtttcggcgtcatgcgttcccgcgaattcctgatgaaagatgcttactctttccatacttctcaggaatccctgcaggaaacctacgatgcaatgtatgcggcctacagcaaaatcttcagccgcatggggctggatttccgcgccgtacaagccgacaccggttctatcggcggcagcgcctctcacgaattccaggtgctggcgcagagcggtgaagacgatgtggtcttctccgacacctctgactatgcagcgaacattgaactggcagaagctatcgcgccgaaagaaccgcgcgctgctgctacccaggaaatgacgctggttgatacgccgaacgcgaaaaccatcgcggaactggttgaacagttcaatctgccgattgagaaaacggttaagactctgctggttaaagcggttgaaggcagcagcttcccgcaggttgcgctgctggtgcgcggtgatcacgagctgaacgaagttaaagcagaaaaactgccgcaggttgcaagcccgctgactttcgcgaccgaagaagaaattcgtgccgtggttaaagccggtccgggttcactgggtccggtaaacatgccgattccggtggtgattgaccgtaccgttgcggcgatgagtgatttcgctgctggtgctaacatcgatggtaaacactacttcggcatcaactgggatcgcgatgtcgctaccccggaagttgcagatatccgtaacgtggtggctggcgatccaagcccggatggccagggtaggctgctgatcaaacgtggtatcgaagttggtcacatcttccagctgggtaccaagtactccgaagcactgaaagcctccgtacagggtgaagatggccgtaaccaaatcctgacgatgggttgctacggtatcggggtaacgcgtgtggtagctgcggcgattgagcagaactacgacgaacgaggcatcgtatggcctgacgctatcgcgccgttccaggtggcgattctgccgatgaacatgcacaaatccttccgcgtacaagagcttgctgagaaactgtacagcgaactgcgtgcacaaggtatcgaagtgctgctggatgaccgcaaagagcgtccgggcgtgatgtttgctgatatggaactgatcggtattccgcacactattgtgctgggcgaccgtaacctcgacaacgacgatatcgaatataaatatcgtcgcaacggcgagaaacagttaattaagactggtgacatcgtcgaatatctggtgaaacagattaaaggctga

SEQ ID NO: 5953 - DNA, 816 bp, Escherichia coli
  CDS (1)...(816)
atggcgttcaaattcaaaacctttgcggcagtgggagccctgatcggatcactggcactggtaggctgcggtcaggatgaaaaagatccaaaccacattaaagtcggcgtgattgttggtgccgaacagcaggttgcagaagtcgcgcagaaagttgcgaaagacaaatatggcctggacgttgagctggtaaccttcaacgactatgttctgccaaacgaagcattgagcaaaggcgatatcgacgccaacgccttccagcataaaccgtaccttgatcagcaactgaaagatcgtggctacaaactggtcgcagtaggcaacacttttgtttatccgattgctggttactccaagaaaatcaaatcactggatgaactgcaggatggttcgcaggttgccgtgccaaacgacccaactaaccttggtcgttcactgctgctgctgcaaaaagtgggcttgatcaaactgaaagatggcgttggcctgctgccgaccgttcttgatgttgttgagaaccccaaaaatctgaaaattgttgaactggaagcaccgcaactgccgcgttctctggacgacgcgcaaatcgctctggcagttatcaataccacctatgccagccagattggcctgactccggcgaaagacggtatctttgttgaagataaagagtccccgtacgtaaacctgatcgtgacgcgtgaagataacaaagacgccgagaacgtgaagaaattcgtccaggcttatcagtctgacgaagtttacgaagcagcaaacaaagtgtttaacggcggagctgttaaaggctggtaa

SEQ ID NO: 5954 - DNA, 654 bp, Escherichia coli
  CDS (1)...(654)
atgtctgagccgatgatgtggctgctggttcgtggcgtatgggaaacgctggcaatgaccttcgtatccggtttttttggctttgtgattggtctgccggttggcgttctgctttatgtcacgcgtccggggcaaattattgctaacgcgaagctgtatcgtaccgtttctgcgattgtgaacattttccgttccatcccgttcattatcttgcttgtatggatgattccgtttacccgcgttattgtcggtacatcgattggtttgcaggcagcgattgttccgttaaccgttggtgcagcaccgtttattgcccgtatggtcgagaacgctctgctggagatcccaaccgggttaattgaagcttcccgcgcaatgggtgccacgccgatgcagatcgtccgtaaggtgctgttaccggaagcgctgccgggtctggtgaatgcggcaactatcaccctgattaccctggtcggttattccgcgatgggtggtgcagtcggtgccggtggtttaggtcagattggctatcagtatggctacatcggctataacgcgacggtgatgaatacggtactggtattgctggtcattctggtttatttaattcagttcgcaggcgaccgcatcgtccgggctgtcactcgcaagtaa

SEQ ID NO: 5955 - DNA, 1428 bp, Escherichia coli
  CDS (1)...(1428)
atgtccatacgtttagaaggttatatgcaaacaacacaacaaaatgcgccactgaagcgcacaatgaaaacgcgtcacctgattatgctttccttgggcggcgtgattggcacaggattattcttcaataccgggtacatcatttccaccactggagcggcgggaacgctgctggcctatctgattggtgcgctggtggtctggctggttatgcagtgtctgggcgagctgtcggtcgcgatgccggagaccggagcgtttcacgtttatgccgcgcgctatcttggtccggctaccgggtataccgtggcctggctttactggctgacctggaccgtggcgctgggttcgagctttaccgccgctggattctgtatgcagtactggtttccacaggtgccggtatgggtctggtgcgtggtgttctgcgcgattatttttggtctgaatgttatctccacgcgcttttttgccgaaggggagttctggttctcgctggtcaaagtggtcactatcatcgcctttatcatcctcggtggggcggcgattttcggctttattccgatgcaggatggctcgcccgcgccggggctgagtaatatcacggcagaaggctggttcccgcacggtggcttaccgattttgatgactatggtggcagtgaactttgctttttcgggtaccgagcttatcggcattgccgccggtgaaacggaaaacccgcgcaaagttatcccggtagcgattcgtactaccatcgcgcgactgattattttctttatcggcaccgtgtttgtgctggcagcgctgatcccgatgcagcaggtgggcgtggagaaaagcccgtttgtgctggtatttgagaaagtagggatcccgtacgccgctgatatttttaacttcgtgatcctgacggctattctttctgcagcgaactccgggttatatgcctccgggcgcatgctgtggtcgttgtcgaatgaacgtacgctaccggcctgttttgcgcgagtaacgaaaaacggcgtgccactgacggcgctgtcggtcagtatgctcggtggtgtgctggcgctgttttccagcgtggtggccccggacacggtatttgttgcgctgtcggcaatctccgggtttgcggtggtagcggtgtggctgagtatctgcgcctcgcattttgtttttcgtcgccgtcatctgcaacaaggtaaggcattgagtgaattacattatcgcgcgccgtggtatccgctggtgccagtattaggttttgtgctgtgcctggtggcctgtgttgggctggcattcgatccagcgcagagaattgcgttgtggtgcgggttaccgtttgttgcgttgtgctatggtgcttatttccttactcaaccccgaaacgcaaaacaggagccagaacatgtcgcagaataa

SEQ ID NO: 5956 - DNA, 1059 bp, Escherichia coli
  CDS (1)...(1059)
atggagcgcactatgactcagaaaaatttcgttgaactgcgcaacgtcactaaacgatttggcagtaatacggtaatcgacaatatcaacctcaccatcccgcaggggcaaatggtgacgctgctcggcccgtccggctgcggcaaaaccactattttgcgcctggttgccgggctggaaaaaccgagcgaagggcaaattttcattgatggcgaagacgtcacccatcgctctattcagcagcgcgatatctgtatggtgtttcagtcctatgccctgttcccgcatatgtcgctgggagagaatgtcggttatggcctgaaaatgctcggcgtaccgcgcgcagagctgaaagcccgcgtcaaagaggcgttggcgatggtggatctggaaggattcgaagaccgctttgtcgatcagatctccggcgggcagcagcagcgcgtggcgctggcccgcgcgctgatcctcaagccgaaagtgctgctgtttgatgagccgttgagtaacctcgacgccaacctgcgtcgcagcatgcgcgacaagatccgcgagttgcaaaagcagtttgatatcacctcgctgtacgtcacccacgatcagagcgaagcctttgcggtttctgatactgtgctggtgatgaacaagggacacatcatgcagatcggctcaccgcaggatctttaccgccagcccgcctcccgctttatggcgagctttatgggcgatgccaacctgttcccggcaaccttcagcgacggatacgttgatatctacggctatcatctgccgcgcccgctgcactttggtacacagggtgaagggatggtcggtgtgcgcccggaagcgatcacgctcagcgatcgcggcgaagagagccagcgctgcgtgatccgccatgtcgcctatatggggccgcagtatgaagtgacggtggaatggcacgggcaggagatattattgcaggtcaacgctacgcgtctgcaaccggacgtcggcgagcagtattatcttgaaatccatccgtacggcatgtttgttctggcggatgcggcataa

SEQ ID NO: 5957 - DNA, 615 bp, Escherichia coli
  CDS (1)...(615)
atgaatatatttgaacaaactccaccgaaccgcagacgttatggtcttgctgcattcattgggctgattgctggcgttgtttccgcattcgtgaagtggggggctgaagttccattgccgccacgtagcccggtggatatgtttaatgcagcgtgtggcccggaatcattaatcagggctgcaggccaaattgattgctcgcgtaattttctcaatccaccgtatatttttcttcgagactggttggggctgacagatcccaatgcggctgtttatacctttgccgggcatgtctttaactgggttggtgttacgcacattatcttttcgatagtgtttgctgtcggttattgtgtggtcgctgaagtatttccaaaaattaaactctggcagggcttactggcaggtgctttagcccaactttttgttcatatgatttcattccctctcatgggactgacgccacctctgtttgatctcccgtggtatgagaatgtttctgaaatttttggacatttagtctggttctggtctattgaaattattcgcagagatttacgaaacagaattactcatgagccagaccctgagatccctttaggctcaaacagataa

SEQ ID NO: 5958 - DNA, 264 bp, Escherichia coli
  CDS (1)...(264)
atgaagcccaatatccatcctgagtatcgtactgtggtgttccacgacaccagtgttgatgagtactttaaaatcggctcgactatcaaaacagaccgtgagattgagctggatggcgtaacgtatccatacgtgacaattgatgtctcttctaaatcgcacccgttctatacagggaagctgagaacagtggcatcagaaggaaatgttgcacgattcacccaacgttttggtcgttttgttagcacgaaaaagggggcgtga

SEQ ID NO: 5959 - DNA, 1671 bp, Escherichia coli
  CDS (1)...(1671)
ttgcaatttgactacatcattattggtgccggctcagccggcaacgttctcgctacccgtctgactgaagatccgaatacctccgtgctgctgcttgaagcgggcggcccggactatcgctttgacttccgcacccagatgcccgctgccctggcattcccgctacagggtaaacgctacaactgggcctatgaaacggaacctgaaccgtttatgaataaccgccgcatggagtgcggacgcggtaaaggtctgggtggatcgtcgctgatcaacggcatgtgctacatccgtggcaatgcgctggatctcgataactgggcgcaagaacccggtctggagaactggagctacctcgactgcctgccctactaccgcaaggccgagactcgcgatatgggtgaaaacgactatcacggcggtgatggcccggtgagcgtcactacctccaaacccggcgtcaatccgctgtttgaagcgatgattgaagcgggcgtgcaggcgggctacccgcgcacggacgatctcaacggttatcagcaggaaggttttggtccgatggatcgcaccgtcacgccgcagggccgtcgcgccagcaccgcgcgtggctatctcgatcaggccaaatcgcgtcctaacctgaccattcgtactcacgctatgaccgatcacatcatttttgacggcaaacgcgcggtgggcgtcgaatggctggaaggcgacagcaccatcccaacccgcgcaacggccaacaaagaagtgctgttatgtgcaggcgcgattgcctcaccgcagatcctgcaacgctccggcgtcggcaacgctgaactgctggcggagtttgatattccgctggtgcatgaattacccggcgtcggcgaaaatcttcaggatcatctggagatgtatctgcaatatgagtgcaaagaaccggtttccctctaccctgccctgcagtggtggaaccagccgaaaatcggtgcggagtggctgtttggcggcactggcgttggtgccagcaaccactttgaagcaggtggatttattcgcagccgtgaggaatttgcgtggccgaatattcagtaccatttcctgccagtagcgattaactataacggctcgaatgcagtgaaagagcacggtttccagtgccacgtcggctcaatgcgctcgccaagccgtgggcatgtgcggattaaatcccgcgacccgcaccagcatccggcgattctgtttaactacatgtcgcacgagcaggactggcaggagttccgcgacgcaattcgcatcacccgcgagatcatgcatcaacccgcgctggatcagtatcgtggccgcgaaatcagccccggtgtcgaatgccagacggatgaacagctcgatgagttcgtgcgtaaccacgccgaaaccgccttccatccgtgcggtacctgcaaaatgggttacgacgagatgtccgtggttgacggcgaaggccgcgtacacgggttagaaggcctgcgtgtggtggatgcgtcgattatgccgcagattatcaccgggaatttgaacgccacgacaattatgattggcgagaaaatagcggatatgattcgtggacaggaagcgctgccgaggagcacggcgggatattttgtggcaaatgggatgccggtgagagcgaaaaaatga

SEQ ID NO: 5960 - DNA, 1473 bp, Escherichia coli
  CDS (1)...(1473)
atgtcccgaatggcagaacagcagctttatatacatggtggttatacctccgccaccagcggtcgcaccttcgagaccattaacccggccaacggtaacgtgctggcgaccgtgcaggccgccgggcgcgaggatgtcgatcgcgccgtgaaaagcgcccagcaggggcaaaaaatctgggcgtcgatgaccgccatggagcgctcgcgtattctgcgtcgggccgttgatattctgcgtgaacgcaatgacgaactcgcaaaactggaaaccctcgacaccggaaaagcatattcggaaacctcaaccgtcgatatcgttaccggtgcggacgtgctggagtactacgccgggctgatcccggcgctggaaggcagccagatcccgttgcgtgaaacgtcctttgtgtatacccgccgcgaaccgctgggcgtagtggcagggattggcgcatggaactacccgatccagattgccctgtggaaatccgccccggcgctggcggcaggcaacgcaatgattttcaaaccgagcgaagttaccccgcttaccgcgttaaagctggctgaaatttacagcgaagcgggcctgccggacggcgtatttaacgtgttgccgggcgtgggcgcggagaccgggcaatatctgaccgagcatccgggcattgccaaagtgtcatttaccggcggtgtcgccagcggcaaaaaagtgatggctaactcggcggcctcttccctgaaagaagtgaccatggaactgggcggtaaatcaccgctgatcgttttcgatgatgcggatctcgatctcgccgccgatatcgccatgatggcaaacttcttcagctccggtcaggtgtgtaccaatggcacccgcgtcttcgttccggcgaaatgcaaagccgcatttgagcagaaaattctggcgcgcgttgagcgcattcgcgcgggcgacgttttcgatccgcaaactaacttcggcccgctggtcagcttcccgcatcgcgataacgtgctgcgctatatcgccaaaggcaaagaggaaggcgcgcgcgtactgtgcggcggcgatgtactgaaaggcgatggcttcgataacggcgcatgggttgcaccgacagtgttcaccgattgcagcgacgatatgaccatcgtgcgtgaagagatcttcgggccagtgatgtccattctgacctacgagtcggaagacgaagtcattcgccgcgctaacgataccgactacggcctggcggcgggcatcgtgacagcggacctgaaccgcgcgcatcgcgtcattcatcagctggaagcgggtatttgctggatcaacacctggggcgaatccccggcagagatgcccgttggcggctacaaacactccggcattggtcgcgagaacggcgtgatgacgctccagagttacacccaggtgaagtccatccaggttgagatggctaaattccagtccatattctaa

SEQ ID NO: 5961 - DNA, 1170 bp, Escherichia coli
  CDS (1)...(1170)
atgagcgacacaacgatcctgcaaaacagtacccatgtcattaaaccgaaaaaatctgtggcactttctggcgttccggcgggcaatacggcgctctgcaccgtgggtaaaagtggcaatgacctgcattaccgcggctacgatattcttgatctggcgaaacattgcgaatttgaagaagtggcgcatctgctgatccacggcaaactgccgacccgtgacgaactcgccgcttacaaaacgaaactgaaagccctgcgcggtttaccggctaacgtgcgtaccgtgctggaagccttaccggcggcgtcgcacccgatggatgttatgcgcaccggtgtttccgcgctcggctgcacgctgccagaaaaagaggggcataccgtctctggcgcgcgggatattgccgacaaactgctggcgtcgcttagctcgattctcctttattggtatcactacagccacaacggcgaacgcatccaaccggaaaccgatgacgactccatcggcggtcacttcctgcatctgctgcacggcgaaaagccatcgcaaagctgggaaaaggcgatgcatatctcgctggtgctgtacgccgaacacgagtttaacgcctccacctttaccagtcgggtgattgcgggcaccggctctgatatgtattccgcgattattggcgcgattggcgcactgcgcgggccaaaacacggcggggcgaatgaagtgtcgctggagatccagcaacgctacgaaacgccggacgaagccgaagcagatatccgcaagcgcgtggaaaacaaagaagtggtcattggttttggtcatccggtttacaccatcgctgacccgcgccaccaggtgattaaacgtgtggcgaagcagctctcgcaggaaggcggctcgctgaagatgtacaacatcgccgatcgcctggaaacggtgatgtgggagagcaaaaagatgttccccaatctcgactggttctctgctgtttcctacaacatgatgggcgttcccaccgagatgttcacaccactgtttgttatcgcccgcgtcaccggctgggcggcgcacattatcgaacaacgtcaggacaacaaaattatccgtccttccgccaattatgttggaccggaagaccgcccgtttgtcgcgctggataagcgccagtaa

SEQ ID NO: 5962 - DNA, 1008 bp, Escherichia coli
  CDS (1)...(1008)
atgcccctcgattccacaaacatcaggcagaccatgacagacttaatccaacgccctcgtcgcctgcgcaaatctcctgcgctgcgcgctatgtttgaagagacaacacttagccttaacgacctggtgttgccgatctttgttgaagaagaaattgacgactacaaagccgttgaagccatgccaggcgtgatgcgcattccagagaaacatctggcacgcgaaattgaacgcatcgccaacgccggtattcgttccgtgatgacttttggcatctctcaccataccgatgaaaccggcagcgatgcctggcgggaagatggactggtggcgcgtatgtcgcgcatctgcaagcagaccgtgccagaaatgatcgttatgtcagacacctgcttctgtgaatacacttctcacggtcactgcggtgtgctgtgcgagcatggcgtcgacaacgacgcgactctggaaaatttaggcaagcaagccgtggttgcagctgctgcaggtgcagacttcatcgccccttccgccgcgatggacggccaggtacaggcgattcgtcaggcgctggacgctgcgggatttaaagatacggcgattatgtcgtattcgaccaagttcgcctcctccttttatggcccgttccgtgaagctgccggaagcgcattaaaaggcgaccgcaaaagctatcagatgaacccaatgaaccgtcgtgaggcgattcgtgaatcactgctggatgaagcccagggcgcagactgcctgatggttaaacctgctggagcgtacctcgacatcgtgcgtgagctgcgtgaacgtactgaattgccgattggcgcgtatcaggtgagcggtgagtatgcgatgattaagttcgccgcgctggcgggtgctatagatgaagagaaagtcgtgctcgaaagcttaggttcgattaagcgtgcgggtgcggatctgattttcagctactttgcgctggatttggctgagaagaagattctgcgttaa

SEQ ID NO: 5963 - DNA, 1095 bp, Escherichia coli
  CDS (1)...(1095)
atggaaaaactgcgggtaggaatcgtttttggtggtaaatcagcggaacatgaagtgtctctgcaatcggcaaaaaacattgtcgatgccattgataaaagtcgcttcgacgttgtgctgctgggcattgataaacaagggcaatggcacgtcagcgatgccagcaattatctgctaaatgcagacgatcctgcccatattgcgttgcgcccttcggcgaccagccttgcgcaggtgccaggtaaacatgagcatcagcttatcgacgcgcaaaacggtcagccgttgccgacggtggatgtcattttcccgattgtccacggtacgctgggcgaagatggttccttgcagggaatgctgcgggtcgccaatttaccgtttgtaggttctgatgttctggcttcagcagcctgtatggacaaagatgtcaccaaacgtctgctacgcgatgccgggctgaacattgcgccatttattaccctgacgcgcgccaatcgtcacaacattagttttgccgaagtggagtctaaactggggttaccactgtttgtaaaaccggctaatcagggctcttctgttggtgtcagcaaagtaaccagtgaagaacagtacgcaattgccgtcgatctggcgttcgagttcgatcataaagtgatcgttgagcaagggatcaaaggtcgtgagatcgaatgcgcagttctgggcaacgacaatccgcaagccagcacctgtggagagatcgtactcaccagcgatttctatgcctacgacaccaagtacattgacgaagatggcgcgaaagtggtagttccggcagccattgcgccagaaatcaacgataagatccgggcgattgccgttcaggcttatcaaacgttgggatgcgcaggcatggcgcgtgtagacgtgtttttaaccccagagaacgaagtggtgatcaacgagatcaacaccctgcctggcttcactaatatcagtatgtatccgaagctgtggcaagccagcggtctgggttacaccgatctgatcacacgtttgattgaactggcgctggagcgtcacgctgcggataacgcattgaaaaccacaatgtaa

SEQ ID NO: 5964 - DNA, 1485 bp, Escherichia coli
  CDS (1)...(1485)
ttgtcacggccgagacttatagtcgctttgtttttattttttaatgtatttgtacatggagaaaataaagtgaaacaaagcactattgcactggcactcttaccgttactgtttacccctgtgacaaaagcccggacaccagaaatgcctgttctggaaaaccgggctgctcagggcgatattactgcacccggcggtgctcgccgtttaacgggtgatcagactgccgctctgcgtgattctcttagcgataaacctgcaaaaaatattattttgctgattggcgatgggatgggggactcggaaattactgccgcacgtaattatgccgaaggtgcgggcggcttttttaaaggtatagatgccttaccgcttaccgggcaatacactcactatgcgctgaataaaaaaaccggcaaaccggactacgtcaccgactcggctgcatcagcaaccgcctggtcaaccggtgtcaaaacctataacggcgcgctgggcgtcgatattcacgaaaaagatcacccaacgattctggaaatggcaaaagccgcaggtctggcgaccggtaacgtttctaccgcagagttgcaggatgccacgcccgctgcgctggtggcacatgtgacctcgcgcaaatgctacggtccgagcgcgaccagtgaaaaatgtccgggtaacgctctggaaaaaggcggaaaaggatcgattaccgaacagctgcttaacgctcgtgccgacgttacgcttggcggcggcgcaaaaacctttgctgaaacggcaaccgctggtgaatggcagggaaaaacgctgcgtgaacaggcacaggcgcgtggttatcagttggtgagcgatgctgcctcactgaattcggtgacggaagcgaatcagcaaaaacccctgcttggcctgtttgctgacggcaatatgccagtgcgctggctaggaccgaaagcaacgtaccatggcaatatcgataagcccgcagtcacctgtacgccaaatccgcaacgtaatgacagtgtaccaaccctggcgcagatgaccgacaaagccattgaattgttgagtaaaaatgagaaaggctttttcctgcaagttgaaggtgcgtcaatcgataaacaggatcatgctgcgaatccttgtgggcaaattggcgagacggtcgatctcgatgaagccgtacaacgggcgctggaattcgctaaaaaggagggtaacacgctggtcatagtcaccgctgatcacgcccacgccagccagattgttgcgccggataccaaagctccgggcctcacccaggcgctaaataccaaagatggcgcagtgatggtgatgagttacgggaactccgaagaggattcacaagaacataccggcagtcagttgcgtattgcggcgtatggcccgcatgccgccaatgttgttggactgaccgaccagaccgatctcttctacaccatgaaagccgctctggggctgaaataa

SEQ ID NO: 5965 - DNA, 3147 bp, Escherichia coli
  CDS (1)...(3147)
atgaaaattctcagcctgcgcctgaaaaacctgaactcattaaaaggcgaatggaagattgatttcacccgcgagccgttcgccagcaacgggctgtttgctattaccggcccaacaggtgcggggaaaaccaccctgctggacgccatttgtctggcgctgtatcacgaaactccgcgtctctctaacgtttcacaatcgcaaaatgatctcatgacccgcgataccgccgaatgtctggcggaggtggagtttgaagtgaaaggtgaagcgtaccgtgcattctggagccagaatcgggcgcgtaaccaacccgacggtaatttgcaggtgccacgcgtagagctggcgcgctgcgccgacggcaaaattctcgccgacaaagtgaaagataagctggaactgacagcgacgttaaccgggctggattacgggcgcttcacccgttcgatgctgctttcgcaggggcaatttgctgccttcctgaatgccaaacccaaagaacgcgcggaattgctcgaggagttaaccggcactgaaatctacgggcaaatctcggcgatggtttttgagcagcacaaatcggcccgcacagagctggagaagctgcaagcgcaggccagcggcgtcacgttgctcacgccggaacaagtgcaatcgctgacagcgagtttgcaggtacttactgacgaagaaaaacagttaattaccgcgcagcagcaagaacaacaatcgctaaactggttaacgcgtcaggacgaattgcagcaagaagccagccgccgtcagcaggccttgcaacaggcgttagccgaagaagaaaaagcgcaacctcaactggcggcgcttagtctggcacaaccggcacgaaatcttcgtccacactgggaacgcatcgcagaacacagcgcggcgctggcgcatattcgccagcagattgaagaagtaaatactcgcttacagagcacaatggcgcttcgcgcgagcattcgccaccacgcggcgaagcagtcagcagaattacagcagcagcaacaaagcctgaatacctggttacaggaacacgaccgcttccgtcagtggaacaacgaaccggcgggttggcgtgcgcagttctcccaacaaaccagcgatcgcgagcatctgcggcaatggcagcaacagttaacccatgctgagcaaaaacttaatgcgcttgcggcgatcacgttgacgttaaccgccgatgaagttgctaccgccctggcgcaacatgctgagcaacgcccactgcgtcagcacctggtcgcgctgcatggacagattgttccccaacaaaaacgtctggcgcagttacaggtcgctatccagaatgtcacgcaagaacagacgcaacgtaacgccgcacttaacgaaatgcgccagcgttataaagaaaagacgcagcaacttgccgatgtgaaaaccatttgcgagcaggaagcgcgcatcaaaacgctggaagctcaacgtgcacagttacaggcgggtcagccttgcccactttgtggttccaccagccacccggcggtcgaggcgtatcaggcgctggagcctggcgttaatcagtctcgattactggcgctggaaaacgaagttaaaaagctcggtgaagaaggtgcgacgctacgtgggcaactggacgccataacaaagcagcttcagcgtgatgaaaacgaagcgcaaagcctccgacaagatgagcaagcacttactcaacaatggcaagccgtcacggccagcctcaatatcaccttgcagccactggacgatattcaaccgtggctggatgcacaagatgagcacgaacgccagctgcggttactcagccaacggcatgaattacaagggcagattgccgcgcataatcagcaaattatccagtatcaacagcaaattgaacaacgccagcaactacttttaacgacattgacgggttatgcactgacattgccacaggaagatgaagaagagagctggttggcgacacgtcagcaagaagcgcagagctggcagcaacgccagaacgaattaaccgcgctgcaaaaccgtattcagcagctgacgccgattctggaaacgttgccgcaaagtgatgaactcccgcactgcgaagaaactgtggtattggaaaactggcggcaggtacatgaacaatgtctcgcattacacagccagcagcagacgttacagcaacaggatgttctggcggcgcaaagtctgcaaaaagcccaggcgcagtttgacaccgcgctacaggccagcgtctttgacgatcagcaggcgttccttgcggcgctaatggatgaacaaacactaacgcagctggaacagctcaagcagaatctggaaaaccagcgccgtcaggcgcaaactctggtcactcagacagcagaaacgctggcacagcatcaacaacaccgacctgacgacgggttggctctcactgtgacggtggagcagattcagcaagagttagcgcaaactcaccaaaagttgcgtgaaaacaccacgagtcaaggcgagattcgccagcagctgaagcaggatgcagataaccgtcagcaacaacaaaccttaatgcagcaaattgctcaaatgacgcagcaggttgaggactggggatatctgaattcgctaataggttccaaagagggcgataaattccgcaagtttgcccaggggctgacgctggataatttagtccatctcgctaatcagcaacttacccggctgcacgggcgctatctgttacagcgcaaagccagcgaggcgctggaagtcgaggttgttgatacctggcaggcagatgcggtacgcgatacccgtaccctttccggcggcgaaagtttcctcgttagtctggcgctggcgctggcgctttcggatctggtcagccataaaacacgtattgactcgctgttccttgatgaaggttttggcacgctggatagcgaaacgctggataccgcccttgatgcgctggatgccctgaacgccagtggcaaaaccatcggtgtgattagccacgtagaagcgatgaaagagcgtattccggtgcagatcaaagtgaaaaagatcaacggcctgggctacagcaaactggaaagtacgtttgcagtgaaataa

SEQ ID NO: 5966 - DNA, 1320 bp, Escherichia coli
  CDS (1)...(1320)
atgacccatcaattaagatcgcgcgatatcatcgctctgggctttatgacatttgcgttgttcgtcggcgcaggtaacattattttccctccaatggtcggcttacaggcaggcgaacacgtctggactgcggcattcggcttcctcattactgccgttggcctgccggtattaacggtagtggcgctggcaaaagttggcggcggtgttgacagcctcagcacgccaatcggtaaagtcgctggcgtactgctggcaacggtttgttacctggcggtggggccgcttttcgctacgccgcgtacagctaccgtttcctttgaagtggggattgcgccgctgacgggtgattccgcgctgccgctgtttatctacagcctggtctatttcgctatcgttattctggtttcgctctatccgggcaagctgctggataccgtgggcaacttccttgcgccgctgaaaattatcgcgctggtcatcctgtctgttgccgctattgtctggccggcgggttctatcagcacggcgactgaggcttatcaaaacgctgcgttttctaacggcttcgttaacggctatctgaccatggatacgctgggcgcaatggtgtttggtatcgttattgttaacgcggcgcgttctcgtggcgttaccgaagcgcgtctgctgacccgttataccgtctgggctggcctgatggcgggtgttggtctgactctgctgtacctggcgctgttccgtctggggtcagacagcgcgtcgctggtcgatcagtctgcaaacggcgctgctattctgcatgcttacgttcagcacacctttggcggcggcggtagcttcctgctggcggcgttaatcttcatcgcctgcctggtaacggcagttggcctgacctgtgcttgtgcagaattctttgcccagtacgtaccgctctcttatcgtacgctggtgtttatcctcggcggcttctcgatggtggtttctaacctcggcttaagccagctgatccagatctccgtaccggtgctgaccgctatttatccgccgtgtatcgcactggttgtattaagttttacacgctcatggtggcataattcgtcccgcgtgattgctccgccgatgtttatcagcctgctttttggtattctcgacgggatcaaagcatctgcattcagcgatatcttaccgtcctgggcgcagcgtttaccgctggccgaacaaggtctggcgtggttaatgccaacagtggtgatggtggttctggccattatctgggatcgcgcggcaggtcgtcaggtgacctccagcgctcactaa

SEQ ID NO: 5967 - DNA, 1071 bp, Escherichia coli
  CDS (1)...(1071)
atgcgcgttaccgatttctcctttgaattgcccgaatccctgattgcccactatcccatgcctgaacgcagtagctgtcgtttactgtcgctggacgggccgacgggcgcgctgacgcacggtactttcaccgatttacttgataagctcaaccccggcgatcttctggtttttaataatacccgcgtgatcccggcgcgcctgtttgggcgtaaagccagcggcggcaagattgaagtgctggttgaacggatgctcgacgacaaacgcattcttgcgcatattcgcgcctcgaaagcgccaaaacctggcgcagaactgctgctgggcgatgacgaaagtattaacgcaacaatgaccgcgcgccacggcgcactgtttgaagtcgaatttaatgatgaacgctcggtgctggatattctcaacagcatcggccatatgccgctgccgccgtatatcgaccgtccggacgaagacgctgaccgcgaactttatcaaaccgtttatagcgaaaaaccgggcgcggttgcagccccgaccgcaggtctgcattttgacgagcctttgctggaaaaattgcgcgccaaaggcgtggagatggcgtttgtgacgttgcacgttggtgcgggcaccttccagccggtgcgcgtcgacaccattgaagatcacatcatgcactcggaatacgctgaagtaccgcaggatgtggtagacgcggtactggcggcgaaagcgcgcggtaaccgggtgattgcggttggcaccacttcagtacgttcgctggaaagcgcggctcaggcagcgaaaaacgatctcattgaaccgttcttcgacgatacccaaatctttatctatccgggcttccagtacaaagtggtcgatgcgctggtgacgaacttccacttgccagagtcgacgctgattatgctggtttcggcctttgccggttatcaacacaccatgaacgcctataaagcagcggtagaagagaaatatcgcttttttagttacggtgatgcgatgtttatcacgtacaatccgcaggcaattaatgagcgcgtcggggagtaa

SEQ ID NO: 5968 - DNA, 1128 bp, Escherichia coli
  CDS (1)...(1128)
atgaaatttgaactggacaccaccgacggtcgcgcacgccgtggccgcctggtctttgatcgtggcgtagtggaaacgccttgttttatgcctgttggcacctacggcaccgtaaaagggatgacgccggaagaagttgaagccactggcgcgcaaattatcctcggcaacaccttccacctgtggctgcgcccgggccaggaaatcatgaaactgcacggcgatctgcacgattttatgcagtggaaggggccgatcctcaccgactccggcggcttccaggtcttcagccttggcgatattcgtaaaatcaccgaacagggcgtgcacttccgtaacccgatcaacggcgatccgattttcctcgatcctgaaaaatcaatggagattcagtacgatcttggttcggatatcgtcatgatctttgatgagtgtacgccgtatcctgctgactgggattacgcaaaacgctccatggagatgtctctgcgttgggcgaagcgtagccgtgagcgttttgacagtctcggaaacaaaaatgcgctgtttggtatcatccagggcagcgtttacgaagatttacgtgatatttctgttaaaggtctggtagatatcggttttgatggctacgctgtcggcggtctggctgtgggtgagccgaaagcagatatgcaccgcattctggagcatgtatgcccgcaaattccggcagacaaaccgcgttacctgatgggcgttggtaaaccagaagacctggttgaaggcgtacgtcgtggtatcgatatgtttgactgcgtaatgccaacccgcaacgcccgaaatggtcatttgttcgtgaccgatggcgtggtgaaaatccgcaatgcgaagtataagagcgatactggcccactcgatcctgagtgtgattgctacacctgtcgcaattattcacgcgcttacttgcatcatcttgaccgttgcaacgaaatattaggcgcgcgactcaacaccattcataaccttcgttactaccagcgtttgatggcgggtttacgcaaggctattgaagagggtaaattagagagcttcgtaactgatttttaccagcgtcaggggcgagaagtaccacctttgaacgttgattaa

SEQ ID NO: 5969 - DNA, 1104 bp, Escherichia coli
  CDS (1)...(1104)
gtgcaggacgagtattacatggcgcgggcgctaaagctggcgcaacgaggacgttttaccacgcatcccaacccgaatgtcgggtgcgtcattgtcaaagatggcgaaattgtcggtgaaggttaccaccaacgtgcgggtgaaccacatgccgaagtacacgcgttgcgtatggcgggtgaaaaagccaaaggtgcgaccgcctatgtcacactcgaaccctgtagccatcatggtcgtacgccaccgtgctgtgacgcactcatcgccgctggcgtagcgcgcgtggttgcctcgatgcaagatcctaacccgcaggtcgctgggcgtggactttaccgtctgcaacaggctggcattgacgtcagccacggcctgatgatgagtgaagccgagcaattgaataaaggctttctcaagcggatgcgcaccggctttccttatattcagttaaaacttggcgcatcgcttgatggtcgcacggcgatggcgagcggcgaaagccagtggatcacttcgccccaggcgcggcgtgatgtacaactactgcgcgcgcaaagtcatgccattttaaccagcagcgccacggtgctggcggatgatcctgccttaacggtgcgttggtctgaactggatgaacaaactcaggcgctctatccgcaacaaaatctccgtcagccgatacgtattgtgattgatagccaaaatcgcgtgacgccggtacatcgcattgtgcagcagcccggcgaaacctggttcgcgcgtacgcaggaagattctcgtgagtggccggaaacggtgcgtaccttgctgattccagagcataaaggtcatctggatctggttgtactgatgatgcaactgggtaaacagcaaattaacagcatctgggtggaagcggggccaacgctcgctggcgcattgctgcaggcgggtttagtcgatgagctgattgtctatatcgcacctaaactattaggcagcgacgcccgcggattatgcacgctgccagggcttgagaaattagccgacgccccccaatttaaattcaaagagatacgtcatgtaggcccggatgtttgcctgcatttagtgggtgcatga

SEQ ID NO: 5970 - DNA, 1047 bp, Escherichia coli
  CDS (1)...(1047)
gtgactggggtgaacgaatgcagccgcagcacatgcaacttgaagtatgacgagtatagcaggagtggcagcatgcaatacaaccccttaggaaaaaccgaccttcgcgtttcccgactttgcctcggctgtatgacctttggcgagccagatcgcggtaatcacgcatggacactgccggaagaaagcagccgtcccataattaaacgtgcactggaaggcggcataaatttctttgataccgccaacagttattctgacggcagcagcgaagagatcgtcggtcgcgcactgcgggatttcgcccgtcgtgaagacgtggtcgttgcgaccaaagtgttccatcgcgttggtgatttaccggaaggattatcccgtgcgcaaattttgcgctctatcgacgacagcctgcgacgtctcggcatggattatgtcgatatcctgcaaattcatcgctgggattacaacacgccgatcgaagagacgctggaagccctcaacgacgtggtaaaagccgggaaagcgcgttatatcggcgcgtcatcaatgcacgcttcgcagtttgctcaggcactggaactccaaaaacagcacggctgggcgcagtttgtcagtatgcaggatcactacaatctgatttatcgtgaagaagagcgcgagatgctaccactgtgttatcaggagggcgtggcggtaattccatggagcccgctggcaaggggccgtctgacgcgtccgtggggagaaactaccgcacgactggtgtctgatgaggtggggaaaaatctctataaagaaagcgatgaaaatgacgcgcagatcgcagagcggttaacaggcgtcagtgaagaactgggggcgacacgagcacaagttgcgctggcctggttgttgagtaaaccgggcattgccgcaccgattatcggaacttcgcgcgaagaacagcttgatgagctattgaacgcggtggatatcactttgaagccggaacagattgccgaactggaaacgccgtataaaccgcatcctgtcgtaggatttaaataa

SEQ ID NO: 5971 - DNA, 1863 bp, Escherichia coli
  CDS (1)...(1863)
atgagttttgatattgccaaatacccgaccctggcactggtcgactccacccaggagttacgactgttgccgaaagagagtttaccgaaactctgcgacgaactgcgccgctatttactcgacagcgtgagccgttccagcgggcacttcgcctccgggctgggcacggtcgaactgaccgtggcgctgcactatgtctacaacaccccgtttgaccaattgatttgggatgtggggcatcaggcttatccgcataaaattttgaccggacgccgcgacaaaatcggcaccatccgtcagaaaggcggtctgcacccgttcccgtggcgcggcgaaagcgaatatgacgtattaagcgtcgggcattcatcaacctccatcagtgccggaattggtattgcggttgctgccgaaaaagaaggcaaaaatcgccgcaccgtctgtgtcattggcgatggcgcgattaccgcaggcatggcgtttgaagcgatgaatcacgcgggcgatatccgtcctgatatgctggtgattctcaacgacaatgaaatgtcgatttccgaaaatgtcggcgcgctcaacaaccatctggcacagctgctttccggtaagctttactcttcactgcgcgaaggcgggaaaaaagttttctctggcgtgccgccaattaaagagctgctcaaacgcaccgaagaacatattaaaggcatggtagtgcctggcacgttgtttgaagagctgggctttaactacatcggcccggtggacggtcacgatgtgctggggcttatcaccacgctaaagaacatgcgcgacctgaaaggcccgcagttcctgcatatcatgaccaaaaaaggtcgtggttatgaaccggcagaaaaagacccgatcactttccacgccgtgcctaaatttgatccctccagcggttgtttgccgaaaagtagcggcggtttgccgagctattcaaaaatctttggcgactggttgtgcgaaacggcagcgaaagacaacaagctgatggcgattactccggcgatgcgtgaaggttccggcatggtcgagttttcacgtaaattcccggatcgctacttcgacgtggcaattgccgagcaacacgcggtgacctttgctgcgggtctggcgattggtgggtacaaacccattgtcgcgatttactccactttcctgcaacgcgcctatgatcaggtgctgcatgacgtggcgattcaaaagcttccggtcctgttcgccatcgaccgcgcgggcattgttggtgctgacggtcaaacccatcagggtgcttttgatctctcttacctgcgctgcataccggaaatggtcattatgaccccgagcgatgaaaacgaatgtcgccagatgctctataccggctatcactataacgatggcccgtcagcggtgcgctacccgcgtggcaacgcggtcggcgtggaactgacgccgctggaaaaactaccaattggcaaaggcattgtgaagcgtcgtggcgagaaactggcgatccttaactttggtacgctgatgccagaagcggcgaaagtcgccgaatcgctgaacgccacgctggtcgatatgcgttttgtgaaaccgcttgatgaagcgttaattctggaaatggccgccagccatgaagcgctggtcaccgtagaagaaaacgccattatgggcggcgcaggcagcggcgtgaacgaagtgctgatggcccatcgtaaaccagtacccgtgctgaacattggcctgccggacttctttattccgcaaggaactcaggaagaaatgcgcgccgaactcggcctcgatgccgctggtatggaagccaaaatcaaggcctggctggcataa

SEQ ID NO: 5972 - DNA, 900 bp, Escherichia coli
  CDS (1)...(900)
atggactttccgcagcaactcgaagcctgcgttaagcaggccaaccaggcgctgagccgttttatcgccccactgccctttcagaacactcccgtggtcgaaaccatgcagtatggcgcattattaggtggtaagcgcctgcgacctttcctggtttatgccaccggtcatatgttcggcgttagcacaaacacgctggacgcacccgctgccgccgttgagtgtatccacgcttactcattaattcatgatgatttaccggcaatggatgatgacgatctgcgtcgcggtttgccaacctgccatgtgaagtttggcgaagcaaacgcgattctcgctggcgacgctttacaaacgctggcgttctcgattttaagcgatgccgatatgccggaagtgtcggaccgcgacagaatttcgatgatttctgaactggcgagcgccagtggtattgccggaatgtgcggtggtcaggcattagatttagacgcggaaggcaaacacgtacctctggacgcgcttgagcgtattcatcgtcataaaaccggcgcattgattcgcgccgccgttcgccttggtgcattaagcgccggagataaaggacgtcgtgctctgccggtactcgacaagtatgcagagagcatcggccttgccttccaggttcaggatgacatcctggatgtggtgggagatactgcaacgttgggaaaacgccagggtgccgaccagcaacttggtaaaagtacctaccctgcacttctgggtcttgagcaagcccggaagaaagcccgggatctgatcgacgatgcccgtcagtcgctgaaacaactggctgaacagtcactcgatacctcggcactggaagcgctagcggactacatcatccagcgtaataaataa

SEQ ID NO: 5973 - DNA, 1992 bp, Escherichia coli
  CDS (1)...(1992)
atgttcggaaaattatcacttgatgcagtcccgttccatgaacctatcgtcatggttacgatcgctggcattattttgggaggtctggcgctcgttggcctgatcacttacttcggtaagtggacctacctgtggaaagagtggctgacctccgtcgaccataaacgcctcggtatcatgtatatcatcgtggcgattgtgatgttgctgcgtggttttgctgacgccattatgatgcgtagccagcaggctcttgcctcggcgggcgaagcgggcttcctgccacctcaccactacgatcagatctttaccgcgcacggcgtgattatgatcttcttcgtggcgatgcctttcgttatcggtctgatgaacctggtggttccgctgcagatcggcgcgcgtgacgttgcgttcccgttcctcaacaacttaagcttctggtttaccgttgttggtgtgattctggttaacgtttctctcggcgtgggcgaatttgcgcagaccggctggctggcctatccaccgctatcgggaatagagtacagtccgggagtcggtgtcgattactggatatggagtctccagctatccggtataggtacgacgcttaccggtatcaacttcttcgttaccattctgaagatgcgcgcaccgggcatgaccatgttcaagatgccagtatttacctgggcatcactgtgcgcgaacgtactgattattgcttccttcccaattctgacggttaccgtcgcgttgttgaccctggatcgctatctgggcacccatttctttaccaacgatatgggtggcaacatgatgatgtacatcaacctgatttgggcctggggccacccggaagtttacatcctgatcctgcctgttttcggtgtgttctccgaaattgcggcaaccttctcgcgtaaacgtctgtttggttatacctcgctggtatgggcaaccgtctgtatcaccgtgctgtcgttcatcgtttggctgcaccacttctttacgatgggtgcgggcgcgaacgtaaacgccttctttggtatcaccacaatgattatcgccatcccgaccggggtgaagatcttcaactggctgttcaccatgtatcagggccgcatcgtgttccattctgcgatgctgtggaccatcggttttatcgtcaccttctcggtgggcgggatgactggcgtgctgctggccgtaccgggcgcggacttcgttctgcataacagcctgttcctgattgcgcacttccataacgtgatcatcggcggcgtggtcttcggctgcttcgcagggatgacctactggtggcctaaagcgttcggtttcaaactgaacgaaacctggggtaaacgcgcgttctggttctggatcatcggcttcttcgttgcctttatgccactgtatgcgctgggcttcatgggcatgacccgtcgtttgagccagcagattgacccgcagttccacaccatgctgatgattgcagccagcggtgcagtactgattgcgctgggtattctctgcctcgttattcagatgtacgtttctattcgcgaccgcgaccagaaccgtgacctgactggcgacccgtggggtggccgtacgctggagtgggcaacctcttccccgcctccgttctataactttgccgtagtgccgcacgttcacgaacgtgatgcattctgggaaatgaaagagaaaggcgaagcgtataaaaagcctgaccactatgaagaaattcatatgccgaaaaacagcggtgcaggtatcgtcattgcagctttctccaccatcttcggtttcgccatgatctggcatatctggtggctggcgattgttggcttcgcaggcatgatcatcacctggatcgtgaaaagcttcgacgaggacgtggattactacgtgccggtggcagaaatcgaaaaactggaaaaccagcatttcgatgagattactaaggcagggctgaaaaatggcaactga

SEQ ID NO: 5974 - DNA, 273 bp, Escherichia coli
  CDS (1)...(273)
gtgaataaatctcaattgatcgacaagattgctgcaggggctgatatctctaaagctgcggctggccgtgcgttagatgctattattgcttccgtaactgaatctctgaaagaaggggatgatgtagcactggtaggttttggtacttttgccgttaaagagcgtgctgcccgtactggccgcaacccgcagaccggtaaagagatcaccatcgctgctgctaaagtaccgagcttccgtgcaggtaaagcactgaaagacgcggtaaactaa

SEQ ID NO: 5975 - DNA, 3150 bp, Escherichia coli
  CDS (1)...(3150)
atgcctaatttctttatcgatcgcccgatttttgcgtgggtgatcgccattatcatcatgttggcaggggggctggcgatcctcaaactgccggtggcgcaatatcctacgattgcaccgccggcagtaacgatctccgcctcctaccccggcgctgatgcgaaaacagtgcaggacacggtgacacaggttatcgaacagaatatgaacggtatcgataacctgatgtacatgtcctctaacagtgactccacgggtaccgtgcagatcaccctgacctttgagtctggtactgatgcggatatcgcgcaggttcaggtgcagaacaaactgcagctggcgatgccgttgctgccgcaagaagttcagcagcaaggggtgagcgttgagaaatcatccagcagcttcctgatggttgtcggcgttatcaacaccgatggcaccatgacgcaggaggatatctccgactacgtggcggcgaatatgaaagatgccatcagccgtacgtcgggcgtgggtgatgttcagttgttcggttcacagtacgcgatgcgtatctggatgaacccgaatgagctgaacaaattccagctaacgccggttgatgtcattaccgccatcaaagcgcagaacgcccaggttgcggcgggtcagctcggtggtacgccgccggtgaaaggccaacagcttaacgcctctattattgctcagacgcgtctgacctctactgaagagttcggcaaaatcctgctgaaagtgaatcaggatggttcccgcgtgctgctgcgtgacgtcgcgaagattgagctgggtggtgagaactacgacatcatcgcagagtttaacggccaaccggcttccggtctggggatcaagctggcgaccggtgcaaacgcgctggataccgctgcggcaatccgtgctgaactggcgaagatggaaccgttcttcccgtcgggtctgaaaattgtttacccatacgacaccacgccgttcgtgaaaatctctattcacgaagtggttaaaacgctggtcgaagcgatcatcctcgtgttcctggttatgtatctgttcctgcagaacttccgcgcgacgttgattccgaccattgccgtaccggtggtattgctcgggacctttgccgtccttgccgcctttggcttctcgataaacacgctaacaatgttcgggatggtgctcgccatcggcctgttggtggatgacgccatcgttgtggtagaaaacgttgagcgtgttatggcggaagaaggtttgccgccaaaagaagctacccgtaagtcgatggggcagattcagggcgctctggtcggtatcgcgatggtactgtcggcggtattcgtaccgatggccttctttggcggttctactggtgctatctatcgtcagttctctattaccattgtttcagcaatggcgctgtcggtactggtggcgttgatcctgactccagctctttgtgccaccatgctgaaaccgattgccaaaggcgatcacggggaaggtaaaaaaggcttcttcggctggtttaaccgcatgttcgagaagagcacgcaccactacaccgacagcgtaggcggtattctgcgcagtacggggcgttacctggtgctgtatctgatcatcgtggtcggcatggcctatctgttcgtgcgtctgccaagctccttcttgccagatgaggaccagggcgtgtttatgaccatggttcagctgccagcaggtgcaacgcaggaacgtacacagaaagtgctcaatgaggtaacgcattactatctgaccaaagaaaagaacaacgttgagtcggtgttcgccgttaacggcttcggctttgcgggacgtggtcagaataccggtattgcgttcgtttccttgaaggactgggccgatcgtccgggcgaagaaaacaaagttgaagcgattaccatgcgtgcaacacgcgctttctcgcaaatcaaagatgcgatggttttcgcctttaacctgcccgcaatcgtggaactgggtactgcaaccggctttgactttgagctgattgaccaggctggccttggtcacgaaaaactgactcaggcgcgtaaccagttgcttgcagaagcagcgaagcaccctgatatgttgaccagcgtacgtccaaacggtctggaagataccccgcagtttaagattgatatcgaccaggaaaaagcgcaggcgctgggtgtttctatcaacgacattaacaccactctgggcgctgcatggggcggcagctatgtgaacgactttatcgaccgcggtcgtgtgaagaaagtttatgtcatgtcagaagcgaaataccgtatgctgccggatgatatcggcgactggtatgttcgtgctgctgatggtcagatggtgccattctcggcgttctcctcttctcgttgggagtacggttcgccgcgtctggaacgttacaacggcctgccatccatggaaatcttaggccaggcggcaccgggtaaaagtaccggtgaagcaatggagctgatggaacaactggcgagcaaactgcctaccggtgttggctatgactggacggggatgtcctatcaggaacgtctctccggcaaccaggcaccttcactgtacgcgatttcgttgattgtcgtgttcctgtgtctggcggcgctgtacgagagctggtcgattccgttctccgttatgctggtcgttccgctgggggttatcggtgcgttgctggctgccaccttccgtggcctgaccaatgacgtttacttccaggtaggcctgctcacaaccattgggttgtcggcgaagaacgcgatccttatcgtcgaattcgccaaagacttgatggataaagaaggtaaaggtctgattgaagcgacgcttgatgcggtgcggatgcgtttacgtccgatcctgatgacctcgctggcgtttatcctcggcgttatgccgctggttatcagtactggtgctggttccggcgcgcagaacgcagtaggtaccggtgtaatgggcgggatggtgaccgcaacggtactggcaatcttcttcgttccggtattctttgtggtggttcgccgccgctttagccgcaagaatgaagatatcgagcacagccatactgtcgatcatcattga

SEQ ID NO: 5976 - DNA, 330 bp, Escherichia coli
  CDS (1)...(330)
atgtttggtaaaggcggtctgggtaacctgatgaagcaagcccagcagatgcaagaaaaaatgcagaaaatgcaggaagagatcgcgcagctggaagtcaccggcgaatctggcgcaggtctggtaaaagtgaccatcaacggtgcacacaactgccgtcgcgtagagatcgacccgagcctgctggaagacgacaaagagatgctggaagacctggtggctgcagcattcaacgacgcagcacgtcgtattgaagaaacgcagaaagaaaaaatggcctctgtatcctccggaatgcagctgccgcctggctttaagatgccgttctga

SEQ ID NO: 5977 - DNA, 606 bp, Escherichia coli
  CDS (1)...(606)
atgcaaaccagcccgctgttaacacagcttatggaagcactgcgctgtctgccgggcgttggcccgaagtcggcgcagcgtatggcgttcacgctgcttcagcgcgatcgtagcggcgggatgcgtctggcgcaggcgctcacccgggcgatgtcggaaatcggccactgcgccgattgccgcactttcaccgaacaggaagtctgtaacatctgttcgaatccgcgtcgtcaggaaaacggtcaaatctgcgtggtggagagtccggcggacatctacgccattgagcagacggggcagttttcaggtcgttattttgtgttgatggggcatctgtcaccgctggacggcatcggtccggatgatatcgggcttgatcgtctggaacagcgtctggcagaggaaaaaatcactgaagtgatcctcgccaccaaccccacggttgaaggtgaagctaccgctaactacattgccgagctttgcgcgcaatatgacgtggaagccagccgaatcgctcatggcgttccggttggcggcgagctggaaatggtcgacggcaccacgttgtcacactcccttgccgggcgtcataagattcgtttttaa

SEQ ID NO: 5978 - DNA, 645 bp, Escherichia coli
  CDS (1)...(645)
atgcgtatcattctgcttggcgctccgggcgcggggaaagggactcaggctcagttcatcatggagaaatatggtattccgcaaatctccactggcgatatgctgcgtgctgcggtcaaatctggctccgagctgggtaaacaagcaaaagacattatggatgctggcaaactggtcaccgacgaactggtgatcgcgctggttaaagagcgcattgctcaggaagactgccgtaatggtttcctgttggacggcttcccgcgtaccattccgcaggcagacgcgatgaaagaagcgggcatcaatgttgattacgttctggaattcgacgtaccggacgaactgatcgttgaccgtatcgtcggtcgccgcgttcatgcgccgtctggtcgtgtttatcacgttaaattcaatccgccgaaagtagaaggcaaagacgacgttaccggtgaagaactgactacccgtaaagatgatcaggaagagaccgtacgtaaacgtctggttgaataccatcagatgacagcaccgctgatcggctactactccaaagaagcagaagcgggtaataccaaatacgcgaaagttgacggcaccaagccggttgctgaagttcgcgctgatctggaaaaaatcctcggctaa

SEQ ID NO: 5979 - DNA, 2505 bp, Escherichia coli
  CDS (1)...(2505)
atgtcacaaactatcgacctgaccctggacggcctgtcctgcggtcactgcgttaaacgcgtgaaagaaagtcttgaacagcgtccggatgttgagcaggcggatgtgtctatcactgaagcgcacgttaccgggactgccagtgcagaacagctgatcgaaaccatcaaacaagcgggttatgacgcatctgtaagccacccaaaggctaaaccgctggcggagtcatcaatcccgtcggaagcactgacagcggtttctgaggcgcttccggcagcgaccgccgatgacgatgacagccagcagttgctgctgagcggcatgagctgcgccagctgtgtcacccgcgtacaaaatgcgctgcaaagcgtaccgggcgtcactcaggcacgggtaaacctggcggagcgtactgcgctggtgatgggcagtgcctccccacaagatttagtgcaggcggtggaaaaagcgggctacggcgcggaagcgattgaagatgacgctaaacgccgcgagcgccagcaagaaaccgccgtcgctacgatgaagcgcttccgctggcaggcaattgtcgcactggcggtgggtatcccggtgatggtctgggggatgatcggcgataacatgatggtcaccgctgacaaccgcagcctgtggttggttatcggcctgataaccctggcagtgatggttttcgccggcggccatttttaccgcagtgcatggaaaagcctgctgaacggtgcggcgacgatggatacgctggtggcgctgggtactggcgtggcgtggctctattcgatgagcgtcaacctgtggccgcagtggttcccgatggaagcgcgacatctttattacgaagccagcgcgatgattatcggtctgatcaatctcggccatatgctggaagcgcgcgcacgccagcgttcttctaaggcgctggaaaagttactcgatttaaccccgccgacggcacgcctggttactgacgaaggtgaaaaaagcgtgcctctggcagaagtgcagccaggtatgttgctgcgcctgacgaccggcgatcgcgtgccggtagatggcgagattacccagggcgaagcatggctggatgaagcgatgctgacgggcgaaccaatcccgcagcaaaaaggcgaaggcgatagcgtccatgccgggacagtggtacaggacggcagtgtgctgtttcgtgccagtgcggttggcagccatactacgctgtcacgaatcattcgcatggtgcgccaggcccagagcagcaagccagaaatcggtcagctggcggataaaatctcagccgtatttgtgccggtagtggtggttattgcgcttgtcagtgcggcaatctggtatttctttggtccggcaccgcagattgtctataccctggtgattgccaccacggtactgattattgcctgtccgtgtgcgctggggctggcgacgccgatgtcgattatttccggcgtcgggcgggcggctgagtttggcgtgctggtgcgggacgctgacgcgctgcaacgcgccagtacactcgacactgtagtgttcgataaaaccgggacgctgactgaagggaagccgcaggttgtcgcagtgaaaacatttgctgatgttgatgaagcgcaggcattgcgtctggcggcggcactggagcaaggttccagccatccgctggcacgagcgatcctcgataaagcaggtgatatgcagctaccgcaggtcaacggtttccgcacattgcgcgggctgggcgtgagcggtgaagctgaaggtcatgcgttattgctgggcaatcaggcgctgttaaatgagcaacaggttggtaccaaagctatcgaagcggagattactgctcaggcatcgcaaggggcaacgcctgtgctgctggcggttgacgggaaagcggtagccctgctggcagtacgcgatccgttgcgtagtgatagcgtggcggcgctgcaacgcctgcataaagcgggatatcgtctggtgatgttgaccggggataacccaaccaccgccaatgcgatcgccaaagaagcagggattgatgaggtgatcgccggggtgctgccggacggtaaagccgaagcgatcaaacatctgcaaagtgaaggacgtcaggtggcaatggtgggcgacggcattaacgacgcgccagcgctggctcaggcggatgtcggcattgcgatgggtggcggcagtgatgttgccattgaaaccgcggcgattaccctgatgcgccatagcctgatgggcgttgcggatgcgctcgctatttcccgcgcaacgctgcacaacatgaagcagaacctgctcggtgcgtttatctacaacagtatcggtattccggtcgccgccggtattttgtggccgttcactggaacactgcttaacccggtagttgccggagcggcaatggcgctctcgtcgattaccgtagtgagtaacgccaaccggttgctgcggtttaaaccgaaggaataa

SEQ ID NO: 5980 - DNA, 687 bp, Escherichia coli
  CDS (1)...(687)
atgccagcggaaaacattgttgaagttcatcatcttaagaagtccgtcggtcagggggagcatgaactctccatcctcaccggagttgagctggttgtcaaacgtggcgagaccatcgcactggtgggcgagtcgggatcgggtaagtcaaccttgctggcgatcctcgccgggcttgatgacggcagcagtggcgaagtgagtctggtgggacaaccgctacataatatggacgaagaagcgcgggcaaagttgcgcgcgaagcacgtcggctttgtttttcagtcatttatgttaattcctacccttaacgcgctggaaaacgtcgagcttccggctctgctgcgcggtgagagtagcgcggaaagtcgtaacggggcgaaagcgttgctcgaacagttagggctgggtaaacgtctggatcatcttccggcacagctttccggcggtgaacagcaacgagtggcgctggcacgagcctttaatggtcgacctgatgtgctgtttgccgacgaacccaccggcaaccttgaccgccagacgggcgataaaattgccgacctgctgttttccctcaaccgtgaacatggcaccacgttgattatggtgacccacgacctgcaactggcggcacgctgcgaccgctgcttacggctggtgaacgggcagttgcaggaggaagcatga

SEQ ID NO: 5981 - DNA, 1362 bp, Escherichia coli
  CDS (1)...(1362)
atgtcttttgatttaatcattaaaaacggcaccgttattttagaaaacgaagctcgcgttgtagatatcgccgttaaaggcggaaaaattgctgctatcggtcaggatctgggcgatgcaaaagaagttatggatgcgtctggtctggtggtttcgccgggcatggttgatgcgcacacccatatttctgaaccgggtcgtagccactgggaaggttatgaaaccggtactcgcgcagcggcaaaaggtggtatcaccaccatgatcgaaatgccgctcaaccagctgcctgcaacggttgaccgcgcttcaattgaactgaagttcgatgccgctaaaggcaagctgactattgatgcggcacaactcggtggcctggtgtcttacaacatcgaccgtctgcatgagctggatgaagtgggcgttgtcggcttcaaatgcttcgttgcgacctgtggcgatcgcggtatcgacaacgacttccgtgatgtaaacgactggcagttcttcaaaggtgcgcagaagctgggcgaactgggtcagccggtgctggtgcactgcgaaaacgcgctgatttgtgacgaactgggcgaagaagcgaagcgtgaaggtcgcgtaaccgctcatgactatgtggcttcgcgtccggtatttaccgaagtggaagcaattcgccgcgtactgtatctggcgaaagttgctggttgccgtctgcacgtttgccacgtcagcagcccggaaggtgttgaggaagtgactcgtgcacgtcaggaaggtcaggacgttacttgtgaatcctgcccgcattactttgtactggataccgatcagttcgaagaaatcggtactctggcgaagtgttcaccgccgatccgcgatctggaaaaccagaaaggcatgtgggaaaaactgtttaacggtgaaatcgactgcctggtttccgaccactctccatgcccgccggaaatgaaagccggtaacatcatgaaagcatggggcggtatcgccggtctgcaaagctgcatggacgtgatgttcgatgaagcggtacagaaacgcggtatgtctctgccaatgttcggcaaattaatggcgactaacgcagcagatattttcggtctgcagcaaaaaggccgtatcgccccaggaaaagatgccgacttcgtcttcattcagccgaatagcagctatgttcttaccaatgacgatctggaatatcgccacaaagtcagcccgtatgttggccgtaccattggcgcgcgtatcacgaaaaccatcttacgtggtgatgtgatttacgacattgaacagggcttccctgttgcgccgaaaggtcaatttatccttaaacatcagcagtaa

SEQ ID NO: 5982 - DNA, 3882 bp, Escherichia coli
  CDS (1)...(3882)
atgagccagcatttacctttggtcgccgcacagcccggcatctggatggcagaaaaactgtcagaattaccctccgcctggagcgtggcgcattacgttgagttaaccggagaggttgattcgccattactggcccgcgcggtggttgccggactagcgcaagcagatacgctgcggatgcgttttacggaagataacggcgaagtctggcagtgggtcgatgatgcgctgacgttcgaactgccagaaattatcgacctacgaaccaacattgatccgcacggtactgcgcaggcattaatgcaggcggatttgcaacaagatctgcgcgtcgatagcggtaaaccactggtctttcatcagctgatacaggtggcggataaccgctggtactggtatcagcgttatcaccatttgctggtcgatggctttagtttcccggccattacccgccagatcgccaatatttactgcacatggctgcgtggcgaaccaacgcctgcttcgccatttacgcctttcgctgatgtagtggaagagtaccagcaataccgcgaaagcgaagcctggcagcgtgatgcggcattctgggcagaacagcgtcgtcaactgccgccgcccgcgtcactttctccggcacctttaccggggcgcagcgcctcggcagatattctgcgcctgaaactggaatttaccgacggggaattccgccagctggctacgcaactttcaggtgtgcagcgtaccgatttagcccttgcgctggcagccttgtggctggggcgattgtgcaatcgtatggactacgccgccggatttatctttatgcgtcgactgggctcggcggcgctgacggctaccggacccgtgctcaacgttttgccgttgggtattcacattgcggcgcaagaaacgctgccggaactggcaacccgactggcagcacaactgaaaaaaatgcgtcgtcatcaacgttacgatgccgaacaaattgtccgtgacagcgggcgagcggcaggtgatgaaccgctgtttggtccggtactcaatatcaaggtatttgattaccaactggatattcctgatgttcaggcgcaaacccataccctggcaaccggtccggttaatgaccttgaactggccctgttcccggatgtacacggtgatttgagtattgagatcctcgccaataaacagcgttacgatgagccaacgttaatccagcatgctgaacgcctgaaaatgctgattgcccagttcgccgcggatccggcgctgttgtgcggcgatgtcgatattatgctgccaggtgagtatgcgcagctggcgcagctcaacgccactcaggttgagattccagaaaccacgcttagcgcgctggtggcagaacaagcggcaaaaacaccggatgctccggcgctggcagatgcgcgttacctgttcagctatcgggaaatgcgcgagcaggtggtggcgctggcgaatctgctgcgtgagcgcggcgttaaaccaggggacagcgtggcggtggcactaccgcgctcggtctttttgaccctggcactccatgcgatagttgaagctggagcggcctggctaccgctggataccggctatccggacgatcgcctgaaaatgatgctggaagatgcgcgtccgtcgctgttaattaccaccgacgatcaactgccgcgctttagcgatgttcccaatttaacaagcctttgctataacgccccgcttacaccgcagggcagtgcgccgctgcaactttcacaaccgcatcacacggcttatatcatctttacctctggctccaccggcaggccgaaaggggtaatggtcgggcagacggctatcgtcaaccgcctgctttggatgcaaaatcattatccgcttacaggcgaagatgtcgttgcccaaaaaacgccgtgcagttttgatgtctcggtgtgggagtttttctggccgtttatcgcaggggcaaaactggtgatggctgaaccggaagcgcaccgcgacccgctcgctatgcagcaattctttgccgaatatggcgtaacgaccacgcactttgtgccgtcgatgctggcggcatttgttgcctcgctgacgccgcaaaccgctcgccagagttgcgcgacgttgaaacaggttttctgtagtggtgaggccttaccggctgatttatgccgcgaatggcaacagttaactggcgcgccgttgcataatctatatggcccgacggaagcggcggtagatgtcagctggtatccggcttttggcgaggaactggcacaggtgcgcggcagcagtgtgccgattggttatccggtatggaatacgggtctgcgtattcttgatgcgatgatgcatccggtgccgccgggtgtggcgggtgatctctatctcactggcattcaactggcgcagggctatctcggacgccccgatctgaccgccagccgctttattgccgatccttttgccccaggtgaacggatgtaccgtaccggagacgttgcccgctggctggataacggcgcggtggagtacctcgggcgcagtgatgatcagctaaaaattcgcgggcagcgtatcgaactgggcgaaatcgatcgcgtgatgcaggcgctgccggatgtcgaacaagccgttacccacgcctgtgtgattaaccaggcggctgccaccggtggtgatgcgcgtcaattggtgggctatctggtgtcgcaatcgggcctgccgttggataccagcgcattgcaggcgcagcttcgtgaaacattgccaccacatatggtaccggtggttctgctgcaacttccacagttaccacttagcgccaacggcaagctggatcgcaaagccttaccgttgcctgaactgaaggcacaagcgccagggcgtgcgccgaaagcgggcagtgaaacgattatcgccgcggcattctcgtcgttgctggggtgtgacgtgcaggatgccgatgctgatttcttcgcgcttggcggtcattcgctactggcaatgaaactggcagcgcagttaagtcggcaggttgcccgccaggtgacgccggggcaagtgatggtcgcgtcaactgtcgccaaactggcaacgattattgatgctgaagaagacagcacccggcgtatgggattcgaaaccattctgccgttgcgtgaaggtaatggcccgacgctgttttgtttccatcctgcgtccggttttgcctggcagttcagcgtgctctcgcgttatctcgatccacaatggtcgattatcggcattcagtcaccgcgccccaatggccccatgcagacggcggcaaacctggatgaagtctgcgaagcgcatctggcaacgttacttgaacaacaaccgcatggcccttattacctgctggggtattcccttggcggtacgctggcgcagggtattgcggcgcgactgcgtgcccgtggcgaacaggtggcatttcttggcttgctggatacctggccgccagaaacgcaaaactggcaggaaaaagaagctaatggtctggacccggaagtgctggcggagattaaccgcgaacgcgaggccttcctggcagcacagcagggaagtacttcaacggagttgtttaccaccattgaaggcaactacgctgatgctgtgcgcctgctgacgactgctcatagcgtaccgtttgacggtaaagcgacgctgtttgttgctgaacgcacacttcaggaaggtatgagtcccgaacgcgcctggtcgccgtggatagcggagctggatatctatcgtcaggattgtgcgcatgtggatattatctctccagggacgtttgaaaaaattgggccgattattcgcgcaacgctaaacaggtaa

SEQ ID NO: 5983 - DNA, 816 bp, Escherichia coli
  CDS (1)...(816)
atgaccgaatcagtagcccgtttgcgcggcgaacagttaaccctgggatatggcaaatataccgttgcggaaaatctgactgtagaaatacctgatggtcacttcacggcaattatcgggccaaatggctgcggtaaatccacgttactgcgtaccttaagccgcctgatgacgcctgctcatgggcatgtctggctggatggcgagcacattcaacattacgccagtaaagaggttgcacgccggattggtctgttggcgcaaaatgctaccacgccgggcgatatcaccgtgcaggagctggtggcgcgtggacgttatccgcatcaaccgctgtttacccgctggcgcaaagaggatgaagaagcggtaacgaaagcaatgcaggccacgggaataactcatctggcagatcaaagcgtggataccctttctggcggacaacgccagcgagcgtggatcgcgatggtgctggcccaggaaacggcaattatgctgctcgacgaacccacgacctggctggatatcagtcatcagattgatttgctggagttgttaagcgaactgaaccgcgaaaaaggctataccctggcggcggtgctgcacgatcttaatcaggcctgtcgttacgccagccatttgattgcattgcgggaagggaaaattgttgctcagggagcgccgaaggagattgtcactgctgaactgattgagcgcatttatggtctgcgctgcatgatcattgacgatccagttgccggaacgccgcttgtggtgccgctcggacgaacggcaccttcaaccgcaaatagttaa

SEQ ID NO: 5984 - DNA, 564 bp, Escherichia coli
  CDS (1)...(564)
atgtccttgattaacaccaaaattaaaccttttaaaaaccaggcattcaaaaacggcgaattcatcgaaatcaccgaaaaagataccgaaggccgctggagcgtcttcttcttctacccggctgactttactttcgtatgcccgaccgaactgggtgacgttgctgaccactacgaagaactgcagaaactgggcgtagacgtatacgcagtatctaccgatactcacttcacccacaaagcatggcacagcagctctgaaaccatcgctaaaatcaaatatgcgatgatcggcgacccgactggcgccctgacccgtaacttcgacaacatgcgtgaagatgaaggtctggctgaccgtgcgaccttcgttgttgacccgcagggtatcatccaggcaatcgaagttaccgctgaaggcattggccgtgacgcgtctgacctgctgcgtaaaatcaaagcagcacagtacgtagcttctcacccaggtgaagtttgcccggctaaatggaaagaaggtgaagcaactctggctccgtctctggacctggttggtaaaatctaa

SEQ ID NO: 5985 - DNA, 924 bp, Escherichia coli
  CDS (1)...(924)
atgggaggattgccaatgatttccgcttcgctgcaacaacgtaaaactcgcacccgccgcagcatgttgtttgtgcctggtgccaatgccgcgatggtcagcaactccttcatctacccggctgatgccctgatgtttgacctcgaagactccgtagcattgcgtgaaaaagacaccgcccgccgcatggtttaccacgcgctgcaacatccgctgtatcgcgatattgaaaccattgtgcgtgtcaacgcgctggattccgaatggggtgttaacgacctggaagccgtcgttcgcggtggtgcggacgttgtgcgtctgccgaaaaccgataccgctcaggatgttctggatattgaaaaagagatcctgcgtatcgaaaaagcctgtggtcgtgaacccggcagcaccggcctgctggcggcgattgaatctccgctggggattacccgcgcagtggaaatcgctcacgcttccgagcgtttgatcggtatcgccctcggtgcagaagactatgtgcgcaacctgcgtacagaacgctccccggaaggaactgaactgctgttcgcacgctgttccattttgcaggccgcgcgctctgcgggtattcaggcgttcgataccgtctattccgacgctaacaacgaagccggatttctgcaagaagccgcccacatcaaacagctgggctttgacggcaaatcgctgatcaacccgcgtcagattgatctgctgcacaacctctacgcaccgacccagaaagaagtggatcacgcccgccgcgtcgtagaagccgctgaagccgccgctcgcgaaggcctcggcgtggtttccctgaacggcaagatggtggacggtccggttatcgatcgcgcccgtctggtgctctcccgtgcagaactttccggcatccgcgaagaataa

SEQ ID NO: 5986 - DNA, 966 bp, Escherichia coli
  CDS (1)...(966)
atgagtaaacccattgtgatggaacgcggtgttaaataccgcgatgccgataagatggcccttatcccggttaaaaacgtggcaacagagcgcgaagccctgctgcgcaagccggaatggatgaaaatcaagcttccagcggactctacacgtatccagggcatcaaagccgcaatgcgcaaaaatggcctgcattctgtctgcgaggaagcctcctgccctaacctggcggaatgcttcaaccacggcacagcaacgtttatgatcctcggcgctatttgtacccgccgttgtccgttctgtgatgttgcccacggtcgcccggtagctcctgatgccaatgaaccagtgaaactggcgcagaccattgccgatatggcgctgcgttatgtggttatcacctccgttgaccgtgatgacctgcgcgatggcggtgcccagcactttgcggattgcattactgccattcgggaaaaaagcccgcaaatcaaaattgaaactctggtgccggatttccgcggtcgtatggatcgtgctctggatattctgactgcaacgccaccagatgtgttcaaccataacctggaaaacgtaccgcgtatttaccgtcaggtacggcctggtgcagattacaactggtcgctgaagctgctggaacgctttaaagaagcgcatccggaaatcccgaccaagtctggtctgatggtgggactgggtgaaaccaatgaagaaattattgaggtaatgcgcgacctgcgccgtcatggtgtgacgatgttaacgctggggcaatatttgcagccaagccgccatcacctgccggttcaacgttacgttagcccggatgagttcgacgaaatgaaagccgaagcgctggcgatgggctttacccatgctgcatgcggtccgtttgtccgctcttcttaccacgccgatttgcaggcgaaagggatggaagttaagtaa

SEQ ID NO: 5987 - DNA, 612 bp, Escherichia coli
  CDS (1)...(612)
atgcgactgtggttaattcgtcatggtgaaacgcaagcgaatatcgatggtctttacagcggtcatgcgcccacccccctgaccgcgcgcggtattgagcaagcgcaaaatctgcatacgctgctacatggtgtttcctttgatctggttttatgcagtgaactggaacgggcacagcataccgcgcgactggttctcagtgaccgccagctccccgtgcaaatcatacctgaactcaacgaaatgttttttggcgactgggagatgcgacatcatcgcgacctcatgcaagaagatgccgaaaactatagcgcgtggtgcaatgactggcagcatgcaatccccacgaacggtgaaggatttcaggcattttcgcaacgtgtggaacgctttatcgcaaggcttagtgaatttcagcactatcagaatattttagtcgtcagccatcagggtgtactgagtctgttaatcgcccgtttaattggcatgcctgccgaagctatgtggcattttcgcgttgaccaggggtgttggagcgccattgatatcaaccaaaaattcgcgacgctacgcgtcctcaatagccgtgccatcggggtcgagaatgcatga

SEQ ID NO: 5988 - DNA, 2583 bp, Escherichia coli
  CDS (1)...(2583)
atgcaagagcaataccgcccggaagagatagaatccaaagtacagcttcattgggatgagaagcgcacatttgaagtaaccgaagacgagagcaaagagaagtattactgcctgtctatgcttccctatccttctggtcgactacacatgggccacgtacgtaactacaccatcggtgacgtgatcgcccgctaccagcgtatgctgggcaaaaacgtcctgcagccgatcggctgggacgcgtttggtctgcctgcggaaggcgcggcggtgaaaaacaacaccgctccggcaccgtggacgtacgacaacatcgcgtatatgaaaaaccagctcaaaatgctgggctttggttatgactggagccgcgagctggcaacctgtacgccggaatactaccgttgggaacagaaattcttcaccgagctgtataaaaaaggcctggtatataagaagacttctgcggtcaactggtgcccgaacgaccagaccgtactggcgaacgaacaagttatcgacggctgctgctggcgctgcgataccaaagttgaacgtaaagagatcccgcagtggtttatcaaaatcactgcttacgctgacgagctgctcaacgatctggataaactggatcactggccagacaccgttaaaaccatgcagcgtaactggatcggtcgttccgaaggcgtggagatcaccttcaacgttaacgactatgacaacacgctgaccgtttacactacccgcccggacacctttatgggttgtacctacctggcggtagctgcgggtcatccgctggcgcagaaagcggcggaaaataatcctgaactggcggcctttattgacgaatgccgtaacaccaaagttgccgaagctgaaatggcgacgatggagaaaaaaggcgtcgatactggctttaaagcggttcacccattaacgggcgaagaaattcccgtttgggcagcaaacttcgtattgatggagtacggcacgggcgcagttatggcggtaccggggcacgaccagcgcgactacgagtttgcctctaaatacggcctgaacatcaaaccggttatcctggcagctgacggctctgagccagatctttctcagcaagccctgactgaaaaaggcgtgctgttcaactctggcgagttcaacggtcttgaccatgaagcggccttcaacgccatcgccgataaactgactgcgatgggcgttggcgagcgtaaagtgaactaccgcctgcgcgactggggtgtttcccgtcagcgttactggggcgcgccgattccgatggtgacgctggaagacggtaccgtaatgccgaccccggacgaccagctgccggtgatcctgccggaagatgtggtaatggacggcattaccagcccgattaaagcagatccggagtgggcgaaaactaccgttaacggtatgccagcactgcgtgaaaccgacactttcgacacctttatggagtcctcctggtactatgcgcgctacacttgcccgcagtacaaagaaggtatgctggattccgaagcggctaactactggctgccggtggatatctacattggtggtattgaacacgccattatgcacctgctctacttccgcttcttccacaaactgatgcgtgatgcaggcatggtgaactctgacgaaccagcgaaacagttgctgtgtcagggtatggtgctggcagatgccttctactatgttggcgaaaacggcgaacgtaactgggtttccccggttgatgctatcgttgaacgtgacgagaaaggccgtatcgtgaaagcgaaagatgcggcaggccatgaactggtttataccggcatgagcaaaatgtccaagtcgaagaacaacggtatcgacccgcaggtgatggttgaacgttacggcgcggacaccgttcgtctgtttatgatgtttgcttctccggctgatatgactctcgaatggcaggaatccggtgtggaaggggctaaccgcttcctgaaacgtgtctggaaactggtttacgagcacacagcaaaaggtgatgttgcggcactgaacgttgatgcgctgactgaaaatcagaaagcgctgcgtcgcgatgtgcataaaacgatcgctaaagtgaccgatgatatcggccgtcgtcagaccttcaacaccgcaattgcggcgattatggagctgatgaacaaactggcgaaagcaccaaccgatggcgagcaggatcgcgctctgatgcaggaagcactgctggccgttgtccgtatgcttaacccgttcaccccgcacatctgcttcacgctgtggcaggaactgaaaggcgaaggcgatatcgacaacgcgccgtggccggttgctgacgaaaaagcgatggtggaagactccacgctggtcgtggtgcaggttaacggtaaagtccgtgccaaaatcaccgttccggtggacgcaacggaagaacaggttcgcgaacgtgctggccaggaacatctggtagcaaaatatcttgatggcgttactgtacgtaaagtgatttacgtaccaggtaaactcctcaatctggtcgttggctaa

SEQ ID NO: 5989 - DNA, 741 bp, Escherichia coli
  CDS (1)...(741)
atgtctatagactggaactggggtatttttttacaacaagccccgttcggcaacaccacctatcttggttggatctggagtggttttcaggtgacgatcgctttgtcgatctgcgcctggattatcgctttcctcgtcggttcatttttcggcattttacgtaccgttccaaaccgttttctctctggtctgggtacgttgtatgtcgaactgttccgcaacgtgccgttgattgtgcaattctttacctggtatctggtgatcccggagctgctgccggagaaaatcggcatgtggtttaaggccgagctggatcccaatattcagtttttcctttcatccatgctctgcctggggctgtttaccgccgcccgtgtttgcgaacaggtacgcgccgcgattcagtcgctgccgcgagggcaaaaaaatgccgcgctggcgatgggcctgacgctaccgcaggcttatcgatacgtactgctgcctaatgcttatcgcgttatcgtcccgccgatgacctcagagatgatgaacctggtgaaaaactccgccatcgcctcgactatcggtctggtggatatggcggcgcaggcgggtaaattgctcgattactcagcccatgcctgggagtcgtttaccgccattacgctggcgtatgtgttgattaacgcttttatcatgctggtgatgacgctggttgaacgtaaagttcgcctgcctggcaacatggggggcaaataa

SEQ ID NO: 5990 - DNA, 1539 bp, Escherichia coli
  CDS (1)...(1539)
atggcttttgcctcattaattgaacgccagcgcattcgcctgctgctggcgttattattcggtgcctgcggaacgctggccttctctccttacgacgtctggcctgcggcgattatttcgctgatggggcttcaggcgttgacctttaaccgccgtccactccagtctgccgctattggcttttgctggggatttggcctctttggcagcggtattaactgggtctatgtcagcatcgcgacctttggcggaatgcctggcccggttaacatcttcctggtggtgctgctggcggcgtatttgtcgctgtataccggactgtttgctggcgtgctgtcgcgtctgtggccgaaaaccacctggctgcgcgtagcgattgccgcccctgccctctggcaagtgaccgagtttctgcgcggttgggtactgaccggcttcccgtggttacagttcggctatagccagattgatggcccgttaaaagggctggcaccgataatgggcgtggaagccattaacttcctgctgatgatggttagtggcctgctggcactggcgttggtcaaacgcaactggcgtccgctggtggtggccgtcgtgctgtttgcccttcccttcccgctgcgttacatccagtggtttaccccacaaccggagaaaaccattcaggtttcgatggttcagggcgatattccgcaatcgctgaaatgggacgaaggccagcttcttaatacgctgaagatttactacaacgcaacggcaccgctgatgggcaaatcatcgttgattatctggccggagtcggcgataaccgatctggaaattaatcagcaaccgttcctcaaagcactggacggtgagttgcgtgataaaggtagctcgctggtaaccgggattgtcgacgcgcgtctcaataagcagaaccgctacgatacctacaacaccatcatcacgctgggtaaaggtgcgccgtacagctacgaatcagccgatcgctataacaaaaaccatctggtgccgtttggcgagtttgtcccgctggagtcgattctgcgtccgttagcaccgttctttgatctgccgatgtcgtcgttcagccgtgggccatatatccagccgccgctgtcggcaaatggtattgagcttactgcggctatttgctacgagatcattctcggcgagcaagtgcgcgataacttccgcccggataccgactatctgctgactatctccaacgatgcgtggtttggtaaatctattggtccatggcaacacttccagatggcgcgaatgcgtgcgctggagctggcgcgcccactgttgcgcagcaccaacaacggcattacggcggtgattggcccgcagggtgagattcaggcgatgatcccgcagttcacccgcgaggtgttaaccactaacgtgacgccgaccaccggactcacaccatacgcacgtaccggcaactggccgctgtgggtgctgacggcattgtttggttttgctgctgtgttgatgagtctgcgtcagcgacgtaaataa

SEQ ID NO: 5991 - DNA, 1149 bp, Escherichia coli
  CDS (1)...(1149)
atgtatgcattaacccagggccggatctttaccggccacgaatttcttgatgaccacgcggttgttatcgctgatggcctgattaaaagcgtctgtccggtagcggaactgccgccagagatcgaacaacgttcactgaacggggccattctctcccccggttttatcgatgtgcagttaaacggctgcggcggcgtacagtttaacgacaccgctgaagcggtcagcgtggaaacgctggaaatcatgcagaaagccaatgagaaatcaggctgtactaactatctgccgacgcttatcaccaccagcgatgagctgatgaaacagggcgtgcgcgttatgcgcgagtacctggcaaaacatccgaatcaggcgttaggtctgcatctggaaggtccgtggctgaatctggtaaaaaaaggcacccataatccgaattttgtgcgtaagcctgatgccgcgctggtcgatttcctgtgtgaaaacgccgacgtcattaccaaagtgaccctggcaccggaaatggttcctgcggaagtcatcagcaaactggcaaatgccgggattgtggtttctgccggtcactccaacgcgacgttgaaagaagcaaaagccggtttccgcgcggggattacctttgccacccatctgtacaacgcgatgccgtatattaccggtcgtgaacctggcctggcgggcgcgatcctcgacgaagctgacatttattgcggtattattgctgatggcctgcatgttgattacgccaacattcgcaacgctaaacgtctgaaaggcgacaaactgtgtctggttactgacgccaccgcgccagcaggtgccaacattgaacagttcatttttgcgggtaaaacaatatactaccgtaacggactttgtgtggatgagaacggtacgttaagcggttcatccttaaccatgattgaaggcgtgcgtaatctggtcgaacattgcggtatcgcactggatgaagtgctacgtatggcgacgctctatccggcgcgtgcgattggcgttgagaaacgtctcggcacactcgccgcaggtaaagtagccaacctgactgcattcacacctgattttaaaatcaccaagaccatcgttaacggtaacgaggtcgtaactcaataa

SEQ ID NO: 5992 - DNA, 1947 bp, Escherichia coli
  CDS (1)...(1947)
atgaatattttaggttttttccagcgactcggtagggcgttacagctccctatcgcggtgctgccggtggcggcactgttgctgcgattcggtcagccagatttacttaacgttgcgtttattgcccaggcgggcggtgcgatttttgataacctcgcattaatcttcgccatcggtgtggcatccagctggtcgaaagacagcgctggtgcggcggcgctggcgggtgcggtaggttactttgtgttaaccaaagcgatggtgaccatcaacccagaaattaacatgggtgtactggcgggtatcattaccggtctggttggtggcgcagcctataaccgttggtccgatattaaactgccggacttcctgagcttcttcggcggcaaacgctttgtgccgattgccaccggattcttctgcctggtgctggcggccatttttggttacgtctggccgccggtacagcacgctatccatgcaggcggcgagtggatcgtttctgcgggcgcgctgggttccggtatctttggtttcatcaaccgtctgctgatcccaaccggtctgcatcaggtactgaacaccatcgcctggttccagattggtgaattcaccaacgcggcgggtacggttttccacggtgacattaaccgcttctatgccggtgacggcaccgcggggatgttcatgtccggcttcttcccgatcatgatgttcggtctgccgggtgcggcgctggcgatgtacttcgcagcaccgaaagagcgtcgtccgatggttggcggtatgctgctttctgttgctgttactgcgttcctgaccggtgtgactgagccgctggaattcctgttcatgttccttgctccgctgctgtacctcctgcacgcactgctgaccggtatcagcctgtttgtggcaacgctgctgggtatccacgcgggcttctctttctctgcgggggctatcgactacgcgttgatgtataacctgccggccgccagccagaacgtctggatgctgctggtgatgggcgttatcttcttcgctatctacttcgtggtgttcagtttggttatccgcatgttcaacctgaaaacgccgggtcgtgaagataaagaagacgagatcgttactgaagaagccaacagcaacactgaagaaggtctgactcaactggcaaccaactatattgctgcggttggcggcactgacaacctgaaagcgattgacgcctgtatcacccgtctgcgccttacagtggctgactctgcccgcgttaacgatacgatgtgtaaacgtctgggtgcttctggggtagtgaaactgaacaaacagactattcaggtgattgttggcgcgaaagcagaatccatcggcgatgcgatgaagaaagtcgttgcccgtggtccggtagccgctgcgtcagctgaagcaactccggcaactgccgcgcctgtagcaaaaccgcaggctgtaccaaacgcggtatctatcgcggagctggtatcgccgattaccggtgatgtcgtggcactggatcaggttcctgacgaagcattcgccagcaaagcggtgggtgacggtgtggcggtgaaaccgacagataaaatcgtcgtatcaccagccgcagggacaatcgtgaaaatcttcaacaccaaccacgcgttctgcctggaaaccgaaaaaggcgcggagatcgtcgtccatatgggtatcgacaccgtagcgctggaaggtaaaggctttaaacgtctggtggaagagggtgcgcaggtaagcgcagggcaaccgattctggaaatggatctggattacctgaacgctaacgcccgctcgatgattagcccggtggtttgcagcaatatcgacgatttcagtggcttgatcattaaagctcagggccatattgtggcgggtcaaacaccgctgtatgaaatcaaaaagtaa

SEQ ID NO: 5993 - DNA, 447 bp, Escherichia coli
  CDS (1)...(447)
atgactgataacaataccgccctaaagaaagctggcctgaaagtaacgcttcctcgtttaaaaatcctggaagttcttcaggagccggacaaccatcacgtcagtgcggaagatttatacaaacgtctgatcgatatgggtgaagaaattggtctggctacggtatatcgcgtactgaaccagtttgacgacgctggtatcgtcacccgccacaattttgaaggcggtaaatccgtatttgaactgacacagcaacatcaccacgatcacctgatctgcctcgactgcggcaaggttatcgaatttagtgatgattccatcgaagcgcgtcagcgtgaaattgccgcaaaacatggcattcgcctgactaaccacagtctctatctttacggtcactgtgccgaaggcgattgccgcgaagatgaacatgcgcacgaaggcaaataa

SEQ ID NO: 5994 - DNA, 2685 bp, Escherichia coli
  CDS (1)...(2685)
atgaataacgaacccttacgtcccgaccccgatcgtctgctggaacaaactgccgcgccgcatcgggggaagctgaaagttttcttcggtgcctgtgcaggcgtcgggaagacctgggcgatgctggcagaagcccagcgactgcgggcgcaagggctggatattgtggttggcgtggtagaaacccacgggcgaaaagataccgccgccatgctggaagggctggctgttctgccgttaaaacgccaggcgtaccgtgggcggcatatcagcgagtttgatctcgatgccgccctcgcccgccgcccggcgctgatcttaatggacgaactggcgcacagtaatgcgccaggttcccgtcatcccaaacgctggcaggatatcgaagaactgctggaagctggcattgatgttttcactaccgtcaacgttcagcatctggaaagtctgaatgatgtggtcagcggcgtcaccggaattcaggtacgggaaaccgtgcccgatccttttttcgatgccgccgacgacgtggtgctggtggacttgcccccggacgatctgcgccagcggctgaaagaaggcaaagtctatattgccgggcaggcggagcgcgccattgaacattttttccgcaaaggtaatctgatcgccctgcgcgaactggcactgcgccgtactgccgatcgcgttgatgagcaaatgcgcgcctggcgggggcatcctggcgaagagaaagtgtggcacacgcgcgacgcgatccttttatgcatcggccataacaccggcagcgaaaaactggtccgcgcagcggcgcggctggcgtcacggctgggtagcgtctggcacgcggtgtatgttgaaacccctgccctgcaccgcttaccggaaaaaaaacgtcgggcaattctcagcgccttacgtctggcgcaggaactgggcgcggagacggcaacactttctgatccagcggaagagaaagcggtagtgcgttatgcccgtgaacataatctcggcaagattattctcggtcgcccggcctcgcgccgctggtggcgtcgggaaacgtttgctgaccgactggcgcgcatcgcccccgatctcgatcaggtgctggtcgcgcttgatgaaccacccgcccgcacgattaacaacgcgccggataaccgctcttttaaagacaagtggcgtgtacaaattcagggatgcgtggttgccgccgcgttatgcgccgttatcaccttaattgccatgcagtggctgatggcgtttgatgccgccaacctggtgatgctgtatctgcttggcgtggtggtggtggcgctattttatggacgctggccttcagtggttgccaccgtcattaatgtagtgagtttcgatctcttttttatcgccccacgcggcacgctcgccgtctctgatgtgcaatatctgctgaccttcgcggtgatgttaaccgtcgggctggtgatcgggaaccttactgctggcgtgcgttatcaggcgcgggtagcccgttaccgcgagcaacgcacacggcacttatatgaaatgtcgaaagctctggcggtgggccgcagtccgcaggatatcgctgccaccagcgaacaatttattgcctccacgtttcatgcccgcagtcaggtgttgttgcccgatgacaacggtaaattgcagccgttaacacatccgcaaggaatgacgccgtgggacgatgccatcgcgcagtggagttttgataaaggcctgcctgcgggcgcgggcaccgacacgttacccggtgtaccgtaccagattttgccgctaaaaagcggcgagaaaacctacgggctggtggtggtggagccggggaatctgcgccagttgatgatcccggaacagcagcgcctgctggagacgtttacgctgttagtcgccaatgcccttgagcggctgacgctaaccgccagcgaagaacaggcgcggatggcaagcgaacgtgaacagatccgcaacgccctgctggcggcgctttcgcatgatttacgcacgccgcttacggtgctgtttggtcaggcagaaatcttaacgctcgatctggcaagcgaaggatcaccccacgcccgccaggccagcgagatccgtcagcatgtgctgaacactacccgactggtgaataatctactggatatggcgcgaattcagtccggcggctttaatttgaagaaagagtggttaacgctggaagaagtagtcggcagcgcgctgcaaatgctggaaccgggtttatcgtcgcccatcaatctttctctgccagaaccgctgaccttaatccacgttgacgggccactctttgaacgggtgctgattaatctgctggagaacgcggtgaaatatgcgggtgcgcaggccgaaattggtatcgatgcccacgttgagggcgaaaatctacaactggatgtctgggataacggccccggtcttccgccaggccaggagcagacgatatttgataagtttgctcgcgggaataaagagtcggcagtaccgggggtagggcttggactggcaatttgtcgggcgatagtggatgtacacgggggcactattaccgcgttcaaccgaccggaaggtggtgcctgttttcgtgttacacttccccagcaaactgcccctgaacttgaagaatttcatgaggatatgtga

SEQ ID NO: 5995 - DNA, 573 bp, Escherichia coli
  CDS (1)...(573)
atgagtggattacgtccggcattatcaacatttatctttctgttattgattactggcggcgtttacccgctgctgaccaccgtactggggcaatggtggtttccctggcaggccaatggttcgttgattcgtgaaggtgatacggtgcgcggttcggcattaatcgggcagaattttaccggcaacggctattttcatggtcgcccgtcggcaacggcagaaatgccctataatccacaggcttctggcgggagcaatctggcggtcagtaaccctgagctggataaactaatagccgcacgcgttgctgcattacgggccgctaacccggatgccagcgcgagcgttccggttgaactggtgacggcatcggcaagcgggctggacaataatatcaccccgcaagcggcggcctggcaaatcccacgcgtggcgaaagcgcgtaatctcagcgttgaacagctcacgcaactgatcgcaaaatacagccaacaaccgctggtgaaatatatcggccagccggttgtcaacattgttgaactcaatctggcgctggataaacttgatgaataa

SEQ ID NO: 5996 - DNA, 2049 bp, Escherichia coli
  CDS (1)...(2049)
atgagtcgtaaacaactggcgctattcgaaccaacacttgtcgttcaggcgctgaaagaagcggtgaaaaaattaaacccgcaggcgcaatggcgcaatccggtgatgtttatcgtctggatcggcagtctgctgaccacctgtattagcatcgcgatggcaagcggtgcgatgcccggcaatgcgctgtttagcgcggccattagcggttggctgtggatcaccgtactgttcgctaatttcgccgaggcgctggcagaaggccgcagtaaagcgcaggccaacagtctgaaaggggtgaaaaaaactgcctttgcccgcaagctgcgtgagccgaaatatggcgctgcggcggacaaagttcctgccgaccaacttcgtaaaggcgatatcgtactggtagaagctggcgatattatcccctgcgatggtgaagttattgaagggggtgcatcggtcgatgaaagcgccatcaccggggaatcggcaccggtgatccgtgaatccggcggcgattttgcctccgtcaccggcggcacgcgtattctttctgactggctggtgattgagtgtagcgttaaccccggcgagacatttctggatcggatgatcgcgatggtggaaggcgcacagcgacgcaaaacgccgaacgaaattgccctgaccattctgctgattgccctgactatcgtctttttactggcaaccgccacgctgtggccgttttccgcgtggggcggtaatgcagtcagcgtaacggtactggtggcgctgctggtctgtctgatcccaaccactattggcggcctgttgtcagcgatcggcgtcgccgggatgagccggatgctaggcgcgaatgtgattgccaccagcggacgtgcagttgaagcggcaggtgacgttgacgttctgctactggataaaaccggcaccatcacactcggtaaccgtcaggcgtcggagtttatccccgcgcagggcgtggatgaaaaaacgctggctgacgccgcacaactggcttcgctggctgatgaaacgccggaaggccgcagtattgtgatcctcgccaagcagcgttttaacctgcgcgagcgcgatgtgcagtcgctccatgccacctttgtaccgtttactgcgcaaagccggatgagcgggatcaacatcgacaaccgcatgatccgtaaaggttctgtcgatgccattcgtcgccatgttgaggctaacggtggtcacttccctaccgatgttgatcaaaaagtcgatcaggttgcgcgtcagggagccacgccgctggtggtggtggaaggttctcgtgtgctgggcgttattgcgctgaaagatatcgtcaaaggcggtattaaagagcgcttcgcccagctgcgcaaaatgggcattaaaacggtgatgattaccggcgataaccgtctgactgccgccgcgattgctgcggaagcgggtgtcgatgattttctcgccgaagcgacaccggaggccaagctggcattgatccgtcagtatcaggcggaaggtcgtttggtagcgatgaccggcgacggcaccaacgatgctccggcgctggcgcaggcagatgtcgcggtggcgatgaactccggcacccaggcggcgaaagaggcgggcaatatggtcgatctcgactctaacccgaccaagttgatcgaggtggtgcacattggcaaacagatgctgatgacccgtggctcgctgaccaccttcagcattgccaacgatgtggcgaaatacttcgccattattccggcggcattcgcggcaacgtatccgcagttaaatgcgctgaacatcatgtgcctgcattcgcccgactccgcaatcctcagtgcggtgattttcaacgccttgattatcgtctttttgattcccctggcgttaaaaggcgtgagttataaaccgcttaccgcttctgccatgttgcgccgtaacttatggatttacggtctgggtgggctgctggtgccgtttatcggtatcaaagtcattgatttactgctgaccgtttgcggtctggtgtga

SEQ ID NO: 5997 - DNA, 735 bp, Escherichia coli
  CDS (1)...(735)
atgaaaattgacctgaacgccgatctgggcgaaggctgcgccagcgacgcagagctattaacgctggtttcctctgccaatattgcctgtggatttcatgcaggcgatgcgcaaatcatgcaggcttgcgtgcgtgaagcaataaaaaatggtgtcgcgattggcgctcacccgagttttcccgacagggaaaattttggtcgcagcgccatgcagctgccgccagaaaccgtttacgcccagacgctgtatcaaattggcgcgctggcaacgattgcccgtgcgcaaggcggcgtaatgcgtcatgtcaaaccgcacggcatgttgtacaaccaggcggcgaaagaagcacaactggcagacgccatcgccagagcggtatacgcttgcgatccagcattgattctcgtcgggctggcgggaagcgagctgattcgtgcaggcaagcaatatggtctgacaacgcgcgaggaagtgtttgccgatcgcggttatcaggctgacggctcgctggtgccgcgaagccagtcaggcgcgttgattgaaaacgaagaacaggcgctggcgcaaacgctggagatggtgcaacacggcagagtcaaaagtatcaccggcgaatgggcaacggtcgcggcgcaaacggtctgcctgcatggcgacggcgagcacgcactggcgttcgcccgccgactacgctctgcatttgccgaaaaggggattgttgtcgcagcataa

SEQ ID NO: 5998 - DNA, 2802 bp, Escherichia coli
  CDS (1)...(2802)
atgcagaacagcgctttgaaagcctggttggactcttcttacctctctggcgcaaaccagagctggatagaacagctctatgaagacttcttaaccgatcctgactcggttgacgctaactggcgttcgacgttccagcagttacctggtacgggagtcaaaccggatcaattccactctcaaacgcgtgaatatttccgccgcctggcgaaagacgcttcacgttactcttcaacgatctccgaccctgacaccaatgtgaagcaggttaaagtcctgcagctcattaacgcataccgcttccgtggtcaccagcatgcgaatctcgatccgctgggactgtggcagcaagataaagtggccgatctggatccgtctttccacgatctgaccgaagcagacttccaggagaccttcaacgtcggttcatttgccagcggcaaagaaaccatgaaactcggcgagctgctggaagccctcaagcaaacctactgcggcccgattggtgccgagtatatgcacattaccagcaccgaagaaaaacgctggatccaacagcgtatcgagtctggtcgcgcgactttcaatagcgaagagaaaaaacgcttcttaagcgaactgaccgccgctgaaggtcttgaacgttacctcggcgcaaaattccctggcgcaaaacgcttctcgctggaaggcggtgacgcgttaatcccgatgcttaaagagatgatccgccacgctggcaacagcggcacccgcgaagtggttctcgggatggcgcaccgtggtcgtctgaacgtgctggtgaacgtgctgggtaaaaaaccgcaagacttgttcgacgagttcgccggtaaacataaagaacacctcggcacgggtgacgtgaaataccacatgggcttctcgtctgacttccagaccgatggcggcctggtgcacctggcgctggcgtttaacccgtctcaccttgagattgtaagcccggtagttatcggttctgttcgtgcccgtctggacagacttgatgagccgagcagcaacaaagtgctgccaatcaccatccacggtgacgccgcagtgaccgggcagggcgtggttcaggaaaccctgaacatgtcgaaagcgcgtggttatgaagttggcggtacggtacgtatcgttatcaacaaccaggttggtttcaccacctctaatccgctggatgcccgttctacgccgtactgtactgatatcggtaagatggttcaggccccgattttccacgttaacgcggacgatccggaagccgttgcctttgtgacccgtctggcgctcgatttccgtaacacctttaaacgtgatgtcttcatcgacctggtgtgctaccgccgtcacggccacaacgaagccgacgagccgagcgcaacccagccgctgatgtatcagaaaatcaaaaaacatccgacaccgcgcaaaatctacgctgacaagctggagcaggaaaaagtggcgacgctggaagatgccaccgagatggttaacctgtaccgcgatgcgctggatgctggcgattgcgtagtggcagagtggcgtccgatgaacatgcactctttcacctggtcgccgtacctcaaccacgaatgggacgaagagtacccgaacaaagttgagatgaagcgcctgcaggagctggcgaaacgcatcagcacggtgccggaagcagttgaaatgcagtctcgcgttgccaagatttatggcgatcgccaggcgatggctgccggtgagaaactgttcgactggggcggtgcggaaaacctcgcttacgccacgctggttgatgaaggcattccggttcgcctgtcgggtgaagactccggtcgcggtaccttcttccaccgccacgcggtgatccacaaccagtctaacggttccacttacacgccgctgcaacatatccataacgggcagggcgcgttccgtgtctgggactccgtactgtctgaagaagcagtgctggcgtttgaatatggttatgccaccgcagaaccacgcactctgaccatctgggaagcgcagttcggtgacttcgccaacggtgcgcaggtggttatcgaccagttcatctcctctggcgaacagaaatggggccggatgtgtggtctggtgatgttgctgccgcacggttacgaagggcaggggccggagcactcctccgcgcgtctggaacgttatctgcaactttgtgctgagcaaaacatgcaggtttgcgtaccgtctaccccggcacaggtttaccacatgctgcgtcgtcaggcgctgcgcgggatgcgtcgtccgctggtcgtgatgtcgccgaaatccctgctgcgtcatccgctggcggtttccagcctcgaagaactggcgaacggcaccttcctgccagccatcggtgaaatcgacgagcttgatccgaagggcgtgaagcgcgtagtgatgtgttctggtaaggtttattacgacctgctggaacagcgtcgtaagaacaatcaacacgatgtcgccattgtgcgtatcgagcaactctacccgttcccgcataaagcgatgcaggaagtgttgcagcagtttgctcacgtcaaggattttgtctggtgccaggaagagccgctcaaccagggcgcatggtactgcagccagcatcatttccgtgaagtgattccgtttggggcttctctgcgttatgcaggccgcccggcctccgcctctccggcggtagggtatatgtccgttcaccagaaacagcaacaagatctggttaatgacgcgctgaacgtcgaataa

SEQ ID NO: 5999 - DNA, 1218 bp, Escherichia coli
  CDS (1)...(1218)
atgagtagcgtagatattctggtccctgacctgcctgaatccgtagccgatgccaccgtcgcaacctggcataaaaaacccggcgacgcagtcgtacgtgatgaagtgctggtagaaatcgaaactgacaaagtggtactggaagtaccggcatcagcagacggcattctggatgcggttctggaagatgaaggtacaacggtaacgtctcgtcagatccttggtcgcctgcgtgaaggcaacagcgccggtaaagaaaccagcgccaaatctgaagagaaagcgtccactccggcgcaacgccagcaggcgtctctggaagagcaaaacaacgatgcgttaagcccggcgatccgtcgcctgctggctgaacacaatctcgacgccagcgccattaaaggcaccggtgtgggtggtcgtctgactcgtgaagatgtggaaaaacatctggcgaaagccccggcgaaagagtctgctccggcagcggctgctccggcggcgcaaccggctctggctgcacgtagtgaaaaacgtgtcccgatgactcgcctgcgtaagcgtgtggcagagcgtctgctggaagcgaaaaactccaccgccatgctgaccacgttcaacgaagtcaacatgaagccgattatggatctgcgtaagcagtacggtgaagcgtttgaaaaacgccacggcatccgtctgggctttatgtccttctacgtgaaagcggtggttgaagccctgaaacgttacccggaagtgaacgcttctatcgacggcgatgacgtggtttaccacaactatttcgacgtcagcatggcggtttctacgccgcgcggcctggtgacgccggttctgcgtgatgtcgataccctcggcatggcagacatcgagaagaaaatcaaagagctggcagtcaaaggccgtgacggcaagctgaccgttgaagatctgaccggtggtaacttcaccatcaccaacggtggtgtgttcggttccctgatgtctacgccgatcatcaacccgccgcagagcgcaattctgggtatgcacgctatcaaagatcgtccgatggcggtgaatggtcaggttgagatcctgccgatgatgtacctggcgctgtcctacgatcaccgtctgatcgatggtcgcgaatccgtgggcttcctggtaacgatcaaagagttgctggaagatccgacgcgtctgctgctggacgtgtag

SEQ ID NO: 6000 - DNA, 870 bp, Escherichia coli
  CDS (1)...(870)
atgtccattttaatcgataaaaacaccaaggttatctgccagggctttaccggtagccaggggactttccactcagaacaggccattgcatacggcactaaaatggttggcggcgtaaccccaggtaaaggcggcaccacccacctcggcctgccggtgttcaacaccgtgcgtgaagccgttgctgccactggcgctaccgcttctgttatctacgtaccagcaccgttctgcaaagactccattctggaagccatcgacgcaggcatcaaactgattatcaccatcactgaaggcatcccgacgctggatatgctgaccgtgaaagtgaagctggatgaagcaggcgttcgtatgatcggcccgaactgcccaggcgttatcactccgggtgaatgcaaaatcggtatccagcctggtcacattcacaaaccgggtaaagtgggtatcgtttcccgttccggtacactgacctatgaagcggttaaacagaccacggattacggtttcggtcagtcgacctgtgtcggtatcggcggtgacccgatcccgggctctaactttatcgacattctcgaaatgttcgaaaaagatccgcagaccgaagcgatcgtgatgatcggtgagatcggcggtagcgctgaagaagaagcagctgcgtacatcaaagagcacgttaccaagccagttgtgggttacatcgctggtgtgactgcgccgaaaggcaaacgtatgggccacgcgggtgccatcattgccggtgggaaagggactgcggatgagaaattcgctgctctggaagccgcaggcgtgaaaaccgttcgcagcctggcggatatcggtgaagcactgaaaactgttctgaaataa

SEQ ID NO: 6001 - DNA, 1290 bp, Escherichia coli
  CDS (1)...(1290)
atgacaacggacgatcttgcctttgaccaacgccatatctggcacccatacacatccatgacctcccctctgccggtttatccggtggtgagcgccgaaggttgcgagctgattttgtctgacggcagacgcctggttgacggtatgtcgtcctggtgggcggcgatccacggctacaatcacccgcagcttaatgcggcgatgaagtcgcaaattgatgccatgtcgcatgtgatgtttggcggtatcacccatgcgccagccattgagctgtgccgcaaactggtggcgatgacgccgcaaccgctggagtgcgtttttctcgcggactccggttccgtagcggtggaagtggcgatgaaaatggcgttgcagtactggcaagccaaaggcgaagcgcgccagcgttttctgaccttccgcaatggttatcatggcgatacctttggcgcgatgtcggtgtgcgatccggataactcaatgcacagtctgtggaaaggctacctgccagaaaacctgtttgctcccgccccgcaaagccgcatggatggcgaatgggatgagcgcgatatggtgggctttgcccgcctgatggcggcgcatcgtcatgaaatcgcggcggtgatcattgagccgattgtccagggcgcaggcgggatgcgcatgtaccatccggaatggttaaaacgaatccgcaaaatatgcgatcgcgaaggtatcttgctgattgccgacgagatcgccactggatttggtcgtaccgggaaactgtttgcctgtgaacatgcagaaatcgcgccggacattttgtgcctcggtaaagccttaaccggcggcacaatgaccctttccgccacactcaccacgcgcgaggttgcagaaaccatcagtaacggtgaagccggttgctttatgcatgggccaacttttatgggcaatccgctggcctgcgcggcagcaaacgccagcctggcgattctcgaatctggcgactggcagcaacaggtggcggatattgaagtacagctgcgcgagcaacttgcccccgcccgtgatgccgaaatggttgccgatgtgcgcgtactgggggccattggcgtggtcgaaaccactcatccggtgaatatggcggcgctgcaaaaattctttgtcgaacagggtgtctggatccggccttttggcaaactgatttacctgatgccgccctatattattctcccgcaacagttgcagcgtctgaccgcagcggttaaccgcgcggtacaggatgaaacatttttttgccaataa

SEQ ID NO: 6002 - DNA, 1041 bp, Escherichia coli
  CDS (1)...(1041)
atggctcaccgcccacgctggacattgtcgcaagtcacagaattatttgaaaaaccgttgctggatctgctgtttgaagcgcagcaggtgcatcgccagcatttcgatcctcgtcaggtgcaggtcagcacgttgctgtcgattaagaccggagcttgtccggaagattgcaaatactgcccgcaaagctcgcgctacaaaaccgggctggaagccgagcggttgatggaagttgaacaggtgctggagtcggcgcgcaaagcgaaagcggcaggatcgacgcgcttctgtatgggcgcggcgtggaagaatccccacgaacgcgatatgccgtacctggaacaaatggtgcagggggtaaaagcgatggggctggaggcgtgtatgacgctgggcacgttgagtgaatctcaggcgcagcgcctcgcgaacgccgggctggattactacaaccacaacctggacacctcgccggagttttacggcaatatcatcaccacacgcacttatcaggaacgcctcgatacgctggaaaaagtgcgcgatgccgggatcaaagtctgttctggcggcattgtgggcttaggcgaaacggtaaaagatcgcgccggattattgctgcaactggcaaacctgccgacgccgccggaaagcgtgccaatcaacatgctggtgaaggtgaaaggcacgccgcttgccgataacgatgatgtcgatgcctttgattttattcgcaccattgcggtcgcgcggatcatgatgccaacctcttacgtgcgcctttctgccggacgcgagcagatgaacgaacagactcaggcgatgtgctttatggcaggcgcaaactcgattttctacggttgcaaactgctgaccacgccgaatccggaagaagataaagacctgcaactgttccgcaaactggggctaaatccgcagcaaactgccgtgctggcaggggataacgaacaacagcaacgtcttgaacaggcgctgatgaccccggacaccgacgaatattacaacgcggcagcattatga

SEQ ID NO: 6003 - DNA, 909 bp, Escherichia coli
  CDS (1)...(909)
atgcgcaatcgtacgctggctgatcttgatcgtgtcgttgctctcggcggagggcatggactgggacgcgttctctcatcactttcgtctttgggttctcgtttaacgggtatcgtcaccaccaccgataatggtggctcgacggggcgtattcgccgttcagaaggcggcattgcctggggcgatatgcgcaactgcctcaaccagctgataacggaaccgagcgtcgcctccgcgatgtttgaataccgttttggtggcaatggcgaactttccggtcataatctcggaaacttgatgttaaaggcgctggatcaccttagcgtgcggcctctggaagccatcaatttaattcgtaatctgctgaaagtggatacgcatttgattccaatgtcagagcatcctgttgatctgatggcgattgacgatcaggggcatgaagtttacggcgaggtcaatatcgaccagttaactacgccgattcaagagttattgttaacgcctaatgtacccgcaacgcgtgaggcggttcacgctatcaatgaagcggatctcatcattattgggcctggcagtttttataccagcctgatgccaattctgctgctgaaggaaatcgcccaggcattacgccgcacgccagcgccgatggtttatatcggcaatctggggcgtgagttgagtttacctgcggctaatttgaagctggaaagcaagctggcaattatggagcagtatgttggtaaaaaggtcattgatgcggtcatcgtcgggccaaaagtggatgtctcggcggtgaaagagcggattgtgatccaggaggtactggaggccagcgatattccgtatcgtcatgaccgccagttgttacataacgcgctggaaaaggcgttacaggctttaggttaa

SEQ ID NO: 6004 - DNA, 513 bp, Escherichia coli
  CDS (1)...(513)
atgagtcaggtaagcactgaatttatcccgacccgtattgctattcttacggtttctaatcgtcgcggtgaagaagacgatacctccggtcactatctgcgcgattcggcgcaagaagcgggccatcacgttgtcgataaagccattgtgaaagaaaaccgctacgctattcgcgctcaggtatctgcgtggatcgccagcgacgatgtacaagtggtattgattacgggtggtactggcctgacggaaggtgatcaggctcccgaagcattgctgccgttgttcgaccgtgaagttgaaggttttggtgaagtgttccggatgttgtcgtttgaagagattggcacttccacgttgcaatctcgtgcggtagcgggcgtcgccaacaaaacgctgattttcgccatgccgggttcgaccaaagcgtgccgtaccgcatgggaaaatatcatcgcgccgcagctggatgcccgtacgcgtccgtgtaatttccatccacatttgaagaaataa

SEQ ID NO: 6005 - DNA, 1752 bp, Escherichia coli
  CDS (1)...(1752)
gtgacgaggcaggacatgaatgatgccgttatcacgctgaacggcctggaaaaacgctttccgggcatggacaagcccgccgtcgcgccgctcgattgtaccattcacgccggttatgtgacggggttggtggggccggacggtgcaggtaaaaccacgctgatgcggatgttggcgggattactgaaacccgacagcggcagtgccacggtgattggctttgatccgatcaaaaacgacggcgcgctgcacgccgtgctcggttatatgccgcagaaatttggtctgtatgaagatctcacggtgatggagaacctcaatctgtacgcggatttgcgcagcgtcaccggcgaggcacgtaagcaaacttttgctcgcctgctggagtttacgtctcttgggccgtttaccggacgcctggcgggcaagctctccggtgggatgaaacaaaaactcggtctggcctgtaccctggtgggcgaaccgaaagtgttgctgctcgatgaacccggcgtcggcgttgaccctatctcacggcgcgaactgtggcagatggtgcatgagctggcgggcgaagggatgttaatcctctggagtacctcgtatctcgacgaagccgagcagtgccgtgacgtgttactgatgaacgaaggcgagttgctgtatcagggagaaccaaaagccctgacacaaaccatggccggacgcagctttctgatgaccagtccacacgagggcaaccgcaaactgttgcaacgcgccttgaaactgccgcaggtcagcgacggcatgattcaggggaaatcggtacgtctgatcctcaaaaaagaggccacaccagacgatattcgccatgccgacgggatgccggaaatcaacatcaacgaaactacgccgcgttttgaagatgcgtttattgatttgctgggcggtgccggaacctcggaatcgccgctgggcgcaatattacatacggtagaaggcacacccggcgagacggtgatcgaagcgaaagaactgaccaagaaatttggggattttgccgccaccgatcacgtcaactttgccgttaaacgtggggagatttttggtttgctggggccaaacggcgcgggtaaatcgaccacctttaagatgatgtgcggtttgctggtgccgacttccggccaggcgctggtgctggggatggatctgaaagagagttccggtaaagcgcgccagcatctcggctatatggcgcaaaaattttcgctctacggtaacctgacggtcgaacagaatttacgctttttctctggtgtgtatggcttacgcggtcgggcgcagaacgaaaaaatctcccgcatgagcgaggcgttcggcctgaaaagtatcgcctcccacgccaccgatgaactgccattaggttttaaacagcggctggcgctggcctgttcgctgatgcatgaaccggacattctgtttctcgacgaaccgacttccggcgttgaccccctcacccgccgtgaattttggctgcacatcaacagcatggtagagaaaggcgtcacggtgatggtcaccacccactttatggatgaagcggaatattgcgaccgcatcggcctggtgtaccgcgggaaattaatcgccagcggcacgccggacgatttgaaagcacagtcggctaacgatgagcaacccgatcccaccatggagcaagcctttattcagttgatccacgactgggataaggagcatagcaatgagtaa

SEQ ID NO: 6006 - DNA, 2361 bp, Escherichia coli
  CDS (1)...(2361)
ttgtcagcaacctgcttaatatcccttcctccctttcacccgaaagggaggcacaccagattcctctcatttaaaatcgcccctcctccagcatctatacttatctttttgctctattttctcactggaggagtcatgcggtggatcctgttcatcctcttctgcctgctgggcgcacctgcccacgcggtatccatacccggcgttacaaccacaacgacaacggactcaacgactgaaccggccccggaaccggatatcgaacaaaaaaaagcggcctatggcgcactggcggatgtgctggataatgacacctcgcgtaaagagttgatcgaccagttgcgcaccgttgccgctacgccccctgctgaaccggtaccaaaaatagtgccgccgacgctggtcgaagagcaaaccgtgctgcaaaaggtcaccgaagtcagccgccattatggtgaagccctttccgcccgcttcgggcaactttatcgcaatatcaccggctccccgcataagccgtttaatccacaaaccttcagcaatgcgctgacccatttttcaatgttagcggtattagtgtttggtttttactggctgattcgcctgtgcgcactgccgctgtatcgcaaaatgggtcagtgggcgcggcaaaaaaatcgtgagcgcagcaactggttgcagcttccggcgatgattatcggggcgtttattatcgacctgctgttactggccctgacattatttgtcggccaggtattaagcgacaacctgaatgcaggcagtcgcaccatcgctttccaacaaagtttgtttctcaacgcctttgccctcattgaatttttcaaagccgtactacgcctgattttttgcccaaacgtggcggagctgcgcccgttcacgattcaggacgagagcgcccgttactggagtcgtcgcctgagctggttaagcagtttgataggttatggcctgattgtggccgtgccgattatctctaatcaggtgaatgtacagataggtgcgctggcgaacgtcatcattatgctgtgcatgaccgtctgggcgttgtacctgatctttcgtaataaaaaagagattacccagcatttgctcaacttcgcggagcattcgctggcctttttcagcctgtttatccgcgcctttgcgctggtgtggcactggctggcaagcgcctattttatcgtgctgtttttcttttcgttgttcgatccgggcaacagcctgaaatttatgatgggtgcaacggtgcgcagcctggcgattattggtatcgcagcgtttgtttccggtatgttttcccgctggctggcgaaaaccatcactctctcgccacatactcagcgtaactatccggagctgcaaaaacggttgaatggctggctgtcggcggcgctgaaaacggcgcgtattctgacagtctgcgtggcggtaatgttgctgttgagcgcatggggattgttcgatttctggaactggctgcaaaacggcgcggggcagaaaaccgtagatatcctgatccgtatcgcactcattcttttcttctcggcggttggctggacggtgctcgccagtttgatcgaaaaccggctggcttcggatattcatggccgcccgctacccagcgcccgcacgcgtaccctgcttacgctgtttcgtaacgcgctggcggtgattatcagtaccatcaccatcatgattgtgttgtcggaaatcggcgtcaatatcgcgccattgctggcaggtgccggggcattaggtctggctatctcgtttggttcgcaaacgctggtgaaagatattatcaccggggtatttattcagtttgaaaacggcatgaacactggagatttggtgactatcgggccgttgaccggcacagtggaacggatgtcgattcgctccgtgggcgtacgacaggataccggggcgtatcacatcattccgtggtcttcgataaccacctttgctaactttgtccgcggcattggttcggtggtggcaaattatgatgttgatcgccatgaagatgctgataaagccaatcaggcactgaaagatgcggtagcggaattaatggaaaacgaagaaattcgcgggctgattattggtgaaccgaattttgccgggattgtcggcttaagcaataccgcgtttacactgcgtgtttcgttcaccacgctgccactcaaacagtggacggtacgctttgccctcgacagccaggtgaaaaaacatttcgacctggcgggcgttcgcgcgccagtgcagacttatcaggtgctgcctgctccgggcgcgaccccggctgaaccgttaccgccgggggaaccaacgctttaa

SEQ ID NO: 6007 - DNA, 888 bp, Escherichia coli
  CDS (1)...(888)
atgcctggttcattacgtaaaatgccggtctggttaccaatagtcatattgctcgttgccatggcgtctattcagggtggagcctcgttagctaagtcactttttcctctggtgggcgcaccgggtgtcactgcgctgcgtctggcattaggaacgctgatcctcatcgcgttctttaagccatggcgactgcgctttgccaaagagcaacggttaccgctgttgttttacggcgtttcgctgggtgggatgaattatcttttttatctttctattcagacagtaccgctgggtattgcggtggcgctggagttcaccggaccactggcggtggcgctgttctcttctcgtcgcccggtagatttcgtctgggttgtgctggcggttcttggtctgtggttcctgctaccgctggggcaagacgtttcccatgtcgatttaaccggctgtgcgctggcactgggggccggggcttgttgggctatttacattttaagtgggcaacgcgcaggagcggaacatggccctgcgacggtggcaattggttcgttgattgcagcgttaattttcgtgccaattggagcgcttcaggctggtgaagcactctggcactggtcggttattccattgggtctggctgtcgctattctctcgaccgctctgccttattcgctggaaatgattgccctcacccgtttgccaacacggacatttggtacgctgatgagcatggaaccggcgctggctgccgtttccgggatgattttcctcggagaaacactgacacccatacagctactggcgctcggcgctatcatcgccgcttcaatggggtctacgctgacagtacgcaaagagagcaaaataaaagaattagacattaattaa

SEQ ID NO: 6008 - DNA, 1593 bp, Escherichia coli
  CDS (1)...(1593)
gtgttagtttccagtaacgtcaccatgcagttcggcagtaagccgttgtttgaaaacatttccgtcaaatttggcggcggcaaccgttacggcctgattggcgcgaacggtagtggtaaatccacctttatgaagatcctcggcggcgaccttgagccgacgctgggtaacgtttccctcgatcccaacgagcgcattggtaaactgcgtcaggatcagtttgcctttgaagagttcactgtgctggatacggtgatcatggggcataaagagttgtgggaagtgaagcaggagcgcgaccgcatctatgctttgccggaaatgagtgaagaagacggctataaagtggccgatctggaagttaaatacggcgaaatggacggttactctgcggaagctcgcgccggtgaactgttgcttggcgtgggaattccagtggaacagcactacggcccgatgagtgaagttgctcctggctggaagctgcgtgtgcttctggcgcaggcgctgtttgctgatccggatattctcctgctcgacgaaccgaccaacaacctcgacatcgacaccattcgctggctggaacaggtgctgaacgagcgtgacagcaccatgatcatcatctcgcacgaccgtcacttccttaacatggtctgtacccacatggcggatctggattacggcgagctgcgcgtttatccgggtaactacgatgagtacatgacggcggcgacccaggcgcgtgaacgtctgctggccgataacgccaagaagaaagcgcagattgctgagttgcaatctttcgttagccgctttagcgccaacgcctcgaaatctcgccaggcaacttcgcgcgcgcgccagattgataaaatcaaactggaagaggtgaaagcctccagccgtcagaacccgttcatccgttttgaacaggataagaaactgttccgtaacgcgctggaagtggaaggtctgaccaaagggtttgataacggtccgctgtttaaaaatctcaacctgctgctggaagtgggtgaaaaactggcggtactgggtaccaacggcgtcggtaaatcaacgctgctgaaaacgctggtgggcgatctgcaaccggacagcggcaccgtaaaatggtctgagaacgcgcgcattggttactatgctcaggaccacgaatatgagtttgaaaatgatctgaccgtgttcgaatggatgagccagtggaagcaggaaggcgatgacgagcaggcggtacgcagtattctcggtcgtttgctgttcagccaggacgacatcaaaaagccagctaaagtgctttccggtggggaaaaagggcggatgctgtttggtaagttaatgatgcagaagccgaacattctgatcatggacgaaccgaccaaccacctggatatggaatccattgagtcgctgaacatggcactggaactgtatcagggcacgctgatctttgtttcacacgaccgtgagttcgtaagctccctggcgacccgcattctggaaatcaccccggaacgcgtgatcgactttagcggtaattacgaagattacctgcgtagtaaagggatcgagtaa

SEQ ID NO: 6009 - DNA, 1236 bp, Escherichia coli
  CDS (1)...(1236)
atggaatttaccaccggattgatgtcgctcgacaccgcgcttaatgagatgctttctcgcgtcaccccactgaccgcccaggaaacgctgccactggtacagtgttttggtcgtattctggcgagcgatgtcgtttcgccgcttgatgttccggggtttgataactccgcaatggacggctacgcggtgcgtttagccgatattgcctccgggcaaccgctgcccgttgccggtaaatcctttgccggtcagccataccatggtgaatggcctgcgggtacctgcattcgtattatgaccggtgcgccggtgccggaaggctgcgaagcggtggtgatgcaggagcagactgaacaaatggacaatggcgtgcgttttactgctgaagtgcgtagcgggcaaaatattcgccgtcgcggtgaagatatctctgcaggtgcggttgttttcccggcgggaactcgcctgactaccgcagagctgccagtaattgcttcactggggattgccgaagttccggtgattcgtaaagtgcgtgtagcgcttttttctaccggtgatgaactccagttgcccggtcagccgctgggcgacggccaaatctacgataccaaccgtctcgccgtacacctgatgttagaacagttgggatgcgaggtaattaacttagggattatccgcgacgatccccatgccctgcgcgccgcatttattgaagccgacagccaggcggatgtggtgatcagttccggcggtgtttcagtgggtgaggcggattacaccaaaacgattcttgaagagctgggggagatcgccttctggaagctggcgattaaaccaggtaaaccgttcgcgttcggtaaactcagcaatagctggttctgcggcctgccgggcaacccggtttcagcgacgctgaccttctatcaactggtacagcctttgctggcaaaactaagcggtaacaccgccagcggcctgcccgcgcgccagcgcgtacgcacagcgtcccgcctgaaaaaaacgccaggacgtcttgatttccagcgcggcgtgctgcaacgcaacgccgatggcgaactggaagtgacgaccaccggacatcagggttcacatatatttagctcctttagcctcggcaactgctttatcgtgctggaacgcgatcgcggcaatgtggaagtgggcgaatgggtggaagtagaaccgtttaacgcgttgttcggaggcctgtaa

SEQ ID NO: 6010 - DNA, 1839 bp, Escherichia coli
  CDS (1)...(1839)
gtgctggcggttgaaaatctgaatattgcctttatgcaggaccagcagaaaatagctgcggtccgcaatctctcttttagtctgcaacgcggtgagacgctggcaattgttggcgaatccggctccggtaagtcagtgactgcgttggcattgatgcgcctgttggaacaggcgggcggtttagtacagtgcgataaaatgctgttgcagcggcgcagtcgcgaagtgattgaacttagcgagcagaacgctgcacaaatgcgccatgttcgcggtgcggatatggcgatgatatttcaggagccgatgacatcgctgaacccggtatttactgtgggtgaacagattgccgaatcaattcgtctgcatcagaacgccagtcgtgaagaagcgatggtcgaggcgaagcggatgctggatcaggtacgcattcctgaggcacaaaccattctttcacgttatccgcatcaactctctggcgggatgcgccagcgagtgatgattgcgatggcgctgtcatgccgcccggcggtgctgattgccgatgagccaaccaccgcgctggatgtcactattcaggcgcagatcctgcaattaatcaaagtattgcaaaaagagatgtcgatgggcgttatctttatcactcacgatatgggcgtggtggcagagattgccgatcgggtactggtgatgtatcagggcgaggcggtggaaacgggtaccgtcgaacagatttttcatgcaccgcaacatccttacacccgtgcgctgttagctgctgttccgcaacttggtgcgatgaaagggttagattatccccgacgtttcccgttgatatcgcttgaacatccagcgaaacaggccccccccatcgagcagaaaacggtggtggatggcgaacctgttttacgagtgcgtaatcttgtcacccgtttccctttgcgcagcggtttgttgaatcgcgtaacgcgggaagtgcatgccgttgagaaagtcagttttgatctctggcctggcgaaacgctatcgctggtgggcgagtctggcagcggtaaatccactaccgggcgggcgttgctgcgcctggtcgaatcgcagggcggcgaaattatctttaacggtcagcgaatcgataccttgtcacccggcaaacttcaggcattacgccgggatattcagtttatttttcaggacccttacgcttcgctggacccacgtcagaccatcggtgattcgattatcgaaccgctgcgtgtacacggtttattgccaggtaaagacgcggctgcacgcgttgcgtggttgctggagcgcgtgggcctgttacctgaacatgcctggcgttacccgcatgagttttccggcggtcagcgccagcgcatctgcattgctcgcgcgttggcattgaatccaaaagtgatcattgccgacgaagccgtttcggcgctggatgtttctattcgcgggcagattatcaacttgttgctcgatctccagcgtgatttcggcattgcgtatctgtttatctcccacgatatggcggtggtagagcggattagtcatcgtgtggcggtgatgtatctcgggcaaattgttgaaattggtccacggcgcgcggtcttcgaaaacccgcagcatccttatacgcgtaaattactggcggcagttccggtcgctgaaccgtcccgacaacgaccgcagcgtgtactgctgtcggacgatcttcccagcaatattcatctgcgtggcgaagaggtggcagccgtctcgttgcaatgcgtcgggccggggcattacgtcgcacaaccacaatcagaatacgcattcatgcgtagataa

SEQ ID NO: 6011 - DNA, 597 bp, Escherichia coli
  CDS (1)...(597)
atgctggaaaatttgaatctctctctattctctcttattaacgcgacgccagactcggctccgtggatgatctcgttggcgatttttattgctaaagatttgattaccgtggtgccgttgctggccgtggtactttggttgtgggggcttacagcacaacggcaactggtgataaaaatcgctatcgcgctggcggtcagcctgtttgtgtcctggacgatgggacatctttttccgcacgaccgaccctttgtcgaaaatatcggctataacttcctgcatcatgcggcggatgactcattcccaagcgatcacggtacggtgattttcacctttgcactggcatttttatgctggcatcgcctgtggtccggctcacttttaatggtgctggccgtcgtcattgcctggtcgcgcgtttatcttggcgtccactggccgctggatatgctcggtggattgctggcaggtatgattggctgccttagtgcccagattatctggcaagcgatggggcataaactctatcaacgtctgcaatcgtggtatcgcgtctgttttgcattaccgatccgcaaaggctgggtgcgtgactga

SEQ ID NO: 6012 - DNA, 1719 bp, Escherichia coli
  CDS (1)...(1719)
atgaaacaaacggttgcagcttatatcgccaaaacactcgaatcggcaggggtgaaacgcatctggggagtcacaggcgactctctgaacggtcttagtgacagtcttaatcgcatgggcaccatcgagtggatgtccacccgccacgaagaagtggcggcctttgccgctggcgctgaagcacaacttagcggagaactggcggtctgcgccggatcgtgcggccccggcaacctgcacttaatcaacggcctgttcgattgccaccgcaatcacgttccggtactggcgattgccgctcatattccctccagcgaaattggcagcggctatttccaggaaacccacccacaagagctattccgcgaatgtagtcactattgcgagctggtttccagcccggagcagatcccacaagtactggcgattgccatgcgcaaagcggtgcttaaccgtggcgtttcggttgtcgtgttaccaggcgacgtggcgttaaaacctgcgccagaaggggcaaccatgcactggtatcatgcgccacaaccagtcgtgacgccggaagaagaagagttacgcaaactggcgcaactgctgcgttattccagcaatatcgccctgatgtgtggcagcggctgcgcgggggcgcataaagagttagttgagtttgccgggaaaattaaagcgcctattgttcatgccctgcgcggtaaagaacatgtcgaatacgataatccgtatgatgttggaatgaccgggttaatcggcttctcgtcaggtttccataccatgatgaacgccgacacgttagtgctactcggcacgcaatttccctaccgcgccttctacccgaccgatgccaaaatcattcagattgatatcaacccagccagcatcggcgctcacagcaaggtggatatggcactggtcggcgatatcaagtcgactctgcgtgcattgcttccattggtggaagaaaaagccgatcgcaagtttctggataaagcgctggaagattaccgcgacgcccgcaaagggctggacgatttagctaaaccgagcgagaaagccattcacccgcaatatctggcgcagcaaattagtcattttgccgccgatgacgctattttcacctgtgacgttggtacgccaacggtgtgggcggcacgttatctaaaaatgaacggcaagcgtcgcctgttaggttcgtttaaccacggttcgatggctaacgccatgccgcaggcgctgggtgcgcaggcgacagagccagaacgtcaggtggtcgccatgtgcggcgatggcggttttagcatgttgatgggcgatttcctctcagtagtgcagatgaaactgccagtgaaaattgtcgtctttaacaacagcgtgctgggctttgtggcgatggagatgaaagctggtggctatttgactgacggcaccgaactacacgacacaaactttgcccgcattgccgaagcgtgcggcattacgggtatccgtgtagaaaaagcgtctgaagttgatgaagccctgcaacgcgccttctccatcgacggtccggtgttggtggatgtggtggtcgccaaagaagagttagccattccaccgcagatcaaactcgaacaggccaaaggtttcagcctgtatatgctgcgcgcaatcatcagcggacgcggtgatgaagtgatcgaactggcgaaaacaaactggctaaggtaa

SEQ ID NO: 6013 - DNA, 2277 bp, Escherichia coli
  CDS (1)...(2277)
atgctcaatcaagaactggaactcagtttaaatatggctttcgccagagcgcgcgagcaccgtcatgagtttatgaccgtcgagcacttgttactggcgctgctcagtaacccatctgcccgggaggcgctggaagcgtgttctgtggatttggttgcgctccgtcaggaactggaagcctttattgaacaaaccacacccgttctgcctgccagtgaagaggagcgcgacacacagccgacgctgagttttcagcgtgtactgcaacgtgcggtcttccatgtccagtcctccggtcgcaatgaggttaccggtgcaaacgttctggtcgctatctttagcgaacaggagtcgcaggcggcatatctgttgcgtaaacatgaagtcagccgtctcgatgtggtgaactttatctctcatggcacgcgtaaagacgagccgacacagtcttctgatcctggcagccagccaaacagcgaagaacaagctggtggggaggaacgtatggagaatttcacgacgaacctgaatcagcttgcgcgcgtgggcggaatcgacccactgattggtcgtgagaaggagctggagcgtgctattcaggttctctgccgtcgccgtaaaaacaacccgctgctggtgggggaatctggtgtcggtaaaaccgcgattgcggaaggtcttgcctggcgaattgttcagggcgatgtgccggaagtgatggctgactgtacgatttactctctcgatatcggttctctgttagcgggcacaaaatatcgcggcgactttgaaaaacgttttaaagcgttgctcaagcagctggagcaggacactaacagcatcctgtttattgatgagatccacaccattatcggtgcgggtgcagcgtctggtggtcaggtcgatgcggctaacctaatcaaaccgttgctctccagcggtaaaattcgtgtaattggttcgacaacctatcaggagttcagcaacattttcgagaaagaccgtgctctggcgcgtcgcttccagaaaattgatattactgaaccgtcgatcgaagaaactgttcaaatcatcaatggcctgaaaccgaagtatgaagcgcaccacgacgtgcgttataccgcaaaagcggtgcgtgcggcggtagagctggcggtgaaatacattaacgatcgtcatctgccggataaagccattgatgttatcgacgaagcgggcgctcgcgcacgcctgatgccggtaagcaaacgcaagaaaaccgttaatgtggcggatattgagtccgtggtggcccgtattgcacgcattccagagaagagtgtttctcagagtgatcgtgataccctgaaaaacctcggcgatcgcttgaaaatgctggtcttcggtcaggataaagccattgaggcgctgactgaagccattaagatggcgcgtgcaggtttaggtcacgaacataaaccggttggttcgttcctgtttgccggccctaccggggtcgggaaaacagaggtgacggtacagctttcgaaagctttgggcattgagcttctgcgctttgatatgtccgagtatatggaacgccataccgtcagccgtcttattggtgcgcctccgggatacgttggttttgatcagggcggtttgctgactgatgcggtcatcaagcatccacatgcggtgctgctgctggacgaaatcgagaaagcgcacccggacgtgttcaatattctgttgcaggtgatggataacggtacgctgaccgataacaacggacgcaaagcagacttccgtaacgtggtgctggtgatgaccaccaacgccggggtacgggaaactgagcgcaaatccattggtcttatccaccaggataacagcaccgatgcgatggaagagatcaagaagatctttacaccggaattccgtaaccgtctcgacaacattatctggtttgatcatctgtcaaccgacgtgatccatcaggtggtggataaattcatcgtcgagttgcaggttcagctggatcagaaaggtgtttctctggaagtgagccaggaagcgcgtaactggctggccgagaaaggttacgaccgggcaatgggcgctcgtccgatggcgcgtgtcatccaggacaacctgaaaaaaccgctcgccaacgaactgctgtttggttcgctggtggacggcggtcaggtcaccgtcgcgctggataaagagaaaaatgagctgacttacggattccagagtgcacaaaagcacaaggcggaagcagcgcattaa

SEQ ID NO: 6014 - DNA, 219 bp, Escherichia coli
  CDS (1)...(219)
atggccaaagaagacaatattgaaatgcaaggtaccgttcttgaaacgttgcctaataccatgttccgcgtagagttagaaaacggtcacgtggttactgcacacatctccggtaaaatgcgcaaaaactacatccgcatcctgacgggcgacaaagtgactgttgaactgaccccgtacgacctgagcaaaggccgcattgtcttccgtagtcgctga

SEQ ID NO: 6015 - DNA, 3990 bp, Escherichia coli
  CDS (1)...(3990)
ttgagccaggaatacattgaagacaaagaagtcacattgacaaagttaagtagcggccgccgccttctggaggcgttgctgatccttattgtcctgtttgccgtctggttgatggctgccttactaagctttaacccttcggaccccagctggtcgcaaacggcctggcatgaacctatccataatttaggtgggatgcccggtgcgtggttggcagatacgctgttctttatttttggcgtgatggcttacaccattcccgtcattattgtcggcggttgttggtttgcctggcgtcatcagtccagcgacgaatacattgattattttgccgtttcgctacgcatcattggcgttttggcgctcatccttacctcctgtggtctggcggcaatcaacgctgacgatatctggtattttgcctccggtggcgtcattggcagcttactaagcactacgctacaaccactgctacacagtagcgggggaactattgcgctgctctgcgtttgggcagcgggcctgacgttgttcaccggttggtcatgggtgaccattgctgaaaaactcggcggctggattttaaacattctcaccttcgccagtaatcgtacccgtcgcgatgatacctgggtcgatgaagatgagtatgaagacgacgaagagtatgaagatgaaaatcacggcaaacagcatgaatcacgccgtgcccgtattcttcgcggcgcgctagcgcgtcgtaaacggttggcggaaaaattcattaatccgatggggcggcaaacagacgctgcgttgttctccggtaagcggatggatgatgacgaagagattacctacactgcacgcggtgtggctgccgacccggacgacgtcctattttcgggcaatcgtgcaacgcagccagaatatgacgaatacgatccattattaaacggtgcgccaattaccgaacctgtcgctgtagcagctgctgctaccacggcgacacaaagctgggctgcgccggttgaacctgtgactcagacgccgcctgttgcctctgttgatgttccacctgcgcaacctacagtagcctggcagcctgtaccgggtccacaaacgggagagccggttattgctcctgcaccggaaggttacccacagcagtcacaatatgcgcagcctgcagtgcaatataatgagccgctgcaacaaccagtacagccgcagcagccgtattatgcacctgcagctgaacaacctgcgcaacagccgtattatgcccctgcgccagaacaaccggtggcaggtaacgcctggcaagccgaagagcagcaatccacttttgctccacagtctacataccagactgagcaaacttatcagcagccagccgctcaggagccgttgtaccaacagccgcaacccgttgaacagcagcctgttgtggagcctgaacccgttgtagaagagacaaaacccgcgcgtccgccgctttactactttgaagaagttgaagagaagcgagcccgtgaacgtgaacaacttgcggcctggtatcaaccgattccagaaccggttaaagaaccagaaccgatcaaatcttcgctgaaagcaccttctgttgcagcagtacctccagtagaagccgctgccgctgtttccccgctggcatctggcgtgaaaaaagcgacactggcgacgggggctgccgcaaccgttgccgcgccagtcttcagtctggcaaatagcggtggaccgcgtcctcaggtcaaagaggggattggtccgcagttgccacgaccgaaacgtatccgcgtgccaactcgtcgtgaactggcgtcttacggtattaagctgccctcacagcgtgcggcggaagaaaaagcccgtgaagcccagcgcaatcagtacgattctggcgatcagtacaacgatgatgaaatcgatgcgatgcagcaggatgaactggcacgtcagttcgcccagacacagcagcaacgctatggcgaacagtatcaacatgatgtgcccgtaaacgcagaagatgcagatgctgcggcagaggctgaactggctcgtcagtttgcgcaaactcaacaacaacgttattccggcgaacaaccggctggggcgaatccgttctcgctggatgattttgaattttcgccaatgaaagcgttgctggatgatggtccacacgaaccgttgtttacgccaattgttgaacctgtacagcagccgcaacaaccggttgcaccgcagcagcaatatcagcagccgcaacaaccagttccgccgcagccgcagtatcagcagccacaacagccggttgcgccgcagccacaatatcagcagccgcaacaaccggttgcgccacagcagcaatatcagcagccgcaacaaccggttgcgccgcagcagcagtatcagcagccacaacagccagttgcgccacaaccgcaggataccctgcttcatccgctgttgatgcgtaatggcgacagccgtccgttgcataaaccgacgacgccgctgccttctctggatttgctgacaccgccgccgagcgaagtggagccggtagatacctttgcgcttgaacaaatggctcgcctggtggaagcgcgtctggctgatttccgtattaaagccgatgtcgtcaattactctccggggccggttatcactcgctttgaattgaacctggcaccgggcgtaaaagcggcgcgcatttctaacttgtcacgggaccttgcccgttcactttcgacggtggcggtgcgtgtcgttgaagttattcctggcaaaccctatgtaggtctggagttaccgaataaaaaacgacaaaccgtttatctgcgcgaagttttggataacgccaaattccgcgataatccgtcgccattaaccgtggtgctgggtaaagatatcgccggtgagccggtggttgccgatctggcgaaaatgccgcacttgttggttgcggggactaccggttccggtaaatctgtcggtgtgaacgcgatgatcctgagcatgctttataaagcacagccagaagatgtgcgtttcatcatgatcgacccgaaaatgctggagctttcggtttatgaaggcattccgcatctgttaacggaagtcgttactgatatgaaagatgccgccaacgcgctgcgctggtgtgttaacgagatggagcgtcggtataaactgatgtctgcgctgggtgtgcgtaatctggcgggttataacgaaaaaattgctgaagccgatcgcatgatgcgtccgattccagacccgtactggaagccgggtgacagtatggatgcccagcatccggtgctgaaaaaagaaccatacattgtggtgttggttgacgaatttgccgacctgatgatgacggtaggtaaaaaagtggaagagctgatagcacgtctggcgcaaaaagcccgtgccgcgggtatccacctcgtactggcaactcagcgtccatcggttgatgttattactggtctgattaaagcgaatattccgacccgtatcgcctttaccgtatccagtaagattgactcacgtaccattcttgatcaggctggcgcggaatcactgctgggtatgggggatatgctctactctgggccgaactccacgttgccggtacgtgtccatggtgcttttgttcgcgatcaggaagttcatgccgtggtgcaggactggaaagcgcgtggtcgcccacagtatgttgatggcatcacctccgacagcgaaagcgaaggtggtgcgggtggtttcgatggcgctgaagaactggatccgttgttcgatcaggcggtgcagtttgtcactgaaaaacgcaaagcgtcaatttctggcgtacagcgtcagttccgcattggttataaccgtgcagcgcgtattatcgaacagatggaagcgcaggggattgtcagcgaacaggggcacaacggtaatcgtgaagtgctggccccaccgccgtttgactaa

SEQ ID NO: 6016 - DNA, 858 bp, Escherichia coli
  CDS (1)...(858)
gtgaaagctgacaacccttttgatcttttacttcctgctgcaatggccaaagtggccgaagaggcgggtgtctataaagcaacgaaacatccgcttaagactttctatctggcgattaccgccggtgttttcatctcaatcgcattcgtcttctatatcacagcaaccactggcacaggcacaatgcccttcggcatggcaaaactggttggcggcatttgcttctctctggggctgattctttgtgttgtctgcggagccgatctctttacttccaccgtgttgattgttgttgctaaggcgagtgggcgcatcacctggggtcagttggcgaaaaactggctaaatgtctattttggcaacctggtcggcgcactgctgtttgtacttttaatgtggctttccggcgagtatatgaccgcaaatggtcaatggggactaaacgtcctacaaaccgccgaccacaaagtgcaccatacttttattgaggccgtctgtcttggtatcctggcaaacctgatggtatgtctggcagtatggatgagttattctggccgcagcctgatggacaaagcgttcattatggtgctgccggtcgcgatgtttgttgccagcggttttgagcacagtatcgcaaacatgtttatgatcccgatgggtattgtaatccgcgacttcgcatccccggaattttggaccgcagtcggttctgcaccggaaaatttttctcacctgaccgtgatgaatttcatcactgataacctgattccggttacgatcggcaacattatcggtggtggtttgttggttgggttgacatactgggtcatttacctgcgtgaaaacgaccaccattaa

SEQ ID NO: 6017 - DNA, 1674 bp, Escherichia coli
  CDS (1)...(1674)
atgactgaatcttttgctcaactctttgaagagtccttaaaagaaatcgaaacccgcccgggttctatcgttcgtggcgttgttgttgctatcgacaaagacgtagtactggttgacgctggtctgaaatctgagtccgccatcccggctgagcagttcaaaaacgcccagggcgagctggaaatccaggtaggtgacgaagttgacgttgctctggacgcagtagaagacggcttcggtgaaactctgctgtcccgtgagaaagctaaacgtcacgaagcctggatcacgctggaaaaagcttacgaagatgctgaaactgttaccggtgttatcaacggcaaagttaagggcggcttcactgttgagctgaacggtattcgtgcgttcctgccaggttctctggtagacgttcgtccggtgcgtgacactctgcacctggaaggcaaagagcttgaatttaaagtaatcaagctggatcagaagcgcaacaacgttgttgtttctcgtcgtgccgttatcgaatccgaaaacagcgcagagcgcgatcagctgctggaaaacctgcaggaaggcatggaagttaaaggtatcgttaagaacctcactgactacggtgcattcgttgatctgggcggcgttgacggcctgctgcacatcactgacatggcctggaaacgcgttaagcatccgagcgaaatcgtcaacgtgggcgacgaaatcactgttaaagtgctgaagttcgaccgcgaacgtacccgtgtatccctgggcctgaaacagctgggcgaagatccgtgggtagctatcgctaaacgttatccggaaggtaccaaactgactggtcgcgtgaccaacctgaccgactacggctgcttcgttgaaatcgaagaaggcgttgaaggcctggtacacgtttccgaaatggactggaccaacaaaaacatccacccgtccaaagttgttaacgttggcgatgtagtggaagttatggttctggatatcgacgaagaacgtcgtcgtatctccctgggtctgaaacagtgcaaagctaacccgtggcagcagttcgcggaaacccacaacaagggcgaccgtgttgaaggtaaaatcaagtctatcactgacttcggtatcttcatcggcttggacggcggcatcgacggcctggttcacctgtctgacatctcctggaacgttgcaggcgaagaagcagttcgtgaatacaaaaaaggcgacgaaatcgctgcagttgttctgcaggttgacgcagaacgtgaacgtatctccctgggcgttaaacagctcgcagaagatccgttcaacaactgggttgctctgaacaagaaaggcgctatcgtaaccggtaaagtaactgcagttgacgctaaaggcgcaaccgtagaactggctgacggcgttgaaggttacctgcgtgcttctgaagcatcccgtgaccgcgttgaagacgctaccctggttctgagcgttggcgacgaagttgaagctaaattcaccggcgttgatcgtaaaaaccgcgcaatcagcctgtctgttcgtgcgaaagacgaagctgacgagaaagatgcaatcgcaactgttaacaaacaggaagatgcaaacttctccaacaacgcaatggctgaagctttcaaagcagctaaaggcgagtaa

SEQ ID NO: 6018 - DNA, 1749 bp, Escherichia coli
  CDS (1)...(1749)
atgcataacgacaaagatctctctacgtggcagacattccgccgactgtggccaaccattgcgcctttcaaagcgggtctgatcgtggcgggcgtagcgttaatcctcaacgcagccagcgataccttcatgttatcgctccttaagccacttcttgatgatggctttggtaaaacagatcgctccgtgctggtgtggatgccgctggtggtgatcgggctgatgattttacgtggtatcaccagctatgtctccagctactgtatctcctgggtatcaggaaaggtggtaatgaccatgcgtcgccgcctgtttggtcacatgatgggaatgccagtttcattctttgacaaacagtcaacgggtacgctgttgtcacgtattacctacgattccgaacaggttgcttcttcttcttccggcgcactgattactgttgtgcgtgaaggtgcgtcgatcatcggcctgttcatcatgatgttctattacagttggcaactgtcgatcattttgattgtgctggcaccgattgtttcgattgcgattcgcgttgtatcgaagcgttttcgcaacatcagtaaaaacatgcagaacaccatggggcaggtgaccaccagcgcagaacaaatgctgaagggccacaaagaagtattgattttcggtggtcaggaagtggaaacgaaacgctttgataaagtcagcaaccgaatgcgtcttcaggggatgaaaatggtttcagcctcttccatctctgatccgatcattcagctgatcgcctctttggcgctggcgtttgttctgtatgcggcgagcttcccaagtgtcatggatagcctgactgccggtacgattaccgttgttttctcttcaatgattgcactgatgcgtccgctgaaatcgctgaccaacgttaacgcccagttccagcgcggtatggcggcttgtcagacgctgtttaccattctggacagtgagcaggagaaagatgaaggtaagcgcgtgatcgagcgtgcgactggcgacgtggaattccgcaatgtcacctttacttatccgggacgtgacgtacctgcattgcgtaacatcaacctgaaaattccggcagggaagacggttgctctggttggacgctctggttcgggtaaatcaaccatcgccagcctgatcacgcgtttttacgatattgatgaaggcgaaatcctgatggatggtcacgatctgcgcgagtataccctggcgtcgttacgtaaccaggttgctctggtgtcgcagaatgtccatctgtttaacgatacggttgctaacaacattgcttacgcacggactgaacagtacagccgtgagcaaattgaagaagcggcgcgtatggcctacgccatggacttcatcaataagatggataacggtctcgatacagtgattggtgaaaacggcgtgctgctctctggcggtcagcgtcagcgtattgctatcgctcgagccttgttgcgtgatagcccgattctgattctggacgaagctacctcggctctggataccgaatccgaacgtgcgattcaggcggcactggatgagttgcagaaaaaccgtacctctctggtgattgcccaccgcttgtctaccattgaaaaggcagacgaaatcgtggtcgtcgaggatggtgtcattgtggaacgcggtacgcataacgatttgcttgagcaccgcggcgtttacgcgcaacttcacaaaatgcagtttggccaatga

SEQ ID NO: 6019 - DNA, 1002 bp, Escherichia coli
  CDS (1)...(1002)
atgttcaggttcctgaccttctgtctctgcgaggtaatgcccatgcgtaacatcattaaactggcgctggcgggattgcttagcgtctctacttttgcggttgctgcagaatcctcgcctgaagcgttacgtataggctatcagaaaggcagtattggtatggtgctggcaaaaagccaccagttactggaaaaacgctatccggaatcaaaaatctcctgggtggagttccccgcgggtccgcaaatgttggaagcgttaaacgttggcagtattgatctcggcagtaccggggatattccgccaatctttgcccaggctgccggggctgatttggtgtacgtgggcgtcgagccaccgaagcccaaagccgaagtgattctggtggcagaaaacagcccgatcaaaaccgtagccgatcttaaaggtcacaaagttgcctttcagaaaggttccagttcacacaaccttttactgcgtgcactgcgtcaggccggacttaagtttaccgatatccaacccacttacctgacgcccgctgatgcccgcgccgcgttccagcaaggtaacgttgacgcctgggctatctgggatccctactactctgctgcattattacagggcggcgtgcgggtgctgaaagacggcaccgatctcaatcaaactggatcgttttatctggcagctcgtccctatgcagaaaaaaacggcgcttttattcagggcgtactggcaacctttagtgaggccgatgcgttaacccgcagccagcgcgagcaaagcatcgctttactggcaaaaacgatgggcttaccggcaccggtgattgcctcttacttagatcatcgccctcctaccaccatcaaaccggttaacgccgaggttgccgccttacagcagcaaacggcagatctgttttatgaaaatcgtctggtgccgaaaaaagtcgatattcgccagcgcatctggcagcccactcaactggaaggaaaacaattatga

SEQ ID NO: 6020 - DNA, 2109 bp, Escherichia coli
  CDS (1)...(2109)
atgaattctctgtttgccagtacggcccgtgggctggaagagctgttaaaaactgaactggaaaacctgggggccgttgaatgccaggtggttcagggtggggtccatttcaagggcgacacacggcttgtttaccagagcctgatgtggagccgcctggcctcgcgtattatgttgccgctgggcgagtgtaaggtttacagcgatttagacctctatctcggtgttcaggcgatcaactggacagagatgtttaatcctggcgcgaccttcgctgtccacttcagtggtttgaatgacaccatccgcaacagtcagtacggcgcgatgaaagtgaaagacgcgatcgtcgatgctttcacgcggaaaaatctgccgcgtccaaatgttgatcgcgatgcgccggatatccgcgttaacgtctggctgcataaagaaaccgccagtatcgctcttgatctgagtggtgatggtttacatctgcgtggctatcgcgatcgtgctggtattgcgccgatcaaagaaaccctggcagccgctattgtgatgcgatccggctggcagccaggaacaccgctgctcgatccgatgtgtggttccggtacgttgctgattgaagcagcgatgctggcgaccgatcgcgcaccaggcttgcaccgtgggcgttggggctttagcggctgggcgcagcatgatgaagctatctggcaggaagtgaaagcggaagcgcaaactcgcgcccgtaaaggcctggctgagtatagctctcatttttacggttcggacagcgacgcacgggtgattcaacgtgcacgcactaacgcccgtcttgcggggattggtgaactgatcacctttgaggtgaaagatgtcgcgcaactgaccaatccgctgccgaaagggccgtacggcacagtgttgagcaacccgccatacggggaacgtctggacagcgaaccggcgctgattgcgctgcatagcctgctgggtcggatcatgaaaaaccagtttggtggctggaatctctctttgtttagtgcctcgccggatctgctaagctgcttgcagctgcgtgcagacaaacagtacaaggcgaaaaacggcccgctggactgcgtacagaaaaattaccacgttgccgaaagcactccagacagcaaaccggcgatggtagcggaagactacaccaaccgcctgcgtaagaacctcaaaaaattcgagaagtgggctcgccaggaagggattgaatgttaccgcctgtatgacgccgatctgccagaatataacgttgccgttgaccgttatgccgactgggtggtggtgcaggagtatgcgccgccaaaaactattgatgctcacaaagcgcgtcagcgtctgttcgatattatcgctgcaaccatttcggtactggggattgcgccaaacaaactggtgctgaaaacccgtgaacgccagaagggcaaaaaccaataccagaaactgggcgagaagggcgagtttcttgaagttaccgaatataacgctcacttgtgggtgaacctgacggattatctcgatactggtctgttcctcgatcaccgcatcgcccgtcgtatgctcggtcagatgagcaaaggcaaagatttcctcaacctgttctcttataccggcagcgccaccgtgcatgcgggattaggcggtgcacgcagcaccaccaccgtggatatgtcgcgtacttatctggaatgggcagaacgcaacctgcgtctgaatggcctgaccgggcgtgcgcatcgcctgattcaggccgattgcctggcgtggctgcgtgaggcaaatgaacagttcgatctgatctttatcgatccgccaaccttctctaactcaaaacgaatggaagatgcgtttgatgttcagcgcgatcatctggcgctgatgaaagatttgaaacgtctgctgcgtgcaggtgggacgatcatgttctcgaacaacaaacgtggcttccgtatggatctcgacggcctggcaaaactgggactgaaagcacaagaaattacgcaaaaaacgctctcccaggatttcgcccgtaaccgccagatccacaactgctggctgattaccgcagcctga

SEQ ID NO: 6021 - DNA, 1104 bp, Escherichia coli
  CDS (1)...(1104)
atggaaggtaaagccagcctcggtgaaaccatcgatattgttgatcatcagggaaaatggttagcacgcggcgcttattcgccagcttcgcaaatccgggcgcgcgtctggacgtttgacccgtctgagtctatcgacattgcttttttttcccgccgtttgcaacaagcacaaaaatggcgtgactggctggcgcaaaaagatggcctcgacagctatcgtttaatcgccggagaatctgatggcctgccgggtattactatcgatcgtttcggtaattttctggtgctgcaactgctgagtgctggggcagaatatcagcgcgcggcattaattagtgccctgcaaacgctgtacccggaatgttcgatttacgatcgcagcgacgtcgcggtacgtaaaaaagaaggaatggagctgacccagggccccgtcaccggcgagttgccacctgccctgctgccgattgaagaacacggaatgaaactgctggtggatattcagcacggacacaaaacgggctactacctggaccagcgtgatagccgcctggctacccgccgctacgttgaaaataaacgtgtgctgaactgtttctcctataccggtggtttcgccgtatcggcactgatgggcggttgcagccaggttgtcagcgttgatacctcccaggaagcgctggatattgcacggcagaacgttgagctgaacaaactggatctgagcaaggctgagtttgtccgtgatgatgtctttaaattgctgcgtacttatcgcgatcgcggtgaaaaatttgacgttatcgtgatggacccgccgaagtttgttgagaataaaagccagttgatgggcgcgtgtcgtggttataaagacatcaacatgctggcgattcagctgctgaatgaaggcggtattctcctgactttctcctgttccggtctgatgaccagcgatttatttcagaaaatcatcgcggatgccgcaattgatgccggtcgtgatgtacaatttatagagcagttccgtcaggcagccgatcatccggtgatcgctacctatccggaagggctatatctgaaagggtttgcctgtcgcgtcatgtaa

SEQ ID NO: 6022 - DNA, 735 bp, Escherichia coli
  CDS (1)...(735)
atgccgcgcccatctacctgcgctgactcaggaggtggcatgatgacgaccttaaccgctcgaccggaagccattaccttcgatccgcagcaaagtgcgctgatcgtggtggatatgcaaaacgcttatgccacgccaggcggctacttagatctcgccgggtttgatgtctcaaccactcgcccggtcattgccaacattcaaaccgccgtgaccgcagcgcgagcggcagggatgctgatcatctggtttcaaaatggctgggatgaacagtatgtcgaggctggcggacccggctcaccgaattttcataaatcgaacgccctgaaaaccatgcgtaagcagccgcagctgcaggggaaattgctggcgaaaggctcctgggattatcaactggtggatgaactggtgccgcagcctggcgatattgtgctgccgaagccgcgctacagcggtttcttcaatacgccgctggacagcattttgcgcagccgcggaatacgccatctggttttcaccggcatcgctaccaacgtctgcgtcgaatcgacgctacgcgacggcttttttctggagtatttcggcgtggtgcttgaagacgcaactcaccaggcggggccgaaatttgcgcagaaagccgcgttgttcaatatcgaaaccttttttggctgggtcagcgacgtcgaaacattctgcgacgcgctttctcccacgtcctttgctcatatcgcttaa

SEQ ID NO: 6023 - DNA, 120 bp, Escherichia coli
  CDS (1)...(120)
gtgggtggcatgtttgttccgtttctcattatgttgcgcgaaggacttgaagccgcgctgattgtcagtttgattgccagctatcttaagcgtacccagcgaggccgatggattgtgtga

SEQ ID NO: 6024 - DNA, 1272 bp, Escherichia coli
  CDS (1)...(1272)
atgcagtataaagatgaaaacggcgtgaatgaaccgtcacgccgacgtttactgaaagtgataggtgcactggcgctggcgggaagttgtccggtcgctcatgcacaaaaaacgcaaagtgcgccgggtacgctttcaccggatgctcgcaatgagaaacagccgttttatggtgagcatcaggcagggatcctgacgccacaacaggccgcaatgatgctggtggcgtttgatgtgcttgccagcgataaagccgatcttgagcggttgtttcgcttgttgactcagcgttttgcttttctgactcagggcggagcagcaccagaaacgccaaatccgcgcctgccaccactcgattccggcattcttggcggctacattgcgcccgataatctcaccatcacgttatcggtgggtcactcattgtttgatgagcgctttggccttgcgccacagatgccaaaaaagctgcagaagatgacgcgtttccccaacgactcgctggatgcggcgttatgtcatggtgatgtgttgctacagatttgcgccaacacccaggacacggttatccatgcgctgcgcgatatcatcaaacacacgccggatttgctcagtgtgcgctggaagcgggaagggtttatttccgatcacgcggcgcgtagtaaaggcaaagagacgccgattaatttgctgggtttcaaagacggcactgccaatcccgatagccagaatgataagttgatgcaaaaagtggtgtgggtaacggcagatcagcaggagcctgcgtggacaatcggtggcagctatcaggcagtacgcttgattcagtttcgagtggaattttgggacagaacgccgctgaaagaacagcagacgatttttggccgtgataagcaaaccggtgcgccgctgggaatgcagcatgagcatgatgtgcctgattacgccagcgacccggaagggaaggtgatcgcgctggacagccatatccggctggcgaatccccgcacggcggagagtgagtccagcctgatgctgcgtcgtggctacagttattcactgggcgtcaccaactccgggcaactggatatggggttgctgtttgtctgctaccaacacgatctggaaaaaggcttcctgacagtacaaaaaaggctcaatggcgaagcgctggaggaatacgttaaacctatcggcggcggttatttttttgcgctgccgggggtgaaggacgcgaacgattatttcggaagcgcgttattgcgggtttaa

SEQ ID NO: 6025 - DNA, 1053 bp, Escherichia coli
  CDS (1)...(1053)
atgccagtgttacacaaccgcatttccaacgacgcgctaaaagccaaaatgttggctgagagcgaaccgcgaaccaccatttcgttttacaagtatttccacatcgccgatcctaaggcgacccgtgacgctttatatcagctgtttaccgcgctgaatgtttttgggcgagtgtatctggcgcatgagggcattaacgcgcaaatcagcgtacctgcgagcaatgttgaaacatttcgcgcgcagctctatgccttcgacccggctttagagggtttacgcctgaatatcgcgttggatgatgacgggaaatccttctgggtactgcgcatgaaggtacgcgatcgcattgttgccgacggtattgacgatcctcactttgatgccagcaatgttggtgagtatctgcaagcggcggaagtgaacgccatgcttgacgatcccgatgcactatttatcgacatgcgtaaccactatgagtatgaagtggggcactttgaaaacgcgctcgaaattccggcagataccttccgtgagcagctgccaaaagcagtcgagatgatgcaggcacataaagataaaaaaatcgtcatgtactgcaccggcggcattcgttgtgaaaaggccagtgcctggatgaaacataacggattcaacaaagtctggcatatcgagggcggaattattgaatacgcccgtaaggcgcgcgagcagggcttgccggtgcgttttattggcaaaaattttgtttttgacgagcggatgggcgaacgtatatcggatgagattatcgcgcattgccaccagtgcggcgcgccgtgcgacagccataccaactgtaaaaatgatggctgccacctgctgtttattcagtgtccagtatgcgcggaaaaatacaaaggttgttgtagtgagatttgctgcgaagaaagcgcgttaccgccagaagaacagcgacgccgtcgggcaggacgtgaaaatggcaataagatctttaataagtctcgtggacgtctgaatacaacactgtgcattcctgatccaacagaataa

SEQ ID NO: 6026 - DNA, 576 bp, Escherichia coli
  CDS (1)...(576)
atgaaaaaaagcctgcttggtttaaccttcgcgtccctgatgttctctgccggttcagcggttgccgccgattacaaaattgacaaagaaggtcagcacgcctttgttaatttccgcatccagcaccttggctatagctggttatacggcacctttaaagatttcgacggtacttttacctttgacgaaaaaaatccggctgccgataaagtgaatgtgacaattaacaccaccagcgtcgatactaatcacgccgaacgcgataaacatcttcgcagtgcagatttcctcaataccgcaaaatatccacaggcaacattcacctccaccagcgtgaagaaagacggtgacgaactggatattaccggcgatctgacgctgaatggcgtaaccaaacccgtcacgctggaagcgaaattaattggtcagggcgacgacccatggggtggtaaacgtgcaggcttcgaggccgaaggcaaaattaagctcaaggacttcaatatcaagacagatttaggtccagcttctcaggaagtggatctgattatttcagtggaaggcgtacagcagaagtaa

SEQ ID NO: 6027 - DNA, 954 bp, Escherichia coli
  CDS (1)...(954)
atgtatacgaagattattggtactggcagctatctgcccgaacaagtgcggacaaacgccgatttggaaaaaatggtggacacctctgacgagtggattgtcactcgtaccggtatccgcgaacgccacattgccgcgccaaacgaaaccgtttcaaccatgggctttgaagcggcgacacgcgcaattgagatggcgggcattgagaaagaccagattggcctgatcgttgtggcaacgacttctgctacgcacgctttcccgagcgcagcttgtcagattcaaagcatgttgggcattaaaggttgcccggcatttgacgttgcagcagcctgcgcaggtttcacctatgcattaagcgtagccgatcaatacgtgaaatctggggcggtgaagtatgctctggtcgtcggttccgatgtactggcgcgcacctgcgatccaaccgatcgtgggactattattatttttggcgatggcgcgggcgctgcggtgctggctgcctctgaagagccgggaatcatttccacccatctgcatgccgacggtagttatggtgaattgctgacgctgccaaacgccgaccgcgtgaatccagagaattcaattcatctgacgatggcgggcaacgaagtcttcaaggttgcggtaacggaactggcgcacatcgttgatgagacgctggcggcgaataatcttgaccgttctcaactggactggctggttccgcatcaggctaacctgcgtattatcagtgcaacggcgaaaaaactcggtatgtctatggataatgtcgtggtgacgctggatcgccacggtaatacctctgcggcctctgtcccgtgcgcgctggatgaagctgtacgcgacgggcgcattaagccggggcagttggttctgcttgaagcctttggcggtggattcacctggggctccgcgctggttcgtttctag

SEQ ID NO: 6028 - DNA, 930 bp, Escherichia coli
  CDS (1)...(930)
atgacgcaatttgcatttgtgttccctggacagggttctcaaaccgttggaatgctggctgatatggcggcgagctatccaattgtcgaagaaacgtttgctgaagcttctgcggcgctgggctacgacctgtgggcgctgacccagcaggggccagctgaagaactgaataaaacctggcaaactcagcctgcgctgttgactgcatctgttgcgctgtatcgcgtatggcagcagcagggcggtaaagcaccggcaatgatggccggtcacagcctgggggaatactccgcgctggtttgcgctggtgtgattgatttcgctgatgcggtgcgtctggttgagatgcgcggcaagttcatgcaagaagccgtaccggaaggcacgggcgctatggcggcaatcatcggtctggatgatgcgtctattgcgaaagcgtgtgaagaagctgcagaaggtcaggtcgtttctccggtaaactttaactctccgggacaggtggttattgccggtcataaagaagcggttgagcgtgctggcgctgcctgtaaagcggcgggcgcaaaacgcgcgctgccgttaccagtgagcgtaccgtctcactgtgcgctgatgaaaccagcagccgacaaactggcagtagaattagcgaaaatcacctttaacgcaccaacagttcctgttgtgaataacgttgatgtgaaatgcgaaaccaatggtgatgccatccgtgacgcactggtacgtcagttgtataacccggttcagtggacgaagtctgttgagtacatggcagcgcaaggcgtagaacatctctatgaagtcggcccgggcaaagtgcttactggcctgacgaaacgcattgtcgacaccctgaccgcctcggcgctgaacgaaccttcagcgatggcagcggcgctcgagctttaa

SEQ ID NO: 6029 - DNA, 735 bp, Escherichia coli
  CDS (1)...(735)
atgaattttgaaggaaaaatcgcactggtaaccggtgcaagccgcggaattggccgcgcaattgctgaaacgctcgcagcccgtggcgcgaaagttattggcactgcgaccagtgaaaatggcgctcaggcgatcagtgattatttaggtgccaacggcaaaggtctgatgttgaatgtgaccgacccggcatctatcgaatctgttctggaaaaaattcgcgcagaatttggtgaagtggatatcctggtcaataatgccggtatcactcgtgataacctgttaatgcgaatgaaagatgaagagtggaacgatattatcgaaaccaacctttcatctgttttccgtctgtcaaaagcggtaatgcgcgctatgatgaaaaagcgtcatggtcgtattatcactatcggttctgtggttggtaccatgggaaatggcggtcaggccaactacgctgcggcgaaagcgggcttgatcggcttcagtaaatcactggcgcgcgaagttgcgtcacgcggtattactgtaaacgttgttgctccgggctttattgaaacggacatgacacgtgcgctgagcgatgaccagcgtgcgggtatcctggcgcaggttcctgcgggtcgcctcggcggcgcacaggaaatcgccaacgcggttgcattcctggcatccgacgaagcagcttacatcacgggtgaaactttgcatgtgaacggcgggatgtacatggtctga

SEQ ID NO: 6030 - DNA, 237 bp, Escherichia coli
  CDS (1)...(237)
atgagcactatcgaagaacgcgttaagaaaattatcggcgaacagctgggcgttaagcaggaagaagttaccaacaatgcttctttcgttgaagacctgggcgcggattctcttgacaccgttgagctggtaatggctctggaagaagagtttgatactgagattccggacgaagaagctgagaaaatcaccaccgttcaggctgccattgattacatcaacggccaccaggcgtaa

SEQ ID NO: 6031 - DNA, 1242 bp, Escherichia coli
  CDS (1)...(1242)
gtgtctaagcgtcgtgtagttgtgaccggactgggcatgttgtctcctgtcggcaataccgtagagtctacctggaaagctctgcttgccggtcagagtggcatcagcctaatcgaccatttcgatactagcgcctatgcaacgaaatttgctggcttagtaaaggattttaactgtgaggacattatctcgcgcaaagaacagcgcaagatggatgccttcattcaatatggaattgtcgctggcgttcaggccatgcaggattctggccttgaaataacggaagagaacgcaacccgcattggtgccgcaattggctccgggattggcggcctcggactgatcgaagaaaaccacacatctctgatgaacggtggtccacgtaagatcagcccattcttcgttccgtcaacgattgtgaacatggtggcaggtcatctgactatcatgtatggcctgcgtggcccgagcatctctatcgcgactgcctgtacttccggcgtgcacaacattggccatgctgcgcgtattatcgcgtatggcgatgctgacgtgatggttgcaggtggcgcagagaaagccagtacgccgctgggcgttggtggttttggcgcggcacgtgcattatctacccgcaatgataacccgcaagcggcgagccgcccgtgggataaagagcgtgatggtttcgtactgggcgatggtgccggtatgctggtacttgaagagtacgaacacgcgaaaaaacgcggtgcgaaaatttacgctgaactcgtcggctttggtatgagcagcgatgcttatcatatgacgtcaccgccagaaaatggcgcaggcgcagctctggcgatggcaaatgctctgcgtgatgcaggcattgaagcgagtcagattggctacgttaacgcgcacggtacttctacgccggctggcgataaagctgaagcgcaggcggtgaaaaccatcttcggtgaagctgcaagccgtgtgttggtaagctccacgaaatctatgaccggtcacctgttaggtgcggcgggtgcagtagaatctatctactccatcctggcgctgcgcgatcaggctgttccgccaaccatcaacctggataacccggatgaaggttgcgatctggatttcgtaccgcacgaagcgcgtcaggttagcggaatggaatacactctgtgtaactccttcggcttcggtggcactaatggttctttgatctttaaaaagatctaa

SEQ ID NO: 6032 - DNA, 642 bp, Escherichia coli
  CDS (1)...(642)
atgcgcagtaagtatatcgtcattgaggggctggaaggcgcaggcaaaactaccgcgcgtaatgtggtggttgagacgctcgagcaactgggtatccgcgacatggttttcactcgggaacctggcggtacgcaacttgccgaaaagttaagaagcctggtgctggatatcaaatcggtaggcgatgaagtcattaccgataaagccgaagttctgatgttttatgccgcgcgcgttcaactggtagaaacggtcatcaaaccagctctggctaacggcacctgggtgattggcgatcgccacgatctctccactcaggcgtatcagggcggcggacgtggtattgaccaacatatgctggcaacactgcgtgatgctgttctcggggattttcgccccgacttaacgctctatctcgatgttaccccggaagttggcttaaaacgcgcgcgtgcgcgcggcgagctggatcgtattgagcaagaatctttcgatttctttaatcgcacccgcgcccgctatctggaactggcagcacaagataaaagcattcataccattgatgccacccagccgctggaggccgtgatggatgcaatccgcactaccgtgacccactgggtgaaggagttggacgcatga

SEQ ID NO: 6033 - DNA, 798 bp, Escherichia coli
  CDS (1)...(798)
atgtttttagtcgactcacactgccatctcgatggtctggattatgaatctttgcataaggacgtggatgacgttctggcgaaagccgccgcacgcgatgtgaaattttgtctggcagtcgccacaacattaccgggttatttacatatgcgggatctggtaggcgaacgtgacaacgtcgtattttcttgtggcgtgcatccactcaaccagaatgatccctacgatgtagaagatttacgccgtctggcggcagaagagggtgttgtagcgctgggtgaaaccgggctggattattattacacgccggaaactaaagtacgtcagcaagagtccttcatccatcatatccagattggtcgtgaactgaacaagccggttatcgtccatacccgtgacgcccgtgccgatacgctggcaattctgcgcgaagaaaaagtgacggattgcggtggcgtactacactgttttacagaggacagagaaacggcgggtaaattactggatctcggattttacatctccttttccggcattgtgaccttccgtaatgcggagcaactgcgcgatgctgcgcgttatgtccccctggatcggttactggtggaaactgactcaccttaccttgcgccggtaccgcatcgaggaaaagagaatcaacctgcgatggttcgtgacgttgcagaatacatggctgtgttgaaaggtgttgccgttgaagaactggcgcaggtaaccaccgataacttcgcccgtctgtttcacatcgacgcttcccgccttcaatccatccgttga

SEQ ID NO: 6034 - DNA, 1434 bp, Escherichia coli
  CDS (1)...(1434)
atgtttaagaatgcatttgctaacctgcaaaaggtcggtaaatcgctgatgctgccggtatccgtactgcctatcgcaggtattctgctgggcgtcggttccgcgaatttcagctggctgcccgccgttgtatcgcatgttatggcagaagcaggcggttccgtctttgcaaacatgccactgatttttgcgatcggtgtcgccctcggctttaccaataacgatggcgtatccgcgctggccgcagttgttgcctatggcatcatggttaaaaccatggccgtggttgcgccactggtactgcatttacctgctgaagaaatcgcctctaaacacctggcggatactggcgtactcggagggattatctccggtgcgatcgcagcgtacatgtttaaccgtttctaccgtattaagctgcctgagtatcttggcttctttgccggtaaacgctttgtgccgatcatttctggcctggctgccatctttactggcgttgtgctgtccttcatttggccgccgattggttctgcaatccagaccttctctcagtgggctgcttaccagaacccggtagttgcgtttggcatttacggtttcatcgaacgttgcctggtaccgtttggtctgcaccacatctggaacgtacctttccagatgcagattggtgaatacaccaacgcagcaggtcaggttttccacggcgacattccgcgttatatggcgggtgacccgactgcgggtaaactgtctggtggcttcctgttcaaaatgtacggtctgccagctgccgcaattgctatctggcactctgctaaaccagaaaaccgcgcgaaagtgggcggtattatgatctccgcggcgctgacctcgttcctgaccggtatcaccgagccgatcgagttctccttcatgttcgttgcgccgatcctgtacatcatccacgcgattctggcaggcctggcattcccaatctgtattcttctggggatgcgtgacggtacgtcgttctcgcacggtctgatcgacttcatcgttctgtctggtaacagcagcaaactgtggctgttcccgatcgtcggtatcggttatgcgattgtttactacaccatcttccgcgtgctgattaaagcactggatctgaaaacgccgggtcgtgaagacgcgactgaagatgcaaaagcgacaggtaccagcgaaatggcaccggctctggttgctgcatttggtggtaaagaaaacattactaacctcgacgcatgtattacccgtctgcgcgtcagcgttgctgatgtgtctaaagtggatcaggccggcctgaagaaactgggcgcagcgggcgtagtggttgctggttctggtgttcaggcgattttcggtactaaatccgataacctgaaaaccgagatggatgagtacatccgtaaccactaa

SEQ ID NO: 6035 - DNA, 2190 bp, Escherichia coli
  CDS (1)...(2190)
atgctttcaacacaatttaacagggataatcaatatcaagccatcaccaaaccgtcactacttgccggttgcatagcactggcactattaccttctgccgcttttgctgcaccagccactgaagaaacggtgattgttgagggttcagccacagctccagatgatggcgaaaatgattacagcgtaacgtctacctctgcgggtaccaaaatgcagatgactcaacgtgatattcctcagtcggtcactattgttagccagcagcggatggaagatcagcagttacaaacgctgggcgaagtgatggaaaacacgctggggatcagcaaaagtcaggcggattccgatcgtgctctttattattcccgcggattccagatcgataactatatggttgatggtatccccacctattttgaatcgcgctggaatctgggcgacgcactttctgatatggcactctttgaacgcgtagaagtagtgcgtggcgcgacaggactcatgaccgggacgggtaatccatctgcggcaattaatatggttcgaaaacacgcgaccagtcgtgaatttaaaggcgatgtctcggcggaatacggtagctggaacaaagaacggtatgtggcggatttacaaagcccactcaccgaagacggtaaaatccgcgcgcgaattgtcggcggctaccagaataacgactcatggctggaccgctacaacagtgaaaagaccttcttctcgggcattgtcgatgctgatttaggcgatcttacgacgctttcagccggttacgaatatcagcgcattgatgttaatagccctacctggggcggtttaccgcgctggaatactgatggcagcagcaacagttacgatcgcgcacgcagtaccgcacctgactgggcgtacaacgataaagagatcaacaaggtctttatgaccctgaagcagcagtttgctgatacctggcaagcgacactgaatgccacccactctgaagtcgaatttgacagcaaaatgatgtatgtcgatgcctatgtaaacaaagcggatggtatgctggttgggccatacagtaattatggacctggctttgattatgtcggcggcaccggttggaacagtggcaaacgtaaagttgatgcgctggatttgttcgctgacggtagttatgaattgtttggtcgtcagcacaatctaatgtttggtggcagttacagcaaacaaaacaatcgttacttcagttcatgggccaacatcttcccggatgaaattggcagtttctacaactttaatggcaatttcccacaaaccgactggtcaccacagagcctggcgcaggacgataccacacatatgaaatcgttatatgctgccactcgtgtcacccttgccgatccgctgcatctgatcctcggcgcacgttataccaactggcgggttgatacgctgacttacagcatggagaaaaaccacaccacgccttacgctggtctggtgtttgacatcaatgacaactggtcgacctacgccagctatacctctattttccagccgcaaaatgatcgtgacagttcaggcaaatatctggctccaatcaccggtaacaactacgagctgggtctgaaatcggactggatgaatagccgtctgaccaccacgttagccatcttccgtattgagcaggataatgtcgctcagtccaccggtacacctatccccggcagcaacggcgaaaccgcctataaagcggtggatgggacagtcagtaaaggggtggaatttgaactcaacggcgcaattaccgacaactggcagctgacatttggcgcaacgcgctatattgcagaggataacgaaggaaacgccgttaatcctaatctgccacgcaccacggttaaaatgttcaccagctatcggttgcctgtcatgccagagttgacggtcggcggtggtgttaactggcaaaatcgcgtgtataccgacaccgtgacgccgtatggcaccttccgcgccgagcaaggtagctacgcgctggtggatctcttcacccgctaccaggtgacgaaaaacttctcgttacaggggaacgtcaataacctgttcgacaaaacctacgataccaacgtggaaggttctatcgtctacggcacaccgcgtaatttcagcattaccggcacgtatcaattctga

SEQ ID NO: 6036 - DNA, 1305 bp, Escherichia coli
  CDS (1)...(1305)
ttgactacgccattgaaaaagattgtgattgtcggcggcggtgctggtgggctggaaatggcaacacagctggggcataagctgggacgcaagaaaaaagccaaaattacgctggtcgatcgtaaccacagccacctgtggaaaccgctgctgcacgaagtggcgactggctcgcttgatgaaggcgtcgatgcgttgagctatctggcccatgcgcgcaatcatggtttccagttccagctgggttccgtcattgatattgatcgtgaagcgaaaacaatcactattgcagaactgcgcgacgagaaaggtgaactgctggttccggaacgtaaaatcgcctatgacaccctggtaatggcgctgggtagcacctctaacgatttcaatacgccaggtgtcaaagagaactgcattttcctcgataacccgcaccaggcgcgtcgcttccaccaggagatgctgaatttgttcctgaaatactccgccaacctgggcgcgaatggcaaagtgaacattgcgattgtcggcggcggcgcgacgggtgtagaactctccgctgaattgcacaacgcggtcaagcaactgcacagctacggttacaaaggcctgaccaacgaagccctgaacgtaacgctggtagaagcgggagaacgtattttgcctgcgttaccgccacgtatctctgctgcggcccacaacgagctaacgaaacttggcgttcgcgtgctgacgcaaaccatggtcaccagtgctgatgaaggcggcctgcacactaaagatggcgaatatattgaggctgatctgatggtatgggcagccgggatcaaagcgccagacttcctgaaagatatcggtggtcttgaaactaaccgtatcaaccagctggtggtggaaccgacgctgcaaaccacccgcgatccagacatttacgctattggcgactgcgcgtcatgcccgcgtccggaagggggctttgttccgccgcgtgctcaggctgcacaccagatggcgacttgcgcaatgaacaacattctggcgcagatgaacggtaagccgctgaaaaattatcagtataaagatcatggttcgctggtatcgctgtcgaacttctccaccgtcggtagcctgatgggtaacctgacgcgcggctcaatgatgattgaaggacgaattgcgcgctttgtatatatctcgctataccgaatgcatcagattgcgctgcatggttactttaaaaccggattaatgatgctggtggggagtattaaccgcgttatccgtccgcgtttgaagttgcattaa

SEQ ID NO: 6037 - DNA, 3447 bp, Escherichia coli
  CDS (1)...(3447)
atgcctgaacaatatcgttatacgctgcccgtcaaagcgggtgagcagcgtctgctgggcgagttaaccggcgcagcctgtgcaacgctggtagcggaaattgccgaacgtcacgccggtccggtggtactcattgcaccagatatgcaaaatgctctgcgtttgcatgatgaaatcagccagtttaccgatcaaatggtgatgaatctggcggactgggaaactcttccctacgacagtttttcgcctcatcaggacattatctcctcgcgcctttccaccctttaccagctaccgacgatgcagcgtggcgtactgattgttccggtgaatacgcttatgcagcgcgtttgcccacacagttttctccacggtcatgcgctggtgatgaaaaaaggtcagcgcctgtcacgagatgcattacgaacccaactggacagcgccggttatcgccatgttgaccaggtgatggagcacggcgaatacgccacgcgcggcgcgttgctggatctcttcccgatggggagtgagctgccttatcgtcttgatttctttgatgatgaaatcgacagcctgcgggtgtttgacgtcgacagccagcgcacgctggaggaagtagaagcgatcaatctgctgcccgcgcacgaatttccgaccgataaagcggcaattgaactgttccgcagccagtggcgcgataccttcgaagtgaagcgcgatccagaacatatttaccagcaagtgagtaaaggcacattacctgccgggatcgagtactggcagccattgttcttcagcgaaccactgccgccgctgttcagttatttccctgccaataccttgctcgtgaatactggcgatctggaaaccagtgccgaacgtttccaggctgacacgctggcgcgttttgagaatcgcggcgtcgatccgatgcgcccgctgttgccaccacaatcgctctggctgcgggtggacgagctcttctcagagctgaaaaactggccccgggtgcagctaaaaactgaacatttaccgacaaaagccgcgaatgccaatttaggtttccagaaactgccagacctggccgttcaggcacaacaaaaagcgccgctggatgcgctgcgtaagttcctcgagactttcgacggtccggtggtgttctcggtagaaagtgaaggtcgccgtgaagcgctgggtgaactgctcgcacgaattaaaattgctccgcaacgcattatgcgtcttgatgaagccagcgaccgtgggcgttatctgatgattggcgctgccgaacatggttttgtcgatacggtgcgtaatctggcgctgatttgcgaaagcgatctgctcggtgaacgcgttgcccgtcgtcgtcaggattctcgccgcaccatcaaccccgatacactgatccgtaaccttgcggaactgcatattggtcagccggtggtccatctggagcacggcgtcggtcgttatgccggaatgaccacgctggaagcgggtggcattactggcgagtatctgatgctcacctatgccaacgacgccaaactgtatgttccggtgtcgtcactgcatctgattagccgttacgcaggtggcgcggaagaaaacgccccgctgcataaacttggcggcgatgcgtggtcacgcgcgcggcagaaagcggcggaaaaagtgcgtgatgtggcggcggaattgctggatatctacgcgcaacgcgccgccaaagagggcttcgcgtttaaacacgatcgtgagcagtatcagttgttctgcgacagcttcccgtttgaaaccacgccggatcaggcgcaggccattaatgcggtacttagcgacatgtgtcagccgctggcaatggatcgtctggtgtgcggcgatgttggctttggtaaaacagaagtggcgatgcgcgcagctttcctggcagtagataaccacaagcaggtggcggtgctggtgcctaccacccttctcgcgcagcagcattacgacaacttccgcgaccgtttcgccaactggccggtacgtatcgaaatgatctcccgtttccgcagcgccaaagagcagacgcaaatccttgcggaagtggcggaagggaaaatcgatattctgatcggtacgcacaaactgctgcaaagtgacgtcaagtttaaagatttaggcctgctgattgtcgatgaagaacaccgcttcggggtgcgtcataaagagcgcattaaagcgatgcgcgcgaacgtggatattctgacgcttactgcaacgccgatcccacgtacgctgaatatggcaatgagcggaatgcgtgacctgtcgattatcgccacgccgcccgcccgtcgtctggcagttaaaacctttgtccgtgagtatgacagcatggtggtccgggaggcgatcctgcgtgaaattttgcgcggaggacaggtttattatctctacaatgatgtggaaaacattcagaaagccgccgaacggctggcagaactggtgccagaagcgcggatcgccatcggtcacgggcagatgcgcgagcgcgaactggaacgggtgatgaatgatttccatcatcaacgtttcaacgtgctggtttgtacaaccattatcgaaaccgggatcgacatcccgacagccaacactattatcattgaacgcgcggatcacttcggtctggcgcagctgcaccagttacgcggtcgcgtcggacgttcgcatcatcaggcatatgcatggttgctgacaccgcatccaaaagcgatgactaccgatgcacaaaaacgtcttgaagcaattgcctcgctggaagatctcggggcaggttttgcgctggcaacgcacgatctggagattcgcggcgcgggtgaactgcttggcgaagaacaaagcggctcaatggaaaccatcggtttctcgctgtatatggagttgctggaaaacgccgtcgatgcactgaaagccggacgcgagccgtcgctggaagatctcaccagccagcaaacagaagtcgagctgcggatgccgtcgctattgccagatgatttcatccctgacgtgaacacgcgtctgtcgttctacaaacgtattgccagcgccaaaacggaaaacgaactggaagagatcaaagtcgagcttatcgatcgcttcggcctgctgccagatccggcgcgtaccctgctggatattgcccgtctgcgccagcaagcgcagaaactggggatcaggaagctggaaggtaatgagaaaggcggggtgatcgaatttgccgagaagaatcacgttaatccggcctggttgattggtttgctgcaaaaacagccgcagcattaccgccttgatggtccgacgcgcctgaaatttattcaggatttgagtgagcggaaaacgcgtatcgaatgggtacgccagtttatgcgtgaactggaagagaacgcgatcgcttaa

SEQ ID NO: 6038 - DNA, 687 bp, Escherichia coli
  CDS (1)...(687)
ttgcaatgcgacaacctgtgcaaacgctatcaggaaggcagtgtgcaaaccgatgtgctgcacaatgtcagtttcagcgtcggcgaaggtgaaatgatggcgatcgtcggtagctctggttccggtaaaagtaccttgctgcacctgctgggcgggctggatacgccaacctccggcgatgtgatttttaatggtcagccaatgagcaaactgtcgtcggcagcgaaagctgaactgcgcaaccagaagctgggctttatttatcagtttcaccacctgctgccggattttaccgccctggaaaacgtggctatgccgctgctgattggcaagaaaaagcccgctgaaatcaacagccgtgcacttgagatgttaaaagcggtggggctggatcatcgtgcgaatcaccgcccatctgaactttctggcggcgaacgccagcgtgtggcgattgcccgtgcgctggtgaataacccgcgcctggtactggcggatgaacctaccggtaacctcgatgcgcgtaacgccgacagcatcttccagttgcttggggaattgaatcgcttgcagggcaccgccttcctggtggttactcacgacctgcaactggcgaaacgtatgagccgccagttagaaatgcgtgatggtcgtctgacggcggaactgagcctgatgggggcggagtaa

SEQ ID NO: 6039 - DNA, 1227 bp, Escherichia coli
  CDS (1)...(1227)
atggataaactacttgagcgatttttgaactacgtgtctctggatacccaatcaaaagcaggggtgagacaggttcccagcacggaaggccaatggaagttattgcatctgctgaaagagcagctcgaagagatggggcttatcaatgtgaccttaagtgagaagggcactttgatggcgacgttaccggctaacgtccctggcgatatcccggcgattggctttatttctcatgtggatacctcaccggattgcagcggcaaaaatgtgaatccgcaaattgttgaaaactatcgcggtggcgatattgcgctgggtatcggcgatgaagttttatcaccggttatgttcccggtgctgcatcagctactgggtcagacgctgattaccaccgatggtaaaaccttgttaggtgccgatgacaaagcaggtattgcagaaatcatgaccgcgctggcggtattgcaacagaaaaaaattccgcatggtgatattcgcgtcgcctttaccccggatgaagaagtgggcaaaggggcgaaacattttgatgttgacgccttcgatgcccgctgggcttacactgttgatggtggtggcgtaggcgaactggagtttgaaaacttcaacgccgcgtcggtcaatatcaaaattgtcggtaacaatgttcatccgggcacggcgaaaggagtgatggtaaatgcgctgtcgctggcggcacgtattcatgcggaagttccggcggatgaaagcccggaaatgacagaaggctatgaaggtttctatcatctggcgagcatgaaaggcaccgttgaacgggccgatatgcactacatcatccgtgatttcgaccgtaaacagtttgaagcgcgtaaacgtaaaatgatggagatcgccaaaaaagtgggcaaagggttacatcctgattgctacattgaactggtgattgaagacagttactacaatatgcgcgagaaagtggttgagcatccgcatattctcgatatcgcccagcaggcgatgcgcgattgcgatattgaaccggaactgaaaccgatccgcggtggtaccgacggcgcgcagttgtcgtttatgggattaccgtgcccgaacctgttcactggcggttacaactatcatggtaagcatgagtttgtgactctggaaggtatggaaaaagcggtgcaggtgatcgtccgtattgccgagttaacggcgcaacggaagtaa

SEQ ID NO: 6040 - DNA, 1371 bp, Escherichia coli
  CDS (1)...(1371)
atggaattatcctcactgaccgccgtttcccctgtcgatggacgctacggcgataaagtcagcgcgctgcgcgggattttcagcgaatatggtttgctgaaattccgtgtacaagttgaagtacgttggctgcaaaaactggccgcgcacgcagcgatcaaggaagttcctgcttttgctgccgacgcaatcggttaccttgatgcaatcgtcgccagtttcagcgaagaagatgcggcgcgcatcaaaactatcgagcgtaccactaaccacgacgttaaagcggttgagtatttcctgaaagaaaaagtggcggagatcccggaactgcacgcggtttctgaattcatccactttgcctgtacttcggaagatatcaataacctctcccacgcattaatgctgaaaaccgcgcgtgatgaagtgatcctgccatactggcgtcaactgattgatggcattaaagatctcgccgttcagtatcgcgatatcccgctgctgtctcgtacccacggtcagccagccacgccgtcaaccatcggtaaagagatggcaaacgtcgcctaccgtatggagcgccagtaccgccagcttaaccaggtggagatcctcggcaaaatcaacggcgcggtcggtaactataacgcccacatcgccgcttacccggaagttgactggcatcagttcagcgaagagttcgtcacctcgctgggtattcagtggaacccgtacaccacccagatcgaaccgcacgactacattgccgaactgtttgattgcgttgcgcgcttcaacactattctgatcgactttgaccgtgacgtctggggttatatcgcccttaaccacttcaaacagaaaaccattgctggtgagattggttcttccaccatgccgcataaagttaacccgatcgacttcgaaaactccgaagggaatctgggcctttccaacgcggtattgcagcatctggcaagcaaactgccggtttcccgctggcagcgtgacctgaccgactctaccgtgctgcgtaacctcggcgtgggtatcggttatgccttgattgcatatcaatccaccctgaaaggcgtgagcaaactggaagtgaaccgtgaccatctgctggatgaactggatcacaactgggaagtgctggctgaaccaatccagacagttatgcgtcgctatggcatcgaaaaaccgtacgagaagctgaaagagctgactcgcggtaagcgcgttgacgccgaaggcatgaagcagtttatcgatggtctggcgttgccagaagaagagaaagcccgcctgaaagcgatgacgccggctaactatattggtcgagctatcacgatggttgatgagctgaaataa

SEQ ID NO: 6041 - DNA, 1152 bp, Escherichia coli
  CDS (1)...(1152)
gtgatagaatacgccgccttgaagttcaatgtcgtgagtgatccaatgtctgaaaccgcaaaaaaagtaatcgtcggcatgtccggcggtgtcgattcctccgtttctgcctggctgttgcaacaacagggatatcaggtcgaaggcctgtttatgaagaactgggaagaagacgacggtgaggaatattgcacagcggcagcggatctggctgatgcccaggctgtctgcgacaagctcggcattgaactgcacaccgttaactttgctgccgagtactgggacaacgtcttcgaactgttccttgccgaatataaagccggtcgcacgccgaatccggatattctgtgcaacaaagagatcaaatttaaagccttcctcgaatttgccgccgaagatttaggtgccgattatatcgctaccggtcattacgtacgtcgggccgatgtcgatggcaagagccgcctgctgcgtggtctggacagcaataaagaccagagctacttcctttatacgctcagccatgagcagattgcgcaaagcctgttcccggtcggcgaactggaaaaaccgcaggtgcgtaagattgctgaagatcttggtctggtcaccgcgaagaaaaaagactctaccggcatttgcttcattggcgaacgtaaattccgcgagttcctgggccgttatctcccggcgcaaccgggcaaaatcattaccgtcgatggcgatgaaattggtgagcaccaggggctgatgtatcacactctcggtcagcgtaaaggtctgggtatcggtggcaccaaagaaggtaccgaagaaccgtggtatgtggtggacaaagacgtcgaaaacaacattctggttgtcgctcagggccatgaacacccgcggctgatgtctgtcgggttgattgcccagcagttgcactgggtcgatcgcgaaccattcaccggcactatgcgttgcacggtaaaaacccgctatcgccagaccgatatcccttgcaccgtcaaggcgctggacgatgatcgcattgaagtgattttcgatgaaccggttgccgccgtgacgccgggccagtctgccgtcttctataacggtgaagtgtgcctcggtggcggtattattgagcagcgtctgccgctgccggtctga

SEQ ID NO: 6042 - DNA, 1251 bp, Escherichia coli
  CDS (1)...(1251)
atggaaagtaaagtagttgttccggcacaaggcaagaagatcaccctgcaaaacggcaaactcaacgttcctgaaaatccgattatcccttacattgaaggtgatggaatcggtgtagatgtaaccccagccatgctgaaagtggtcgacgctgcagtcgagaaagcctataaaggcgagcgtaaaatctcctggatggaaatttacaccggtgaaaaatccacacaggtttatggtcaggacgtctggctgcctgctgaaactcttgatctgattcgtgaatatcgcgttgccattaaaggtccgctgaccactccggttggtggcggtattcgctctctgaacgttgccctgcgccaggaactggatctctacatctgcctgcgtccggtacgttactatcagggcactccaagcccggttaaacaccctgaactgaccgatatggttatcttccgtgaaaactcggaagacatttatgcgggtatcgaatggaaagcagactctgccgacgccgagaaagtgattaaattcctgcgtgaagagatgggggtgaagaaaattcgcttcccggaacattgtggtatcggtattaagccgtgttcggaagaaggcaccaaacgtctggttcgtgcagcgatcgaatacgcaattgctaacgatcgtgactctgtgactctggtgcacaaaggcaacatcatgaagttcaccgaaggagcgtttaaagactggggctaccagctggcgcgtgaagagtttggcggtgaactgatcgacggtggcccgtggctgaaagttaaaaacccgaacactggcaaagagatcgtcattaaagacgtgattgctgatgcattcctgcaacagatcctgctgcgtccggctgaatatgatgttatcgcctgtatgaacctgaacggtgactacatttctgacgccctggcagcgcaggttggcggtatcggtatcgcccctggtgcaaacatcggtgacgaatgcgccctgtttgaagccacccacggtactgcgccgaaatatgccggtcaggacaaagtaaatcctggctctattattctctccgctgagatgatgctgcgccacatgggttggaccgaagcggctgacttaattgttaaaggtatggaaggcgcaatcaacgcgaaaaccgtaacctatgacttcgagcgtctgatggatggcgctaaactgctgaaatgttcagagtttggtgacgcgatcatcgaaaacatgtaa

SEQ ID NO: 6043 - DNA, 660 bp, Escherichia coli
  CDS (1)...(660)
atgtatcaacatcacaactggcaaggtgcgctgctggattatccggtgagtaaagtagtctgtgttggcagtaactatgccaaacatattaaagagatgggcagcgcagtgcccgaagagccagtgctgtttattaaaccagaaacggcactgtgcgatctgcggcagccattggcgatcccatccgatttcggttcagttcatcatgaagtcgaactggcggtgttgattggcgcgacactgcgtcaggctacggaagagcatgtccgcaaagccattgccggttatggcgtggcgctcgatctgacattgcgtgatgttcagggaaaaatgaagaaagccgggcagccgtgggaaaaggctaaagcgtttgataactcttgtccgctttccgggtttattcccgcggcggaatttaccggcgacccgcaaaatacaacgctgagcctgagcgtaaacggcgaacaacgccagcaaggtacgactgcggacatgatccataaaatcgttccgctgatcgcttatatgagcaagttttttaccctcaaggccggtgacgttgtgttgacaggcacgcctgatggcgtcggcccgttgcaaagcggtgatgagctgacagtcactttcgatgggcattctttgacaactcgcgttttgtaa

SEQ ID NO: 6044 - DNA, 1092 bp, Escherichia coli
  CDS (1)...(1092)
atgggattcaaatgcggtatcgtcggtttgcccaacgtcgggaaatctaccctgttcaacgcgctgaccaaagccggtattgaagcggccaactttccattctgcaccattgagccgaacacaggcgtcgtaccaatgcctgatcctcgcctggatcaactggctgaaatcgtaaaaccgcagcgtacgcttcccacgaccatggaatttgtcgatatcgccggtctggtaaaaggcgcatcgaaaggcgaaggtctgggtaaccagttcctgaccaacatccgtgaaaccgaagcgatcggtcacgttgttcgctgctttgaaaatgacaacatcattcacgtttccggcaaagttaacccggctgacgatattgaagttatcaacaccgaactggcgctggcagacctcgacacctgcgaacgtgcgattcatcgcgtacagaagaaagccaaaggtggcgataaagacgcgaaagctgagctggcggtcctggaaaaatgcctgccccagttggaaaatgcaggtatgctgcgcgcgctggatttaagcgctgaagagaaagcggctattcgttacctgagcttcctgacgctgaaaccaacaatgtacatcgccaacgtcaacgaagacggttttgaaaacaacccatatcttgaccaggtgcgtgaaatcgcggcgaaagaaggttctgttgtggttccggtttgtgctgctgttgaagcagacattgccgaactggacgacgaagaacgtgacgagtttatgcaggagcttgggctggaagagccgggcctgaaccgtgtgatccgtgccggttataaactgctgaacctgcaaacttacttcaccgctggggtgaaagaagtgcgtgcatggaccattccggttggagcaaccgcgccgcaggcagcgggcaaaatccatactgattttgaaaaaggctttatccgtgcacaaaccatctcgtttgaagatttcatcacttacaaaggtgaacaaggcgcgaaagaagcaggcaaaatgcgtgcagaaggtaaagattacatcgtgaaagatggcgatgtgatgaacttccttttcaacgtctaa

SEQ ID NO: 6045 - DNA, 948 bp, Escherichia coli
  CDS (1)...(948)
gtgcctgatatgaagctttttgctggtaacgccaccccggaactagcacaacgtattgccaaccgcctgtacacttcactcggcgacgccgctgtaggtcgctttagcgatggcgaagtcagcgtacaaattaatgaaaatgtacgcggtggtgatattttcatcatccagtccacttgtgcccctactaacgacaacctgatggaattagtcgttatggttgatgccctgcgtcgtgcttccgcaggtcgtatcaccgctgttatcccctactttggctatgcgcgccaggaccgtcgcgtccgttccgctcgtgtaccaatcactgcgaaagtggttgcagacttcctctccagcgtcggtgttgaccgtgtgctgacagtggatctgcacgctgaacagattcagggtttcttcgacgttccggttgataacgtatttggtagcccgatcctgctggaagacatgctgcagctgaatctggataacccaattgtggtttctccggacatcggcggcgttgtgcgtgcccgcgctatcgctaagctgctgaacgataccgatatggcaatcatcgacaaacgtcgtccgcgtgcgaacgtttcacaggtgatgcatatcatcggtgacgttgcaggtcgtgactgcgtactggtcgatgatatgatcgacactggcggtacgctgtgtaaagctgctgaagctctgaaagaacgtggtgctaaacgtgtatttgcgtacgcgactcacccgatcttctctggcaacgcggcgaacaacctgcgtaactctgtaattgatgaagtcgttgtctgcgataccattccgctgagcgatgaaatcaaatcactgccgaacgtgcgtactctgaccctgtcaggtatgctggccgaagcgattcgtcgtatcagcaacgaagaatcgatctctgccatgttcgaacactaa

SEQ ID NO: 6046 - DNA, 1083 bp, Escherichia coli
  CDS (1)...(1083)
atgaagccttctatcgttgccaaactggaagccctgcatgaacgccatgaagaagttcaggcgttgctgggtgacgcgcaaactatcgccgaccaggaacgttttcgcgcattatcacgcgaatatgcgcagttaagtgatgtttcgcgctgttttaccgactggcaacaggttcaggaagatatcgaaaccgcacagatgatgctcgatgatcctgaaatgcgtgagatggcgcaggatgaactgcgcgaagctaaagaaaaaagcgagcaactggaacagcaattacaggttctgttactgccaaaagatcctgatgacgaacgtaacgccttcctcgaagtccgagccggaaccggcggcgacgaagcggcgctgttcgcgggcgatctgttccgtatgtacagccgttatgccgaagcccgccgctggcgggtagaaatcatgagcgccagcgagggtgaacatggtggttataaagagatcatcgccaaaattagcggtgatggtgtgtatggtcgtctgaaatttgaatccggcggtcatcgcgtgcaacgtgttcctgctacggaatcgcagggtcgtattcatacttctgcttgtaccgttgcggtaatgccagaactgcctgacgcagaactgccggacatcaacccagcagatttacgcattgatactttccgctcgtcaggggcgggtggtcagcacgttaacaccaccgattcggcaattcgtattactcacttgccgaccgggattgttgttgaatgtcaggacgaacgttcacaacataaaaacaaagctaaagcactttctgttctcggtgctcgcatccacgctgctgaaatggcaaaacgccaacaggccgaagcgtctacccgtcgtaacctgctggggagtggcgatcgcagcgaccgtaaccgtacttacaacttcccgcaggggcgcgttaccgatcaccgcatcaacctgacgctctaccgcctggatgaagtgatggaaggtaagctggatatgctgattgaaccgattatccaggaacatcaggccgaccaactggcggcgttgtccgagcaggaataa

SEQ ID NO: 6047 - DNA, 1392 bp, Escherichia coli
  CDS (1)...(1392)
atgagtcactcatccgcccccgaaagggctactggagctgtcattacagattggcgaccggaagatcctgcgttctggcaacaacgcggtcaacgtattgccagccgcaacctgtggatttccgttccctgtctgctgctggcgttttgcgtatggatgttgttcagcgctgttgcggtgaacctaccgaaagtcggctttaattttacgaccgatcagctatttatgttgactgcgctgccttcggtttctggcgcgttattacgtgttccatactcctttatggttcctatcttcggtggtcgtcgctggacggcgttcagcaccggtattctgattattccttgcgtctggctgggttttgccgtgcaggatacctccacgccttatagcgtcttcatcatcatctctctgctatgcggctttgctggcgcgaacttcgcatccagtatggcaaacatcagcttcttctttccgaaacagaagcagggtggcgcgctgggtctgaatggtggtctgggaaacatgggcgtcagcgtcatgcagttggttgctccgctggtggtatcactgtcgattttcgcagtatttggtagccagggcgtcaaacagccggatgggactgagctgtatctggcgaatgcgtcctggatatgggtgccgttccttgccatcttcaccattgcggcgtggtttggcatgaacgatcttgctacctcgaaagcctccatcaaggagcagttgccggtactcaaacggggtcatctgtggattatgagcctgctgtatctggcaaccttcggctccttcatcggcttctccgcgggctttgcaatgctgtcaaaaacgcagttcccggatgttcagattctgcaatacgctttcttcgggccgtttattggtgcgctggcgcgttctgcaggtggtgcattatctgaccgtctgggcggaactcgtgtcacgctggtgaactttattctgatggcgattttcagcggcctgctgttcctgaccttaccgactgacgggcagggcggaagcttcatggcgttcttcgcggtcttcctggcgctgttcctgacagctgggctgggtagtggttccactttccagatgatttcagtgatcttccgtaaactgacaatggatcgcgtgaaagcagaagggggttctgacgaacgtgcgatgcgtgaagcggcaaccgacacggcggcggcgctgggtttcatctctgcgattggcgcgattggtggcttctttatcccgaaagcgtttggtagctcgctggcattaacgggttcgccagtcggcgcaatgaaggtatttttgattttctatatcgcctgcgtagtgattacctgggcggtatatggtcggcattctaaaaaataa

SEQ ID NO: 6048 - DNA, 3744 bp, Escherichia coli
  CDS (1)...(3744)
atgagtaaattcctggaccggtttcgctacttcaaacagaagggtgaaacctttgccgatgggcatggccagcttctcaataccaaccgtgactgggaggatggatatcgccagcgttggcagcatgacaaaatcgtccgctctacccacggggtaaactgcaccggctcctgcagctggaaaatctacgtcaaaaacggtctggtcacctgggaaacccagcagactgactatccgcgtacccgtccggatctgccaaaccatgaacctcgcggctgcccgcgcggtgccagctactcctggtatctttacagtgccaaccgcctgaaatacccgatgatgcgcaaacgcctgatgaaaatgtggcgtgaagcgaaggcgctgcatagcgatccggttgaggcatgggcttctatcattgaagacgccgataaagcgaaaagctttaagcaggcgcgtggacgcggtggatttgttcgttcttcctggcaggaggtgaacgaactgatcgccgcatctaacgtttacaccatcaaaaactacggcccggaccgtgttgctggtttctcgccaattccggcaatgtcgatggtttcttacgcatcgggtgcacgctatctctcgctgattggcggtacttgcttaagcttctacgactggtactgcgacttgcctcctgcgtctccgcaaacctggggcgagcaaactgacgtaccggaatctgctgactggtacaactccagctacatcatcgcctgggggtcaaacgtgccgcagacgcgtaccccggatgctcacttctttactgaagtgcgttacaaagggaccaaaactgttgccgtcacaccagactacgctgaaatcgccaaactgtgcgatctgtggctggcaccgaaacagggcaccgatgcggcaatggcgctggcgatgggccacgtaatgctgcgtgaattccacctcgacaacccaagccagtatttcaccgactatgtgcgtcgctacaccgacatgccgatgctggtgatgctggaagaacgcgacggttactacgctgcaggtcgtatgctgcgcgctgctgatctggttgatgcgctgggccaggaaaacaatccggaatggaaaactgtcgcctttaataccaatggcgaaatggttgcgccgaacggttctattggcttccgctggggcgagaagggcaaatggaatcttgagcagcgcgacggcaaaactggcgaagaaaccgagctgcaactgagcctgctgggtagccaggatgagatcgctgaggtaggcttcccgtactttggtggcgacggcacggaacacttcaacaaagtggaactggaaaacgtgctgctgcacaaactgccggtgaaacgcctgcaactggctgatggcagcaccgccctggtgaccaccgtttatgatctgacgctggcaaactacggtctggaacgtggcctgaacgacgttaactgtgcaaccagctatgacgatgtgaaagcttataccccggcctgggccgagcagattaccggcgtttctcgcagccagattattcgcatcgcccgtgaatttgccgataacgctgataaaacgcacggtcgttcgatgattatcgtcggtgcggggctgaaccactggtatcacctcgatatgaactatcgtggtctgatcaacatgctgattttctgcggctgtgtcggtcagagcgggggcggctgggcgcactatgtaggtcaggaaaaactgcgtccgcaaaccggctggcagccgctggcgtttgcccttgactggcagcgtccggcgcgtcacatgaacagcacttcttatttctataaccactccagccagtggcgttatgaaaccgtcacggcggaagagttgctgtcaccgatggcggacaaatcccgctataccggacacttgatcgactttaacgtccgtgcggaacgcatgggctggctgccgtctgcaccgcagttaggcactaacccgctgactatcgctggcgaagcggaaaaagccgggatgaatccggtggactatacggtgaaatccctgaaagagggttccatccgttttgcggcagaacaaccagaaaacggtaaaaaccacccgcgcaacctgttcatctggcgttctaacctgctcggttcttccggtaaaggtcatgagtttatgctcaagtacctgctggggacggagcacggtatccagggtaaagatctggggcaacagggcggcgtgaagccggaagaagtggactggcaggacaatggtctggaaggcaagctggatctggtggttacgctggacttccgtctgtcgagcacctgtctctattccgacatcattttgccgacggcgacctggtacgaaaaagacgacatgaatacttcggatatgcatccgtttattcacccgctgtctgcggcggtcgatccggcctgggaagcgaaaagcgactgggaaatctacaaagccatcgcgaagaaattctccgaagtgtgcgtcggccatctgggtaaagaaaccgacatcgtcacgctgcctatccagcatgactctgccgctgaactggcgcagccgctggatgtgaaagactggaaaaaaggcgagtgcgacctgatcccaggtaaaaccgcgccacacattatggtcgtagagcgcgattatccggcgacttacgaacgctttacctctatcggcccgctgatggagaaaatcggtaatggcggtaaagggattgcctggaacacccagagcgagatggatctgctgcgtaagctcaactacaccaaagcggaaggtccggcgaaaggccagccgatgctgaacaccgcaattgatgcggcagagatgatcctgacactggcaccggaaaccaacggtcaggtagccgtgaaagcctgggctgccctgagcgaatttaccggtcgtgaccatacgcatctggcgctgaataaagaagacgagaagatccgcttccgcgatattcaggcacagccgcgcaaaattatctccagcccgacctggtctggtctggaagatgaacacgtttcttacaacgccggttacaccaacgttcacgagctgatcccatggcgtacgctctctggtcgtcagcaactgtatcaggatcaccagtggatgcgtgatttcggtgaaagcctgctggtttatcgtccgccgatcgacacccgttcggtgaaagaagtgataggccagaaatccaacggcaaccaggaaaaagcgctcaacttcctgacgccgcaccagaagtggggtatccactccacctacagcgacaacctgctgatgctgactttaggtcgcggtggtccggtggtctggttgagtgaagccgatgccaaagatctgggtatcgccgataacgactggattgaagtcttcaacagcaacggtgctctgactgcccgtgcggttgtcagccagcgtgttccggcagggatgaccatgatgtaccacgcgcaggaacgtatcgttaacctgcctggttcggaaattacccaacagcgtggtggtatccataactcggtcacccgtatcacgccgaaaccgacgcatatgatcggcggctatgcccatctggcatacggctttaactactatggcaccgtaggttctaaccgcgatgagtttgttgtagtgcgtaagatgaagaacattgactggttagatggcgaaggcaatgaccaggtacaggagagcgtaaaatga

SEQ ID NO: 6049 - DNA, 618 bp, Escherichia coli
  CDS (1)...(618)
atggcacagctatatttctactattccgcaatgaatgcgggtaagtctacagcattgttgcaatcttcatacaattaccaggaacgcggcatgcgcactgtcgtatatacggcagaaattgatgatcgctttggtgccgggaaagtcagttcgcgtataggtttgtcatcgcctgcaaaattatttaaccaaaattcatcattatttgatgagattcgtgcggaacatgaacagcaggcaattcattgcgtactggttgatgaatgccagtttttaaccagacaacaagtatatgaattatcggaggttgtcgatcaactcgatatacccgtactttgttatggtttacgtaccgattttcgaggtgaattatttattggcagccaatacttactggcatggtccgacaaactggttgaattaaaaaccatctgtttttgtggccgtaaagcaagcatggtgctgcgtcttgatcaagcaggcagaccttataacgaaggtgagcaggtggtaattggtggtaatgaacgatacgtttctgtatgccgtaaacactataaagaggcgttacaagtcgactcattaacggctattcaggaaaggcatcgccacgattaa

SEQ ID NO: 6050 - DNA, 2676 bp, Escherichia coli
  CDS (1)...(2676)
atggctgttactaatgtcgctgaacttaacgcactcgtagagcgtgtaaaaaaagcccagcgtgaatatgccagtttcactcaagagcaagtagacaaaatcttccgcgccgccgctctggctgctgcagatgctcgaatcccactcgcgaaaatggccgttgccgaatccggcatgggtatcgtcgaagataaagtgatcaaaaaccactttgcttctgaatatatctacaacgcctataaagatgaaaaaacctgtggtgttctgtctgaagacgacacttttggtaccatcactatcgctgaaccaatcggtattatttgcggtatcgttccgaccactaacccgacttcaactgctatcttcaaatcgctgatcagtctgaagacccgtaacgccattatcttctccccgcacccgcgtgcaaaagatgccaccaacaaagcggctgatatcgttctgcaggctgctatcgctgccggtgctccgaaagatctgatcggctggatcgatcaaccttctgttgaactgtctaacgcactgatgcaccacccagacatcaacctgatcctcgcgactggtggtccgggcatggttaaagccgcatacagctccggtaaaccagctatcggtgtaggcgcgggcaacactccagttgttatcgatgaaactgctgatatcaaacgtgcagttgcatctgtactgatgtccaaaaccttcgacaacggcgtaatctgtgcttctgaacagtctgttgttgttgttgactctgtttatgacgctgtacgtgaacgttttgcaacccacggcggctatctgttgcagggtaaagagctgaaagctgttcaggatgttatcctgaaaaacggtgcgctgaacgcggctatcgttggtcagccagcctataaaattgctgaactggcaggcttctctgtaccagaaaacaccaagattctgatcggtgaagtgaccgttgttgatgaaagcgaaccgttcgcacatgaaaaactgtccccgactctggcaatgtaccgcgctaaagatttcgaagacgcggtagaaaaagcagagaaactggttgctatgggcggtatcggtcatacctcttgcctgtacactgaccaggataaccaaccggctcgcgtttcttacttcggtcagaaaatgaaaacggcgcgtatcctgattaacaccccagcgtctcagggtggtatcggtgacctgtataacttcaaactcgcaccttccctgactctgggttgtggttcttggggtggtaactccatctctgaaaacgttggtccgaaacacctgatcaacaagaaaaccgttgctaagcgagctgaaaacatgttgtggcacaaacttccgaaatctatctacttccgccgtggctccctgccaatcgcgctggatgaagtgattactgatggccacaaacgtgcgctcatcgtgactgaccgcttcctgttcaacaatggttatgctgatcagatcacttccgtactgaaagcagcaggcgttgaaactgaagtcttcttcgaagtagaagcggacccgaccctgagcatcgttcgtaaaggtgcagaactggcaaactccttcaaaccagacgtgattatcgcgctgggtggtggttccccgatggacgccgcgaagatcatgtgggttatgtacgaacatccggaaactcacttcgaagagctggcgctgcgctttatggatatccgtaaacgtatctacaagttcccgaaaatgggcgtgaaagcgaaaatgatcgctgtcaccaccacttctggtacaggttctgaagtcactccgtttgcggttgtaactgacgacgctactggtcagaaatatccgctggcagactatgcgctgactccggatatggcgattgtcgacgccaacctggttatggacatgccgaagtccctgtgtgctttcggtggtctggacgcagtaactcacgccatggaagcttatgtttctgtactggcatctgagttctctgatggtcaggctctgcaggcactgaaactgctgaaagaatatctgccagcgtcctaccacgaagggtctaaaaatccggtagcgcgtgaacgtgttcacagtgcagcgactatcgcgggtatcgcgtttgcgaacgccttcctgggtgtatgtcactcaatggcgcacaaactgggttcccagttccatattccgcacggtctggcaaacgccctgctgatttgtaacgttattcgctacaatgcgaacgacaacccgaccaagcagactgcattcagccagtatgaccgtccgcaggctcgccgtcgttatgctgaaattgccgaccacttgggtctgagcgcaccgggcgaccgtactgctgctaagatcgagaaactgctggcatggctggaaacgctgaaagctgaactgggtattccgaaatctatccgtgaagctggcgttcaggaagcagacttcctggcgaacgtggataaactgtctgaagatgcattcgatgaccagtgcaccggcgctaacccgcgttacccgctgatctccgagctgaaacagattctgctggatacctactacggtcgtgattatgtagaaggtgaaactgcagcgaagaaagaagctgctccggctaaagctgagaaaaaagcgaaaaaatccgcttaa

SEQ ID NO: 6051 - DNA, 1014 bp, Escherichia coli
  CDS (1)...(1014)
atgaacgtaattgaaactgcaactgtgccgctcgcacaacaacaggctgacgcactgctgaacgtgaaagatttgcgtgtcacctttagtaccccggacggcgacgtcacggcggtcaatgatttgaatttttccctacgtgccggagaaacgctgggtattgtaggtgagtctggttcgggtaaatcgcaaactgcatttgcgttgatgggcctgttggctgccaacggacgtattggcggatcggcaaccttcaatgggcgtgaaatcctcaatttgccagagcatgaactcaataaactgcgcgctgaacaaatctcaatgatttttcaggacccaatgacttcgttgaatccctatatgcgcgtcggtgagcagttgatggaagtgctgatgctgcataagaacatgagcaaagctgaggcgtttgaagagtcggtgcggatgctcgatgcggtaaaaatgccggaagcgcgtaaacgcatgaaaatgtacccgcacgaattttctggcggcatgcgtcagcgagtcatgattgcgatggccttgttatgtcgacctaagctgctgattgcggatgaaccaacaactgcgctggacgtcaccgtacaggcgcagatcatgacgctattaaatgaactgaagcgggaatttaataccgccatcattatgatcacccacgatcttgtcgtggtggcggggatctgcgacaaagtgctggtaatgtacgccgggcgcacgatggaatatggcaacgcgcgcgatgtcttttatcaacccgttcatccttattctatcggtttgctcaacgcggtgccgcgtctcgatgcggaaggtgaaacaatgttgaccatcccgggtaatccgccaaacctgctgcgattaccgaaaggttgcccgttccagccacgttgtccgcatgcgatggaaatttgtagtagcgcaccgccgctggaagagtttacgcctggccgtctgcgtgcttgctttaaaccggtggaggaactgttatga

SEQ ID NO: 6052 - DNA, 639 bp, Escherichia coli
  CDS (1)...(639)
atgaaaaagttaacagtggcggctttggcagtaacaactcttctctctggcagtgcctttgcgcatgaagcaggcgaattttttatgcgtgcaggttctgcaaccgtacgtccaacagaaggtgctggtggtacgttaggaagtctgggtggattcagcgtgaccaataacacgcaactgggccttacgtttacttatatggcgaccgacaacattggtgtggaattactggcagcgacgccgttccgccataaaatcggcacccgggcgaccggcgatattgcaaccgttcatcatctgccaccaacactgatggcgcagtggtattttggtgatgccagcagcaaattccgtccttacgttggggcaggtattaactacaccaccttctttgataatggatttaacgatcatggcaaagaggcagggctttccgatctcagtctgaaagattcctggggagctgccgggcaggtgggggttgattatctgattaaccgtgactggttggttaacatgtcagtgtggtacatggatatcgataccaccgccaattataagctgggcggtgcacagcaacacgatagcgtacgcctcgatccgtgggtgtttatgttctcagcaggatatcgtttttaa

SEQ ID NO: 6053 - DNA, 1596 bp, Escherichia coli
  CDS (1)...(1596)
atggctgacattctgctgctcgataatatcgactcttttacgtacaacctggcagatcagttgcgcagcaatgggcataacgtggtgatttaccgcaaccatattccggcgcaaaccttaattgaacgcctggcgaccatgagcaatccggtgctgatgctttctcctggccccggtgtgccgagcgaagccggttgtatgccggaactcctcacccgcttgcgtggcaagctgcccattattggcatttgcctcggacatcaggcgattgtcgaagcttacgggggctatgtcggtcaggcgggcgaaattctccacggtaaagcctccagcattgaacatgacggtcaggcgatgtttgccggattaacaaacccgctgccggtggcgcgttatcactcgctggttggcagtaacattccggccggtttaaccatcaacgcccattttaatggcatggtgatggcagtacgtcacgatgcggatcgcgtttgtggattccagttccatccggaatccattctcaccacccagggcgctcgcctgctggaacaaacgctggcctgggcgcagcagaaactagagccagccaacacgctgcaaccgattctggaaaaactgtatcaggcgcagacgcttagccaacaagaaagccaccagctgttttcagcggtggtgcgtggcgagctgaagccggaacaactggcggcggcgctggtgagcatgaaaattcgcggtgagcacccgaacgagatcgccggggcagcaaccgcgctactggaaaacgcagcgccgttcccgcgcccggattatctgtttgctgatatcgtcggtactggcggtgacggcagcaacagtatcaatatttctaccgccagtgcgtttgtcgccgcggcctgtgggctgaaagtggcgaaacacggcaaccgtagcgtctccagtaaatctggttcgtccgatctgctggcggcgttcggtattaatcttgatatgaacgccgataaatcgcgccaggcgctggatgagttaggtgtatgtttcctctttgcgccgaagtatcacaccggattccgccacgcgatgccggttcgccagcaactgaaaacccgcaccctgttcaatgtgctggggccattgattaacccggcgcatccgccgctggcgttaattggtgtttatagtccggaactggtgctgccgattgccgaaaccttgcgcgtgctggggtatcaacgcgcggcggtggtgcacagcggcgggatggatgaagtttcattacacgcgccgacaatcgttgccgaactgcatgacggcgaaattaaaagctatcagctcaccgcagaagactttggcctgacaccctaccaccaggagcaactggcaggcggaacaccggaagaaaaccgtgacattttaacacgtttgttacaaggtaaaggcgacgccgcccatgaagcagccgtcgctgcgaacgtcgccatgttaatgcgcctgcatggccatgaagatctgcaagccaatgcgcaaaccgttcttgaggtactgcgcagtggttccgcttacgacagagtcaccgcactggcggcacgagggtaa

SEQ ID NO: 6054 - DNA, 2598 bp, Escherichia coli
  CDS (1)...(2598)
atgggtaaagctcttgtcatcgttgagtccccggcaaaagccaaaacgatcaacaagtatctgggtagtgactacgtggtgaaatccagcgtcggtcacatccgcgatttgccgaccagtggctcagctgccaaaaagagtgccgactctacctccaccaagacggctaaaaagcctaaaaaggatgaacgtggcgctctcgtcaaccgtatgggggttgacccgtggcacaattgggaggcgcactatgaagtgttgcctggtaaagagaaggtcgtctctgaactgaaacaactggctgaaaaagccgaccacatctatctcgcaaccgaccttgaccgcgaaggggaagccattgcatggcacctgcgggaagtgattgggggtgatgatgcgcgctatagccgagtggtgtttaacgaaattactaaaaacgcgatccgccaggcatttaacaaaccgggtgagctgaatattgatcgtgttaatgcccagcaggcgcgtcgctttatggaccgcgtggtggggtatatggtttcgccgctgctatggaaaaagatcgctcgtggcctgtctgccggtcgtgtgcagtcggtggcggttcgcctggtggtcgagcgtgagcgtgaaattaaagcgttcgtgccggaagagttctgggaagtcgatgccagcacgaccacgccatctggtgaagcgttggcgttacaggtgactcatcagaacgacaaaccgttccgtccggtcaacaaagaacaaactcaggctgcggtaagtctgctggaaaaagcgcgctacagcgtgctggaacgtgaagacaaaccgacaaccagtaaacctggcgctccttttattacctctacgctgcaacaagctgccagcacccgtcttggatttggcgtgaaaaaaaccatgatgatggcgcagcgtttgtatgaagcaggctatatcacttacatgcgtaccgactccactaacctgagtcaggacgcggtaaatatggttcgcggttatatcagcgataattttggtaagaaatatctgccggaaagtccgaatcagtacgccagcaaagaaaactcacaggaagcgcacgaagcgattcgtccttctgacgtcaatgtgatggcggaatcgctgaaggatatggaagcagatgcgcagaaactgtaccagttaatctggcgtcagttcgttgcctgccagatgaccccagcgaaatatgactccacgacgctgaccgttggtgcgggcgatttccgcctgaaagcacgcggtcgtattttgcgttttgatggctggacaaaagtgatgcctgcgttgcgtaaaggcgatgaagatcgcatcttaccagcagttaataaaggcgatgctctgacgctcgttgaacttacaccagcccagcactttaccaagccgccagcccgtttcagtgaagcatcgctggttaaagagctggaaaaacgcggtatcggtcgtccgtctacctatgcgtcgatcatttcgaccattcaggatcgtggctacgtgcgagtagaaaatcgtcgtttctatgcggaaaaaatgggcgaaatcgtcaccgatcgccttgaagaaaatttccgcgagttaatgaactacgactttaccgcgcagatggaaaacagcctcgaccaggtggcaaatcacgaagcagagtggaaagctgtactggatcacttcttctcggatttcacccagcagttagataaagctgaaaaagatccggaagagggtggtatgcgcccgaaccagatggttctgaccagcattgactgcccgacttgtggtcgcaaaatggggattcgcacagcgagcaccggggtattccttggctgttctggctatgcgctgccgccgaaagagcgttgcaaaaccaccattaacctggtgccggaaaacgaagtgctgaacgtgctggaaggcgaagatgctgaaaccaacgcgctgcgcgcaaaacgtcgttgcccgaaatgcggcacggcgatggacagctatctcatcgatccgaaacgtaagttgcatgtctgtggtaataacccaacctgcgacggttacgagatcgaagagggcgaattccgcattaaaggttatgacggcccgatcgttgagtgtgaaaaatgtggctctgaaatgcacctgaaaatggggcgtttcggtaaatacatggcctgcaccaacgaagagtgtaaaaacacacgtaagattttacgtaacggcgaagtggcaccaccgaaagaagatccggtgccattacctgagctgccgtgcgaaaaatcagatgcttatttcgtgctgcgtgacggtgctgccggtgtgttcctggctgccaacactttcccgaaatcgcgtgaaacgcgtgcgccactggtggaagagctttatcgcttccgcgaccgtctgccggaaaaactgcgttatctggccgatgcgccacagcaggatccggaaggtaataagaccatggttcgctttagccgtaaaaccaaacagcaatatgtctcttcggaaaaagacggaaaggcgactggctggtcagcattttatgttgatggcaaatgggttgaaggaaaaaaataa

SEQ ID NO: 6055 - DNA, 789 bp, Escherichia coli
  CDS (1)...(789)
atgggttttctttccggtaagcgcattctggtaaccggtgttgccagcaaactatccatcgcctacggtatcgctcaggcgatgcaccgcgaaggagctgaactggcattcacctaccagaacgacaaactgaaaggccgcgtagaagaatttgccgctcaattgggttctgacatcgttctgcagtgcgatgttgcagaagatgccagcatcgacaccatgttcgctgaactggggaaagtttggccgaaatttgacggtttcgtacactctattggttttgcacctggcgatcagctggatggtgactatgttaacgccgttacccgtgaaggcttcaaaattgcccacgacatcagctcctacagcttcgttgcaatggcaaaagcttgccgctccatgctgaatccgggttctgccctgctgaccctttcctaccttggcgctgagcgcgctatcccgaactacaacgttatgggtctggcaaaagcgtctctggaagcgaacgtgcgctatatggcgaacgcgatgggtccggaaggtgtgcgtgttaacgccatctctgctggtccgatccgtactctggcggcctccggtatcaaagacttccgcaaaatgctggctcattgcgaagccgttaccccgattcgccgtaccgttactattgaagatgtgggtaactctgcggcattcctgtgctccgatctctctgccggtatctccggtgaagtggtccacgttgacggcggtttcagcattgctgcaatgaacgaactcgaactgaaataa

SEQ ID NO: 6056 - DNA, 1281 bp, Escherichia coli
  CDS (1)...(1281)
atgaccgaacataccagcagttactacgccgccagtgcgaataaatatgcaccattcgacacgctgaatgagtcaatcacctgcgacgtttgcgtggttggcggcggctataccgggctctcctccgcgctgcatctggcggaagcgggctttgacgtagtggttctcgaagcctcacgcatcggctttggcgcaagcgggcgcaatggcggacagcttgtgaactcctacagccgcgacatcgacgtgatcgaaaaaagctacggcatggacaccgcccgtatgctcggcagcatgatgttcgaaggtggtgagatcatccgcgaacgtatcaaacgttatcagattgactgcgactaccgccccggcggcctgtttgtggcgatgaatgataaacagctcgccacacttgaagagcagaaagagaactgggaacgctacggcaataaacagctggaattgctggacgccaacgccattcgccgtgaagtagccagcgatcgctataccggtgcgctgctggatcacagcggtgggcatattcatccgctaaaccttgccattggcgaagcggacgccatccgcctcaacggcgggcgcgtgtatgaactttctgccgtgacgcagatccagcacaccacgccagccgttgtgcgaactgccaaaggtcaggtgacggcgaagtatgtgattgtcgccgggaatgcgtatctgggcgataaagtagagccggaactggcgaaacgcagcatgccgtgcggcacgcaggtgatcaccaccgaacggctgtcggaagatttagcccgttcgctgatcccgaaaaactactgtgtggaagactgtaactatctgcttgattactaccgtcttaccgccgacaaccgcctgctgtacggcggcggcgtggtctacggcgcgcgcgacccggatgacgttgagcgccttgtggtgccgaaactgctgaaaaccttcccgcagctgaagggcgtgaaaattgattaccgctggacgggcaacttcctgctgaccctgtcgcgtatgccgcagtttggtcgcctcgataccaacatctattacatgcagggctacagcggccacggcgtgacctgtactcatctagccggacgtttgattgccgaactgctgcgcggcgacgccgaacgtttcgatgccttcgccaatctgccgcattacccgttccccggcgggcgcacgctgcgtgtgccgtttaccgcgatgggcgcggcgtattacagcctgcgcgatcgtctgggcgtttaa

SEQ ID NO: 6057 - DNA, 1056 bp, Escherichia coli
  CDS (1)...(1056)
gtgaaaagtgcaatgacaagctctccgctgcgggtcgcgataataggcgcaggccaggtggcggataaggttcatgcttcgtactactgcacccgcaacgatctggaactggtggctgtctgtgacagccgcctttcccaggcgcaggcgctggcagaaaaatacgggaatgcatccgtgtgggacgatccgcaggccatgctgctggcggtgaaacctgatgtggttagcgtctgctcacctaaccgttttcattacgaacataccctgatggcactggaagcgggctgccatgtgatgtgcgaaaaaccgcccgccatgacgccagaacaggcgcgggaaatgtgcgataccgcgcgcaaactgggcaaggtgctggcctacgactttcaccatcgttttgcgctcgatacgcaacagctgcgtgaacaggtgaccaacggcgttttgggagagatttacgttaccaccgcccgcgccctgcgtcgctgcggcgttcccggctggggtgtctttaccaataaagaactgcagggtggtggcccgctgatcgacatcggcattcatatgctggatgctgcgatgtatgtgctgggctttccggcggtgaaaagcgtgaatgcgcatagctttcaaaagatcggcacgcaaaagagctgtggtcaatttggtgagtgggatccggcaacttacagcgtcgaagattcgctgtttggcaccattgaatttcataacggcggcattctgtggctggaaacgtcatttgcactcaacatccgcgaacagtcgattatgaacgtcagcttttgtggtgataaagctggtgcgacgctgtttccagcacatatctacaccgataacaacggtgaattaatgacgctgatgcaacgggaaatagcagacgacaaccgccatttgcgcagcatggaagcctttatcaatcacgtacagggcaagcccgtgatgatagccgacgccgagcaggggtacatcatccagcaactggtggcggcgttgtatcaatccgcagaaacagggacgcgtgtggaattatga

SEQ ID NO: 6058 - DNA, 2268 bp, Escherichia coli
  CDS (1)...(2268)
atgaccaggccagtaacgttatcagaaccccatttcagccagcataccctgaacaagtatgcatcgctgatggcgcaggggaacggctatcttgggcttcgcgccagccatgaagaagattacacgcgccagacgcgagggatgtatctggcggggctgtatcatcgggcgggaaaaggtgaaatcaacgaactggtgaacctgcctgatgtcgtggggatggagattgccataaatggtgaggttttctcgttatcccacgaagcctggcagcgtgagcttgactttgccagtggcgaattacgccgcaatgttgtctggcgtaccagcaacggctcaggttacaccatcgccagccgtcgctttgtttcggcagaccaactgccgctcattgcgctggaaatcactattacgccactggacgccgacgcgtcagtgctgatttcaacaggcattgacgccacgcaaaccaatcacggtcgccaacatctcgacgaaacccaggtgcgggtgtttggtcagcatctgatgcaggggagctacaccacccaggatggacgcagtgatgtggccatcagctgttgctgtaaggtgagcggtgatgtgcagcaatgctataccgccaaagagcgccgtttactgcaacataccagtgcgcagcttcatgcaggcgagacaatgacgttgcaaaaactggtgtggatcgactggcgggatgacaggcaagctgctttagacgagtggggcagcgcgtcgcttcgccagcttgaaatgtgcgcgcagcagagttacgaccaacttcttgcagcatcaacagaaaactggcgtcaatggtggcagaaacgtcgtatcacggtaaatggcggcgaagcgcacgatcagcaagcgttagattatgcgctttatcatctgcgcatcatgacgcctgcccacgacgagcgcagcagcattgcggcaaaaggcttaaccggcgaaggctacaaaggccacgttttctgggatacagaagtatttttgttaccgtttcatctgtttagcgatccgacggttgcccgaagtttactgcgttatcgctggcacaacttgccaggcgcgcaggagaaagcgcgacgcaacggctggcagggcgcgctatttccgtgggaaagcgcgcgcagcggcgaagaagagacgccggaatttgccgccattaacattcgcaccgggctgcggcaaaaagtggcctcggcgcaggcggaacatcatctggtggccgatatcgcctgggcggttattcaatactggcagaccacgggggatgaaagtttcattgcgcatgaaggcatggcgctacttctggagacggcaaagttctggattagccgcgcggtgagagttaacgatcgtctggaaattcatgatgttattgggccagacgaatataccgaacatgtcaataataatgcatacaccagctatatggcccgctacaacgttcaacaggcgctgaatattgcccgccagttcggctgtagcgacgatgcgtttatccatcgcgccgaaatgttcctcaaagagctatggatgccagaaattcagcccgacggcgttttgccgcaggatgattcgtttatggctaagccggcgattaatctggcgaaatacaaagcggcggcggggaagcaaaccatactgctggattattcacgcgcagaagtgaacgagatgcagatcctcaaacaagctgatgtggtgatgctcaattacatgctgccggagcagttctcagcggcatcgtgtcttgccaatctgcaattttatgaaccgcgcactattcacgactcgtcattaagtaaagcaatccacggcattgttgccgcacgctgtggcctgctgacccaaagttatcagttctggcgcgaggggactgaaatcgatcttggtgctgatccgcatagttgtgatgatggtatccatgctgccgcaactggcgctatctggctgggggcgattcagggttttgccggggtgagcgtgcgtgacggtgaattgcatctcaatccggcgttacctgagcagtggcaacagttgtctttccctctgttctggcagggctgcgaattacaggtcactcttgacgcgcagcgtattgcgattcgaacttctgcgcccgtttcactgcgtttgaacggtcagcttataaccgtggctgaagaatctgttttctgtttgggtgattttattttgcccttcaatgggaccgctaccaaacatcaggaggatgaatga

SEQ ID NO: 6059 - DNA, 999 bp, Escherichia coli
  CDS (1)...(999)
atgtcccctactatttatgatattgccagggttgcaggcgtatcaaaatccaccgtatcacgcgtgctgaataagcaaactaatatctccccggaagcgcgcgaaaaagtgttacgggccattgaagaattacagtatcagccaaacaagctggcccgcgcgctgacctcttcgggttttgatgccattatggtgatttctacccgttcgaccaaaactacggcgggtaatccgtttttctctgaagttttgcatgccatcaccgccaaagctgaagaagaaggtttcgacgtgatattacaaacgtcgcacaatccggcagaagatctgcaaaaatgcgaaagcaaaattaagcagaaaatgattaaaggcattattatgctcagttcgccagcggatgagtcattttttgcccaactcgataaatatgatattccggtggtggtgattggcaaagttgaaggtcaatatgcccatgtttattctgtcgataccgataattttggcgacagcattgcgttgaccgatgcattaattgaaagtgggcatcaaaatattgcctgcctgcatgctccgcttgatgtccatgtttcggttgatcgcgttaatggttataagcagagcctggctgcgcataatattgcagtgcgtgatgaatggattgttgatggcggttatacccatgaaactgcattaaaagcagcacggcaattattaagccagtcaccgttgcctgaggcggtgtttgccactgacagcctgaaattaatgagcatttatcgtgcggcagcagagaaaaatattgctattccgcagcagttagcggtggtgggttatagcaatgaaacgctgtcatttattttaacgcctgcaccgggcggcatcgatgttccgacgcaggagttaggtcaacaaagctgcgagttattattccgcttaatttctggaaaaccgtcaccacagaatattaccgttgccacgcatatgacgctgaaataa

SEQ ID NO: 6060 - DNA, 1533 bp, Escherichia coli
  CDS (1)...(1533)
atgcccatgagtatgtcatccataccgtcgtcctcccaatccgggaagctctatggctgggtcgaaagaattggtaacaaggttccccatccttttctgctctttatctatttgattatcgtactcatggtgacgacggcaattttgtcggcctttggcgtcagtgcgaaaaacccgaccgatggtacgccggtcgtggtgaaaaacctgctcagtgtggaaggattacactggtttttacccaatgttattaaaaactttagcggttttgctccacttggtgcgatcctggcgctggttttaggtgccggtctggcggagcgcgtcggcttactgccagcactaatggttaaaatggcatcgcatgttaatgcccgctacgccagttatatggtgctgtttattgcttttttcagccacatttcttccgatgcggcgttagtgatcatgccaccgatgggtgcgctgatttttctggcggtgggcaggcatccagttgcaggtttactggctgccattgcaggcgtaggttgcggctttacggctaatttactgattgtcacaaccgacgtgttgctgtcggggatcagcacggaagcggcagctgcgttcaatccgcaaatgcacgtcagtgtaattgataactggtattttatggccagctccgtagtcgtactgacgattgttggcggcctgataaccgacaaaatcatcgagccacggttaggtcaatggcagggaaacagcgatgagaaactgcagacattgaccgaaagtcagcgttttggtttacgcatagcaggtgtcgtatcgctactttttattgctgcgattgcgctgatggtgatcccgcaaaacgggatattgcgcgatccgattaatcacaccgtgatgccatcaccctttattaaaggtatcgtgccactgatcattctttttttctttgttgtctcgctggcttatggcatcgctacccgcacaattcgacgtcaggcggatttaccgcatttaatgattgaaccgatgaaagagatggcgggatttatcgtgatggtttttcccctcgcccaatttgtcgccatgtttaactggagcaacatggggaaattcatcgccgtggggctgaccgatatactggaaagttcagggcttagcggcatcccggcgtttgtcggtctggcgttgctttcctctttcttatgcatgtttattgccagcggttccgcaatctggtcgattctcgcccccattttcgtaccaatgtttatgctacttggctttcacccggcatttgcgcaaatcctctttcgtattgccgactcatccgtattgcctttagcgccggtatctccttttgttccactgtttcttggattcctgcaacgctacaaaccagacgcgaaactgggtacttactattcgttagtcttgccctatccacttatctttttggtggtatggctgctgatgttgctggcgtggtatcttgtcggtctgccgataggtccgggtatttacccacgtttgtcttaa

SEQ ID NO: 6061 - DNA, 1446 bp, Escherichia coli
  CDS (1)...(1446)
atgcaggaaatctatcgttttatcgacgatgcgattgaagccgatcgccaacgttataccgatattgccgatcaaatctgggatcatccagaaacacgttttgaagagttctggtcagcggagcatctggcttcggcgctggaatctgcaggcttcaccgttacccgcaacgtaggcaatatcccaaatgcctttattgcttcgtttggtcaaggcaaaccggttatcgccctgctgggagaatatgacgccctggcaggtttaagtcagcaagcaggttgcgcgcaacctacatccgtgacgcccggtgaaaatggtcacggttgcggacacaatttgctgggaaccgccgcctttgccgctgcaatagccgtcaagaaatggctggaacaatatgggcaaggcggcacggtgcgcttttatggttgtcctggcgaagaaggcggctcgggtaaaacgttcatggttcgcgagggggtatttgatgatgtggatgcggcactcacctggcacccggaagcctttgccggtatgttcaatacccgcacgctggcaaacattcaggcatcatggcgctttaaagggatcgcagcacatgccgcgaattcccctcatttgggacgcagcgcccttgatgccgtaacgttgatgaccactggcaccaacttcctcaacgaacatattattgaaaaagcgcgcgtacactatgccatcacaaatagcggcgggatctcgcccaacgtggtccaggcgcaggcagaagtgctttatcttatccgcgcccccgaaatgaccgacgtgcagcatatttatgatcgggtcgccaaaatcgccgaaggtgcggcattgatgaccgaaaccacggttgaatgccgcttcgacaaagcctgttccagttatctcccgaatcgcaccttagaaaatgccatgtaccaggccctatcccattttggtaccccggaatggaactccgaagaactggcttttgcgaaacaaattcaggctacgctcacctccaacgatcggcaaaacagtctgaataatatcgccgcaaccggtggcgaaaacggcaaggtttttgcactacgtcatcgtgaaacggtactggcgaatgaagtcgctccatatgccgccaccgataacgtgcttgcggcatcgactgatgtcggcgacgtcagttggaaactgcctgttgcccagtgtttcagcccctgttttgccgtcggtacaccgctacatacgtggcaactggttagccaggggcgaacatctattgctcataaaggaatgctgctggcggcgaaaactatggcagcaaccacagtcaatctcttccttgattcagggctattgcaagaatgccaacaagagcatcagcaagtaacggacacgcaaccgtatcactgccctatcccgaaaaacgtgacaccgtcacctttaaaataa

SEQ ID NO: 6062 - DNA, 906 bp, Escherichia coli
  CDS (1)...(906)
atgaaccccgcagtggataatgagtttcagcaatggctttcccaaatcaatcaggtatgcggaaattttaccggacgcctgctgactgagcgttacacgggtgtactggacacgcattttgccaaaggactaaagctgagtaccgtgacaaccagcggggtgaatttatcccgcacctggcaggaagtaaaaggcagcgacgatgcctggttttacaccgtttttcagcttagtggtcaggcaataatggagcaggatgagcgtcaggtgcagattggcgctggcgatattacgttactcgatgcctcacgcccctgttcgctttactggcaggagtcttctaaacagatttcattacttttgccacgcactctgctggaacaatattttccccatcaaaaacctatctgcgcagaaagactggacgctgacttacccatggtgcaactcagtcatcgcctgttacaggagagcatgaataatccggcactttctgaaacagaaagtgaagctgcgctacaggcgatggtgtgtctgctgcgcccggtacttcatcagcgggaatctgttcaacctcgtcgtgaacgtcagtttcaaaaagtggttacgttgatagacgataatattcgcgaagagatattacgcccggagtggatagccggagagacaggtatgtcagtacgtagtttgtaccgaatgtttgccgataaaggtttggtagtcgcgcaatatattcgtaaccgtcgtctcgatttttgtgcagatgcgattcgccatgccgcagatgatgaaaaactggcaggcatcggctttcattggggattttctgaccagagtcatttttcaacggtatttaagcaacgctttgggatgacgccaggcgagtatcgacgtaaattccgctaa

SEQ ID NO: 6063 - DNA, 1131 bp, Escherichia coli
  CDS (1)...(1131)
gtgttgcagaggggatgtgacggctgcaaacaaaaccaatcccgtgagcctgctactattgatggattcatgccaaaagcacaggagagcattatggggcaacaaaagcagcgtaatcgacgttgggttctggcctcgcgtccacatggcgcacctgttccggagaatttccgtcttgaagaagatgatgtcgccacaccgggtgaaggacaggtgttactgcgcacagtttatttgtccctggacccgtatatgcgtggacgtatgagcgatgagccatcttattcaccgcctgttgatattggcggcgtgatggtcggcggtacggtgagccgtgtcgtggagtcgaatcatcctgattatcagtctggcgactgggtgctgggctacagtggatggcaagactatgacatatccagtggtgatgatctggtgaaacttggcgatcatccgcaaaatccatcgtggtcgctgggtgtgctagggatgccaggctttaccgcttatatgggcctactggatatcggtcagcctaaagagggcgaaacgttggtggtagctgcggcgacaggaccagtgggggcgacggtggggcaaatcggcaaacttaaaggttgcagagtggtgggggtagccggtggcgcggaaaaatgccgccatgctaccgaggtgttaggcttcgatgtttgtcttgatcaccacgcggatgattttgccgaacaactggcgaaagcgtgcccaaaaggtattgatatctattatgaaaacgtgggcggtaaggtattcgatgcggtgctaccgttacttaatacatctgcgcgcattcccgtctgcggattagtgagcagctataacgctacagagctaccacccggtccggatcgtttacctctgttgatggctacagtgctgaaaaaacgtattcgcttgcaaggttttattatcgctcaggattatggtcaccgcatccatgagtttcagagggagatggggcaatgggtgaaagaggataaaatccactaccgcgaagaaattactgacggtttagagaatgcgccacagacgtttatcggcctgctgaagggtaaaaacttcggcaaagtggtgatccgcgtggcgggtgatgattaa

SEQ ID NO: 6064 - DNA, 1389 bp, Escherichia coli
  CDS (1)...(1389)
atggcactgcaaaatgagaaaaatagtcgttatcttttgcgcgactggaaaccagaaaatccggccttctgggaaaataaaggaaaacatattgctcgaagaaatctctggatatcagtcagttgtctacttcttgccttctgtgtctggatgctatttagcgcagttaccgttaatctcaataaaatcggttttaattttactaccgatcaactctttttattaaccgcattaccctccgtttctggcgcattattgcgtgttccctactcctttatggtgcctatattcggtggacgccgatggacggtttttagtactgcaatcctgattattccttgcgtctggctcggaattgccgtgcaaaatccgaatactccttttgggatatttatcgttatcgctttgctatgcggttttgcaggtgcaaactttgcttcgagcatgggcaatatcagtttcttctttccaaaagccaaacaagggagcgctcttgggattaatggcggattaggaaacttaggtgtaagtgtaatgcagctggttgcaccgctggtcatttttgtacctgtatttgcctttctcggcgtcaatggcgtaccgcaggccgacggttcggtgatgtcgctggcgaatgccgcatggatttgggtaccgctactggcgattgccacgatcgccgcatggtcagggatgaatgatatcgccagttcacgcgcctcaattgccgaccagctccctgtcttacaacgcctgcatctctggctgctgagcctgctttaccttgccaccttcggttcgtttatcggtttttctgcgggttttgccatgctggcaaaaacccagttcccggatgtgaatattctgcgcctggcgttctttggcccatttatcggtgccatcgcgcggtcggttggtggtgctatttccgataagttcggcggcgtgcgggtgacgttgatcaactttatttttatggcgattttcagtgccctgctgttccttaccttaccgggcacaggctccggtaatttcatcgccttttacgccgtatttatggggctgtttctgactgcgggtctgggaagtggttctactttccagatgatcgccgtcatctttcgccagataaccatttatcgggtaaagatgaaaggcggtagtgatgagcaagctcataaagaagccgtcaccgaaacggcggcggctctgggctttatctcagccattggcgcagtgggcggcttttttattccgcaggcgtttggcatgtcgctcaatatgaccggctctccggtcggcgcgatgaaagtgtttttaatcttctacatcgtttgtgtgctgctgacctggctggtttatggtcggcggaagttcagccaaaaataa

SEQ ID NO: 6065 - DNA, 1041 bp, Escherichia coli
  CDS (1)...(1041)
atgcagaacatcatccgaaaaggaggaactatgaaggctgcagttgttacgaaggatcatcatgttgacgttacgtataaaacactgcgctcactgaaacatggcgaagccctgctgaaaatggagtgttgtggtgtatgtcataccgatcttcatgttaagaatggcgattttggtgacaaaaccggcgtaattctgggccatgaaggcatcggtgtggtggcagaagtgggtccaggtgtcacctcattaaaaccaggcgatcgtgccagcgtggcgtggttctacgaaggatgcggtcattgcgaatactgtaacagtggtaacgaaacgctctgccgttcagttaaaaatgccggatacagcgttgatggcgggatggcggaagagtgcatcgtggtcgccgattacgcggtaaaagtgccagatggtctggactcggcggcggccagcagcattacctgtgcgggagtcaccacctacaaagccgttaagctgtcaaaaattcgtccagggcagtggattgctatctacggtcttggcggtctgggtaacctcgccctgcaatacgcgaagaatgtctttaacgccaaagtgatcgccattgatgtcaatgatgagcagttaaaactggcaaccgaaatgggcgcagatttagcgattaactcacacaccgaagacgccgccaaaattgtgcaggagaaaactggtggcgctcacgctgcggtggtaacagcggtagctaaagctgcgtttaactcggcagttgatgctgtccgtgcaggcggtcgtgttgtggctgtcggtctaccgccggagtctatgagcctggatatcccacgtcttgtgctggatggtattgaagtggtcggttcgctggtcggcacgcgccaggatttaactgaagccttccagtttgccgccgaaggtaaagtggtgccgaaagtcgccctgcgtccgttagcggacatcaacaccatctttactgagatggaagaaggcaaaatccgtggccgcatggtgattgatttccgtcactaa

SEQ ID NO: 6066 - DNA, 954 bp, Escherichia coli
  CDS (1)...(954)
atgacaatcaacgattcggcaatttcagaacagggaatgtgtgaagaagaacaggtcgcgcggatcgcgtggttttactatcacgacgggctgacccagagcgagatcagcgatcgtctcggcctgacacgtttgaaagtgtcgcgattgctggagaaagggcatcagtccggcattattcgcgtacagattaattctcgctttgaaggctgtctggaatatgaaactcaattacgtcgtcagttttcgctgcaacatgtccgggtgatccctgggcttgcggatgctgatgtcggtgggcgactggggataggcgcggcgcatatgttgatgagtttacttcaaccacaacagatgctggcgattggttttggcgaggcaaccatgaatacgctgcaacgcttaagtggttttatttcgtcacagcaaattcgcctggtcacgctctccggtggcgtcggttcttatatgacgggaatcgggcagcttaacgcggcgtgcagtgtgaatattattccggctccgttgcgggcatcctccgctgacattgcccgtacgctaaaaaatgaaaattgcgtcaaagatgttctgttagccgcgcaagcagcggatgtggcgattgtcggcattggtgctgtgagtcaacaggacgatgcgacaatcattcgctccggttatatcagccagggcgaacagttaatgattggccgaaaaggggcggttggcgacattttaggctacttttttgatgcaaaaggtgacgttgtcacgaatatcaaaatacataacgaactgattggcttacctttaagcgcgctgaagaccatacccgtccgggttggcgtggcagggggagaaaataaagccgaagcaattgccgctgcaatgaaaggcggttatatcaacgcactggttaccgatcaggacacagcagcggcgattttacgtagttaa

SEQ ID NO: 6067 - DNA, 1191 bp, Escherichia coli
  CDS (1)...(1191)
atgacaacaaacactgtttcccgcaaagtggcgtggctacgggtcgttacgctggcagtcgccgccttcatcttcaacaccaccgaatttgtccctgttggcctgctctctgacattgcgcaaagttttcacatgcaaaccgctcaggtcggcatcatgttgaccatttacgcatgggtagtagcgctaatgtcattgccttttatgttaatgaccagtcaggttgaacggcgcaaattactgatctgcctgtttgtggtgtttattgccagccacgtactgtcgtttttgtcgtggagctttaccgttctggtgatcagtcgcattggtgtggcttttgcacatgcgattttctggtcgattacggcgtctctggcgatccgtatggctccggccgggaagcgagcacaggcattgagtttaattgccaccggtacagcactggcgatggtcttaggtttacctctcgggcgcattgtgggccagtatttcggttggcgaatgaccttcttcgcgattggtattggggcgcttatcacccttttgtgcctgattaagttacttcccttactgcccagtgagcattccggttcactgaaaagcctcccgctattgttccgccgcccggcattgatgagcatttatttgttaactgtggtggttgtcaccgcccattacacggcatacagctatatcgagccttttgtacaaaacattgcgggattcagcgccaactttgccacggcattactgttattactcggtggtgcgggcattattggcagcgtgattttcggtaaactgggtaatcagtatgcgtctgcgttggtgagtacggcgattgcgctgttgctggtgtgcctggcattgctgttacctgcggcgaacagtgaaatacacctcggggtgctgagtattttctgggggatcgcgatgatgatcatcgggcttggtatgcaggttaaagtgctggcgctggcaccagatgctaccgacgtcgcgatggcgctattctccggcatatttaatattggaatcggggcgggtgcgttggtaggtaatcaggtgagtttgcactggtcaatgtcgatgattggttatgtgggcgcggtgcctgcttttgccgcgttaatttggtcaatcattatatttcgccgctggccagtgacactcgaagaacagacgcaatag

SEQ ID NO: 6068 - DNA, 1254 bp, Escherichia coli
  CDS (1)...(1254)
gtgagccgtactacaactgttgatggcgctccggcaagcgacactgacaagcaaagcatttctcagccaaatcaatttattaaacgcggtacgccgcaatttatgcgcgtcaccctggcgctgttctctgccggactggcaacatttgcacttctctattgtgtgcagcctatccttccggtgctttcgcaggagtttggcttaacccccgcgaacagtagtatttcactgtccatttccacggcgatgttggctattggtttgctgtttactggcccgctatccgatgccattggtcgcaaaccagtgatggtcacggcgctactgttggcctccatttgtacgttactttcgacaatgatgaccagctggcacggcattttgattatgcgcgccttgattgggctttcgttaagtggcgtggcagctgttggcatgacttatcttagcgaggaaatccatcccagtttcgtggccttttcaatggggttgtatatcagcggcaactcaattggcggcatgagcggacgcttaattagcggtgtcttcacggactttttcaactggcgaattgctctggcggcaatcggttgtttcgcgctggcctcggcgttgatgttctggaaaatcctccctgaatcacgccattttcgcccgacttcgctgcgccctaagacgttgtttatcaactttcgtctgcactggcgtgaccggggattaccgttattgttcgcagaaggctttttgctgatggggtcgttcgtcacgctgtttaattacatcggctatcggttgatgctctccccctggcatgtcagtcaggccgtggttggcttattatcgctggcttatttgaccggtacatggagctcacccaaagccggaaccatgaccacccgctatgggcgtggtccagtgatgttgttttcgacgggggttatgctgtttggtttactgatgaccttattcagctcgctgtggctgatctttgccggaatgttactcttctcagcaggattcttcgcagcccactcagtagccagcagctggatcggcccccgcgcaaaacgcgctaaaggccaggcctcctcgctgtatctgttcagttactatctggggtcgagtattgccgggacgctgggtggtgttttctggcataactatggctggaacggcgtcggcgcatttattgctctgatgctggtcattgctctgctggtcgggacgcgtttgcatcgtcgtctgcacgcctga

SEQ ID NO: 6069 - DNA, 1533 bp, Escherichia coli
  CDS (1)...(1533)
atgcgaattggcataccaagagaacggttaaccaatgaaacccgtgttgcagcaacgccaaaaacagtggaacagctgctgaaactgggttttaccgtcgcggtagagagcggcgcgggtcaactggcaagttttgacgataaagcgtttgtgcaagcgggcgctgaaattgtagaagggaatagcgtctggcagtcagagatcattctgaaggtcaatgcgccgttagatgatgaaattgcgttactgaatcctgggacaacgctggtgagttttatctggcctgcgcagaatccggaattaatgcaaaaacttgcggaacgtaacgtgaccgtgatggcgatggactctgtgccgcgtatctcacgcgcacaatcgctggacgcactaagctcgatggcgaacatcgccggttatcgcgccattgttgaagcggcacatgaatttgggcgcttctttaccgggcaaattactgcggccgggaaagtgccaccggcaaaagtgatggtgattggtgcgggtgttgcaggtctggccgccattggcgcagcaaacagtctcggcgcgattgtgcgtgcattcgacacccgcccggaagtgaaagaacaagttcaaagtatgggcgcggaattcctcgagctggattttaaagaggaagctggcagcggcgatggctatgccaaagtgatgtcggacgcgttcatcaaagcggaaatggaactctttgccgcccaggcaaaagaggtcgatatcattgtcaccaccgcgcttattccaggcaaaccagcgccgaagctaattacccgtgaaatggttgactccatgaaggcgggcagtgtgattgtcgacctggcagcccaaaacggcggcaactgtgaatacaccgtgccgggtgaaatcttcactacggaaaatggtgtcaaagtgattggttataccgatcttccgggccgtctgccgacgcaatcctcacagctttacggcacaaacctcgttaatctgctgaaactgttgtgcaaagagaaagacggcaatatcactgttgattttgatgatgtggtgattcgcggcgtgaccgtgatccgtgcgggcgaaattacctggccggcaccgccgattcaggtatcagctcagccgcaggcggcacaaaaagcggcaccggaagtgaaaactgaggaaaaatgtacctgctcaccgtggcgtaaatacgcgttgatggcgctggcaatcattctttttggctggatggcaagcgttgcgccgaaagaattccttgggcacttcaccgttttcgcgctggcctgcgttgtcggttattacgtggtgtggaatgtatcgcacgcgctgcatacaccgttgatgtcggtcaccaacgcgatttcagggattattgttgtcggagcactgttgcagattggccagggcggctgggttagcttccttagttttatcgcggtgcttatagccagcattaatattttcggtggcttcaccgtgactcagcgcatgctgaaaatgttccgcaaaaattaa

SEQ ID NO: 6070 - DNA, 1275 bp, Escherichia coli
  CDS (1)...(1275)
atggcaagcagtaacttgattaaacaattgcaagagcgggggctggtagcccaggtgacggacgaggaagcgttagcagagcgactggcgcaaggcccgatcgcgctctattgcggcttcgatcctaccgctgacagcttgcatttggggcatcttgttccattgttatgcctgaaacgcttccagcaggcgggccacaagccggttgcgctggtaggcggcgcgacgggtctgattggcgacccgagcttcaaagctgccgagcgtaagctgaacaccgaagaaactgttcaggagtgggtggacaaaatccgtaagcaggttgccccgttcctcgatttcgactgtggagaaaactctgctatcgcggcgaacaactatgactggttcggcaatatgaatgtgctgaccttcctgcgcgatattggcaaacacttctccgttaaccagatgatcaacaaagaagcggttaagcagcgtctcaaccgtgaagatcaggggatttcgttcactgagttttcctacaacctgttgcagggttatgacttcgcctgtctgaacaaacagtacggtgtggtgctgcaaattggtggttctgaccagtggggtaacatcacttctggtatcgacctgacccgtcgtctgcatcagaatcaggtgtttggcctgaccgttccgctgatcactaaagcagatggcaccaaatttggtaaaactgaaggcggcgcagtctggttggatccgaagaaaaccagcccgtacaaattctaccagttctggatcaacactgcggatgccgacgtttaccgcttcctgaagttcttcacctttatgagcattgaagagatcaacgccctggaagaagaagataaaaacagcggtaaagcaccgcgcgcccagtatgtactggcggagcaggtgactcgtctggttcacggtgaagaaggtttacaggcggcaaaacgtattaccgaatgcctgttcagcggttctttgagtgcgctgagtgaagcggacttcgaacagctggcgcaggacggcgtaccgatggttgagatggaaaagggcgcagacctgatgcaggcactggtcgattctgaactgcaaccttcccgtggtcaggcacgtaaaactatcgcctccaatgccatcaccattaacggtgaaaaacagtccgatcctgaatacttctttaaagaagaagatcgtctgtttggtcgttttaccttactgcgtcgcggtaaaaagaattactgtctgatttgctggaaataa

SEQ ID NO: 6071 - DNA, 900 bp, Escherichia coli
  CDS (1)...(900)
ttgcgtttgccttgctctggcaatactgattgcgtggtaactatgtcaattaaaacaattaagtatttctcaacaatcattgtagcggtagttgcggttcttgccggatggtggctgtggaattattacatgcaatctccgtggacacgcgacgggaaaatacgcgcagaacaggtttctatcaccccacaggtgtcgggacgtattgttgagctgaatataaaagacaaccagctggttaacgcgggggatcttctgctcacgatcgataaaacgccctttcagatcgccgagctgaacgcacaggctcagctggcgaaagcgcaatctgacctcgcaaaagccaataacgaagcgaatcgtcgtcgtcatctctcacaaaattttatttctgccgaagaactcgataccgctaacctcaatgttaaagcgatgcaggccagtgttgatgccgcacaggcgacgctgaaacaggcacaatggcaactggcgcaaacggaaattcgcgccccggtgagtggatgggtgactaaccttactacccgcatcggcgattacgctgataccgggaaaccgctgtttgcccttgtcgacagccactcgttttacgtcattggttattttgaagaaaccaagttgcgccatatccgcgaaggtgcaccagcacaaattaccctctatagtgataacaaaacgttacagggtcacgtttccagtatcggtcgggcgatttatgatcagagcgttgaaagtgactcaagccttattccggatgttaaacctaacgtcccctgggttcgactcgcccaacgcgttcccgtccgctttgcgctggataaagtcccaggcgatgtcacgttggtgtcgggcaccacctgtagcattgccgtaggtcaataa

SEQ ID NO: 6072 - DNA, 600 bp, Escherichia coli
  CDS (1)...(600)
atgaacaaacacaccgaacatgatactcgcgaacatctcctggcgacgggcgagcaactttgcctgcaacgtggattcaccgggatggggctaagcgaattactaaaaaccgctgaagtgccgaaagggtccttctatcactactttcgctctaaagaagcgtttggcgttgccatgcttgagcgtcattacgccgcatatcaccagcgactgactgagttgctgcaatccggcgaaggtaactaccgcgaccgcatactggcttattaccagcaaacactgaaccagttttgccaacatggaaccatcagtggttgcctgacagtaaaactctctgccgaagtgtgcgatctgtcagaagatatgcgcagcgcgatggataaaggtgctcgcggcgtgatcgccctgctctctcaggcgctggaaaatggccgtgagaaccattgtttaaccttttgtggcgaaccgctgcaacaggcacaagtgctttacgcactgtggcttggcgcgaatctgcaggccaaaatttcgcgcagtttcgagccactggaaaacgcgctggcccatgtaaaaaacattattgcgacgcctgccgtttag

SEQ ID NO: 6073 - DNA, 642 bp, Escherichia coli
  CDS (1)...(642)
atgtttacggggattgtacagggcaccgcaaaactggtgtcgattgacgagaaaccaaattttcgtacgcatgtggtggagttacccgaccacatgctggacggcctggaaaccggtgcttccgtggcgcataacggttgctgcctgaccgtgacggaaattaacggcaaccatgtcagttttgacctgatgaaagaaacgttacgcattaccaatcttggcgatttaaaagtgggggattgggtaaacgttgagcgtgcggcgaaattcagtgatgaaattggcggacacttaatgtcaggtcatattatgaccactgctgaagtggcgaaaatattaacctcagaaaataatcgccagatctggtttaaagtccaggatagtcagttgatgaaatatattctgtacaaaggatttattggcatcgacggtattagcctgaccgtcggcgaagtcacgccaacgcgtttttgcgtccatttaattccggaaacactggaacgcacgactcttgggaagaaaaaacttggcgcacgcgtcaacattgaaatcgatccacaaactcaggcagtggtagatacggtagaacgtgtgctggcggcacgagaaaatgccatgaatcaaccaggcacagaagcctga

SEQ ID NO: 6074 - DNA, 1413 bp, Escherichia coli
  CDS (1)...(1413)
atgaaaaagaccaaaattgtttgcaccatcggaccgaaaaccgaatctgaagagatgttagctaaaatgctggacgctggcatgaacgttatgcgtctgaacttctctcatggtgactatgcagaacacggtcagcgcattcagaatctgcgcaacgtgatgagcaaaactggtaaaaccgccgctatcctgcttgataccaaaggtccggaaatccgcaccatgaaactggaaggcggtaacgacgtttctctgaaagctggtcagacctttactttcaccactgataaatctgttatcggcaacagcgaaatggttgcggtaacgtatgaaggtttcactactgacctgtctgttggcaacaccgtactggttgacgatggtctgatcggtatggaagttaccgccattgaaggtaacaaagttatctgtaaagtgctgaacaacggtgacctgggcgaaaacaaaggtgtgaacctgcctggcgtttccattgctctgccagcactggctgaaaaagacaaacaggacctgatctttggttgcgaacaaggcgtagactttgttgctgcttcctttattcgtaagcgttctgacgttatcgaaatccgtgagcacctgaaagcgcacggcggcgaaaacatccacatcatctccaaaatcgaaaaccaggaaggcctcaacaacttcgacgaaatcctcgaagcctctgacggcatcatggttgcgcgtggcgacctgggtgtagaaatcccggtagaagaagttatcttcgcccagaagatgatgatcgaaaaatgtatccgtgcacgtaaagtcgttatcactgcgacccagatgctggattccatgatcaaaaacccacgcccgactcgcgcagaagccggtgacgttgcaaacgccatcctcgacggtactgacgcagtgatgctgtctggtgaatccgcaaaaggtaaatacccgctggaagcggtttctatcatggcgaccatctgcgaacgtaccgaccgcgtgatgaacagccgtctcgagttcaacaatgacaaccgtaaactgcgcattaccgaagcggtatgccgtggtgccgttgaaactgctgaaaaactggatgctccgctgatcgtggttgctactcagggcggtaaatctgctcgcgcagtacgtaaatacttcccggatgccaccatcctggcactgaccaccaacgaaaaaacggctcatcagttggtactgagcaaaggcgttgtgccgcagcttgttaaagagatcacttctactgatgatttctaccgtctgggtaaagaactggctctgcagagcggtctggcacacaaaggtgacgttgtagttatggtttctggtgcactggtaccgagcggcactactaacaccgcatctgttcacgtcctgtaa

SEQ ID NO: 6075 - DNA, 747 bp, Escherichia coli
  CDS (1)...(747)
atgttaagtattaaagatttacacgtcagcgtggaagataaagctatcctgcgcggattaagcctcgacgttcatcccggcgaagttcacgccattatggggccaaacggttcgggcaaaagtaccttatcggcaacgcttgccgggcgagaagattatgaagtgacgggcggcacggttgagttcaaaggcaaagatttgcttgcgctgtcgccggaagatcgcgcgggcgaaggcatctttatggccttccagtatccggtggagattccaggtgtcagtaaccagtttttcctgcaaacggcacttaatgcggtgcgcagctatcgcggccaggaaacgctcgaccgctttgattttcaggatttgatggaagagaaaatcgctctcctgaagatgccggaagatttattaacccgttcggtaaacgttggtttttccggcggcgagaaaaagcgcaacgatattttgcaaatggcggtgctggaaccggagttatgcattcttgatgagtcggactccgggctggatattgacgcattaaaagtggtcgccgatggcgtgaactcgctgcgtgatggcaagcgctcattcatcattgttacgcactaccaacgcattctcgactacatcaagcctgattacgttcatgtgctatatcagggacgaattgtgaaatccggcgatttcacgttggtcaaacaactggaggagcagggttatggctggcttaccgaacagcagtaa

SEQ ID NO: 6076 - DNA, 759 bp, Escherichia coli
  CDS (1)...(759)
atgaaaaccgtaactgtaaaagatctcgtcattggtacgggcgcacctaaaatcatcgtctcgctgatggcgaaagatatcgccagcgtgaaatccgaagctctcgcctatcgtgaagcggactttgatattctggaatggcgtgtggaccactatgccgacctctccaatgtggagtctgtcatggcggcagcaaaaattctccgtgagaccatgccagaaaaaccgctgctgtttaccttccgcagtgccaaagaaggcggcgagcaggcgatttccaccgaggcttatattgcactcaatcgtgcagccatcgacagcggcctggttgatatgatcgatctggagttatttaccggtgatgatcaggttaaagaaaccgtcgcctacgcccacgcgcatgatgtgaaagtagtcatgtccaaccatgacttccataaaacgccggaagccgaagaaatcattgcccgtctgcgcaaaatgcaatccttcgacgccgatattcctaagattgcgctgatgccgcaaagtaccagcgatgtgctgacgttgcttgccgcgaccctggagatgcaggagcagtatgccgatcgtccaattatcacgatgtcgatggcaaaaactggcgtaatttctcgtctggctggtgaagtatttggctcggcggcaacttttggtgcggtaaaaaaagcgtctgcgccagggcaaatctcggtaaatgatttgcgcacggtattaactattttacaccaggcataa

SEQ ID NO: 6077 - DNA, 2388 bp, Escherichia coli
  CDS (1)...(2388)
atgaaattcagtgaactgtggttacgcgaatgggtgaacccggcgattgatagcgatgcgctggcaaatcaaatcactatggcgggcctggaagttgacggtgtagaaccggttgccggcagcttccacggcgtggtcgttggtgaagtggttgagtgtgcgcagcatccgaacgctgacaaactgcgtgtgacaaaagtgaatgtcggcggcgatcgcctgctggacatcgtctgcggtgcgccaaactgccgtcagggcctgcgtgtagcggtagcgaccattggtgctgttctgccgggtgatttcaaaattaaagcggcgaaactgcgtggcgaaccgtctgaagggatgctgtgctccttctctgaactgggcatttctgacgatcacagcggcattatcgaactgcctgcggatgcgccgattggcaccgatatccgtgaatacctgaaacttgatgacaacaccatcgaaatcagcgtgacgccaaaccgtgccgactgcttaggcatcattggtgttgcgcgtgacgttgccgtgctgaaccagctgccgctggttcaaccggaaatcgttccggttggtgcgaccatcgacgacacgctgccgattacagtcgaagcgccggaagcctgcccgcgttatcttggccgtgtggtaaaaggcattaacgttaaagcgccaactccgctgtggatgaaagaaaaactgcgtcgttgcgggatccgttctatcgatgcagttgttgacgtcaccaactatgtgctgctcgaactgggccagccgatgcacgctttcgataaagatcgcattgaaggcggcattgtggtgcggatggcgaaagagggcgaaacgctggtgctgctcgacggtactgaagcgaagctgaatgctgacactctggtcatcgccgaccacaacaaggcgctggcgatgggcggcatcttcggtggcgaacactctggcgtgaatgacgaaacacaaaacgtgctgctggaatgcgcgttctttagcccgctgtctatcaccggtcgtgctcgtcgtcatggcctgcataccgatgcgtctcaccgttatgagcgtggcgttgatccggcactgcagcacaaagcgatggaacgtgcgacccgtctgctgatcgacatctgcggtggtgaggctggcccggtaattgatatcaccaacgaagcaacgctgccgaagcgtgcaaccatcactctacgtcgtagcaaactggatcgcctgatcggccatcatattgcggatgagcaggtaactgacattctgcgtcgtctcggctgcgaagtgaccgaaggcaaagacgaatggcaggcagttgcgccgagctggcgtttcgatatggagattgaagaagatctggttgaagaagtcgcgcgtgtttacggctacaacaacatcccggatgagccggtacaggcaagcctgattatgggtactcaccgtgaagctgacctgtcgctcaagcgcgtgaaaacgctgctcaacgacaaaggctatcaggaagtgatcacctacagcttcgttgatccgaaagtgcagcagatgatccatccaggcgttgaagccttactgctgccaagcccgatctctgttgaaatgtcagcaatgcgtctttctctgtggactggcctgctggcaaccgtggtgtacaaccagaaccgtcagcagaaccgtgtgcgcattttcgaaagcggtctgcgtttcgtaccagatactcaggcaccgttgggcattcgtcaggatctgatgttagccggtgtgatttgcggtaaccgttacgaagagcactggaacctggcaaaagagaccgttgatttctatgatttgaaaggcgatcttgaatccgttctcgacctgaccggtaaactgaatgaggttgagttccgtgcagaagcgaatccggcactgcatccggggcaatccgcagcgatttatctgaaaggtgaacgtattggttttgttggggttgttcatcctgaactggaacgtaaactggatcttaacggtcgcactctggtgttcgaactggagtggaacaagctcgcagaccgcgtggtgcctcaggcgcgcgagatttctcgcttcccggcgaaccgtcgtgacatcgcggtggtggtcgcagaaaacgttcccgcagcggatattttatccgaatgtaagaaagttggcgtaaatcaggtagttggcgtaaacttatttgacgtgtaccgcggtaagggtgttgcggaggggtataagagcctcgccataagcctgatcctgcaagataccagccgtacactcgaagaagaggagattgccgctaccgtcgccaaatgtgtagaggcattaaaagagcgattccaggcatcattgagggattga

SEQ ID NO: 6078 - DNA, 984 bp, Escherichia coli
  CDS (1)...(984)
atgtcacatctcgcagaactggttgccagtgcgaaggcggccattagccaggcgtcagatgttgccgcgttagataatgtgcgcgtcgaatatttgggtaaaaaagggcacttaacccttcagatgacgaccctgcgtgagctgccgccagaagagcgtccggcagctggtgcggttatcaacgaagcgaaagagcaggttcagcaggcgctgaatgcgcgtaaagcggaactggaaagcgctgcactgaatgcgcgtctggcggcggaaacgattgatgtctctctgccaggtcgtcgcattgaaaacggcggtctgcatccggttacccgtaccatcgaccgtatcgaaagtttcttcggtgagcttggctttaccgtggcaaccgggccggaaatcgaagacgattatcataacttcgatgctctgaacattcctggtcaccacccggcgcgcgctgaccacgacactttctggtttgacactacccgcctgctgcgtacccagacctctggcgtacagatccgcaccatgaaagcccagcagccaccgattcgtatcatcgcgcctggccgtgtttatcgtaacgactacgaccagactcacacgccgatgttccatcagatggaaggtctgattgttgataccaacatcagctttaccaacctgaaaggcacgctgcacgacttcctgcgtaacttctttgaggaagatttgcagattcgcttccgtccttcctacttcccgtttaccgaaccttctgcagaagtggacgtcatgggtaaaaacggtaaatggctggaagtgctgggctgcgggatggtgcatccgaacgtgttgcgtaacgttggcatcgacccggaagtttactctggtttcgccttcgggatggggatggagcgtctgactatgttgcgttacggcgtcaccgacctgcgttcattcttcgaaaacgatctgcgtttcctcaaacagtttaaataa

SEQ ID NO: 6079 - DNA, 357 bp, Escherichia coli
  CDS (1)...(357)
atggctcgcgtaaaacgtggtgttattgcacgtgcacgtcacaagaaaattttgaaacaagctaaaggctactacggtgcgcgttctcgcgtataccgcgttgccttccaggctgttatcaaagctggtcagtatgcttaccgtgaccgtcgtcaacgtaagcgtcagttccgtcaactgtggattgcgcgtatcaacgcagcagcacgtcagaacggtatttcttacagcaaattcatcaatggcctgaaaaaagcctctgttgaaatcgaccgtaagatcctggctgatatcgcagtattcgacaaagtagcgttcaccgctctggttgaaaaagcgaaagcagctctggcataa

SEQ ID NO: 6080 - DNA, 198 bp, Escherichia coli
  CDS (1)...(198)
atgccaaaaattaagaccgtacgcggtgctgctaagcgcttcaaaaaaaccggtaaaggtggttttaagcacaagcacgctaacctgcgtcacattctgaccaaaaaagcgaccaaacgtaaacgtcacctgcgtccgaaagccatggtttccaaaggcgatctgggcctggtaatcgcgtgcctgccgtacgcataa

SEQ ID NO: 6081 - DNA, 543 bp, Escherichia coli
  CDS (1)...(543)
attaaaggcggaaaacgagttcaaacggcgcgccctaaccgtatcaatggcgaaattcgcgcccaggaagttcgcttaacaggtctggaaggcgagcagcttggtattgtgagtctgagagaagctctggagaaagcagaagaagccggagtagacttagtcgagatcagccctaacgccgagccgccggtttgtcgtataatggattacggcaaattcctctatgaaaagagcaagtcttctaaggaacagaagaaaaagcaaaaagttatccaggttaaggaaattaaattccgtcctggtacagatgaaggcgactatcaggtaaaactccgcagcctgattcgctttctcgaagagggtgataaagccaaaatcacgctgcgtttccgcggtcgtgagatggcgcaccagcaaatcggtatggaagtgcttaatcgcgtgaaagacgatttgcaagaactggcagtggtcgaatccttcccaacgaagatcgaaggccgccagatgatcatggtgctcgctcctaagaagaaacagtaa

SEQ ID NO: 6082 - DNA, 1929 bp, Escherichia coli
  CDS (1)...(1929)
atgcctgttataactcttcctgatggcagccaacgccattacgatcacgctgtaagccccatggatgttgcgctggacattggtccaggtctggcgaaagcctgtatcgcagggcgcgttaatggcgaactggttgatgcttgcgatctgattgaaaacgacgcacaactgtcgatcattaccgccaaagacgaagaaggtctggagatcattcgtcactcctgtgcgcacctgttagggcacgcgattaaacaactttggccgcataccaaaatggcaatcggcccggttattgacaacggtttttattacgacgttgatcttgaccgcacgttaacccaggaagatgtcgaagcactcgagaagcggatgcatgagcttgctgagaaaaactacgacgtcattaagaagaaagtcagctggcacgaagcgcgtgaaactttcgccaaccgtggggagagctacaaagtctccattcttgacgaaaacatcgcccatgatgacaagccaggtctgtacttccatgaagaatatgtcgatatgtgccgcggtccgcacgtaccgaacatgcgtttctgccatcatttcaaactaatgaaaacggcaggggcttactggcgtggcgacagcaacaacaaaatgttgcaacgtatttacggtacggcgtgggcagacaaaaaagcacttaacgcttacctgcagcgcctggaagaagccgcgaaacgcgaccaccgtaaaatcggtaaacagctcgacctgtaccatatgcaggaagaagcgccgggtatggtattctggcacaacgacggctggaccatcttccgtgaactggaagtgtttgttcgttctaaactgaaagagtaccagtatcaggaagttaaaggtccgttcatgatggaccgtgtcctgtgggaaaaaaccggtcactgggacaactacaaagatgcaatgttcaccacatcttctgagaaccgtgaatactgcattaagccgatgaactgcccgggtcacgtacaaattttcaaccaggggctgaagtcttatcgcgatctgccgctgcgtatggccgagtttggtagctgccaccgtaacgagccgtcaggttcgctgcatggcctgatgcgcgtgcgtggatttacccaggatgacgcgcatatcttctgtactgaagaacaaattcgcgatgaagttaacggatgtatccgtttagtctatgatatgtacagcacttttggcttcgagaagatcgtcgtcaaactctccactcgtcctgaaaaacgtattggcagcgacgaaatgtgggatcgtgctgaggcggacctggcggttgcgctggaagaaaacaacatcccgtttgaatatcaactgggtgaaggcgctttctacggtccgaaaattgaatttaccctgtatgactgcctcgatcgtgcatggcagtgcggtacagtacagctggacttctctttgccgtctcgtctgagcgcttcttatgtaggcgaagacaatgaacgtaaagtaccggtaatgattcaccgcgcaattctggggtcgatggaacgtttcatcggtatcctgaccgaagagttcgctggtttcttcccgacctggcttgcgccggttcaggttgttatcatgaatattaccgattcacagtctgaatacgttaacgaattgacgcaaaaactatcaaatgcgggcattcgtgttaaagcagacttgagaaatgagaagattggctttaaaatccgcgagcacactttgcgtcgcgtcccatatatgctggtctgtggtgataaagaggtggaatcaggcaaagttgccgttcgcacccgccgtggtaaagacctgggaagcatggacgtaaatgaagtgatcgagaagctgcaacaagagattcgcagccgcagtcttaaacaattggaggaataa

SEQ ID NO: 6083 - DNA, 930 bp, Escherichia coli
  CDS (1)...(930)
atggtacgtatctatacgttgacacttgcgccctctctcgatagcgcaacaattaccccgcaaatttatcccgaaggaaaactgcgctgtaccgcaccggtgttcgaacccgggggcggcggcatcaacgtcgcccgcgccattgcccatcttggaggcagtgccacagcgatcttcccggcgggtggcgcgaccggcgaacacctggtttcactgttggcggatgaaaatgtccccgtcgctactgtagaagccaaagactggacccggcagaatttacacgtacatgtggaagcaagcggtgagcagtatcgttttgttatgccaggcgcggcattaaatgaagatgagtttcgccagcttgaagagcaagttctggaaattgaatccggggccatcctggtcataagcggaagcctgccgccaggtgtgaagctggaaaaattaacccaactgatttccgctgcgcaaaaacaagggatccgctgcatcgtcgacagttctggcgaagcgttaagtgcagcactggcaattggtaacatcgagttggttaagcctaaccaaaaagaactcagtgcgctggtgaatcgcgaactcacccagccggacgatgtccgcaaagccgcgcaggaaatcgttaatagcggcaaggccaaacgggttgtcgtttccctgggtccacaaggagcgctgggtgttgatagtgaaaactgtattcaggtggtgccaccaccggtgaaaagccagagtaccgttggcgctggtgacagcatggtcggcgcgatgacactgaaactggcagaaaatgcctctcttgaagagatggttcgttttggcgtagctgcggggagtgcagccacactcaatcagggaacacgtctgtgctcccatgacgatacgcaaaaaatttacgcttacctttcccgctaa

SEQ ID NO: 6084 - DNA, 2262 bp, Escherichia coli
  CDS (1)...(2262)
atgtcgcaacataacgaaaagaacccacatcagcaccagtcaccactacacgattccagcgaagcgaaaccggggatggactcactggcacctgaggacggctctcatcgtccagcggctgaaccaacaccgccaggtgcacaacctaccgccccagggagcctgaaagcccctgatacgcgtaacgaaaaacttaattctctggaagacgtacgcaaaggcagtgaaaattatgcgctgaccactaatcagggcgtgcgcatcgccgacgatcaaaactcactgcgtgccggtagccgtggtccaacgctgctggaagattttattctgcgcgagaaaatcacccactttgaccatgagcgcattccggaacgtattgttcatgcacgcggatcagccgctcacggttatttccagccatataaaagcttaagcgatattaccaaagcggatttcctctcagatccgaacaaaatcaccccagtatttgtacgtttctctaccgttcagggtggtgctggctctgctgataccgtgcgtgatatccgtggctttgccaccaagttctataccgaagagggtatttttgacttcgttggcaataacacgccaatcttctttatccaggatgcgcataaattccccgattttgttcatgcggtaaaaccagaaccgcactgggcaattccacaagggcaaagtgcccacgatactttctgggattatgtttctctgcaacctgaaactctgcacaacgtgatgtgggcgatgtcggatcgcggcatcccccgcagttaccgcaccatggaaggcttcggtattcacaccttccgcctgattaatgccgaagggaaggcaacgtttgtacgtttccactggaaaccactggcaggtaaagcctcactcgtttgggatgaagcacaaaaactcaccggacgtgacccggacttccaccgccgcgagttgtgggaagccattgaagcaggcgattttccggaatacgaactgggcttccagttgattcctgaagaagatgaattcaagttcgacttcgatcttctcgatccaaccaaacttatcccggaagaactggtgcccgttcagcgtgtcggcaaaatggtgctcaatcgcaacccggataacttctttgctgaaaacgaacaggcggctttccatcctgggcatatcgtgccgggactggacttcaccaacgatccgctgttgcagggacgtttgttctcctataccgatacacaaatcagtcgtcttggtgggccgaatttccatgagattccgattaaccgtccgacctgcccttaccataatttccagcgtgacggcatgcatcgcatggggatcgacactaacccggcgaattacgaaccgaactcgattaacgataactggccgcgcgaaacaccgccggggccgaaacgcggcggttttgaatcataccaggagcgcgtggaaggcaataaagttcgcgagcgcagcccatcgtttggcgaatattattcccatccgcgtctgttctggctaagtcagacgccatttgagcagcgccatattgtcgatggtttcagttttgagttaagcaaagtcgttcgtccgtatattcgtgagcgcgttgttgaccagctggcgcatattgatctcactctggcccaggcggtggcgaaaaatctcggtatcgaactgactgacgaccagctgaatatcaccccacctccggacgtcaacggtctgaaaaaggatccatccttaagtttgtacgccattcctgacggtgatgtgaaaggtcgcgtggtagcgattttacttaatgatgaagtgagatcggcagaccttctggccattctcaaggcgctgaaggccaaaggcgttcatgccaaactgctctactcccgaatgggtgaagtgactgcggatgacggtacggtgttgcctatagccgctacctttgccggtgcaccttcgctgacggtcgatgcggtcattgtcccttgcggcaatatcgcggatatcgctgacaacggcgatgccaactactacctgatggaagcctacaaacaccttaaaccgattgcgctggcgggtgacgcgcgcaagtttaaagcaacaatcaagatcgctgaccagggtgaagaagggattgtggaagctgacagcgctgacggtagttttatggatgaactgctaacgctgatggcagcacaccgcgtgtggtcacgcattcctaagattgacaaaattcctgcctga

SEQ ID NO: 6085 - DNA, 351 bp, Escherichia coli
  CDS (1)...(351)
atgatggatctcgataacattcccgatacgcaaacggaagctgaagagctggaagaagtggtgatggggctgatcatcaactccggacaagcgcgcagcctggcgtatgcggcactgaaacaggcgaagcagggcgattttgccgcagcaaaagccatgatggatcagtcacggatggcattgaatgaagcgcatctggtacagacgaaactgattgaaggcgatgcgggcgaaggtaagatgaaagtgagtctggtgctggtccacgctcaggatcatttaatgacgtccatgcttgcgcgtgaactgattactgaattaattgagcttcatgaaaaactgaaggcataa

SEQ ID NO: 6086 - DNA, 1359 bp, Escherichia coli
  CDS (1)...(1359)
atgagtaatgttattgcatcgcttgaaaaggtactcctcccttttgcagttaaaataggaaagcagccacacgttaatgcaatcaaaaatggctttattcgcttaatgccgttaacccttgcgggggccatgtttgtattaattaacaacgtttttctaagctttggggaggggtcgtttttttattccttaggtattcgcctcgacgcctcaaccattgaaacacttaatggtctgaaaggtattggcggcaacgtatataacggaacattaggaataatgtctttaatggcaccgttctttattggcatggcgctggcagaagagcgtaaagtcgatgcgctggcggctgggttgttatccgttgcagcatttatgaccgtcaccccatatagtgtcggtgaggcctatgcggttggtgcaaactggttaggtggggcgaatatcatctccgggattattattggcctggtggtggcagaaatgtttacctttattgtccgccgcaattgggtcattaaactgcccgacagcgtacctgcttcagtatcgcgttccttctcggcattaattcccggctttattattctttccgtgatggggattattgcctgggcgttgaatacctggggcaccaacttccatcagatcattatggataccatctcaaccccactggcatcgttgggtagcgtggtgggctgggcctatgtgatctttgttccactgctctggttcttcggtattcatggcgcgctggcgctgaccgcactggacaacggcattatgacgccgtgggcactggaaaatatcgcgacctatcagcaatatggttccgtcgaagcggcgctggcagccggtaagaccttccatatctgggccaagccgatgctggactcctttattttccttgggggcagtggtgcgactttaggcctgatcctggctatctttatcgcctctcgccgtgctgattatcgtcaggtggcaaaactggcgctgccgtccggcatcttccagattaacgaaccgattctgtttggtctgccaattatcatgaacccggtgatgtttatcccgtttgtactggtacaaccgattctggcggcaatcaccctcgcagcgtactacatgggcattattcctccggtgaccaatattgcaccgtggaccatgccaaccggtctgggagccttctttaacaccaacggtagcgtcgccgcattgctggtcgcactcttcaaccttggcatcgcaacgttaatttatctgccctttgttgtggtggctaacaaagcacaaaatgcgattgataaagaagagagcgaagaagatatcgctaacgccctgaaattttaa

SEQ ID NO: 6087 - DNA, 828 bp, Escherichia coli
  CDS (1)...(828)
atgacattgcaacaacaaataataaaggcgctgggcgcaaaaccgcagattaatgctgaagaggaaattcgtcgtagtgtcgattttctgaaaagctacctgcaaacttatccgttcattaaatcactggtgctcgggatcagcggcggtcaggactccacgcttgccggaaagctgtgccagatggcgattaatgagctgcgcctggaaaccggcaacgaatcactgcaatttattgccgtacgcctgccctatggtgttcaggccgacgaacaagattgccaggatgccattgcctttattcaaccggatcgcgtattaaccgttaatatcaagggcgcggtattggccagcgaacaggcattgcgggaagcaggcattgaactgagcgattttgtccgtggcaatgaaaaagcgcgtgagcggatgaaagcacaatatagcattgcgggtatgaccagcggtgtcgtggtgggcaccgatcatgcagcagaagccattaccggattcttcactaaatatggtgacggcggtacggacattaatccgctgtatcgtctcaacaaacgtcagggtaaacagttactggcggcattagcttgcccggaacacctttataagaaagcgccaacggccgatctggaagatgatcgcccttctctgccagatgaagtggcactcggcgtgacctatgacaatatcgacgactatctggaagggaaaaacgtacctcaacaggtcgccagaacaatagagaactggtatctgaaaaccgaacataaacgccgtccgccaattaccgttttcgatgatttctggaaaaagtaa

SEQ ID NO: 6088 - DNA, 1962 bp, Escherichia coli
  CDS (1)...(1962)
atgcggttgtttattgccgaaaaaccgagtctggcgcgcgccattgctgatgtcctgcccaaaccgcaccggaaaggcgatggctttatcgagtgcggtaatggtcaggtggtgacctggtgtatcggtcacctgcttgagcaggcgcagccagacgcctacgacagccgctatgcgcgctggaatcttgcggatttgccgattgtcccggaaaagtggcaattacagccccgaccctccgtgaccaaacaacttaacgtcatcaaacggttcctgcatgaagccagcgaaatcgttcacgccggggacccggatcgtgaagggcaattgctggtggatgaagtgctggactatctgcaactggcaccggaaaagcgccagcaggtacagcgttgcttgataaacgacctgaacccgcaggcggttgagcgggcgatcgaccgtcttcgttccaacagtgagtttgtaccgctgtgcgtttctgcgctggcgcgagcgcgtgccgactggctgtacggcatcaatatgacccgtgcgtataccattctcggtcgcaatgccggttatcagggcgtactttccgtgggacgcgtgcagacgcccgtgcttgggctggtggtgcgccgcgatgaagagattgaaaacttcgtggcgaaagacttctttgaagtcaaagcacatatcgtgacacctgccgatgagcggtttaccgctatctggcaaccgagcgaagcgtgtgaaccgtaccaggatgaagaagggcgcttgttacatcgtccactggcggagcatgtggttaaccgcattagtggtcaaccggctattgtcaccagctataacgataaacgggaatcagaatccgcgccgctgcctttttcgctttcagcgttgcagattgaagcggcaaaacgttttggtctgagtgcgcagaacgtgcttgatatctgccagaaactgtacgaaacgcacaagctaatcacttatccgcgttctgattgtcgctatttgccagaagaacattttgccggacgccacgcggtgatgaatgccatcagtgttcatgcaccggatctgttgccgcagccagtggtagatccagatatacgcaaccgctgttgggatgacaaaaaggtcgatgcgcaccacgccatcattccgaccgcacggagttctgcgatcaacctgacggagaacgaagcgaaggtctataacctgattgcccgtcagtatctgatgcaattctgcccggatgcggtgttccgcaagtgtgttatcgaactggacattgccaaaggcaaatttgtcgctaaagcgcgttttcttgctgaagcaggctggcgcacgctgttaggcagcaaagagcgcgatgaagaaaacgacggcacgccactgcctgtggtggcgaaaggcgatgagttgctgtgtgaaaaaggtgaagtggtagagcggcaaacccagccgccgcgccattttaccgatgcaacactgctttcggcgatgaccgggatcgcgcgctttgtgcaggataaagatctgaaaaagatcctccgtgcgaccgatggtctggggacagaggcaacgcgtgccgggattattgaactgttgttcaagcgtggtttcctgaccaaaaaagggcgctatatccactccaccgacgccggaaaagcgctattccattcgctgccggagatggcgacgcgaccggacatgaccgcgcactgggaatcggtgctgacgcaaatcagcgaaaagcagtgtcgctatcaggactttatgcagccgctggtggggacgctatatcagcttattgatcaagccaaacgtacgccggtgcggcagtttcgcggcattgtggctccgggcagtggtggcagtgctgataagaaaaaggctgcaccgcgtaaacgtagtgcgaaaaaaagtccgccagcagatgaagtcggaagcggggcgatagcgtaa

SEQ ID NO: 6089 - DNA, 981 bp, Escherichia coli
  CDS (1)...(981)
atgaaaaagatacctttaggcacaacggatattacgctttcgcgaatggggttggggacatgggccattggcggcggtcctgcatggaatggcgatctcgatcggcaaatatgtattgatacgattcttgaagcccatcgttgtggcattaatctgattgatactgcgccaggatataactttggcaatagtgaagttatcgtcggtcaggcgttaaaaaaactgccccgtgaacaggttgtagtagaaaccaaatgcggcattgtctgggaacgaaaaggaagtttattcaacaaagttggcgatcggcagttgtataaaaacctttccccggaatctatccgcgaagaggtagcagcgagcttgcaacgtctgggtattgattacatcgatatctacatgacgcactggcagtcggtgccgccattttttacgccgatcgctgaaactgtcgcagtgcttaatgagttaaagtctgaagggaaaattcgcgctataggcgctgctaacgtcgatgctgaccatatccgcgagtatctgcaatatggtgaactggatattattcaggcgaaatacagtatcctcgaccgggcaatggaaaacgaactgctgccactatgtcgtgataatggcattgtggttcaggtttattccccgctagagcagggattgttgaccggcaccatcactcgtgattacgttccgggcggcgctcgggcaaataaagtctggttccagcgtgaaaacatgctgaaagtgattgatatgcttgaacagtggcagccactttgtgctcgttatcagtgcacaattcccactctggcactggcgtggatattaaaacagagtgatttaatctccattcttagtggggctactgcaccggaacaggtacgcgaaaatgtcgcggcactgaatatcaacttatcggatgcagacgcaacattgatgagggaaatggcagaggccctggagcgttaa

SEQ ID NO: 6090 - DNA, 1077 bp, Escherichia coli
  CDS (1)...(1077)
atgaaagcactggctcggtttggcaaggcctttggcggctacaagatgattgatgtcccacaacccatgtgtggcccggaagatgtagtgattgaaattaaagccgcggcaatctgcggcgcagacatgaagcactacaatgtcgatagcggttctgatgagtttaactctatccgcggccatgagttcgcaggttgtattgcgcaggttggtgaaaaagtcaaagactggaaagtggggcaacgcgtcgtatcggataacagcggtcacgtttgcggtgtttgtccggcctgtgaacaaggtgattttctgtgttgtacagaaaaagtaaaccttggtctggataataatacctggggcggtggtttttccaaatattgtctggttcctggtgaaattctcaaaattcatcgtcatgcgttgtgggaaatccctgatggtgttgattatgaggacgcagccgtacttgaccctatctgtaatgcctacaaatccatcgcgcagcaatcgaaattccttcctggtcaggatgtggtcgtcatcggcactggcccactcgggctgttctccgtacaaatggcgcgaattatgggggcggtaaatatcgtcgtcgttggtctgcaagaagatgtggcggtccgcttcccggttgcaaaagaactgggtgcgacggcagtagtaaatggttctaccgaagatgtggtggcgcgctgccagcaaatttgtggcaaagacaatctgggactggtgattgaatgctccggtgccaatatcgcactgaaacaagccatcgaaatgctccgcccgaacggggaagtggtacgcgttggaatgggcttcaaacctcttgatttctcgattaatgacattaccgcctggaacaaaagcatcattgggcatatggcctatgactccacctcatggcgtaacgctatcaggctattagccagcggcgctatcaaagtcaaaccgatgatcacgcatcgtatcggcctgtcgcaatggcgcgaagggtttgatgcgatggtcgataaaaccgcaatcaaagtgatcatgacttacgactttgatgaataa

SEQ ID NO: 6091 - DNA, 996 bp, Escherichia coli
  CDS (1)...(996)
atgactatcaaagtaggtatcaacggttttggccgtatcggtcgcattgttttccgtgctgctcagaaacgttctgacatcgagatcgttgcaatcaacgacctgttagacgctgattacatggcatacatgctgaaatatgactccactcacggccgtttcgacggtaccgttgaagtgaaagacggtcatctgatcgttaacggtaaaaaaatccgtgttaccgctgaacgtgatccggctaacctgaaatgggacgaagttggtgttgacgttgtcgctgaagcaactggtctgttcctgactgacgaaactgctcgtaaacacatcaccgctggtgcgaagaaagtggttatgactggtccgtctaaagacaacactccgatgttcgttaaaggcgctaacttcgacaaatatgctggccaggacatcgtttccaacgcttcctgcaccaccaactgcctggctccgctggctaaagttatcaacgataacttcggcatcatcgaaggtctgatgaccaccgttcacgctactaccgctactcagaaaaccgttgatggcccgtctcacaaagactggcgcggcggccgcggcgcttcccagaacatcatcccgtcctctaccggtgctgctaaagctgtaggtaaagtactgccagaactgaatggcaaactgactggtatggcgttccgcgttccgaccccgaacgtatctgtagttgacctgaccgttcgtctggaaaaagctgcaacttacgagcagatcaaagctgccgttaaagctgctgctgaaggcgaaatgaaaggcgttctgggctacaccgaagatgacgtagtatctaccgatttcaacggcgaagtttgcacttccgtgttcgatgctaaagctggtatcgctctgaacgacaacttcgtgaaactggtatcctggtacgacaacgaaaccggttactccaacaaagttctggacctgatcgctcacatctccaaataa

SEQ ID NO: 6092 - DNA, 822 bp, Escherichia coli
  CDS (1)...(822)
atgatgcacaggttgaatctcaatggctatgaacccgaccgacaccatgaagccgcggtcgcattttgtattcacgccggaacggatgagttaaccagtcctgtacatcagcaccgcaaaggacagctgatactggcgctacatggtgcaattacctgtacggtggaaaatgctttgtggatggtgccgccacaatatgcggtttggataccgggcggggtggaacatagcaatcaagtaacagctaatgctgaactctgttttctgtttatcgaacccagcgcagtgacaatgccgacaacatgttgcacattgaaaatatcgcccttatgccgggaattaattttaaccctggcaaacaggacgacgactcagcgtgctgagccaatgacccgcagattaattcaggtcctgtttgatgaactccctcagcagccacaacaacagctgcacctgcccgtttcttctcatcctaaaatccgcacgatggtggagatgatggcgaaagggcctgtcgagtggggggcattggggcaatgggctggcttttttgcgatgagtgaacgcaatcttgcccgactgatagtaaaagagacggggttgagttttcgccagtggcgtcagcagttacagctgattatggcgcttcagggattagtgaaaggcgatactgtacagaaagttgctcatacgctggggtatgattcaacaacggcctttattactatgtttaagaaaggcctggggcaaacgccaggccgatatattgcgagattaactactgtttccccacaatcagcgaaaccagacccgcggcaataa

SEQ ID NO: 6093 - DNA, 1476 bp, Escherichia coli
  CDS (1)...(1476)
atggcggtaacgcaaacagcccaggcctgtgacctggtcattttcggcgcgaaaggcgaccttgcgcgtcgtaaattgctgccttccctgtatcaactggaaaaagccggtcagctcaacccggacacccggattatcggcgtagggcgtgctgactgggataaagcggcatataccaaagttgtccgcgaggcgctcgaaactttcatgaaagaaaccattgatgaaggtttatgggacaccctgagtgcacgtctggatttttgtaatctcgatgtcaatgacactgctgcattcagccgtctcggcgcgatgctggatcaaaaaaatcgtatcaccattaactactttgccatgccgcccagcacttttggcgcaatttgcaaagggcttggcgaggcaaaactgaatgctaaaccggcacgcgtagtcatggagaaaccgctggggacgtcgctggcgacctcgcaggaaatcaatgatcaggttggcgaatacttcgaggagtgccaggtttaccgtatcgaccactatcttggtaaagaaacggtgctgaacctgttggcgctgcgttttgctaactccctgtttgtgaataactgggacaatcgcaccattgatcatgttgagattaccgtggcagaagaagtggggatcgaagggcgctggggctattttgataaagccggtcagatgcgcgacatgatccagaaccacctgctgcaaattctttgcatgattgcgatgtctccgccgtctgacctgagcgcagacagcatccgcgatgaaaaagtgaaagtactgaagtctctgcgccgcatcgaccgctccaacgtacgcgaaaaaaccgtacgcgggcaatatactgcgggcttcgcccagggcaaaaaagtgccgggatatctggaagaagagggcgcgaacaagagcagcaatacagaaactttcgtggcgatccgcgtcgacattgataactggcgctgggccggtgtgccattctacctgcgtactggtaaacgtctgccgaccaaatgttctgaagtcgtggtctatttcaaaacacctgaactgaatctgtttaaagaatcgtggcaggatctgccgcagaataaactgactatccgtctgcaacctgatgaaggcgtggatatccaggtactgaataaagttcctggccttgaccacaaacataacctgcaaatcaccaagctggatctgagctattcagaaacctttaatcagacgcatctggcggatgcctatgaacgtttgctgctggaaaccatgcgtggtattcaggcactgtttgtacgtcgcgacgaagtggaagaagcctggaaatgggtagactccattactgaggcgtgggcgatggacaatgatgcgccgaaaccgtatcaggccggaacctggggacccgttgcctcggtggcgatgattacccgtgatggtcgttcctggaatgagtttgagtaa

SEQ ID NO: 6094 - DNA, 1773 bp, Escherichia coli
  CDS (1)...(1773)
atgcgtacagaatattgtggacagctccgtttgtcccacgtggggcagcaggtgactctgtgtggttgggtcaaccgtcgtcgtgatcttggtagcctgatcttcatcgatatgcgcgaccgcgaaggtatcgtgcaggtatttttcgatccggatcgtgcggacgcgttaaagctggcctctgaactgcgtaatgagttctgcattcaggtcacgggcaccgtacgtgcgcgtgacgaaaaaaatattaaccgcgatatggcgaccggcgaaatcgaagtgctggcgtcctcgctgactatcatcaaccgcgcagatgttctgccgcttgactctaaccacgtcaacaccgaagaagcgcgtctgaaataccgctacctcgacctgcgtcgtccggaaatggctcagcgcctgaaaacccgcgctaaaatcaccagcctggtgcgccgttttatggatgaccacggcttcctcgacatcgaaactccgatgctgaccaaagccacgccggaaggcgcgcgtgactacctggtgccttctcgtgtgcacaaaggtaaattctacgcactgccgcaatccccgcagttgttcaaacagctgctgatgatgtccggttttgaccgttactatcagatcgttaaatgcttccgtgacgaagacctgcgtgctgaccgtcagcctgaatttactcagatcgatgtggaaacttctttcatgaccgcgccgcaagtgcgtgaagtgatggaagcgctggtgcgtcatctgtggctggaagtgaagggtgtggatctgggcgatttcccggtaatgacctttgcggaagcagaacgccgttatggttctgataaaccggatctgcgtaacccgatggaactgactgacgttgctgatctgctgaaatctgttgagtttgctgtatttgcaggtccggcgaacgatccgaaaggtcgcgtagcggctctgcgcgttccgggcggcgcatcgctgacccgtaagcagatcgacgaatacggtaacttcgttaaaatctacggcgcgaaaggtctggcttacatcaaagttaacgaacgcgcgaaaggtctggaaggtatcaacagcccggtagcgaagttccttaatgcagaaatcatcgaagacatcctggatcgtactgccgcgcaagatggcgatatgattttcttcggtgccgacaacaagaaaattgttgccgacgcgatgggtgcactgcgcctgaaagtgggtaaagaccttggtctgaccgacgaaagcaaatgggcaccgctgtgggttatcgacttcccgatgtttgaagacgacggtgaaggcggcctgacggcaatgcaccatccgttcacctcaccgaaagatatgacggctgcagaactgaaagctgcaccggaaaatgcggtggcgaacgcttacgatatggtcatcaatggttacgaagtgggcggtggttcagtacgtatccataatggtgatatgcagcagacggtgtttggtattctgggtatcaacgaagaggaacagcgcgagaaattcggcttcctgctcgacgctctgaaatacggtactccgccgcacgcaggtctggcattcggtcttgaccgtctgaccatgctgctgaccggcaccgacaatatccgtgacgttatcgccttcccgaaaaccacggcggcagcgtgtctgatgactgaagcaccgagctttgctaacccgactgcactggctgagctgagcattcaggttgtgaagaaggctgagaataactga

SEQ ID NO: 6095 - DNA, 600 bp, Escherichia coli
  CDS (1)...(600)
gtgaggcacgattttgttttttcaggagtcattatgcttgaacttaatgctaaaaccactgcgctggtggtgatcgatttacaagaaggcatcttaccttttgccggtggtccacatactgccgatgaggtagttaatcgcgccgggaagctggcggcgaaatttcgcgccagcggtcagcccgtgtttctggtgcgcgttggctggtctgccgattacgctgaagcattaaaacagccggtcgatgcgccctcaccggctaaagtgttgcccgaaaattggtggcaacatcctgctgcattaggtgcaaccgacagcgatatcgaaatcatcaaacgtcaatggggtgcgttttacggtacggatctggagttgcaattacgccgccgaggtatcgatacaatagtgttatgtgggatctcgaccaatatcggtgttgaatccaccgcccgcaatgcctgggaacttggctttaatctggtgattgccgaagacgcctgtagtgccgccagcgccgagcagcacaataacagtatcaaccatatctacccgcgcatcgcccgtgtgcgtagcgtggaagagatcctcaacgcgttatga

SEQ ID NO: 6096 - DNA, 1734 bp, Escherichia coli
  CDS (1)...(1734)
gtgaatattcaggctcttctctcagaaaaagtccgtcaggccatgattgcggcaggcgcgcctgcggattgcgaaccgcaggttcgtcagtcagcaaaagttcagttcggcgactatcaggctaacggcatgatggcagttgctaaaaaactgggtatggcaccgcgacaattagcagagcaggtgctgactcatctggatcttaacggtatcgccagcaaagttgagatcgccggtccaggctttatcaacattttccttgatccggcattcctggctgaacatgttcagcaggcgctggcgtccgatcgtctcggtgttgctacgccagaaaaacagaccattgtggttgactactctgcgccaaacgtggcgaaagagatgcatgtcggtcacctgcgctctaccattattggtgacgcagcagtgcgtactctggagttcctcggtcacaaagtgattcgcgcaaaccacgtcggcgactggggcactcagttcggtatgctgattgcatggctggaaaagcagcagcaggaaaacgccggtgaaatggagctggctgaccttgaaggtttctaccgcgatgcgaaaaagcattacgatgaagatgaagagttcgccgagcgcgcacgtaactacgtggtaaaactgcaaagcggtgacgaatatttccgcgagatgtggcgcaaactggtcgacatcaccatgacgcagaaccagatcacctacgatcgtctcaacgtgacgctgacccgtgatgacgtgatgggcgaaagcctctacaacccgatgctgccaggaattgtggcggatctcaaagccaaaggtctggcagtagaaagcgaaggggcgaccgtcgtattccttgatgagtttaaaaacaaggaaggcgaaccgatgggcgtgatcattcagaagaaagatggcggctatctctacaccaccactgatatcgcctgtgcgaaatatcgttatgaaacactgcatgccgatcgcgtgctgtattacatcgactcccgtcagcatcaacacctgatgcaggcatgggcgatcgtccgtaaagcaggctatgtaccggaatccgtaccgctggaacaccacatgttcggcatgatgctgggtaaagacggcaaaccgttcaaaacccgcgcgggtggtacagtgaaactggccgatctgctggatgaagccctggaacgtgcacgccgtctggtggcagaaaagaacccggatatgccagccgacgagctggaaaaactggctaacgcggttggtattggtgcggtgaaatatgcggatctctccaaaaaccgcaccacggactacatcttcgactgggacaacatgctggcgtttgagggtaataccgcgccatacatgcagtatgcatacacgcgtgtattgtccgtgttccgtaaagcagaaattgacgaagagcaactggctgcagctccggttatcatccgtgaagatcgtgaagcgcaactggcagctcgcctgctgcagtttgaagaaaccctcaccgtggttgcccgtgaaggcacgccgcatgtaatgtgtgcttacctgtacgatctggccggtctgttctctggcttctacgagcactgcccgatcctcagcgcagaaaacgaagaagtgcgtaacagccgtctaaaactggcacaactgacggcgaagacgctgaagctgggtctggatacgctgggtattgagactgtagagcgtatgtaa

SEQ ID NO: 6097 - DNA, 1050 bp, Escherichia coli
  CDS (1)...(1050)
atgagcaaaatcagggtgttatctgtcgatgattcggcactgatgcgccagatcatgacagaaatcatcaacagccatagcgacatggaaatggtggcgaccgcgcctgatccgctggtcgcgcgtgacttgattaagaaattcaatcccgatgtgctgacgctggatgttgaaatgccgcggatggacggactggatttcctcgaaaaattaatgcgtttgcgtccaatgcccgttgtgatggtttcttccctgaccggcaaagggtcagaagtcacgctgcgcgcgctggagctgggggcgatagattttgtcaccaaaccgcaactgggtattcgcgaaggtatgctggcgtataacgaaatgattgctgaaaaggtgcgtacggcagcaaaggcgagccttgcagcacataagccattgtcggcaccgacaacgctgaaggcggggccgttgttgagttctgaaaaactgattgcgattggtgcttcaacgggtggaactgaggcaattcgtcacgtactgcaaccgttgccgctttccagcccggcactgttaattacccagcatatgccgcccggtttcacccgctcttttgccgacagacttaataagctttgccagatcggggttaaagaagccgaagacggagaacgtgtcttgccggggcatgcctatattgcgccgggcgatcggcatatggagctgtcgcgtagtggcgcaaattaccaaatcaaaattcacgatggcccggcggttaaccgtcatcggccttcggtagatgtgttgttccattctgtcgccaaacaggcggggcgtaatgcggttggggtgatcctgaccggtatgggcaacgacggcgcggcgggaatgttggcgatgcgtcaggcgggggcatggacccttgcgcaaaacgaagcaagttgcgtggtgttcggcatgccgcgcgaggccatcaatatgggtggtgtctgcgaagtggtcgatcttagccaggtaagccagcaaatgttggcaaaaattagtgccggacaggcgatacgtatttaa

SEQ ID NO: 6098 - DNA, 549 bp, Escherichia coli
  CDS (1)...(549)
atgcaatttaatatccctacgttgcttacactgttccgtgtcatccttatcccattctttgtattggtcttttatctgcctgtcacctggtcgccgtttgccgccgcgctcattttctgcgtcgcggcggtgactgactggttcgatggttttctggcacgccgctggaaccagagtacccggtttggtgctttccttgaccctgtggcagataaagttctcgtggctatcgccatggtgctggtaaccgagcattatcacagctggtgggtgacattaccggcggcaacgatgatcgcccgtgaaattattatttctgcgctacgcgaatggatggcggagttgggtaaacgcagtagcgtggccgtctcctggattgggaaagtgaaaaccactgcccagatggtggcgttggcatggctgctgtggcgtccgaacatttgggttgagtacgccggtattgcacttttctttgtggctgcggtactgactctgtggtcaatgttgcaatatttgagcgctgcgcgtgcagatttgcttgatcagtga

SEQ ID NO: 6099 - DNA, 753 bp, Escherichia coli
  CDS (1)...(753)
atgagtgccattgaagttaagaacctggtgaaaaaattccacggtcagacggtgctgcacggtatcgaccttgaggtaaagcctggcgaagtggtggcaattatcggtccgagtggttccggcaaaaccacgttgctacgcagcataaatctgctggaacaacccgaagcgggaacgatcaccgttggcgatatcactattgatactgcacgttcattaagtcagcaaaaatctctgattcgccagttgcgtcagcacgtcgggtttgtcttccagaactttaatttgtttccgcatcgtacggtgctggagaacattattgaagggccggtgatcgtcaaaggtgaaccgaaagaagaggccacggcgcgcgctcgcgagctgctggcaaaagttgggctggcaggtaaagaaaccagctatccacgtcgtttgtctggcggtcaacagcagcgtgttgcgattgcgcgtgcgctggcaatgcgtcctgaggtgattttgtttgacgagccaacgtcagcgctggatccagagctggtgggtgaagtcctgaacaccatccgtcagctggcgcaggaaaagcgcacgatggtgattgtgacgcacgaaatgagctttgcccgggatgttgcggaccgggcgatctttatggaccaggggcggatagtcgagcagggggccgcaaaagcgttatttgccgaccccgagcagcctcgcacccgccagttcctcgagaagtttctgctgcaataa

SEQ ID NO: 6100 - DNA, 801 bp, Escherichia coli
  CDS (1)...(801)
atgaaattagcacatctgggacgtcaggcattgatgggtgtgatggccgtggcgctggttgcgggcatgagcgttaaaagttttgcagatgaaggtctgcttaataaagttaaagagcgcggcacgctgctggtagggctggaaggaacttatccgccgttcagttttcagggagatgacggcaaattaaccggttttgaagtggaatttgcccaacagctggcaaaacatcttggcgttgaggcgtcactaaaaccgaccaaatgggacggtatgctggcgtcgctggactctaaacgtattgatgtggtgattaatcaggtcaccatttctgatgagcgcaagaaaaaatacgatttctcaaccccgtacaccatttctggtattcaggcgctggtgaaaaaaggtaacgaaggcaccattaaaacagccgatgatctgaaaggcaaaaaagtgggggtcggtctgggcaccaactatgaagagtggctgcggcagaatgttcagggcgtcgatgtgcgtacctatgatgatgacccgaccaaatatcaggatctgcgcgtagggcgtatcgatgcgatcctcgttgatcgtctggcggcgctggatctggtgaagaaaaccaacgatacgctggcagtaaccggtgaagcattctcccgtcaggagtctggcgtggcgctgcgtaaaggaaatgaggacctgctgaaagcagtgaatgatgcaattgcggaaatgcaaaaagatggcactctgcaagccctttccgaaaaatggtttggtgctgatgtgaccaaataa

SEQ ID NO: 6101 - DNA, 921 bp, Escherichia coli
  CDS (1)...(921)
atgcgtttccgccagttgttaccgctttttggcgcgctgtttgcgttgtatatcatttggggctcaacctattttgtcattcggattggcgtggaaagctggcctccgttaatgatggcgggcgttcgattcctggcagccggtattttattgctggcatttttgctactgcgcggacacaaactccccccgctacgtccgctgctcaatgccgcgctgattggcctgttattgctggctgtcggtaatggcatggtgacggttgccgaacatcaaaatgttccttccggcatcgccgccgtagtggttgcaaccgtgcccctctttaccctgtgcttcagccgcctgtttggcattaaaacgcgcaaactggaatgggtgggtattgccattgggcttgccggaatcatcatgctcaatagcggtggaaatttaagcggcaatccgtggggcgcgattctgattttaatcggctcgattagctgggcgtttggctcagtttatggctcgcgcattaccttacctgtagggatgatggcgggtgcgattgagatgctggcggcaggcgtggtgttaatgatcgcgtcgatgattgcgggtgaaaaactgacggcgctcccttccctttcaggcttccttgcggtcggctatctggcgctgtttggttcgattatcgccatcaacgcttatatgtatttaatccgtaatgtcagtccggctctcgccaccagctacgcttacgttaacccggtggtcgcggtcttgctgggtacgggactgggtggagaaacactgtcgaagattgaatggctggcgctcggcgtaattgtcttcgcggtggtactggtcacgttgggaaaatatctcttcccggcaaaacccgtagttgcgccagttattcaggacgcatcaagcgagtaa

SEQ ID NO: 6102 - DNA, 852 bp, Escherichia coli
  CDS (1)...(852)
atgactgttcaaacaagtaaaaatccgcaggtcgatattgctgaagataatgcattcttcccttcagaatattcgcttagccaatataccagtcctgtctctgatcttgatggcgtggactatccaaaaccttatcgcggtaaacataaaattctggtgatcgccgcggacgaacgttatttgccgaccgataacggaaaactgttctcgaccggtaaccatccgattgaaacgttgctgccgttgtatcatctccatgctgcaggtttcgaattcgaagtggcgaccatttccggtctgatgaccaagtttgaatactgggctatgccgcacaaagatgaaaaagtaatgccattctttgagcagcataaatcgttgttccgcaatccgaagaaactcgcggatgttgttgccagcctcaacgctgatagcgaatatgcagcaatctttgttcctggtggtcatggcgcacttattggtttacctgaaagccaggacgtggctgccgctttacagtgggcaatcaaaaatgaccgttttgttatctccctttgccacggcccggcggcttttctggcgcttcgccacggcgataacccactgaatggttattccatttgcgcattcccagacgccgcagacaaacaaacgccagagattggctatatgccgggtcatctcacctggtacttcggcgaagaactgaagaaaatgggcatgaatatcattaatgacgacatcaccgggcgagtacataaggaccgtaaacttctcaccggcgacagtccttttgcagcgaatgcgttgggtaaactggcggcgcaggaaatgctggcagcttacgcgggttaa

SEQ ID NO: 6103 - DNA, 1428 bp, Escherichia coli
  CDS (1)...(1428)
atgatgaatgacggtaagcaacaatctacctttttgtttcacgattacgaaacctttggcacgcaccccgcgttagatcgccctgcacagttcgcagccattcgcaccgatagcgaattcaatgtcatcggcgaacccgaagtcttttactgcaagcccgctgatgactatttaccccagccaggagccgtattaattaccggtattaccccgcaggaagcacgggcgaaaggagaaaacgaagccgcgtttgccgcccgtattcactcgctttttaccgtaccgaagacctgtattctgggctacaacaatgtgcgtttcgacgacgaagtcacacgcaacattttttatcgtaatttctacgatccttacgcctggagctggcagcatgataactcgcgctgggatttactggatgttatgcgtgcctgttatgccctgcgcccggaaggaataaactggcctgaaaatgatgacggtctaccgagctttcgccttgagcatttaaccaaagcgaatggtattgaacatagcaacgcccacgatgcgatggctgatgtgtacgccactattgcgatggcaaagctggtaaaaacgcgtcagccacgcctgtttgattatctctttacccatcgtaataaacacaaactgatggcgttgattgatgttccgcagatgaaacccctggtgcacgtttccggaatgtttggagcatggcgcggcaataccagctgggtggcaccgctggcgtggcatcctgaaaatcgcaatgccgtaattatggtggatttggcaggagacatttcgccattactggaactggatagcgacacattgcgcgagcgtttatataccgcaaaaaccgatcttggcgataacgccgccgttccggttaagctggtgcatatcaataaatgtccggtgctggcccaggcgaatacgctacgcccggaagatgccgaccgactgggaattaatcgtcagcattgcctcgataacctgaaaattctgcgtgaaaatccgcaagtgcgcgaaaaagtggtggcgatattcgcggaagccgaaccgtttacgccttcagataacgtggatgcacagctttataacggctttttcagtgacgcagatcgtgcagcaatgaaaattgtgctggaaaccgagccgcgtaatttaccggcactggatatcacttttgttgataaacggattgaaaagctgttgttcaattatcgggcacgcaacttcccggggacgctggattatgccgagcagcaacgctggctggagcaccgtcgccaggtcttcacgccagagtttttgcagggttatgctgatgaattgcagatgctggtacaacaatatgccgatgacaaagagaaagtggcgctgttaaaagcactttggcagtacgcggaagagattgtctaa

SEQ ID NO: 6104 - DNA, 1407 bp, Escherichia coli
  CDS (1)...(1407)
atgtccaagcaacagatcggcgtagtcggtatggcagtgatgggacgcaaccttgcgctcaacatcgaaagccgtggttataccgtctctattttcaaccgttcccgtgagaagacggaagaagtgattgccgaaaatccaggcaagaaactggttccttactatacggtgaaagagtttgtcgaatctctggaaacgcctcgtcgcatcctgttaatggtgaaagcaggtgcaggcacggatgctgctattgattccctcaaaccatatctcgataaaggagacatcatcattgatggtggtaacaccttcttccaggacactattcgtcgtaatcgtgagctttcagcagagggctttaacttcatcggtaccggtgtttctggcggtgaagagggggcgctgaaaggtccttctattatgcctggtggccagaaagaagcctatgaattggtagcaccgatcctgaccaaaatcgccgccgtagctgaagacggtgaaccatgcgttacctatattggtgccgatggcgcaggtcactatgtgaagatggttcacaacggtattgaatacggcgatatgcagctgattgctgaagcctattctctgcttaaaggtggcctgaacctcaccaacgaagaactggcgcagacctttaccgagtggaataacggtgaactgagcagttacctgatcgacatcaccaaagatatcttcaccaaaaaagatgaagacggtaactacctggttgatgtgatcctggatgaagcggctaacaaaggtaccggtaaatggaccagccagagcgcgctggatctcggcgaaccgctgtcgctgattaccgagtctgtgtttgcacgttatatctcttctctgaaagatcagcgtgttgccgcatctaaagttctctctggtccgcaagcacagccagcaggcgacaaggctgagttcatcgaaaaagttcgtcgtgcgctgtatctgggcaaaatcgtttcttacgcccagggcttctctcagctgcgtgctgcgtctgaagagtacaactgggatctgaactacggcgaaatcgcgaagattttccgtgctggctgcatcatccgtgcgcagttcctgcagaaaatcaccgatgcttatgccgaaaatccacagatcgctaacctgttgctggctccgtacttcaagcaaattgccgatgactaccagcaggcgctgcgtgatgtcgttgcttatgcagtacagaacggtattccggttccgaccttctccgcagcggttgcctattacgacagctaccgtgctgctgttctgcctgcgaacctgatccaggcacagcgtgactattttggtgcgcatacttataagcgtattgataaagaaggtgtgttccataccgaatggctggattaa

SEQ ID NO: 6105 - DNA, 1395 bp, Escherichia coli
  CDS (1)...(1395)
atgacaaatctaaaaaagcgcgagcgagcgaaaaccaatgcatcgttaatctctatggtgcaacgcttttcagatatcaccatcatgtttgccggactatggctggtttgcgaagtcagcggactgtcattcctctacatgcacctgttggtggcgctgattacgctggtggtgttccagatgctgggcggcatcaccgatttttatcgctcatggcgcggtgttcgggcagcgacagaatttgccctgttgctacaaaactggaccttaagcgtgattttcagcgccggactggtggcgttcaacaatgatttcgacacgcaactgaaaatctggctggcgtggtatgcgctgaccagcatcggactggtggtttgccgttcgtgtattcgcattggggcgggctggctgcgtaatcatggctataacaagcgcatggtcgcggtggcgggggatttagccgccgggcaaatgctgatggagagcttccgtaaccagccgtggttagggtttgaagtggtgggcgtttaccacgacccgaaaccgggcggcgtttctaacgactgggcgggtaacctgcaacagctggtcgaggacgcgaaagcgggcaagattcataacgtctatatcgcgatgcaaatgtgcgacggcgcgcgagtgaaaaaactggtccatcaactggcggacaccacctgttcggtgctgctgatccccgacgtctttaccttcaacattctccattcacgcctcgaagagatgaacggcgtaccggtggtgccgctttacgacacgccgctttccggggttaaccgcctgctcaaacgtgcggaagacattgtgctggcgacgcttattctgctgctgatctccccggtgctgtgctgtattgcgctggcggtgaaactcagttcaccagggccggttattttccgccagactcgctacggcatggatggcaagccgatcaaagtgtggaagttccgttccatgaaagtgatggagaacgacaaagtggtgacccaggcgacgcagaacgatccgcgcgtcaccaaagtggggaactttctgcgccgtacctcgctggatgaattgccgcagtttatcaatgtgctgaccggggggatgtcgattgtcggtccacgtccgcacgcagtagcgcataacgaacagtatcgacagctcattgaaggctacatgctgcgccataaggtgaaaccgggcattaccggctgggcgcagattaacggctggcgcggcgaaaccgacacgctggagaaaatggaaaaacgcgtcgagttcgaccttgagtacatccgcgaatggagcgtctggttcgatatcaaaatcgttttcctgacggtgttcaaaggtttcgttaacaaagcggcatattga

SEQ ID NO: 6106 - DNA, 3123 bp, Escherichia coli
  CDS (1)...(3123)
atgcaggtgttacccccgagcagcacaggcggcccgtcgcgcctgtttattatgcgtcctgtggccaccacgctgctgatggtggcgatcttactcgccgggattatcggttatcgcgccctgcccgtttcggcgctgccggaagtggactatccgaccattcaggtggtcacgctctacccaggtgccagcccggatgtcatgacctctgccgttaccgcgccgctagaacgccagttcgggcagatgtctggcctgaaacagatgtcgtcgcaaagttccggcggtgcgtcagttatcactttgcagttccagctaacattaccgctcgatgtcgccgagcaggaagtgcaggccgcgattaacgctgcgaccaacttgttgccgagcgatctgcctaacccgccggtttacagcaaagtgaacccggcagatccgccgatcatgacgctcgccgtcacctcaaccgccatgccgatgacgcaagtggaagatatggtggaaacccgcgtcgcgcagaaaatctcgcagatttccggcgtcggcctggtgacgctttccggcggtcagcgtccggctgttcgcgtcaaacttaacgctcaggcgattgccgccctcggcctgaccagcgaaaccgtgcgcaccgccattaccggcgctaacgttaactcggcaaaaggtagcctcgacggcccttcccgtgcggtcacgctttccgcgaacgaccagatgcaatccgccgaagagtatcgccagctaatcatcgcctaccagaacggcgcgccaattcgtctgggcgatgtcgcaactgtagagcaaggtgcagaaaacagctggctcggcgcgtgggcgaacaaagaacaggccattgtgatgaatgttcagcgccagcccggtgctaacattatctccaccgccgacagcattcggcagatgctgccacagctcactgagagtctgccgaaatcggtgaaggtgacagtgctttccgatcgcaccaccaatatccgcgcatccgtcgatgatactcagtttgaattgatgatggctatcgcgctggtagtcatgattatctacctgtttttgcgcaatattccggcgaccatcattcccggtgttgctgtaccgctgtcgttaatcggcactttcgcggttatggtgtttctcgatttttcaatcaataacctgacactgatggcgttaactatcgccaccggattcgtggtcgatgacgccatcgtggtgatcgaaaacatttcccgctatatcgaaaaaggcgaaaaaccgttggcggcggcgctcaagggcgcaggtgaaatcggctttaccattatctcgctgaccttctcactgattgcggtgttgatcccactgctgtttatgggcgatatcgtcgggcgactgttccgcgaatttgctattaccctggcggtagcgattttgatctcagcggtggtgtcgctgaccctgacaccgatgatgtgcgcgcggatgctcagccaggagtcgttgcgtaaacagaaccgcttctcccgtgcctcggaaaaaatgttcgacaggataatcgccgcctatggtcgtggactggcgaaagtgctgaatcatccgtggctgaccttaagcgtggcactcagcacgctgctgcttagcgtgctgctgtgggtgttcattccgaaaggtttcttcccggtacaggacaatggcattattcagggcactttgcaggcaccgcaatccagctcctttgccaatatggcccagcgacaacgccaggtcgcggacgtgattttgcaggatccggcagtgcaaagcctgacctcatttgttggcgttgatggcactaacccgtcgctgaacagtgcacgtttacaaatcaacctcaaaccgttggatgaacgtgatgatcgggtgcaaaaagtcatcgcccgtctgcaaacggcggtagataaagtgccgggcgtcgatctcttcctgcaaccaacgcaggatctgactattgatactcaggtcagccgcacccagtaccagtttaccttgcaggccacgtcactggatgcgctcagtacctgggtgccacagttgatggaaaaactccagcaactgccacagctttctgatgtctccagcgactggcaggacaaagggctggtggcgtatgtcaatgttgatcgcgacagcgccagccgtctggggatcagcatggcggatgtcgataacgccctgtacaacgcgtttggtcagcggctgatttccactatttatactcaggccaaccagtatcgcgtggtgctggagcacaacaccgaaaataccccaggcctcgcggcgctggataccattcgcctgaccagcagcgacggcggcgtggtgccgctaagctcaattgccaaaattgagcagcgttttgcgccgctctccatcaaccatctggatcagttcccggtaacgaccatctcctttaacgtgccggataactattcgctgggcgatgcggtgcaggcgattatggacaccgaaaagacgctgaatctgccggtggatatcaccacgcagttccagggcagcaccctcgccttccagtcggcgctgggcagcactgtctggctgattgtcgcggcggtggtggcgatgtatatcgtgctcggcattctgtacgagagctttattcacccgatcaccattctctcgacgctacccaccgcaggggttggcgcactgctggcgttgctgattgctggtagcgaactggatgtgattgcgattatcggcattattttgctgatcggtatcgtgaagaagaacgccatcatgatgatcgacttcgcgctggctgctgagcgcgagcaaggcatgtcgccgcgcgaggcaatctaccaggcttgtctgttgcgttttcgtccgatcctgatgaccactctggcggctctgcttggcgcgctgccgctgatgttgagtaccggggtcggcgcggaactgcgtcgtccgttaggtatcggcatggtcggcggtctgattgtcagccaggtgctgacgctgtttaccacgccggtgatttatttgctgttcgaccgcctggcattgtggaccaaaagccgctttgcccgtcatgaagaggaggcgtaa

SEQ ID NO: 6107 - DNA, 1362 bp, Escherichia coli
  CDS (1)...(1362)
atgtttaaaccggaactcctttccccggcgggaacgctgaaaaatatgcgttacgctttcgcttatggcgcagatgctgtttatgcgggccagccgcgttattccctgcgtgtgcgcaacaacgaattcaaccacgaaaatcttcagctcggcatcaatgaagcccacgcgctggggaaaaagttttatgtcgtggtcaacattgcaccgcacaacgccaagctgaaaacctttatccgtgacctgaaaccggtggtggaaatggggccggatgcgctgattatgtccgatccagggctgattatgctggtgcgtgagcacttccctgaaatgccgatccacctttcggtgcaggctaacgccgtgaactgggcgacggtgaaattctggcagcaaatgggcctgacccgcgtgatcctctctcgcgagctgtcgctggaagagattgaagagatccgcaatcaggtgccggatatggagatcgagatcttcgttcacggcgcgctgtgcatggcctactccggtcgctgcctgctctctggctatatcaacaagcgcgacccgaaccagggcacctgcaccaacgcctgccgctgggagtacaacgtccaggaagggaaagaagatgatgttggcaacatcgtacacaagtacgagccgattccggtgcaaaatgttgagccgacgctgggtatcggcgcaccaaccgacaaagtgtttatgatcgaagaggcccagcgtccgggcgagtatatgaccgcgtttgaagatgagcacggcacttacatcatgaactcgaaagatctgcgcgccatcgcccatgtagaacgcctgaccaaaatgggcgtgcattcgctgaaaatcgaaggtcgtaccaaatctttctactattgtgcacgcaccgcacaggtttaccgcaaagctatcgatgacgccgctgcgggaaaaccgttcgataccagcctgctggaaactctggaaggtctggcgcatcgtggctataccgaaggtttcctgcgtcgtcatactcacgacgattatcagaactacgaatacggttattcagtttctgaccgccagcagtttgttggtgagtttaccggtgagcgcaagggggacctcgcggcggtagcggtgaaaaataaattctccgttggcgacagccttgagctgatgacgccgcaaggcaacattaattttacccttgagcacatggaaaacgccaaaggcgaagctatgccgatagcaccaggcgatggttatactgtgtggctcccggtcccgcaggatcttgagctcaattacgcgctgctgatgcgtaatttctccggggaaaccacgcgtaatccccacggtaagtga

SEQ ID NO: 6108 - DNA, 900 bp, Escherichia coli
  CDS (1)...(900)
atggcagaatttcccgccagcttactgattcttaatggcaaaagtactgacaatctacccttgcgcgaagcaattatgctgttgcgtgaggaaggaatgacgatccatgtgcgggtcacctgggagaaaggcgatgccgcacgatatgtagaggaggcccggaagtttggcgtcgcaacggtgattgccggtggtggcgatggcaccattaatgaagtttctacggcgttgattcagtgtgagggggatgacatacccgcgctgggaattttgccattaggaaccgccaatgattttgccaccagtgtagggattcctgaggcactggataaggcgctgaaactggcaattgccggtgacgccattgcgatagatatggcgcaggtcaacaaacaaacctgttttattaatatggcgacaggcggatttgggacgcgtattaccacagaaacgccggaaaaattaaaagccgcgctgggtagcgtctcttacatcattcatggcttaatgcgtatggatactctgcaaccggaccgttgtgaaatccgcggtgaaaactttcactggcaaggtgacgccctggtcattggtattggtaacgggcgtcaggccggtggcggtcagcaattgtgtccgaacgcgttaattaacgatggcttgctgcaactgcgcatttttaccggcgatgaaatacttccggctctcgtatcaaccttaaaatctgacgaagataacccgaatattatcgaaggcgcttcgtcgtggtttgatattcaggcaccacacgacatcacctttaatcttgatggcgaaccgttgagtgggcaaaattttcatattgaaatacttccggcagcgttgcgttgtcgattaccaccagattgtccactgttgcgttaa

SEQ ID NO: 6109 - DNA, 1041 bp, Escherichia coli
  CDS (1)...(1041)
atgaaatcagtggtgaatgatactgatggtatcgtgcgcgttgcagaaagcgtcattcctgaaattaaacatcaggatgaggtgcgggtaaaaattgccagctcgggcttatgtggttccgatttacccaggatatttaaaaatggtgcacattattatccaataacgttaggccatgaatttagcggctatattgatgcggtgggatccggtgttgatgatttacaccctggcgatgcggttgcctgtgtgccgttattaccctgttttacttgtccagagtgtctgaaagggttttattcccagtgcgcaaaatatgattttattggctcgcggcgtgatggtggatttgctgaatatattgtcgttaagcgaaaaaatgtctttgctctacccacggatatgcctattgaggatggggcttttattgagccgattaccgttggtctgcatgcttttcatttagcgcaaggttgtgagaataaaaacgttattattattggtgccggaaccattggcctgctggccattcagtgcgctgtcgcgctgggagcaaagagtgtgacggcgatcgacattagttcagaaaaactggcactggcaaaatctttcggtgcgatgcaaacatttaacagtagcgaaatgagcgcgccgcaaatgcagagcgttttacgcgaactgcgctttaatcagcttatcctcgagacggctggcgtaccgcaaactgtcgaactggcggtagagattgccggtcctcatgcccaactggcgctggtgggcacgttgcatcaggatctgcatttaacatcggcaacgtttggcaaaatattgcgtaaagagctgacggttatcggcagttggatgaactactccagcccttggccggggcaggagtgggaaacggcgagccggttgctgacagaacgtaagttaagcctggagccattaatcgctcaccgtggaagctttgaaagcttcgcccaggcggtgcgtgacatcgctcgtaatgctatgccgggcaaagtgttgctcattccctga

SEQ ID NO: 6110 - DNA, 861 bp, Escherichia coli
  CDS (1)...(861)
atgaaaatgtacgtggtatcgacaaagcagatgctgaacaacgcacagcgcggcggttatgcggttccggcattcaatattcacaatctcgaaacgatgcaagtggtggtagaaaccgctgccaacctgcatgcgccggtcatcatcgccggaacgcctggcacatttactcatgctggtacagaaaatctgttggcgctggtcagcgcgatggcgaagcaatatcaccatccactggcaattcatctcgaccatcacacgaaatttgacgatatcgctcagaaggttcgttctggcgtgcgctcagtcatgattgacgcctcgcatttgccttttgcgcaaaatatttcacgggtcaaagaggtggtggatttttgccatcgctttgatgtcagcgtcgaggcggagctggggcaacttggcggccaggaagatgatgtgcaagtcaatgaagccgatgcgttgtacaccaaccccgctcaggcgcgtgaatttgccgaggcaaccggaattgattccctggcggtcgccatcggcacggctcatgggatgtatgccagcgcaccggcgcttgatttttctagactggagaacattcgccagtgggtgaacttaccgctggtgctgcatggcgcgtcagggttatcgactaaggatattcagcaaaccatcaaactggggatatgcaaaatcaacgttgcaacggagctgaaaaatgccttctcgcaggcgttaaaaaattacctgaccgagcaccctgaagcgaccgatccccgggattatttgcagtcggctaaatccgcaatgcgcgatgtggtgagcaaagtgattgccgattgtggctgcgagggcagggcataa

SEQ ID NO: 6111 - DNA, 789 bp, Escherichia coli
  CDS (1)...(789)
atgcaagtcgacctgctgggttcagcgcaatctgcgcacgcgttacacctttttcaccaacattcccctcttgtgcactgcatgaccaatgatgtggtgcaaacctttaccgccaataccttgctggcgctcggtgcatcgccagcgatggttatcgaaaccgaagaggccagtcagtttgcggctatcgccagtgccttgttgattaacgttggcacactgacgcagccacgcgctcaggcgatgcgtgctgccgttgagcaagcaaaaagctctcaaacaccctggacgcttgatccagtagcggtgggtgcgctcgattatcgccgccatttttgtcatgaacttttatcttttaaaccggcagcgatacgtggtaatgcttcggaaatcatggcattagctggcattgctaatggcggacggggagtggataccactgacgccgcagctaacgcgatacccgctgcacaaacactggcacgggaaactggcgcaatcgtcgtggtcactggcgagatggattatgttaccgatggacatcgtatcattggtattcacggtggtgatccgttaatgaccaaagtggtaggaactggctgtgcattatcggcggttgtcgctgcctgctgtgcgttaccaggcgatacgctggaaaatgtcgcatctgcctgtcactggatgaaacaagccggagaacgcgcagtcgccagaagcgaggggccaggcagttttgttccacatttccttgatgcgctctggcaattgacgcaggaggtgcaggcatga

SEQ ID NO: 6112 - DNA, 273 bp, Escherichia coli
  CDS (1)...(273)
atgtctcatacaatccgtgataaacagaaactgaaagcgcgtgccagtaagattcagggccaggtcgtggcgctcaagaaaatgctcgacgagccgcacgaatgcgctgcagttttacaacagattgctgctatccgtggcgcggtaaacggtctgatgcgggaagtgattaaaggtcatctgacggaacacatcgttcaccagggggatgagctaaaacgtgaagaagatctggatgtcgttctgaaggtgctggattcatatatcaaataa

SEQ ID NO: 6113 - DNA, 2034 bp, Escherichia coli
  CDS (1)...(2034)
atgactcaagtcgcgaagaaaattctggtgacgtgcgcactgccgtacgctaacggctcaatccacctcggccatatgctggagcacatccaggctgatgtctgggtccgttaccagcgaatgcgcggccacgaggtcaacttcatctgcgccgacgatgcccacggtacaccgatcatgctgaaagctcagcagcttggtatcaccccggagcagatgattggcgaaatgagtcaggagcatcagactgatttcgcaggctttaacatcagctatgacaactatcactcgacgcacagcgaagagaaccgccagttgtcagaacttatctactctcgcctgaaagaaaacggttttattaaaaaccgcaccatctctcagctgtacgatccggaaaaaggcatgttcctgccggaccgttttgtgaaaggcacctgcccgaaatgtaaatccccggatcaatacggcgataactgcgaagtctgcggcgcgacctacagcccgactgaactgatcgagccgaaatcggtggtttctggcgctacgccggtaatgcgtgattctgaacacttcttctttgatctgccctctttcagcgaaatgttgcaggcatggacccgcagcggtgcgttgcaggagcaggtggcaaataaaatgcaggagtggtttgaatctggcctgcaacagtgggatatctcccgcgacgccccttacttcggttttgaaattccgaacgcgccgggcaaatatttctacgtctggctggacgcaccgattggctacatgggttctttcaagaatctgtgcgacaagcgcggcgacagcgtaagcttcgatgaatactggaagaaagactccaccgccgagctgtaccacttcatcggtaaagatattgtttacttccacagcctgttctggcctgccatgctggaaggcagcaacttccgcaagccgtccaacctgtttgttcatggctatgtgacggtgaacggcgcaaagatgtccaagtctcgcggcacctttattaaagccagcacctggctgaatcattttgacgcagacagcctgcgttactactacactgcgaaactctcttcgcgcattgatgatatcgatctcaacctggaagatttcgttcagcgtgtgaatgccgatatcgttaacaaagtggttaacctggcctcccgtaatgcgggctttatcaacaagcgttttgacggcgtgctggcaagcgaactggctgacccgcagttgtacaaaaccttcactgatgccgctgaagtgattggtgaagcgtgggaaagccgtgaatttggtaaagccgtgcgcgaaatcatggcgctggctgatctggctaaccgctatgtcgatgaacaggctccgtgggtggtggcgaaacaggaaggccgcgatgccgacctgcaggcaatttgctcaatgggcatcaacctgttccgcgtgctgatgacttacctgaagccggtactgccgaaactgaccgagcgtgcagaagcattcctcaatacggaactgacctgggatggtatccagcaaccgctgctgggccacaaagtgaatccgttcaaggcgctgtataaccgcatcgatatgaggcaggttgaagcactggtggaagcctctaaagaagaagtaaaagccgctgccgcgccggtaactggcccgctggcagatgatccgattcaggaaaccatcacctttgacgacttcgctaaagttgacctgcgcgtggcgctgattgaaaacgcagagtttgttgaaggttctgacaaactgctgcgcctgacgctggatctcggcggtgaaaaacgcaatgtcttctccggtattcgttctgcttacccggatccgcaggcactgattggtcgtcacaccattatggtggctaacctggcaccacgtaaaatgcgcttcggtatctctgaaggcatggtgatggctgccggtcctggcgggaaagatattttcctgctaagcccggatgccggtgctaaaccgggtcatcaggtgaaataa

SEQ ID NO: 6114 - DNA, 1686 bp, Escherichia coli
  CDS (1)...(1686)
atgtacgattttaatctggtgttgctgctgcttcagcagatgtgcgtttttttagtcattgcatggttaatgagtaaaacgccattattcataccgttaatgcaggtcacggttcgtctgccgcataaatttctctgctacatcgtcttttccatcttctgcatcatgggcacctggtttgggttgcacattgacgattctattgccaatacccgtgcgataggcgcggtaatgggcggcttactcggcggtccggtcgtcggtgggctggttgggctgaccggcggcttacatcgatattcgatggggggcatgaccgcgttaagttgcatgatctcgaccatcgttgaaggattactcggtggcctggtacacagcatcctgatccgccgcgggcgcactgataaagtctttaaccccattaccgccggtgccgtcacgttcgtcgctgaaatggtgcaaatgctgatcatccttgcgatcgcccgaccttatgaagatgcggtgcgtctggtgagtaatattgctgcgccaatgatggtcaccaataccgtcggcgcggcgctgtttatgcgtatattgctcgataaacgcgcgatgtttgaaaaatacacttcggctttttctgccactgcgctgaaagtggcagcctcgacggaaggcattttgcgccaggggtttaacgaagtgaacagcatgaaagtggctcaggtgctgtatcaggaactggatattggtgcagtcgcgattaccgatcgagagaaattgctggcctttaccggaattggtgacgaccaccatttacccggcaaaccgatttcttcaacttatactttaaaagcgattgaaaccggtgaagtggtctacgctgatggcaacgaagtaccttaccgttgctctttgcatccgcaatgcaaactggggtcgacgctggtaattccgttgcgtggtgaaaatcagcgggtgatgggcaccatcaaattgtatgaagccaaaaaccgtttattcagttcaatcaaccgcacgttgggtgaggggattgcgcaattgctttcggcgcagatccttgccgggcaatatgagcggcaaaaagcgatgctcacccagtcagagatcaaactgcttcacgcccaggtgaatccccattttttgtttaatgcgcttaacaccattaaagcggtgatccgccgcgacagcgaacaggccagccagctggtgcagtatctttccacttttttccgcaaaaacttaaagcggccttcggagtttgttactctcgccgacgaaattgaacatgtgaatgcttatctgcaaattgaaaaggcgcgcttccagtcgcggttgcaggtcaacattgctattccgcaagaattatcccagcagcaattgcccgcgtttaccctgcaaccgatagtggaaaacgccattaaacatgggacatcacaactgctggatacagggcgagtggcaatcagcgcccgacgtgaggggcaacatttgatgctggagatcgaagacaatgccggtttgtatcaaccggtaaccaatgccagtgggctggggatgaatctggtggataagcgtttacgtgaacggtttggcgatgactatggaataagcgtcgcctgtgagcctgatagttacacccgaataacgttacgactaccatggagggacgaggcatga

SEQ ID NO: 6115 - DNA, 927 bp, Escherichia coli
  CDS (1)...(927)
atgattgaatttagccatgtcagcaaactgttcggcgcacaaaaagccgttaacgatctcaatctcaattttcaggaagggagtttttcggtgctgattggcacatctggctccggcaaatccaccaccctgaaaatgattaaccgcctggtggagcatgacagcggagagatccgctttgccggagaagaaattcgctcgctgccagtactggagttgcgccgccggatgggctatgccattcaatctattggcctgttcccccactggagcgtggcgcaaaacatcgctaccgtgccgcaattacaaaaatggtcgcgggcgcggattgacgatcgtatcgacgaattaatggcgctactggggctggagtcaaatttgcgtgagcgttatccgcatcagctttccggtggtcagcagcaacgtgtgggagtggcgcgtgcactggctgccgatccgcaagtcttactaatggatgaaccttttggcgcactggacccggtaacgcgcggcgcgttgcaacaagagatgacgcgcattcaccgtttgctggggcgtaccattgtgctggtcactcatgatattgatgaggcgctacggctggcagaacatctggtattgatggatcacggtgaagtagtgcagcagggcaatccgctgacgatgctgactcgtccggcgaatgattttgtccgccagttttttggacgtagtgaactgggtgtgcgcctgctttcgttacgtagtgtggcggattacgtgcgtcgcgaagaacgagcagatggtgaggcactggcagaagagatgacgctacgcgatgcgctctctctgtttgttgcgcggggatgcgaggtgctgccggtggtgaacatgcagggccagccttgcggcacgctgcattttcaggatctgctggtggaggcgtaa

SEQ ID NO: 6116 - DNA, 948 bp, Escherichia coli
  CDS (1)...(948)
atgcgtgtgttactggcaccgatggagggagtgcttgactctctggtgcgtgaattgctgaccgaagttaacgactacgatctgtgcatcaccgagtttgtccgcgtggtggatcaactgctgccggtaaaagtctttcatcgcatttgccctgagctacaaaacgccagccggacaccatctggtacgctggtgcgcgtgcagttgttaggtcagttcccacaatggctggcagagaacgccgcccgtgcggtggagttaggttcctggggcgtggatctcaattgcggctgcccgtcgaaaacggttaacggtagcggcggcggggcgacgttactcaaagatcctgaactcatctaccagggtgcaaaagcgatgcgtgaagctgtaccggcgcatttgcccgtcagcgtgaaagtgcgtctgggctgggacagcggtgagaagaaatttgaaatcgccgatgcggttcaacaggctggcgctacggagctggtggtgcatgggcggacgaaagagcagggttaccgcgcggagcatattgactggcaggcgattggcgatattcgccagcggctgaatattccggtgattgccaacggtgaaatctgggactggcagagcgcgcaacaatgcatggcgatcagcggctgcgacgcagtgatgattggtcgcggggcgctcaatattcccaacctgagccgggtggtaaaatataacgaaccgcgaatgccgtggccggaggtggttgctttgctgcaaaaatatacccgtctggaaaagcagggcgataccgggttatatcacgttgcgcggattaaacagtggttgagttatttgcgtaaagaatacgatgaagcaacggaattatttcagcatgttcgggtgttgaataattcccctgatattgcaagggctattcaggcaattgatatcgagaaactctaa

SEQ ID NO: 6117 - DNA, 1521 bp, Escherichia coli
  CDS (1)...(1521)
atggtcagctcaacgactccgtcctccggggaatacttgttggaaatgagcggtatcaacaagtcctttcctggtgttaaggcacttgataacgttaatttaaaagtccggccacattctatccatgcattaatgggggaaaacggtgcaggaaaatcgacattattaaaatgcctgtttggtatttatcaaaaagactccggcaccattttattccagggtaaagagatcgatttccattctgcaaaagaagccctggaaaatggtatttcgatggtacaccaggagttaaacctggtattacaacgttcggtgatggataacatgtggctggggcgatatcccaccaaaggcatgtttgtcgatcaggacaaaatgtaccgcgaaaccaaagcgatttttgacgaactggatattgatatcgatccgcgtgcgcgcgtcggcacattatccgtttcgcaaatgcagatgatcgaaatcgccaaagcgttttcctataacgcgaaaattgtgattatggatgaaccgacttcttcgttaaccgaaaaagaggtcaatcatctgttcactattattcgtaaattaaaagagcgcggctgcggtattgtttatatctcgcataaaatggaagaaatcttccagttatgtgatgaagttaccgtattgcgcgacggtcagtggatcgccaccgaaccgctggcaggactgacgatggacaagatcatcgccatgatggttgggcgttctcttaaccagcgtttccctgacaaagaaaacaaaccgggcgaagtcatcctcgaggtacgtaacctgacgtcactgcgccagccgtcgattcgcgatgtctcgtttgatctgcataaaggggagatcctcggtattgccggtctggtgggggcgaaacgtaccgatattgttgagacgttatttggtattcgcgagaaatcggctggcaccataacgttgcacggcaaacagatcaataaccataatgccaacgaagccataaaccatggatttgcactggtaactgaggagcgccgctcaacgggaatttatgcctatctggatattggttttaactcgttaatttccaatattcgcaactacaaaaataaagttggtttactggataactcgcggatgaaaagcgatacccagtgggtgattgattcgatgcgggtaaaaacgccgggtcatcggacgcaaattggttcgctctccggtggtaatcagcaaaaggtgattattggtcgctggctactaacgcaaccagaaatattaatgctcgatgaaccgacgcgcggtattgatgtcggggcgaagtttgaaatttatcagttaattgccgaactggcgaagaaaggcaaggggattattattatctcctctgaaatgcctgagttgttagggataacagaccgtattctggtcatgagcaatggtctcgtttccggaattgtcgatacaaaaacaacaacgcaaaacgaaattctgcgtcttgcgtctttgcacctttaa

SEQ ID NO: 6118 - DNA, 1470 bp, Escherichia coli
  CDS (1)...(1470)
atggtttccgaaactaaaaccacagaagcgccgggcttacgccgtgaattaaaggcgcgtcacctgacgatgattgccattggcggttccatcggtacaggtctttttgttgcctctggcgcaacgatttctcaggcaggtccgggcggggcattgctctcgtatatgctgattggcctgatggtttacttcctgatgaccagtctcggtgaactggctgcatatatgccggtttccggttcgtttgccacttacggtcagaactatgttgaagaaggctttggcttcgcgctgggctggaactactggtacaactgggcggtgactatcgccgttgacctggttgcagctcagctggtcatgagctggtggttcccggatacaccgggctggatctggagtgcgttgttcctcggcgttatcttcctgctgaactacatctcagttcgtggctttggtgaagcggaatactggttctcactgatcaaagtcacgacagttattgtctttatcatcgttggcgtgctgatgattatcggtatcttcaaaggcgcgcagcctgcgggctggagcaactggacaatcggcgaagcgccgtttgctggtggttttgcggcgatgatcggcgtagctatgattgtcggcttctctttccagggaaccgagctgatcggtattgctgcaggcgagtccgaagatccggcgaaaaacattccacgcgcggtacgtcaggtgttctggcgaatcctgttgttctatgtgttcgcgatcctgattatcagcctgattattccgtacaccgatccgagcctgctgcgtaacgatgttaaagacatcagcgttagtccgttcaccctggtgttccagcacgcgggtctgctctctgcggcggcggtgatgaacgcagttattctgacggcggtgctgtcagcgggtaactccggtatgtatgcgtctactcgtatgctgtacaccctggcgtgtgacggtaaagcgccgcgcattttcgctaaactgtcgcgtggtggcgtgccgcgtaatgcgctgtatgcgacgacggtgattgccggtctgtgcttcctgacctccatgtttggcaaccagacggtatacctgtggctgctgaacacctccgggatgacgggttttatcgcctggctggggattgccattagccactatcgcttccgtcgcggttacgtattgcagggacacgacattaacgatctgccgtaccgttcaggtttcttcccactggggccgatcttcgcattcattctgtgtctgattatcactttgggccagaactacgaagcgttcctgaaagatactattgactggggcggcgtagcggcaacgtatattggtatcccgctgttcctgattatttggttcggctacaagctgattaaaggaactcacttcgtacgctacagcgaaatgaagttcccgcagaacgataagaaataa

SEQ ID NO: 6119 - DNA, 858 bp, Escherichia coli
  CDS (1)...(858)
atgaaatacattggagcgcacgttagtgctgctggcggtctggcaaatgccgcaattcgcgccgccgaaatcgacgcaaccgcgtttgccttgttcaccaaaaaccaacgtcagtggcgtgccgcaccgctcacgacgcaaaccatcgatgaattcaaagccgcctgtgaaaaatatcactacacatcggcgcaaattcttccccacgacagttatctgattaacctcggacatccggtcactgaagctctggaaaaatcgcgcgatgcctttatagatgaaatgcagcgttgcgaacagctggggctttctttgctcaacttccaccctggcagccatctgatgcagatttcagaagaggattgccttgcgcgtattgccgaatccatcaacattgcgctggataaaactcaaggtgtgacagcggtgatagaaaacaccgccggtcagggcagtaacttagggtttaaattcgaacatctcgcggcgattatcgacggcgtggaagataaatcccgcgtcggcgtctgcattgatacctgccatgctttcgctgccgggtatgatttgcgtactccagccgaatgcgagaaaacattcgcggattttgcccgtactgtcggctttaagtatctgcgcgggatgcaccttaacgatgcgaaaagcacctttggcagccgcgttgaccgccatcatagcctcggtgaaggcaatatcggtcatgatgcgttccgctggatcatgcaggacgaccgtttcgacggcattccgctgatcctcgaaaccatcaacccggatatctgggcagaagagatcgcctggctgaaagcgcaacaaactgaaaaagcggtagcctga

SEQ ID NO: 6120 - DNA, 939 bp, Escherichia coli
  CDS (1)...(939)
atgtctgaattaaaaatttcccctgaattattacaaatttccccggaagtgcaggacgctttaaaaaacaaaaaaccggttgtggcgctggaatcgaccattatttctcacgggatgccgttcccacaaaatgcccagaccgcaattgaagttgaagaaactattcgtaaacagggcgctgtacctgccacgatcgccattattggcggcgtgatgaaagtggggttaagcaaagaagaaattgaattactgggtcgtgaagggcataacgtgaccaaagttagtcgtcgcgatttaccttttgttgttgccgccggaaaaaatggcgcaaccactgtggcttcaacgatgattattgcggcgcttgccggaattaaagtatttgccaccgggggaattggtggtgtgcatcgcggggcggaacataccttcgatatttctgccgatttgcaagaactggcaaatactaatgtcaccgttgtttgtgccggggcgaaatctattctcgatttaggattaaccactgagtatttagaaaccttcggtgtgccgttaattggctatcagactaaagcgctgcctgcgtttttctgccgcaccagcccgtttgacgtcagcattcgtctcgacagcgccagcgaaattgcccgtgcaatggtggtgaaatggcaaagcggtctgaacggtggcctcgtggtagcgaacccgatcccggaacagtttgctatgccggaacacactatcaatgcggcgatcgatcaggcggtagctgaagctgaagctcagggagtcattggtaaagaaagtacgccattcctgctggcgcgcgttgctgaactgaccggcggtgacagcctgaaatccaacatccagctggtgttcaacaacgccattctggcgagcgaaattgccaaagaatatcagcgtctcgcgggttaa

SEQ ID NO: 6121 - DNA, 1692 bp, Escherichia coli
  CDS (1)...(1692)
atgaaaacgctgctgattattgacgctaatctcggtcaggcacgcgcctatatggcgaagaccctgctgggcgcggcggcgcgaaaagcaaaactggaaatcatcgacaatccgaacgacgctgaaatggcgattgttctcggtgattccatcccgaacgacagcgcgctgaacggtaaaaatgtctggctgggcgatatttcccgggcagttgcgcaccctgagctgttcctgagtgaagccaaaggccatgcgaaaccttacactgcgccggtcgctgcgacagcaccagttgccgccagcggtccgaaacgcgtagttgcggtgactgcttgcccgactggcgtagcacacacctttatggcggctgaagccattgaaaccgaagcgaaaaaacgtggctggtgggtgaaagttgaaacccgtggttctgttggcgcgggtaatgcaatcactcccgaagaagtcgcagcagcggatctggtgattgtggcggcagatatcgaagtggatctggcgaaatttgctggtaaaccgatgtatcgtacctctaccggtctggcgctgaagaaaaccgcgcaggaactggataaagcggttgctgaagcaacgccgtatgaaccggcgggcaaagctcaaacggcgaccactgaaagtaagaaagagagtgcaggcgcataccgtcacttgctgacgggcgtttcttacatgctgccgatggtcgttgcaggtggtctgtgtatcgcgctttcttttgcttttggtatcgaagcgtttaaagagccgggtacgttggctgcggcgctgatgcagattggtggtggttcagcctttgcgctgatggtgccggtactggcaggttatattgccttttccattgccgatcgtccgggcctcactccgggtctgattggcggtatgctggcggtcagcaccggttctggcttcattggtggtattattgcgggcttcctggctggttacattgcgaagttaatcagtacgcaattgaaactgccacagagtatggaggcgctgaaaccgatcctgatcattccgctaatttccagtctggtggtcggtctggcgatgatctacctgatcggtaaaccagttgctggcattctcgaagggctgactcactggctgcagaccatggggactgcgaatgcggttctgctgggggcgatcctcggtggcatgatgtgtactgacatgggcggtccggtaaacaaagcagcgtacgcattcggtgtgggtctgctgagtactcaaacctatggcccgatggcggcgattatggcggcaggtatggtgccaccgctggcaatgggtctggcaacaatggtggcgcgtcgcaaattcgacaaagcgcagcaggaaggtggcaaagccgctctggtattgggactgtgcttcatttcggaaggtgcaattccgtttgctgctcgtgatccgatgcgtgtgctgccgtgctgtatcgtgggtggggcgctgactggcgcaatctcaatggcgattggtgcgaaactgatggcaccgcacggtggtctgtttgttctgctgatccctggcgctattacgccggtattgggttacctggtagcaattattgccggtacgctggtggcgggtttggcctatgccttcctgaaacgtccggaagtggacgcagtagcgaaagcagcgtaa

SEQ ID NO: 6122 - DNA, 939 bp, Escherichia coli
  CDS (1)...(939)
atgagcagacgtgttgctactatcacccttaatccggcttatgaccttgttggtttctgcccggaaattgaacgcggcgaagtgaacctggtgaaaaccaccggtctgcatgcggcgggtaaaggcatcaacgtggccaaagtattaaaagacctgggaattgatgtcaccgttggcggcttcctgggtaaagacaatcaggatggttttcagcaactgttcagcgagctgggcattgccaaccgtttccaggttgtacaggggcgcacccgaattaacgttaagctgacggaaaaagacggcgaagtgaccgacttcaacttctcgggttttgaagtcacccccgccgactgggaacgctttgtgactgattctctgagctggctcggtcagttcgatatggtctgtgtcagcggaagcttaccgtcaggcgtcagcccggaagcgttcaccgactggatgactcgcctgcgtagtcagtgtccttgcattatctttgatagtagccgtgaagcgttagtagcaggtttgaaagcggcaccgtggctggtgaaacctaaccgccgcgagctggaaatctgggcaggccgtaaactgcctgaaatgaaagatgtgattgaagctgcacatgcgctacgtgaacaaggcatcgcgcatgttgttatttcactgggtgccgaaggcgcgctttgggttaatgcctccggcgaatggatcgccaaaccaccgtcagtcgatgtcgtaagcaccgttggcgcaggggattctatggttggtggcctgatttatggcttgctgatgcgtgaatccagtgaacacacactgcgtctggcgacagctgttgcagccctggcggtaagtcaaagcaatgtgggtattaccgatcgtccgcagttggccgcaatgatggcgcgcgtcgacttacaaccttttaactga

SEQ ID NO: 6123 - DNA, 1131 bp, Escherichia coli
  CDS (1)...(1131)
atgttccagttatccgtacaggacatccatccgggcgaaaaggccggagacaaagaagaggcgattcgccaggtcgctgcggcgctggtgcaggccggtaatgtagcagaaggctacgtcaatggcatgctggcgcgcgaacagcaaacctcaacgttcctcggcaatggtattgctattccacacggcactaccgacacccgcgatcaggtgctgaaaaccggcgttcaggtatttcagttcccggaaggcgtcacctggggtgacggtcaggtagcgtacgtggcaatcggtattgctgccagctcggatgaacatctgggcctgctacgccagctgacccacgtactgagcgatgattccgttgctgaacaactgaagtcagcaacaacagcagaagaacttcgcgcattactgatgggcgaaaagcagagtgagcagctgaagctcgacaacgaaatgctgacactggatatcgtcgccagcgatctgctgactcttcaggcgctgaacgctgcgcgtctgaaagaggcgggggcagttgacgccactttcgtcaccaaagccatcaatgaacaaccgctgaatctcggacagggtatctggctgagcgatagcgccgaaggcaatctgcgtagcgcgattgcggtaagccgtgcggcaaatgcttttgatgtggacggcgaaacggcagccatgctggtgagtgtggcgatgaatgacgatcagcccatcgcggttcttaagcgtctcgctgatttattgctcgacaataaagctgaccgcttgctgaaagcggatgcggcaacgttgctggcgctgctgaccagcgatgatgcgccgaccgacgacgtgttaagcgcggagtttgtggtgcgcaatgaacacggcctgcatgctcgtccaggtaccatgctggtcaataccattaaacaatttaacagtgatattaccgtgacaaaccttgatggtaccggcaaaccggcaaacggacgtagtctgatgaaagttgtggcacttggcgttaagaaaggtcatcgcctacgctttaccgcccagggtgcagatgctgaacaggcgctgaaagcaatcggcgacgctatcgctgctggtcttggggagggcgcataa

SEQ ID NO: 6124 - DNA, 696 bp, Escherichia coli
  CDS (1)...(696)
atgcgacttgataaatttatcgcacagcaactcggcgttagccgtgctattgccgggcgtgaaatccgcggcaatcgtgtcaccgtcgatggcgaaatcgtccgtaatgcagcgttcaaactgcttcctgaacatgatgtcgcttacgatggcaacccgctggcgcagcaacacggtccacgttacttcatgctcaataagcctcagggctatgtttgctccacggacgaccctgatcacccaacggtgctctattttcttgatgaaccggtagcgtggaaactgcatgcggcggggcggttggatattgataccaccggtctggtgctgatgactgatgatggtcagtggtcgcaccgcattacttctccgcgccatcattgcgagaagacctatctggtgacactggaatcacctgtagctgacgatacggcagagcaatttgctaaaggcgtgcagctgcataacgaaaaagatctcactaagcctgcggtgctggaagtgattaccccaacgcaggttcgtctgaccatcagcgaagggcgttatcatcaggtgaaacgcatgttcgccgccgtgggtaaccacgtggttgagctgcatcgtgaacgtattggcggtattacgctggatgctgatttagcccccggtgaatatcgtccgttaactgaagaagaaattgccagcgtcgtctaa

SEQ ID NO: 6125 - DNA, 1761 bp, Escherichia coli
  CDS (1)...(1761)
atggtaactcatcgtcagcgctaccgtgaaaaagtctcccagatggtcagttgggggcactggtttgcactgttcaatattctgctttcgctcgtcattggcagccgttacctgtttatcgccgactggccgacaacgcttgctggtcgcatttattcctacgtaagcattatcggccatttcagcttcctggtgttcgccacctacttgctgatcctcttcccgctgacctttatcgtcggctcccagaggctgatgaggtttttgtccgtcattctggcaacggcgggaatgacgctattactgatcgatagcgaagtctttactcgtttccatctccatcttaatcccatcgtctggcaactggttatcaacccagacgaaaatgagatggcgcgcgactggcagctgatgttcatcagcgtgccggttattttattgcttgaactggtgtttgcgacgtggagctggcaaaagctgcgcagcctgacgcgtcgtcgacgcttcgcgcgcccgctggccgcattcttatttatcgcctttatcgcctcgcatgtggtgtatatctgggccgatgccaacttctatcgcccgatcaccatgcagcgcgctaacctgccgctttcgtacccgatgacggcgcgacgttttcttgagaagcatggtctgcttgatgcgcaggagtatcaacgccgtcttattgagcaaggtaatccagacgccgtttccgttcagtatccgttaagcgaactgcgctatcgcgatatgggcaccgggcagaatgtgctgttgattactgtcgatggcctgaactactcacgcttcgagaagcagatgcctgcgctggcaggttttgctgagcaaaatatttcgttcacgcgccatatgagctccggcaacactacagacaacggcatctttggcctgttctatggcatctcgccgagctatatggacggcattctgtcgacccgtacgcctgcggcattaattactgcgcttaatcagcaaggctatcagctggggttattctcatcagatggctttaccagcccgctgtatcgccaggcattgttgtcagatttctcgatgccgagcgtacgcacccaatccgacgagcagaccgccacgcagtggatcaactggctgggacgctacgcacaagaagataaccgctggttctcgtgggtttctttcaatggtactaacattgacgacagcaatcagcaggcatttgcacggaaatatagccgggcggcaggcaatgtcgatgaccagatcaaccgcgtgctcaatgcactgcgtgattctggcaaactggacaatacggtggtgattatcactgccggtcggggtattccactgagcgaagaggaagaaacctttgactggtcccacggtcatctgcaggtgccattagtgattcactggccaggcacgccggcgcagcgtattaatgctctgactgatcataccgatctgatgacgacgctgatgcaacgcctgctacatgtcagcacacctgccagcgaatattcgcaaggtcaggatttgttcaaccctcaacgccgtcattactgggttaccgcagcggataacgatacgctggcaattaccaccccgaaaaagacgctggtactgaacaataacggtaaataccgcacttacaacttacgtggtgaaagagtgaaagatgaaaaaccacagttaagtttgttattgcaagtgctgacagacgagaagcgttttatcgctaactga

SEQ ID NO: 6126 - DNA, 1647 bp, Escherichia coli
  CDS (1)...(1647)
atgaaaaaagtgactgccatgctcttctcgatggccgtggggcttaatgccgtttcgatggcggcaaaagcgaaagcgtccgaggagcaggaaactgatgtactgttgattggcggcggcattatgagcgccacgttggggacctatttacgcgagctggagcctgaatggtcgatgaccatggtggagcgcctggagggtgtcgcgcaggagagttcgaacggctggaataacgccggaaccgggcattctgcactgatggaactgaactacaccccgcaaaacgccgatggcagcatcagtattgaaaaagcagtcgccattaacgaagcatttcagatttcccgccagttctgggcgcaccaggttgagcgcggcgtgctgcgtactccgcgttcatttatcaataccgttccgcatatgagctttgtctggggcgaggataacgtcaatttcctgcgcgcccgttacgccgcgttgcaacaaagctcgctgtttcgcggtatgcgttactctgaagatcacgcgcagatcaaagagtgggcaccgttagtgatggaagggcgcgatccgcaacagaaagtggcagccacgcgtacggaaattggtaccgatgtgaactacggcgagatcacccgccagttaattgcttccttgcagaagaaatctaacttctcgctgcaactcagcagcgaagtccgcgccctaaagcgtaatgacgataacacctggaccgttaccgttgccgatctgaaaaatggcactgcacagaacattcgtgccaaatttgtctttatcggcgcgggcggtgcggcgctgaagctgttacaggaatcggggattccggaagcgaaagactacgccggtttcccggtgggcggacagttccttgtttcggaaaacccggacgtggttaatcaccatctggcgaaggtttacggtaaagcatccgttggcgcaccaccgatgtcggttccgcatatcgatacccgcgttctggacggtaaacgcgtagtgctgtttgggccatttgccaccttctcaaccaaattcctcaaaaacggttcattgtgggatctaatgagttccaccaccacctctaacgtgatgccgatgatgcacgtcgggctggataatttcgatctggtgaaatatctggtgagtcaggtgatgttgagtgaagaggatcgttttgaagcgttgaaagagtactatccgcaggcgaaaaaagaggactggcgtttgtggcaagcggggcagcgcgtgcagattatcaagcgtgatgccgagaaaggtggcgtactgcgtctgggtactgaagtcgtcagtgaccagcaaggaaccattgccgcgctcctgggggcatcgccaggggcgtcaaccgccgcgccgattatgttgaatctgctggaaaaagtatttggcgatcgtgtttccagcccgcaatggcaggctacgttgaaagcgatcgttccgtcttatggacgcaagctgaacggtgatgtagcggcaacagaacgcgagttgcagtacaccagcgaagtgctggggttgaactacgacaagccgcaggcagcagatagtacgccgaaaccgcagttgaaaccgcaacccgttcaaaaagaagtggcggatattgcgttgtaa

SEQ ID NO: 6127 - DNA, 2628 bp, Escherichia coli
  CDS (1)...(2628)
atgagcgaccttgcgagagaaattacaccggtcaacattgaggaagagctgaagagctcctatctggattatgcgatgtcggtcattgttggccgtgcgctgccagatgtccgagatggcctgaagccggtacaccgtcgcgtactttacgccatgaacgtactaggcaatgactggaacaaagcctataaaaaatctgcccgtgtcgttggtgacgtaatcggtaaataccatccccatggtgactcggcggtctatgacacgatcgtccgcatggcgcagccattctcgctgcgttatatgctggtagacggtcagggtaacttcggttctatcgacggcgactctgcggcggcaatgcgttatacggaaatccgtctggcgaaaattgcccatgaactgatggccgatctcgaaaaagagacggtcgatttcgttgataactatgacggcacggaaaaaattccggacgtcatgccaaccaaaattcctaacctgctggtgaacggttcttccggtatcgccgtaggtatggcaaccaacatcccgccgcacaacctgacggaagtcatcaacggttgtctggcgtatattgatgatgaagacatcagcattgaagggctgatggaacacatcccggggccggacttcccgacggcggcaatcattaacggtcgtcgcggtattgaagaagcttaccgtaccggtcgcggcaaggtgtatatccgcgctcgcgcagaagtggaagttgacgccaaaaccggtcgtgaaaccattatcgtccacgaaattccgtatcaggtaaacaaagcgcgcctgatcgagaagattgcggaactggtaaaagaaaaacgcgtggaaggcatcagcgcgctgcgtgacgagtctgacaaagacggtatgcgcatcgtgattgaagtgaaacgcgatgcggtcggtgaagttgtgctcaacaacctctactcccagacccagttgcaggtttctttcggtatcaacatggtggcattgcaccatggtcagccgaagatcatgaacctgaaagacatcatcgcggcgtttgttcgtcaccgccgtgaagtggtgacccgtcgtactattttcgaactgcgtaaagctcgcgatcgtgctcatatccttgaagcattagccgtggcgctggcgaacatcgacccgatcatcgaactgatccgtcatgcgccgacgcctgcagaagcgaaaactgcgctggttgctaatccgtggcagctgggcaacgttgccgcgatgctcgaacgtgctggcgacgatgctgcgcgtccggaatggctggagccagagttcggcgtgcgtgatggtctgtactacctgaccgaacagcaagctcaggcgattctggatctgcgtttgcagaaactgaccggtcttgagcacgaaaaactgctcgacgaatacaaagagctgctggatcagatcgcggaactgttgcgtattcttggtagcgccgatcgtctgatggaagtgatccgtgaagagctggagctggttcgtgaacagttcggtgacaaacgtcgtactgaaatcaccgccaacagcgcagacatcaacctggaagatctgatcacccaggaagatgtggtcgtgacgctctctcaccagggctacgttaagtatcagccgctttctgaatacgaagcgcagcgtcgtggcgggaaaggtaaatctgccgcacgtattaaagaagaagactttatcgaccgactgctggtggcgaacactcacgaccatattctgtgcttctccagccgtggtcgcgtctattcgatgaaagtttatcagttgccggaagccactcgtggcgcgcgcggtcgtccgatcgtcaacctgctgccgctggagcaggacgaacgtatcactgcgatcctgccagtgaccgagtttgaagaaggcgtgaaagtcttcatggcgaccgctaacggtaccgtgaagaaaactgtcctcaccgagttcaaccgtctgcgtaccgccggtaaagtggcgatcaaactggttgacggcgatgagctgatcggcgttgacctgaccagcggcgaagacgaagtaatgctgttctccgctgaaggtaaagtggtgcgctttaaagagtcttctgtccgtgcgatgggctgcaacaccaccggtgttcgcggtattcgcttaggtgaaggcgataaagtcgtctctctgatcgtgcctcgtggcgatggcgcaatcctcaccgcaacgcaaaacggttacggtaaacgtaccgcagtggcggaatacccaaccaagtcgcgtgcgacgaaaggggttatctccatcaaggttaccgaacgtaacggtttagttgttggcgcggtacaggtagatgactgcgaccagatcatgatgatcaccgatgccggtacgctggtacgtactcgcgtttcggaaatcagcatcgtgggccgtaacacccagggcgtgatcctcatccgtactgcggaagatgaaaacgtagtgggtctgcaacgtgttgctgaaccggttgacgaggaagatctggataccatcgacggcagtgccgcggaaggggacgatgaaatcgctccggaagtggacgttgacgacgagccagaagaagaataa

SEQ ID NO: 6128 - DNA, 1842 bp, Escherichia coli
  CDS (1)...(1842)
atgaacatgcttgccttaaccattattttgccattgattggcttcgtcctgctggcattctcccgtgggcgctggtctgaaaacgtctcggcgatcgtcggcgtaggctctgtgggcctggcggcgctggtaaccgcctttatcggcgttgatttcttcgctaacggcgagcagacatacagccagccgctgtggacgtggatgtcggtaggcgactttaacatcggttttaacctggtgctggacggcctgtcgctgaccatgctctcggtggtcactggtgtgggtttccttattcacatgtacgcctcctggtatatgcgcggtgaagagggctactctcgcttcttcgcttacaccaacctgttcatcgccagcatggtggttctggtgcttgccgacaacctgctgctgatgtacctcggctgggaaggcgtgggcctgtgctcctatctgctgatcgggttctattacaccgatccgaagaatggcgcagcggcaatgaaagcgttcgtcgtgacccgtgtgggtgacgtgttcctcgctttcgcactgttcattctttacaacgaactgggcaccctgaacttccgcgaaatggtggaactggcaccagcgcactttgctgacggcaataacatgctgatgtgggcgacgctgatgctgctgggcggtgcggtcggtaaatctgcgcagttgccgttgcagacatggcttgccgacgcgatggcgggcccgacgcctgtctccgcgctgatccacgccgcaaccatggtaaccgcgggtgtctacctgatcgcccgtacccacggcctgttcctgatgacgccggaagttctgcatctggtgggtattgtcggggcggttacgctgctgctggccggttttgccgcgctggtacagaccgacatcaaacgtgttctcgcttactctaccatgagccagattggctacatgttcctcgcgcttggcgtgcaggcatgggatgcggcgattttccacttgatgacccacgcgttctttaaagcgctgctgttcctggcatccggttccgtcattctggcctgccatcacgaacagaacatcttcaagatgggcggtctgcgtaaatctattccgctggtttatctctgcttcctggtgggcggcgcagcactgtcggcactaccgctggtcactgcgggcttcttcagtaaggatgagatcctcgcgggtgcgatggcgaatggtcatatcaatctgatggtggcaggtctggtcggtgcgtttatgacctcgctctacaccttccgtatgattttcatcgtcttccacggaaaagaacaaattcacgctcacgccgtgaaaggggtaactcacagcctgccgctgattgtgctgctgatcctttccaccttcgttggcgcactgattgtaccgccgctgcagggcgtgcttccgcaaacgacggaactggcgcacggcagcatgttgaccctggaaattacctctggcgtggtcgcggtggtcggcattctgctggcagcctggctgtggctgggtaaacgtactctggtgacctccatcgccaacagtgcgccgggccgtctgctgggcacctggtggtacaacgcctggggatttgactggctgtatgacaaagtgttcgtcaagccgttcctgggtattgcctggttgctgaaacgcgatccgctgaactcaatgatgaacatcccggctgtcctttcccgctttgcaggtaaaggtctgctgttaagtgagaacggctatctgcgctggtatgtggcatccatgagcatcggtgcggtcgtggtgctggcactgttgatggtactgcgttga

SEQ ID NO: 6129 - DNA, 1338 bp, Escherichia coli
  CDS (1)...(1338)
atgaaaaacattatccgtactcccgaaacgcatccgctgacctggcgtctgcgcgatgacaaacagccagtgtggctggacgaataccgcagcaaaaacggttacgaaggcgcgcgtaaggcgctgaccgggctgtctccggacgaaatcgttaatcaggtaaaagacgctggtctgaaagggcgcggcggcgcgggcttctcgactggcctgaaatggagcctgatgccgaaagacgaatccatgaacatccgttacctgctgtgtaatgccgatgaaatggagccgggcacctataaagaccgcctgttgatggagcaactgccgcacctgctggtggaaggtatgctcatctccgcgtttgcgctgaaagcttaccgtggctacatcttcctgcgtggcgaatatatcgaagcggcagttaatctgcgccgtgccattgccgaagccaccgaagcgggtctgcttggcaaaaacattatgggaacaggtttcgatttcgaactgttcgtccataccggggcagggcgctacatctgcggggaagaaacagcgttaatcaactccctggaaggacgtcgtgctaacccacgctcgaagccacccttcccggcaacctccggcgcatggggtaaaccgacctgtgtcaacaacgtcgaaaccctgtgtaacgttccggcgatcctcgctaacggcgtggagtggtatcagaacatctcgaaaagtaaagatgctggcaccaagctgatgggcttctccggtcgggtgaaaaatccgggactgtgggaactgccgttcggcaccaccgcacgcgagatcctcgaagattacgccggtggtatgcgtgatggtctgaaatttaaagcctggcagccaggcggcgcggggactgacttcctgaccgaagcgcaccttgatctgccgatggaattcgaaagtatcggtaaagcgggcagccgtctgggtacggcgctggcgatggcggttgaccatgagatcaacatggtgtcgctggtgcgtaacctggaagagtttttcgcccgtgagtcctgcggctggtgtacgccgtgccgcgacggtctgccgtggagcgtgaaaattctgcgtgcgctggagcgtggtgaaggtcagccgggcgatatcgaaacacttgagcaactgtgtcgattcttaggcccgggtaaaactttctgtgcccacgcacctggtgcagtggagccgttacagagcgccatcaaatatttccgcgaagaatttgaggcgggaatcaaacagccgttcagcaatacccatttgattaatgggattcagccgaacctgctgaaagagcgctggtaa

SEQ ID NO: 6130 - DNA, 2145 bp, Escherichia coli
  CDS (1)...(2145)
gtgtcccgtattattatgctgatccctaccggaaccagcgtcggtctgaccagcgtcagccttggcgtgatccgtgcaatggaacgcaaaggcgttcgtctgagcgttttcaaacctatcgctcagccgcgtaccggtggcgatgcgcccgatcagactacgactatcgtgcgtgcgaactcttccaccacgacggccgctgaaccgctgaaaatgagctacgttgaaggtctgctttccagcaatcagaaagatgtgctgatggaagagatcgtcgcaaactaccacgctaacaccaaagacgctgaagtcgttctggttgaaggtctggtcccgacacgtaagcaccagtttgcccagtctctgaactacgaaatcgctaaaacgctgaatgcggaaatcgtcttcgttatgtctcagggcactgacaccccggaacagctgaaagagcgtatcgaactgacccgcaacagcttcggcggtgccaaaaacaccaacatcaccggcgttatcgttaacaaactgaacgcaccggttgatgaacagggtcgtactcgcccggatctgtccgagattttcgacgactcttccaaagctaaagtaaacaatgttgatccggcgaagctgcaagaatccagcccgctgccggttctcggcgctgtgccgtggagctttgacctgatcgcgactcgtgcgatcgatatggctcgccacctgaatgcgaccatcatcaacgaaggcgacatcaatactcgccgcgttaaatccgtcactttctgcgcacgcagcattccgcacatgctggagcacttccgtgccggttctctgctggtgacttccgcagaccgtcctgacgtgctggtggccgcttgcctggcagccatgaacggcgtagaaatcggtgccctgctgctgactggcggttacgaaatggacgcgcgcatttctaaactgtgcgaacgtgctttcgctaccggcctgccggtatttatggtgaacaccaacacctggcagacctctctgagcctgcagagcttcaacctggaagttccggttgacgatcacgaacgtatcgagaaagttcaggaatacgttgctaactacatcaacgctgactggatcgaatctctgactgccacttctgagcgcagccgtcgtctgtctccgcctgcgttccgttatcagctgactgaacttgcgcgcaaagcgggcaaacgtatcgtactgccggaaggtgacgaaccgcgtaccgttaaagcagccgctatctgtgctgaacgtggtatcgcaacttgcgtactgctgggtaatccggcagagatcaaccgtgttgcagcgtctcagggtgtagaactgggtgcagggattgaaatcgttgatccagaagtggttcgcgaaagctatgttggtcgtctggtcgaactgcgtaagaacaaaggcatgaccgaaaccgttgcccgcgaacagctggaagacaacgtggtgctcggtacgctgatgctggaacaggatgaagttgatggtctggtttccggtgctgttcacactaccgcaaacaccatccgtccgccgctgcagctgatcaaaactgcaccgggcagctccctggtatcttccgtgttcttcatgctgctgccggaacaggtttacgtttacggtgactgtgcgatcaacccggatccgaccgctgaacagctggcagaaatcgcgattcagtccgctgattccgctgcggccttcggtatcgaaccgcgcgttgctatgctctcctactccaccggtacttctggtgcaggtagcgacgtagaaaaagttcgcgaagcaactcgtctggcgcaggaaaaacgtcctgacctgatgatcgacggtccgctgcagtacgacgctgcggtaatggctgacgttgcgaaatccaaagcgccgaactctccggttgcaggtcgcgctaccgtgttcatcttcccggatctgaacaccggtaacaccacctacaaagcggtacagcgttctgccgacctgatctccatcgggccgatgctgcagggtatgcgcaagccggttaacgacctgtcccgtggcgcactggttgacgatatcgtctacaccatcgcgctgactgcgattcagtctgcacagcagcagtaa

SEQ ID NO: 6131 - DNA, 894 bp, Escherichia coli
  CDS (1)...(894)
atgaacatagtgatcaccggagggacaggattaattggtcgccatttgattccgcgtttgctggagctgggccatcaaattacggtagtgacgcgtaacccgcagaaagccagttccgttctcggccctcgggtgacactatggcaagggcttgccgatcaaagcaacctcaacggcgttgatgcggtaatcaacctggccggagaaccgattgctgataaacgctggactcacgagcaaaaagagcgtctctgccaaagccgctggaatatcacgcaaaaactggtcgatttgattaatgccagcgacacgccaccgtcggtactcatttccggctcggcaacgggctattatggtgacttaggtgaagtggtggttaccgaagaggaaccgccgcataacgaatttacccataaactctgcgctcgctgggaagaaattgcctgccgggcgcaaagtgacaaaacgcgagtgtgcctgctgcgtaccggtgtagtgctggcaccggatggcggtattctcggtaaaatgctgccgccgtttcgtcttggcctgggcgggccgattggctctggtcggcagtatctggcctggattcatattgatgatatggtcaacggtattctctggctgctggataacgagctgcgcgggccatttaatatggtttcgccctacccggtacgcaatgaacaatttgcccatgcgctcggtcatgcgctgcatcgcccggccattttgcgcgtccccgcgaccgccattcgactgttaatgggcgaatcttcagtactggtattaggtggacaacgcgcgctgcctaaacggctggaagaagcgggttttgcgtttcgctggtacgatttagaagaggcgctggcggatgtcgttcgctga

SEQ ID NO: 6132 - DNA, 570 bp, Escherichia coli
  CDS (1)...(570)
atgaaacgactcattgtaggcatcagcggtgccagcggcgcgatttatggcgtgcgcttattacaggttctgcgcgatgtcacagatatcgaaacgcatctggtgatgagccaggcagcgcgccagaccttatccctcgaaacggatttttctctgcgcgaagtgcaggcattagccgatgtcacgcacgatgcgcgcgatattgccgccagcatctcttccggttctttccagacgctggggatggtgattttaccctgttcaatcaaaaccctttccggcattgtccatagctatactgatggcttactgacccgtgcggcagatgtggtgctgaaagagcgtcgcccgttggtgctctgcgtgcgtgaaacaccattgcacttaggccatctgcgtttaatgactcaggcggcagaaatcggtgcggtgattatgcctcccgttccggcgttttatcatcgcccgcaatcccttgatgatgtgataaatcagacggttaatcgtgttcttgaccagtttgcgataacccttcctgaagatctctttgcccgctggcagggcgcataa

SEQ ID NO: 6133 - DNA, 915 bp, Escherichia coli
  CDS (1)...(915)
atgagctggattgaacgaattaaaagcaacattactcccacccgcaaggcgagcattcctgaaggggtgtggactaagtgtgatagctgcggtcaggttttataccgcgctgagctggaacgtaatcttgaggtctgtccgaagtgtgaccatcacatgcgtatgacagcgcgtaatcgcctgcatagcctgttagatgaaggaagccttgtggagctgggtagcgagcttgagccgaaagatgtgctgaagtttcgtgactccaagaagtataaagaccgtctggcatctgcgcagaaagaaaccggcgaaaaagatgcgctggtggtgatgaaaggcactctgtatggaatgccggttgtcgctgcggcattcgagttcgcctttatgggcggttcaatggggtctgttgtgggtgcacgtttcgtgcgtgccgttgagcaggcgctggaagataactgcccgctgatctgcttctccgcctctggtggcgcacgtatgcaggaagcactgatgtcgctgatgcagatggcgaaaacctctgcggcactggcaaaaatgcaggagcgcggcttgccgtacatctccgtgctgaccgacccgacgatgggcggtgtttctgcaagtttcgccatgctgggcgatctcaacatcgctgaaccgaaagcgttaatcggctttgccggtccgcgtgttatcgaacagaccgttcgcgaaaaactgccgcctggattccagcgcagtgaattcctgatcgagaaaggcgcgatcgacatgatcgtccgtcgtccggaaatgcgcctgaaactggcgagcattctggcgaagttgatgaatctgccagcgccgaatcctgaagcgccgcgtgaaggcgtagtggtacccccggtaccggatcaggaacctgaggcctga

SEQ ID NO: 6134 - DNA, 1014 bp, Escherichia coli
  CDS (1)...(1014)
atgtctgaaggctggaacattgccgtcctgggcgcaactggcgctgtgggcgaagccctgcttgaaacgctggctgaacgtcagttcccggttggggaaatttatgcactggcacgtaacgaaagcgcaggcgaacaactgcgctttggtggtaagacaatcaccgtgcaggatgccgctgaattcgactggacgcaggcgcagctggcattttttgtcgcaggcaaagaagctaccgctgcctgggttgaagaagcgaccaactcaggttgcctggtgatcgacagcagtggattgtttgctctcgaacccgacgtaccgctggtggtgccggaagtaaacccgtttgtactgacagattaccggaaccggaatgtcatcgccgtaccagacagtctgaccagccagctgctggcggcactgaaaccgttaatcgatcagggcggtttatcacgtatcagcgttaccagcctgatttcagcctccgcccagggcaaaaaagcggtcgatgcgttagcggggcagagtgcgaaattgctcaacggcattccgattgacgaagaagatttcttcgggcgtcagctggcgttcaacatgctgccgttactgccggatagcgaaggtagcgtgcgtgaagaacgtcgtatcgttgacgaagtacgcaaaatcctgcaggacgaagggctgatgatttcggctagcgtcgtccaggcaccggtattctacggtcatgcccagatggtcaactttgaagctctgcgtccactggcagcagaagaagcgcgtgatgcgtttgttcaaggcgaagatattgtgctctctgaagagaacgaattcccaactcaggtaggtgatgcttcgggtacgccgcatctttctgttggctgcgtgcgtaatgactacggtatgccggagcaagtccagttctggtcggtggccgataacgttcgctttggcggcgcgctgatggcagtaaaaatcgccgagaaactggtgcaggagtatctgtactaa

SEQ ID NO: 6135 - DNA, 1086 bp, Escherichia coli
  CDS (1)...(1086)
atggctggaaacacaattggacaactctttcgcgtaaccaccttcggcgaatcgcacgggctggcgctcggctgcatcgtcgatggtgttccgccaggcattccgctgacggaagcggacctgcaacatgacctcgaccgtcgtcgccctgggacatcgcgctataccacccagcgccgcgagccggatcaggtcaaaattctctccggtgtttttgaaggcgttactaccggcaccagcattggcttgttgatcgaaaacactgaccagcgctctcaggattacagtgcgattaaggacgttttccgtccaggccatgccgattacacctacgaacaaaaatacggtctgcgcgattatcgcggcggtggacgttcttccgcccgcgaaaccgccatgcgcgtggcggcaggagctattgccaaaaaatatctcgccgagaaatttggtattgaaatccgtggctgcctgacccagatgggcgacattccgctggatatcaaagactggtcgcaggtcgagcaaaatccgtttttttgcccggaccccgacaaaatcgacgcgttagacgagttgatgcgtgcgctgaaaaaagagggcgactccatcggcgctaaagtcaccgttgttgccagtggcgttcctgccggacttggcgagccggtctttgaccgcctggatgctgacatcgcccatgcgctgatgagcatcaacgcggtgaaaggcgtggaaattggcgacggctttgacgtggtggcgctgcgcggcagccagaaccgcgatgaaatcaccaaagacggtttccagagcaaccatgcgggcggcattctcggcggtatcagcagcgggcagcaaatcattgcccatatggcgctgaaaccgacctccagcattaccgtgccgggtcgtaccattaaccgctttggcgaagaagttgagatgatcaccaaaggccgtcacgatccctgtgtcgggatccgcgcagtgccgatcgcagaagcgatgctggcgatcgttttaatggatcacctgttacggcaacgggcgcaaaatgccgatgtgaagactgatattccacgctggtaa

SEQ ID NO: 6136 - DNA, 1185 bp, Escherichia coli
  CDS (1)...(1185)
gtgtcttttcaccttcggcttttttcaaggcataagcaaatgacaaataatgaaagcaaagggccgtttgaaggcttattagttatcgatatgacacatgtccttaatggacctttcggaactcaacttctttgtaatatgggcgcaagggtaattaaagttgagccgccgggtcatggtgatgatacccgcacatttggtccctatgtggatggacagtcactctattacagttttattaatcatggcaaagagagtgtggttcttgatttaaagaatgatcacgataaaagtatatttataaatatgctcaaacaagctgatgtattagctgagaattttcgcccaggtacaatggaaaaactggggttttcatgggaaacgcttcaagaaatcaacccgcgcctcatatatgcttcatcgtcaggtttcggacataccggtccgctaaaagatgctcctgcctacgataccatcattcaggcaatgagcgggataatgatggaaacaggatatcctgatgctccgccagtgcgcgttggtacatctcttgcggatctatgcggcggtgtctatttattcagcggaatagtgagtgcactttatggccgcgaaaagagccagagaggggcgcatgtcgatatagcgatgtttgatgccacgctgagttttctggagcatggtctgatggcatatatcgcaactgggaagtcaccacaacgtctgggaaatcgccatccctacatggcaccttttgatgttttcaatactcaggataagccgattacgatttgttgtggtaatgacaagcttttttctgcgttatgccaggcactggagcttacggaactggttaatgatccccgatttagcagcaatattttacgcgtacaaaaccaggctattcttaaacaatatattgagcggacgttaaaaacgcaggcagctgaagtttggttagccagaatacatgaagttggtgtacccgtcgcgccgttattaagtgtggctgaggccattaaattgccacaaactcaggcgagaaatatgttgattgaagccgggggaataatgatgccgggtaatccgataaaaatcagcggctgcgcggacccgcatgttatgccgggagcggcaacgctcgaccagcatggggaacaaattcgccaggagttctcatcataa

SEQ ID NO: 6137 - DNA, 735 bp, Escherichia coli
  CDS (1)...(735)
gtgaaagtcatcattgttgaagacgaattcctggcacaacaggaactgagctggctaattaaagagcacagccagatggagattgtcggcacctttgacgacggtctggacgtgttgaagtttttgcagcataaccgcgtcgacgccatttttctggatatcaatattccgtcgctggatggcgtgttgctggcgcaaaacatcagccagttcgcccataaaccgtttattgtgttcatcaccgcgtggaaagaacatgcggtagaagcgtttgaactggaggcgtttgactacattctcaaaccgtatcaggagtcacgtattaccgggatgctgcaaaaactggaagcggcctggcaacaacagcagaccagcagtacgcctgccgcgacggtaacgcgtgagaatgacaccattaatctggtgaaagatgagcgaataatcgtcacgccaattaacgatatctattacgccgaagcgcacgagaaaatgacctttgtctatacgcggcgtgaatcctacgtaatgccgatgaacattaccgaattttgcagcaaactgccgccgtcgcattttttccgctgccatcgctcattttgtgtcaatctgaacaaaatacgcgaaatcgaaccgtggtttaataacacctacattctgcgactgaaagatctggattttgaagtgccggtcagccgcagcaaagtgaaagaatttcgccagttaatgcatctttaa

SEQ ID NO: 6138 - DNA, 1086 bp, Escherichia coli
  CDS (1)...(1086)
atgacattactcgcttcgctgcgcgactggcttaaggcgcaacaactggatgcagtgcttctctcctcacggcagaacaaacagccgcatctggggatctccaccggatcaggttatgtggtgattagccgtgaaagtgcgcacattctggtggattcgcgctattacgttgaggtggaagcccgtgcgcaaggctaccagctgcatttgcttgacgcgacgaacacgcttaccactatcgtcaatcaaatcattgccgatgaacagttgcaaacgctcggttttgagggccagcaggtgagttgggaaaccgcgcaccgctggcagtctgaactcaatgcgaaactggttagcgccacgccggatgtgctgcggcaaatcaaaacgccagaggaggtggagaaaatccgcctcgcctgtgggattgctgatcgcggtgcagagcatattcgccgctttattcaggcggggatgagcgagcgcgagatagccgctgaactggagtggtttatgcgccagcagggcgcagaaaaagcctcttttgacaccattgtcgccagtggctggcgtggggcgctgccgcacggcaaagccagcgacaagattgttgcagcgggcgagtttgtcactctcgatttcggtgcgctgtatcagggctactgctctgatatgacgcgcaccttgctggtgaatggcgaaggggtgagcgccgaatctcacctgctgtttaacgtctatcaaattgtcctgcaggcacagctcgcagcaatctccgcgattcgccccggcgtgcgctgccagcaggttgacgatgccgcgcgccgggtcattacagaagcaggttatggcgactatttcggtcataacaccggtcacgctatcggcattgaagttcatgaagatccgcgtttttcaccgcgggacaccacgacgctacagccaggcatgttactgaccgtggagccggggatttatttgccagggcaagggggcgtgcgcatcgaagatgttgtgctggttaccccgcaaggcgcagaagtgctctacgccatgccgaaaacagtgttgctcacgggagaggcataa

SEQ ID NO: 6139 - DNA, 1239 bp, Escherichia coli
  CDS (1)...(1239)
atgacgaactatcgcgttgagagtagcagcggacgggcggcgcgcaagatgaggctcgcattaatgggacctgcgttcattgcggcgattggttatatcgatcccggtaactttgcgaccaatattcaggcgggtgctagcttcggctatcagctactgtgggttgtcgtttgggccaacctgatggcgatgctgattcagatcctctctgccaaactagggattgccaccggtaaaaatctggcggagcagattcgcgatcactatccgcgtcccgtagtgtggttctattgggttcaggcagaaattattgcgatggcaaccgacctggcggaatttattggtgcggcgatcggttttaaactcattcttggtgtttcgttgttgcagggcgcggtgctgacggggatcgcgactttcctgattttaatgctgcaacgtcgcgggcaaaaaccgctggagaaagtgattggcgggttactgttgtttgttgccgcggcttacattgtcgagttgattttctcccagcctaacctggcgcagctgggtaaaggaatggtgatcccgagtttacctacttcggaagcggtcttcctggcagcaggcgtgttaggggcgacgattatgccgcatgtgatttatttgcactcctcgctcactcagcatttacatggcggttcgcgtcaacaacgttattccgccaccaaatgggatgtggctatcgccatgactattgccggttttgtcaatctggcgatgatggctacagctgcggcggcgttccacttttccggtcatactggtgttgccgatcttgatgaggcttatctgacgctgcaaccgctgttaagccacgctgcggcaacggtctttggattaagcctggttgctgcggggctgtcttcaacggtggtggggacactggcggggcaggtggtgatgcagggcttcattcgctttcatatcccgctgtgggtgcgtcgtacagtcaccatgttgccgtcatttattgtcattctgatgggattagatccgacacggattctggttatgagtcaggtactgttaagttttggtatcgctctggcgctggttccactgctgattttcaccagtgacagcaagttgatgggcgatctggtgaacagcaaacgcgtaaaacagacaggctgggtgattgtggtgctggtcgtggcgctgaatatctggttgttggtggggacggcgctgggattgtag

SEQ ID NO: 6140 - DNA, 1416 bp, Escherichia coli
  CDS (1)...(1416)
atgaaaatcaaaactcgcttcgcgccaagcccaacaggctatctgcacgttggcggcgcgcgtactgctctttactcctggctttttgcacgtaaccacggcggtgagttcgtgctgcgtattgaagacaccgatcttgagcgttccacgccggaagctatcgaagccattatggatggcatgaactggctgagcctggagtgggatgaaggtccgtactaccagaccaaacgttttgatcgctacaacgcggtgatcgatcagatgctggaagagggcactgcttataaatgctattgctctaaagagcgcctggaagcgctgcgcgaagagcaaatggcgaaaggtgagaagccgcgttatgacggtcgctgccgccacagccatgagcatcatgctgatgatgaaccgtgtgttgtacgttttgctaacccgcaggaaggttctgttgtttttgacgatcagatccgtggtccgatcgagttcagcaaccaggaactggacgatcttattatccgccgtaccgatggttccccaacctataacttctgtgtggttgtcgatgactgggatatggaaatcacccacgttatccgtggcgaagaccatatcaacaacacgccacgccagatcaacattcttaaggccctgaaagcgccggtgccggtttacgcgcacgtttctatgatcaatggcgatgacggtaaaaaactgtccaaacgtcacggggcagtcagcgtaatgcagtatcgtgatgacggttatttgccagaagcactgctgaactatctggtgcgtctgggctggtcccacggcgatcaggaaatcttcactcgtgaagagatgatcaaatacttcactttgaatgccgtcagcaaatctgccagtgcgttcaacaccgacaagctgctgtggctgaaccatcactacattaacgcgctgccgccggagtatgttgctactcacttacagtggcacattgagcaggaaaatatcgatacccgtaacggcccgcagctggctgatctggtgaaactgctgggcgaacgctgcaagacgctgaaagagatggcacagagctgccgttatttctacgaagattttgctgagttcgatgccgacgccgcgaaaaaacatctgcgtccggtagcgcgtcagccgctggaagtggttcgtgacaaactggccgcgattactgactggaccgctgaaaacgttcatcacgctattcaggcgacggcggatgagctggaagtgggtatgggtaaagttggtatgccgctgcgtgtcgccgtaaccggtgcggggcagtctccagcactggatgttaccgttcacgcaattggtaagacccgcagtatcgagcgtatcaacaaagcgctggattttattgctgaacgcgaaaatcagcagtaa

SEQ ID NO: 6141 - DNA, 2016 bp, Escherichia coli
  CDS (1)...(2016)
atggaatcaatcgaacaacaactgacagaactgcgaacgacgcttcgccatcatgaatatctttatcatgtgatggatgcgccggaaattcccgacgctgaatacgacaggctgatgcgcgaactgcgcgagctggaaaccaaacatccagaactgattacgcctgattcgcctactcaacgtgtaggcgctgcgccgctggcggctttcagccagatacgccatgaagtaccaatgctgtcactggataacgtttttgatgaagaaagctttcttgctttcaacaaacgtgtgcaggaccgtctgaaaaacaacgagaaagtcacctggtgctgtgagctgaagctggatggtcttgccgtcagtattctgtatgaaaatggcgttttagtcagtgccgcgacccgtggcgatggcaccaccggggaagatatcacgtctaatgtgcgtactattcgcgccattccgctgaagctgcacggagagaatatcccggcgcgtctggaagtgcgtggtgaagtgttcctgccgcaggcggggttcgaaaagattaacgaagatgcgcgacgcacgggcgggaaagtgtttgctaacccacgtaatgcggcagctggttcactgcgtcagcttgatccgcgtattacagcgaagcgaccgctcacttttttctgctatggcgttggtgttctggaaggtggcgagctgccggatactcatcttggccgtttactgcaatttaaaaagtgggggttgccggtcagcgatcgggtaacgctttgtgaatcggcggaagaagtgctggcgttctatcacaaagtggaagaagaccgcccgacgctgggctttgatatcgacggcgtggtgattaaggtcaactcactggcacagcaggagcagcttggctttgtcgcgcgtgccccgcgctgggcggtagcgtttaaattcccggcgcaggagcagatgacctttgtgcgtgacgtcgagtttcaggttgggcgtactggcgcgattacgcctgttgcgcgtctggaacctgtccatgttgcaggcgtgctggtgagtaacgcaaccttacacaatgcggatgaaatcgaacgtcttggtttacgcattggcgataaagtggtgattcgccgcgctggcgacgtgatcccgcaggtggttaacgtcgtgctttctgaacgcccggaagatacccgtgaggttgtattcccgacgcattgtccggtatgtggttctgacgttgagcgtgtggaaggtgaagcggttgcccgctgtaccggtggcctgatttgcggtgcgcagcgtaaagagtcgctgaaacactttgtttcccgccgtgcgatggatgttgacggaatgggcgacaaaatcatcgatcagctggttgaaaaagaatatgtccatactccggcagatctgttcaaactcaccgcaggcaaactgaccggactggagcgtatggggccaaaatcggcacaaaacgtggttaacgcgctggaaaaagcgaaagaaaccacctttgctcgcttcctctatgcacttggcatccgtgaagtcggcgaggccaccgcagcaggtctggcggcatatttcggcacgctggaagcgctggaagccgcttcgattgaagagctgcaaaaggtgcctgatgttggcattgtcgttgcatcccacgttcacaacttctttgccgaagaaagcaaccgcaatgtcatcagcgagctgttggcggaaggtgttcactggcctgcgccgatcgttatcaacgcggaagagattgacagcccgtttgctggtaaaaccgtggtgcttacgggcagcttaagccagatgtcgcgtgatgacgctaaagctcgactggtcgaactgggcgcgaaagtcgcgggcagcgtgtcgaagaaaaccgatctggtgatagcgggtgaagctgcaggatctaaactggcgaaggcgcaggaactgggcattgaagtcatcgacgaagcggaaatgctgcgtttgctgggtagctga

SEQ ID NO: 6142 - DNA, 972 bp, Escherichia coli
  CDS (1)...(972)
atgagtaagatttttgaagataactcgctgactatcggtcacacgccgctggttcgcctgaatcgcatcggtaacggacgcattctggcgaaggtggaatctcgtaaccccagcttcagcgttaagtgccgtatcggtgccaacatgatttgggatgccgaaaagcgcggcgtgctgaaaccaggcgttgaactggttgaaccgaccagcggtaataccgggattgcactggcctatgtagctgccgctcgcggttacaaactcaccctgaccatgccagaaaccatgagtattgaacgccgcaagctgctgaaagcgttaggtgcaaacctggtgctgacggaaggtgctaaaggcatgaaaggcgcaatccaaaaagcagaagaaattgtcgccagcaatccagagaaatacctgctgctgcaacaattcagcaatccggcaaaccctgaaattcacgaaaagaccaccggtccggagatatgggaagataccgacggtcaggttgatgtatttattgctggcgttgggactggcggtacgctgactggcgtcagccgctacattaaaggcaccaaaggcaagaccgatcttatctctgtcgccgttgagccaaccgattctccagttatcgcccaggcgctggcaggtgaagagattaaacctggcccgcataaaattcagggtattggcgctggttttatcccggctaacctcgatctcaagctggtcgataaagtcattggcatcaccaatgaagaagcgatttctaccgcgcgtcgtctgatggaagaagaaggtattcttgcaggtatctcttctggagcagctgttgccgcggcgttgaaactacaagaagatgaaagctttaccaacaagaatattgtggttattctaccatcatcgggtgagcgttatttaagcaccgcattgtttgccgatctcttcactgagaaagaattgcaacagtaa

SEQ ID NO: 6143 - DNA, 1728 bp, Escherichia coli
  CDS (1)...(1728)
atgatttcaggcattttagcatccccgggtatcgctttcggtaaagctctgcttctgaaagaagacgaaattgtcattgaccggaaaaaaatttctgccgaccaggttgatcaggaagttgaacgttttctgagcggtcgtgccaaggcatcagcccagctggaaacgatcaaaacgaaagctggtgaaacgttcggtgaagaaaaagaagccatctttgaagggcatattatgctgctcgaagatgaggagctggagcaggaaatcatagccctgattaaagataagcacatgacagctgacgcagctgctcatgaagttatcgaaggtcaggcttctgccctggaagagctggatgatgaatacctgaaagaacgtgcggctgacgtacgtgatatcggtaagcgcctgctgcgcaacatcctgggcctgaagattatcgacctgagcgccattcaggatgaagtcattctggttgccgctgacctgacgccgtccgaaaccgcacagctgaacctgaagaaggtgctgggtttcatcaccgacgcgggtggccgtacttcccacacctctatcatggcgcgttctctggaactacctgctatcgtgggtaccggtagcgtcacctctcaggtgaaaaatgacgactatctgattctggatgccgtaaataatcaggtttacgtcaatccaaccaacgaagttattgataaaatgcgcgctgttcaggagcaagtggcttctgaaaaagcagagcttgctaaactgaaagatctgccagctattacgctggacggtcaccaggtagaagtatgcgctaacattggtacggttcgtgacgttgaaggtgcagagcgtaacggcgctgaaggcgttggtctgtatcgtactgagttcctgttcatggaccgcgacgcactgcccactgaagaagaacagtttgctgcttacaaagcagtggctgaagcgtgtggctcgcaagcggttatcgttcgtaccatggacatcggcggcgacaaagagctgccatacatgaacttcccgaaagaagagaacccgttcctcggctggcgcgctatccgtatcgcgatggatcgtagagagatcctgcgcgatcagctccgcgctatcctgcgtgcctcggctttcggtaaattgcgcattatgttcccgatgatcatctctgttgaagaagtgcgtgcactgcgcaaagagatcgaaatctacaaacaggaactgcgcgacgaaggtaaagcgtttgacgagtcaattgaaatcggcgtaatggtggaaacaccggctgccgcaacaattgcacgtcatttagccaaagaagttgatttctttagtatcggcaccaatgatttaacgcagtacactctggcagttgaccgtggtaatgatatgatttcacacctttaccagccaatgtcaccgtccgtgctgaacttgatcaagcaagttattgatgcttctcatgctgaaggcaaatggactggcatgtgtggtgagcttgctggcgatgaacgtgctacacttctgttgctggggatgggtctggacgaattctctatgagcgccatttctatcccgcgcattaagaagattatccgtaacacgaacttcgaagatgcgaaggtgttagcagagcaggctcttgctcaaccgacaacggacgagttaatgacgctggttaacaagttcattgaagaaaaaacaatctgctaa

SEQ ID NO: 6144 - DNA, 858 bp, Escherichia coli
  CDS (1)...(858)
ttgtttatcctgtattttcagagggaatggagtgtaacgctctgtattaacaaggagagcattaaaatgggtaaactcacgggcaagacagcactgattacgggcgcattgcagggaattggcgaaggaattgccagaacttttgcacgtcatggcgcgaacctaatcttgctggatatctcccctgagatcgaaaagctggcggacgaactgtgtggtcgtggtcatcgctgtacggcggttgtcgccgatgtgcgtgacccggcgtcggtagccgcagctatcaaacgcgcgaaggaaaaagaagggcgcattgatatcctggtgaataacgcaggcgtttgtcgtctgggcagtttcctcgatatgagcgatgacgatcgcgatttccatattgacatcaatattaaaggcgtatggaacgtcacgaaggcggtgctgccggagatgattgcccgcaaagatggtcgcattgtgatgatgtcttcagtcactggtgatatggtggccgatcctggcgaaacggcgtacgccttaacgaaagcggcgattgttggcctgacaaaatcgctggcggtggagtacgcgcagtctggtattcgcgttaacgccatttgcccgggatacgtgcgcacaccaatggcggaaagcattgcccgccagtcgaacccggaagatccagagtcggtgctgactgaaatggcgaaagcaatcccgatgcgtcgcctcgccgatccgctggaagtcggcgaactggcggccttcctcgcatcggatgaatccagctatttaaccggtacacagaatgtgattgatggcggcagcacactgccggagacggttagcgtcggtatctga

SEQ ID NO: 6145 - DNA, 897 bp, Escherichia coli
  CDS (1)...(897)
atgcaatttgaaaagatgattactgaaggctcgaacaccgcctcggctgaaattgaccgcgtatcgacgctggaaatgtgccggattatcaacgatgaagataaaaccgtaccgcttgccgttgagcgcgtactgccggatatcgccgcggcgatcgatgttatccacgcccaggtaagcggcggcgggcgtctgatttacctcggtgcgggaacatccggtcgtctggggattctggatgccagcgaatgtccgcccacctacggcgtgaaaccgggtctggtggttggtttgattgctggcggcgaatatgccattcagcacgcggtggaaggcgcggaagatagccgggaaggcggtgttaatgatctgaaaaatattaatttaacggcacaggatgtggtggttggcattgctgccagcggtcgcacgccgtatgtgattgccggactggaatacgcacgccagctcggctgccgcacagtgggaatttcctgtaatccggggagcgccgtttcaaccaccgctgagtttgccattacaccgattgtaggtgccgaagttgttaccggttcttcgcggatgaaagcaggtacagcgcagaaactggtgctcaatatgctttccaccgggctgatgattaaatccggcaaagtgttcggcaacctgatggtcgatgtggtcgccaccaacgaaaaactgcatgtgcgacaggtcaatattgttaaaaacgccaccggatgtagcgcagagcaagcggaagcggcgttaattgcttgcgagcgcaactgtaaaacggccattgtgatggtgctgaaaaatctcgatgccgcagaagctaaaaaacgcctggatcaacacggcggctttattcgtcaggttttagacaaggaataa

SEQ ID NO: 6146 - DNA, 1425 bp, Escherichia coli
  CDS (1)...(1425)
atggccaaagagatcagcagtgaacttctgaacaccattcttacccgtgtcggcggaccgggaaatatcgccagttgtggtaactgtatgacgcgcctgcgtctgggtgtacatgacagttcactggttgatcccaatatcaaaacgctggaaggcgtgaagggcgtcattttgaccagcgaccaggtgcaggtcgtttttgggcctggtaaagcgcatcgtgccgcaaaagcgatgagcgagctgctgggagaagcaccggtacaggatgccgcagaaatcgccgcccagaacaaacgtcagttaaaagccaaacaaacctccggcgtgcaacaatttctcgccaaattcgccaccatcttcacgccgctgatccccggttttattgccgccggtctgctgctggggatagcgacgttaattgccacggtgatgcacgttccggcagatgctcagggaacactacccgatgcgctgaattttatgaaggtgttcagcaaaggtttgttcactttcctggtgattctggtgggctataacgccgcccaggcatttggcggcacgggcgtaaatggcgcaattatcgccgcgctctttttgctcggttataaccccgcagcgaccaccggttactacgccggttttcacgatttctttggtctgcccatcgatccgcgcggcaatattatcggcgtgctgattgccgcgtgggcctgcgcccgcattgaaggcatggtgcgccgctttatgccggacgatctcgacatgctgctgacctcgttaatcaccctgctgatcaccgctacgcttgcgtacctgatcattatgccgctgggtggctggttattcgaaggtatgtcatggctgtttatgcacctgaacagtaatccgttcggttgtgcggttttagccgggctgttcctgatcgccgtggtatttggcgtgcatcagggctttattcctgtttacctcgcgttaatggacagccagggattcaacagcttatttcccatcctttcaatggcaggcgcgggccaggtgggcgcggcgctggcactctactggcgggcgcaaccgcacagtgcgctacgcagtcaggtacgcggggcgattattcccggcctgctgggcgttggtgaaccgctgatttacggtgtcaccctgccccgcatgaagccgtttgttaccgcctgtttaggcggcgcggcgggcggtttgtttatcggcctgatagcctggtggggtctgccgatgggcttaaacagcgcctttgggccgtctggtctggtagcgctgccgctgatgacttccgcacaaggcatccttccggccatggcggtttatgctggcgggattctggtggcatgggtttgcgggtttattttcaccacgctctttggctgccgtaacgtcaatctggactga

SEQ ID NO: 6147 - DNA, 1404 bp, Escherichia coli
  CDS (1)...(1404)
gtgaaaaatgccaatcatcgattcttcctgagggaacgacttatgaaactaaagaccacattgttcggcaatgtatatcagtttaaggatgtaaaagaggtgctggctaaagccaacgaactgcgttcgggggatgtgctggcgggcgtcgcagcggcaagctcacaggagcgcgtggcggcaaagcaggtgttgtcggaaatgaccgtagcggacatccgcaataatccggtgattgcctatgaagatgactgcgtgacgcggctgattcaggacgatgttaacgaaacggcctacaaccagattaaaaactggagcatcagcgaactgcgtgagtatgtgctgagcgatgaaaccagcgtggacgacattgcctttacccgcaaagggctgacctcggaagtggtcgcggcggtagcgaagatttgctccaacgcggacctgatctacggcgcgaagaaaatgccggtaatcaaaaaggccaataccaccatcggtattccgggcacctttagcgcccgtttgcagccaaatgacacccgtgacgacgtgcaaagtatcgccgcgcaaatctacgaagggctttccttcggggtgggcgatgcggtgatcggcgttaacccggtgactgacgacgtggaaaacttaagccgcgtgttggataccatctatggcgtgatcgacaaattcaacatcccaactcagggctgtgtactggcgcacgtcaccacccagatcgaagcgatccgtcgtggcgcaccgggcgggctgattttccagagtatctgtggcagcgaaaaagggctgaaagagtttggcgtggagctggcgatgctcgacgaagcgcgcgcagtgggcgcggagttcaaccgtatcgccggggaaaactgcctctacttcgaaaccggacaaggctctgcgctatccgctggcgctaacttcggcgcagaccaggtaacgatggaagcacgtaactacgggctggcgcgtcattacgatccgtttatcgtcaacaccgtggtcggctttattgggccggagtatctctacaacgaccgccagattatccgtgctggcttagaagatcactttatgggcaagctgagcggcatctctatgggctgtgactgctgttataccaaccacgctgacgctgaccagaacctcaacgaaaacctgatgatcctgctcgccaccgcaggctgcaactacatcatggggatgccgctgggtgatgacatcatgctcaactaccagaccaccgcattccacgataccgccactgtgcgtcagttactcaacctgcgcccgtcaccggagtttgaacgctggctggaaagcatgggcattatggcaaacggtcgcctgaccaaacgggcgggcgatccgtcactgttcttctga

SEQ ID NO: 6148 - DNA, 2004 bp, Escherichia coli
  CDS (1)...(2004)
atgtcccgaaaagaccttgccaatgcgattcgcgcactcagtatggatgcggtacaaaaagccaactctggtcatcccggcgcgccgatgggcatggctgatattgccgaagtgctgtggaacgattttcttaaacataaccctaccgacccaacctggtatgatcgcgaccgctttattctttccaacggtcacgcgtcgatgctgctctacagtttgctacatctgaccggttacgacctgccgctggaagaactgaagaacttccgtcagttgcattcgaaaaccccaggccacccggagattggctatacgccaggcgttgaaaccaccaccggcccgcttggacaaggtttggcgaacgccgtcgggctggcgatagcagagcgtacactggcggcgcagtttaaccagccagaccatgagatcgtcgatcacttcacctatgtgtttatgggcgacggctgcctgatggaaggtatttcccacgaagtctgttcgctggcaggcacgctgggactgggcaagctgattggtttttacgatcacaacggtatttccatcgacggtgaaacagaaggctggtttaccgacgatacggcaaaacgttttgaagcctatcactggcatgtgatccatgaaatcgacggtcacgatccgcaggcggtgaaggaagcgatccttgaagcgcaaagcgtgaaagataagccgtcgctgattatctgccgtacggtgattggctttggttcgccgaataaagcaggtaaggaagaggcgcacggcgcaccactgggggaagaagaagtggcgctggcacggcaaaaactgggctggcaccatccgccatttgagatccctaaagagatttatcacgcctgggatgcccgtgaaaaaggcgaaaaagcgcagcagagctggaatgagaagtttgccgcctataaaaaggctcatccgcaactggcagaagagtttacccgacggatgagcggtggtttaccgaaggactgggagaaaacgactcagaaatatatcaatgagttacaggcaaatccggcgaaaatcgctacccgtaaggcttcgcaaaatacgcttaacgcttacgggccgatgctgcctgagttgctcggcggttcggcggatctggctcccagcaacctgaccatctggaaaggttctgtttcgctgaaggaagatccagcgggcaactacattcactacggggtgcgtgaatttggcatgaccgctatcgccaacggcatcgcgcaccacggcggctttgtgccgtataccgcgacgttcctgatgtttgttgaatacgcccgtaacgccgcgcggatggcggcactgatgaaagcgcggcagattatggtttatacccacgactcaattggcctgggcgaagatggtccgacgcaccaggctgttgagcaactggccagcctgcgcttaacgccaaatttcagcacctggcgaccgtgcgatcaggtggaagcggcggtgggctggaagctggcggttgagcgccacaacggaccgacggcactgatcctctcaaggcagaatctggcccaggtggaacgtacgccggatcaggttaaagagattgctcgtggcggttatgtgctgaaagacagcggcggtaagccagatattattctgattgccaccggttcagagatggaaattaccctgcaagcggcagagaaattagcaggagaaggtcgcaatgtacgcgtagtttccctgccctcgaccgatattttcgacgcccaggatgaggaatatcgggagtcggtgttgccttctaacgttgcggctcgcgtggcggtggaagcaggtattgccgattactggtacaagtatgttggtctgaaaggggcaattgtcgggatgacgggttacggggaatctgctccggcggataagctgttcccgttctttggctttaccgccgagaatattgtggcaaaagcgcataaggtgctgggagtgaaaggtgcctga

SEQ ID NO: 6149 - DNA, 1980 bp, Escherichia coli
  CDS (1)...(1980)
atgaatcgttttattatggccaacagtcagcaatgtctgggttgtcatgcttgtgaaatcgcctgtgtcatggctcacaatgatgagcaacatgtcctgagccaacaccattttcatccccgaattacggttatcaaacatcaacagcaacgtagtgcagtgacctgtcaccattgtgaagatgcgccctgcgcccgtagctgccctaatggcgcaatcagccacgttgatgacagcattcaggtcaatcagcaaaagtgtattggctgtaaatcctgcgtggtggcctgtccttttggtacgatgcaaatcgtcctgacacccgtcgcggcaggaaaagtaaaagccacggcgcataaatgcgacctttgtgcggggcgcgaaaacggtcctgcctgtgttgagaattgcccggcggacgcgctgcaactggtcactgacgtcgcactctccggcatggcgaaatcccgccgcttgcgcaccgcgcgtcaggaacatcaaccgtggcatgccagtaccgcggcgcaagaaatgccggtaatgagtaaagtcgaacaaatgcaggcaacgcccgcgcgtggcgagccggataaactggcgattgaagcgcgcaaaaccggttttgatgaaatttatctgccatttcgcgccgaccaggcacaacgggaagcctcgcgctgccttaagtgcggcgagcacagcgtttgtgaatggacctgcccgctgcataaccatataccgcagtggattgaactggtgaaagccggaaacatcgacgccgccgtcgagctttctcaccagaccaacaccctgccggaaattaccggacgcgtttgtccgcaagaccgtttgtgtgaaggtgcctgtactattcgcgatgagcacggcgcggtaactatcggcaacattgaacgctacatttcagatcaggcgttggcgaaaggttggcgtcctgacttaagccatgtcaccaaagtggacaagcgggtggcgattatcggtgcaggtccggcagggctggcctgtgcggatgttctgacccgcaatggcgtgggggtgacggtgtacgatcgccatccagaaatcggtggcttgctcactttcggcattccttctttcaaactggataaatccctgctggcacgccgtcgggaaatcttcagcgcgatggggattcacttcgaactcaattgtgaagtgggtaaagatgtctctttggattcgcttttggaacaatacgacgcggtcttcgttggcgtaggcacttaccgttccatgaaagcgggtttacccaatgaagatgcgccgggcgtttatgacgcgctgccgttcctcattgccaacactaaacaggtgatggggctcgaagagctaccggaagagccgtttatcaataccgccggacttaacgtcgtggtactgggcggcggcgacaccgcgatggactgtgtgcgtaccgcactgcgccacggcgcgagtaacgtcacctgcgcttatcgtcgtgatgaagctaacatgccaggctcgaagaaagaagtgaagaacgcccgcgaagagggggccaacttcgaatttaacgtccagccggtggcgcttgagctgaatgaacaaggtcacgtctgcgggattcgtttcctgcgcacgcgtcttggagagccggatgcccaggggcgtcggcgtccagtgccggtggaaggcagtgaatttgtcatgccagccgacgcggtgattatggcgtttggcttcaatccgcacgggatgccgtggctggagtcgcacggtgtaacggtagacaaatggggccgcatcatcgcggatgtggaaagccagtaccgttaccagaccaccaatccgaaaatcttcgctggtggtgacgccgtgcgtggtgcggatctggtggttaccgcaatggcagaaggacgtcatgcggcacaggggattattgactggctgggggtaaaatcagtcaaatctcactga

SEQ ID NO: 6150 - DNA, 747 bp, Escherichia coli
  CDS (1)...(747)
gtggtaaacttctcgcgattttgtgaaatcctggttgaggtatctctgaacacaccggcacagctctctttgccactttatcttcctgacgacgaaacctttgcaagtttctggccgggggataactcctctttactggccgcgctgcaaaacgtgctgcgtcaggaacatagcggttacatctatctctgggcacgcgaaggcgcggggcgcagccatctgctgcacgcggcttgcgcggaattgtcgcagcgtggcgatgcggtgggctatgtcccgctggataaacgcacctggtttgttccggaagtgctcgacggtatggagcatttgtcgctggtctgtatcgacaacattgagtgtattgcaggcgatgagttgtgggagatggcgattttcgatctctacaatcgaattctggaatcgggcaaaacacggttgttgatcaccggcgatcgtccaccgcggcagttgaatctgggattaccggatctcgcgtcgcgactcgactgggggcagatctacaaattgcagccactttctgatgaagataagttgcaggcgctacagttacgcgcgcgtttgcgtggttttgaactgccggaagatgtggggcgtttcttgctgaagcggctcgacagagaaatgcgcacgctatttatgacgttggatcagttggatcgtgcgtcgattaccgcgcaacgtaagctgaccattccgtttgtgaaagaaattctgaagttgtag

SEQ ID NO: 6151 - DNA, 654 bp, Escherichia coli
  CDS (1)...(654)
gtggctgcccctcaaaggagaaagagtatgaagatcgtggaagtcaaacacccactcgtcaaacacaagctgggactgatgcgtgagcaagatatcagcaccaagcgctttcgcgaactcgcttccgaagtgggtagcctgctgacttacgaagcgaccgccgacctcgaaacggaaaaagtaactatcgaaggctggaacggcccggtagaaatcgaccagatcaaaggtaagaaaattaccgttgtgccaattctgcgtgcgggtcttggtatgatggacggtgtgctggaaaacgttccgagcgcgcgcatcagcgttgtcggtatgtaccgtaatgaagaaacgctggagccggtaccgtacttccagaaactggtttctaacatcgatgagcgtatggcgctgatcgttgacccaatgctggcaaccggtggttccgttatcgcgaccatcgacctgctgaaaaaagcgggctgcagcagcatcaaagttctggtgctggtagctgcgccagaaggtatcgctgcgctggaaaaagcgcacccggacgtcgaactgtataccgcatcgattgatcagggactgaacgagcacggatacattattccgggcctcggcgatgccggtgacaaaatctttggtacgaaataa

SEQ ID NO: 6152 - DNA, 1578 bp, Escherichia coli
  CDS (1)...(1578)
atgacggaaaacattcataagcatcgcatcctcattctggacttcggttctcagtacactcaactggttgcgcgccgcgtgcgtgagctgggtgtttactgcgaactgtgggcgtgggatgtgacagaagcacaaattcgtgacttcaatccaagcggcattattctttccggcggcccggaaagtactactgaagaaaacagtccgcgtgcgccgcagtatgtctttgaagcaggcgtaccggtattcggcgtttgctatggcatgcagaccatggcaatgcagttgggcggtcacgttgaagcctctaacgaacgtgaatttggctacgcgcaggttgaagtcgtaaacgacagcgcactggttcgcggtatcgaagatgcgctgaccgcagacggtaaaccgctgctcgatgtctggatgagccacggcgataaagttaccgctattccgtccgacttcatcaccgtagccagcaccgaaagctgcccgtttgccattatggctaacgaagaaaaacgcttctatggcgtacagttccacccggaagtgactcatacccgccagggtatgcgcatgctggagcgttttgtgcgtgatatctgccagtgtgaagccctgtggacgccagcgaaaattatcgacgatgctgtagctcgcatccgcgagcaggtaggcgacgataaagtcatcctcggcctctctggtggtgtggattcctccgtaaccgcaatgctgctgcaccgcgctatcggtaaaaacctgacttgcgtattcgtcgacaacggcctgctgcgcctcaacgaagcagagcaggttctggatatgtttggcgatcactttggtcttaacattgttcacgtaccggcagaagatcgcttcctgtcagcgctggctggcgaaaacgatccggaagcaaaacgtaaaatcatcggtcgcgttttcgttgaagtattcgatgaagaagcgctgaaactggaagacgtgaagtggctggcgcagggcaccatctaccctgacgttatcgaatctgcggcgtctgcaaccggtaaagcacacgtcatcaaatctcaccacaacgtgggcggcctgccgaaagagatgaagatgggcctggttgaaccgctgaaagagctgttcaaagacgaagtgcgtaagattggtctggagctgggcctgccgtacgacatgctgtaccgtcacccgttcccgggaccaggccttggcgttcgtgttctgggtgaagtgaagaaagagtactgtgacctgctgcgccgtgctgacgccatcttcattgaagaactgcgtaaagcggacctgtacgacaaagtcagccaggcgttcactgtgttcctgccggtacgttccgttggcgtaatgggcgatggtcgtaagtatgactgggttgtctctctgcgtgctgtcgaaaccatcgactttatgaccgcacactgggcgcatctgccgtacgatttcctcggtcgcgtttccaaccgcattatcaatgaagtgaacggtatttcccgcgtggtgtatgacatcagcggcaagccgccagctaccattgagtgggaatga

SEQ ID NO: 6153 - DNA, 1371 bp, Escherichia coli
  CDS (1)...(1371)
atgttaccttctcaatcccctgcaatttttaccgttagtcgcctgaatcaaacggttcgtctgctgcttgagcatgagatgggacaggtttggatcagcggcgaaatttctaatttcacgcaaccagcttccggtcactggtactttacactcaaagacgacaccgcccaggtacgctgcgcgatgttccgcaacagcaaccgccgggtgaccttccgcccacagcatgggcaacaagttttagttcgcgccaatattacgctctacgagccgcgcggcgactaccagataatcgttgagagtatgcagccggccggtgaagggctgctgcaacagaagtacgaacagctcaaagcgaagttgcaggctgaaggtttgttcgatcagcaatacaaaaaaccacttccctcccctgcgcattgcgttggtgtgatcacctcaaaaaccggtgctgcgctacatgatattttgcatgtgttaaaacgtcgcgatccttctctgccggtgatcatctaccctgccgccgttcagggcgatgacgcgccggggcaaattgttcgcgccattgaactggcgaatcagcgcaatgagtgcgacgtattgatcgtcgggcgcggcggcggttcgctggaagatttatggagttttaacgacgaacgcgtagcgcgggcgatttttaccagccgcattccggttgtcagcgccgtcgggcatgagacggatgtgaccattgccgattttgttgccgatctgcgtgcgccaacgccgtctgccgccgctgaagtagtgagccgtaatcagcaagagttactgcgccaggtgcaatcgacccgtcaacggctggagatggcgatggattattatctcgccaaccgcacacgtcgctttacgcaaattcatcaccgattacagcaacagcatccgcagctccggctggcacgccagcaaaccatgcttgagcgcctgcaaaagcgaatgagctttgcgctggaaaatcaacttaagcgtaccgggcaacagcagcagcggttaacacagcggctgaatcagcaaaatccacagccgaagattcatcgcgcgcaaacgcgcattcagcaactggaatatcgtttagcagaaaccctgcgcgcacagcttagcgccacgcgtgaacgtttcggtaatgcagtaacgcacctcgaagccgtaagcccactgtcaacgctggcgcgtggatacagcgttactactgctactgacggcaatgtactgaaaaaagtgaagcaagttaaagcgggtgaaatgctaaccacacgtctggaagacggctggatagaaagtgaagtaaaaaacatccagccagtaaaaaaatcgcgtaaaaaggtgcattaa

SEQ ID NO: 6154 - DNA, 1512 bp, Escherichia coli
  CDS (1)...(1512)
gtgcgttgtctgatgatttataaaaatgaggctttaaacatggtacctgtggtcgcgcttgtcgggcgccctaacgtaggaaaatccacgttatttaaccgtctaactcgcacccgagatgcgctggttgcggatttcccgggtctgactcgtgaccgtaagtacggtcgtgcggaaattgaaggccgtgagtttatctgtattgataccggcgggattgatggcacagaagacggtgtagaaacccgcatggcggaacagtcgctgctggcgattgaagaagcggacgtcgtactgtttatggtggatgcgcgcgcgggcctgatgccggcagatgaagcgattgccaaacatctgcgctcccgtgaaaaaccgaccttcctggtggcaaacaaaactgacggtctggatcccgatcaggcagtggttgatttctactcgcttggtttaggtgaaatctacccgatcgccgcgtctcacggtcgtggcgtattaagtctgctggagcatgtgctgctgccgtggatggaagatctcgcaccgcaagaggaagtcgacgaagacgctgaatactgggcgcaatttgaagcggaagagaacggcgaagaagaagaggaagacgacttcgacccgcaaagtctgccgatcaaactggcgattgtgggtcgtccgaacgtaggtaagtctacactcactaaccgtattcttggtgaagagcgcgttgttgtttacgacatgcctggcacgacgcgtgacagcatctacatcccaatggaacgcgatggacgtgagtatgtgctcattgacaccgctggcgtacgtaaacgcggcaaaatcaccgatgctgtagagaaattctccgtaatcaaaacgttgcaggccattgaagacgccaacgtggtgatgttagtgattgatgcgcgcgaaggtatttccgatcaggatctctcgctgctgggctttattctcaatagtgggcgctcacttgtcattgtggtgaataagtgggatggcctgagtcaggaagtgaaagagcaggtgaaagaaacgctggacttccgtctgggctttatcgattttgctcgtgtgcactttatctctgccttgcacggcagtggtgttggtaacttgtttgaatcagtacgtgaagcgtatgacagctccacccgtcgtgtggggacctctatgctgacgcgcatcatgacgatggctgttgaagatcaccaaccgccgctggtacgcggtcgtcgtgtgaagctgaaatatgcccacgccggtggttataacccgccgattgtggtgattcacggtaatcaggtgaaagacctgcctgattcctacaagcgctacttgatgaactacttccgcaaatcgctggacgtaatgggatcgccgattcgtattcagttcaaagaaggggaaaacccgtatgcgaataagcgtaacaccctgacgccaacccagatgcgtaaacgtaagcgtctgatgaagcacatcaagaaaaataaataa

SEQ ID NO: 6155 - DNA, 1275 bp, Escherichia coli
  CDS (1)...(1275)
gtggcaaaaaacattcaagccattcgcggcatgaacgattacctgcctggcgaaacggccatctggcagcgcattgaaggcacactgaaaaacgtgctcggcagctacggttacagtgaaatccgcttgccgattgtagagcagaccccgctattcaaacgtgcgattggtgaagtcaccgacgtggttgaaaaagagatgtacacctttgaggatcgcaatggcgacagcctgactctgcgccctgaagggacggcgggctgtgtacgcgccggcatcgagcatggtcttctgtacaatcaggaacagcgtctgtggtatatcgggccgatgttccgtcacgagcgtccgcagaaagggcgttatcgtcagttccatcagttgggctgcgaagttttcggtctgcaaggtccggatatcgacgctgaactgattatgctcactgcccgctggtggcgcgcgctgggtatttccgagcacgtaactcttgagctgaactctatcggttcgctggaagcacgcgccaattaccgcgatgcgctggtggcattccttgagcagcataaagaaaagctggacgaagactgcaaacgccgcatgtacactaacccgctgcgcgtgctggattcaaaaaatccggaagtgcaggcgcttctcaacgacgctccggcattaggtgactatctggacgaggaatctcgtgagcattttgccggtctgtgcaaactgctggagagcgcggggatcgcttacaccgtaaaccagcgtctggtgcgtggtctggattactacaaccgtaccgttttcgagtgggtgactaacagtctcggctcccagggcaccgtgtgtgcaggcggtcgttatgacggtcttgtggaacaactgggcggtcgtgcaacaccggctgtcggttttgctatgggcctcgaacgtcttgtattgttagtacaggccgttaatccggaatttaaagccgatcctgttgtcgatatatacctggtggcttcaggtgctgatacacaatctgcggctatggcattagctgagcgtctgcgtgatgaattaccgggcgtgaaattgatgaccaaccacggcggcggcaactttaagaaacagtttgcccgtgctgataaatggggtgcccgcgttgctgtggtgctgggtgagtctgaagtggctaacggcacagcagtagtgaaggatttgcgctctggtgagcaaacggcagttgcgcaggatagcgtagccgcgcatttgcgcacgttactgggttaa

SEQ ID NO: 6156 - DNA, 1362 bp, Escherichia coli
  CDS (1)...(1362)
atgaccacaccctcagatttgaacatttaccaactgattgacacccaaaatggtcgggtcactccgcgtatttataccgacccggatatttaccaactggagcttgagcgtattttcggtcgttgctggctatttctcgcccacgaaagccagatcccaaaacccggtgatttctttaacacctacatgggagaagatgcggttgtcgtagtgcgtcagaaagacggcagcatcaaggcgtttctcaaccaatgccgccaccgggccatgcgtgtgagttatgcagattgcggcaacactcgcgcctttacctgcccgtatcacggctggtcttatggcattaacggcgagttgatcgatgtaccgctggaacctcgcgcctacccacaagggttgtgtaaatcccactggggactaaacgaagttccttgtgtggagagttataaagggctaatttttggcaactgggataccagcgcaccgggcctgcgtgattacctgggtgacattgcctggtatctggatggcatgctggatcgtcgcgaaggcggcaccgaaattgtcggcggcgtacaaaagtgggtgatcaactgtaactggaaattcccggcagagcagttcgccagtgaccagtatcatgctctgttcagccatgcttctgccgttcaggtattaggggcgaaagatgatggcagcgataagcgcctcggtgatggacaaaccgcccgcccggtgtgggaaaccgccaaagatgcgctgcaatttggtcaggacggtcacggtagcggtttcttctttactgaaaaaccggatgctaatgtctgggtcgatggcgcagtttcaagctattaccgcgaaacctatgccgaagcagaacaacgtttaggtgaagttcgcgccctgcgcctggcgggtcataacaatattttccccacgctttcatggctaaacggcactgccacactccgcgtctggcatccgcgcggccctgatcaagttgaagtgtgggcgttctgtattactgacaaagccgcctccgatgaagttaaagccgcttttgaaaacagcgccactcgtgcttttggtcctgctggttttctcgagcaggatgactcggagaactggtgtgaaatccagaaattgcttaaaggccaccgcgcccgcaacagcaaactgtgtctggaaatggggcttggtcaggaaaagcgccgcgacgacggcattcctggcattactaactatatcttttcagaaactgccgctcgtggaatgtaccaacgctgggccgatcttctgagtagcgaaagctggcaggaagtgctcgataaaaccgccgcttaccagcaggaggtgatgaaatga

SEQ ID NO: 6157 - DNA, 1254 bp, Escherichia coli
  CDS (1)...(1254)
atgttaaagcgtgaaatgaacattgccgattatgatgccgaactgtggcaggctatggagcaggaaaaagtacgtcaggaagagcacatcgaactgatcgcctccgaaaactacaccagcccgcgcgtaatgcaggcgcagggttctcagctgaccaacaaatatgctgaaggttatccgggcaaacgctactacggcggttgcgagtatgttgatatcgttgaacaactggcgatcgatcgtgcgaaagaactgttcggcgctgactacgctaacgtccagccgcactccggctcccaggctaactttgcggtctacaccgcgctgctggaaccaggtgataccgttctgggtatgaacctggcgcatggcggtcacctgactcacggttctccggttaacttctccggtaaactgtacaacatcgttccttacggtatcgatgctaccggtcatatcgactacgccgatctggaaaaacaagccaaagaacacaagccgaaaatgattatcggtggtttctctgcatattccggcgtggtggactgggcgaaaatgcgtgaaatcgctgacagcatcggtgcttacctgttcgttgatatggcgcacgttgcgggcctggttgctgctggcgtctacccgaacccggttcctcatgctcacgttgttactaccaccactcacaaaaccctggcgggtccgcgcggcggcctgatcctggcgaaaggtggtagcgaagagctgtacaaaaaactgaactctgccgttttccctggtggtcagggcggtccgttgatgcacgtaatcgccggtaaagcggttgctctgaaagaagcgatggagcctgagttcaaaacttaccagcagcaggtcgctaaaaacgctaaagcgatggtagaagtgttcctcgagcgcggctacaaagtggtttccggcggcactgataaccacctgttcctggttgatctggttgataaaaacctgaccggtaaagaagcagacgccgctctgggccgtgctaacatcaccgtcaacaaaaacagcgtaccgaacgatccgaagagcccgtttgtgacctccggtattcgtgtaggtactccggcgattacccgtcgcggctttaaagaagccgaagcgaaagaactggctggctggatgtgtgacgtgctggacagcatcaatgatgaagccgttatcgagcgcatcaaaggtaaagttctcgacatctgcgcacgttacccggtttacgcataa

SEQ ID NO: 6158 - DNA, 1419 bp, Escherichia coli
  CDS (1)...(1419)
gtgagcaccattcatactcccctgacttataacgaaatcaacgggaaaccttttggcctggattacgaactggcgaaacagtttgccgattacctcggcgtaaaactgaaagtgaccgtgcggcagaatatcagccagctgtttgacgaccttgataatggtaacgccgacctgctggcggcaggacttgtctataacagtgagcgggtaaaaaattatcagcctggccctacctattattccgtgtcacaacaactggtttataaagtgggtcagtatcgcccacgtacgctgggcaacctgacggcggagcaactcaccgttgcaccgggtcatgtggtggttaacgatctccagaccctgaaagaaacaaaattcccggaattaagctggaaggtagacgacaaaaaaggctctgcggaattaatggaagatgtcatcgaaggaaaactcgattacaccattgctgattctgtcgccatcagcctgtttcagcgcgttcacccggagctcgccgtagcgctcgatatcaccgatgaacaaccggtgacttggtttagcccgttagatggcgataataccctttccgccgccctgctcgacttcttcaacgaaatgaatgaagacggtacgctggcacgcattgaagagaaatacctggggcatggcgatgattttgattacgtcgatacgcgcacatttttacgcgccgtcgatgcggtactgccgcagttaaagcccctgtttgagaaatacgccgaagaaattgactggcgtttgctggccgctattgcttatcaggaatcgcactgggatgcacaggccacttcaccgacgggtgtgcgcggcatgatgatgttaaccaaaaataccgcgcaaagcctcggcattacggatcgtaccgatgccgaacagagcatcagcggtggcgtgcgttatttgcaggatatgatgagtaaagtgccggaaagtgtgccggagaacgagcggatctggtttgccctcgctgcgtacaatatgggctatgcgcatatgctggatgcccgcgccctgacggcaaaaaccaaagggaatcctgacagttgggctgacgtaaaacagcgtctgcctttacttagccagaaaccctattacagcaagctgacttacggctacgctcgtggacatgaagcctacgcttatgtcgaaaatattcgtaagtatcagattagcctggtgggttatctgcaagagaaagagaagcaggctacagaagcggcgatgcaactggcgcaggattatccggcggtatcgcctacggagttgggcaaagagaaatttccttttctctcgtttctttcccagtcgtcatcaaactatttgacccattctccctctctgctgttttccaggaaagggagtgaagagaaacaaaattaa

SEQ ID NO: 6159 - DNA, 381 bp, Escherichia coli
  CDS (1)...(381)
atggcaatattaggtttaggcacggatattgtggagatcgctcgcatcgaagcggtgatcgcccgatccggtgatcgcctggcacgccgcgtattaagcgataacgaatgggctatctggaaaacgcaccaccagccggtgcgttttctggcgaagcgttttgctgtgaaagaagccgcagcaaaagcgtttggcaccgggatccgcaatggtctggcgtttaatcaatttgaagtattcaatgatgagctcggcaaaccacggctacggctatggggcgaggcattaaaactggcggaaaagctgggcgttgcaaatatgcatgtaacgctggcagatgagcggcactatgcttgtgccacggtaattattgaaagttaa

SEQ ID NO: 6160 - DNA, 906 bp, Escherichia coli
  CDS (1)...(906)
atgagcatcgataaaagttactgcggatttattgccatcgtcggacgtccgaacgttggcaaatccacattgttgaacaaactgctggggcagaaaatctccatcacttcccgcaaggcgcagacaactcgtcaccgcattgtggggatccatactgaaggcgcgtatcaggcgatctacgtcgatacaccgggcctgcatatggaagaaaaacgcgccattaaccgcctgatgaacaaagcggcgagcagctctattggcgatgttgagctggtgatttttgtcgttgaaggcacccgctggacgccggacgacgaaatggtgctcaacaaactgcgcgaaggcaaagcgccggtaatcctcgcggtgaacaaagtggacaacgtgcaggagaaagccgatctgctgccgcacctgcagttcctggcaagccagatgaacttcctcgatatcgtgccaatctctgccgaaaccgggctgaatgttgacactattgcggcaatcgtgcgtaagcatctacctgaagcgactcatcacttcccggaagattacatcaccgatcgctcacagcgttttatggcgtctgaaatcatccgcgaaaaactgatgcgtttcctcggcgctgaactgccgtactccgtgaccgtggagatcgaacgtttcgtctctaacgaacgcggtggttatgacatcaacggtttgattctcgttgagcgtgaagggcagaagaagatggtcattggcaacaaaggggccaagatcaaaaccatcgggattgaagcgcgtaaagacatgcaggaaatgttcgaagcgcctgttcaccttgaactgtgggtaaaagtgaaatccggttgggccgacgacgaacgcgcactgcgcagtctcggttacgttgacgatctttaa

SEQ ID NO: 6161 - DNA, 2574 bp, Escherichia coli
  CDS (1)...(2574)
atgcgtctggatcgtcttactaataaattccagcttgctcttgccgatgcccaatcacttgcactcgggcacgacaaccaatttatcgaaccacttcatttaatgagcgccctgctgaatcaggaagggggttcggttagtcctttattaacatccgctggcataaatgctggccagttgcgcacagatatcaatcaggcattaaatcgtttaccgcaggttgaaggtactggtggtgatgtccagccatcacaggatctggtgcgcgttcttaatctttgcgacaagctggcgcaaaaacgtggtgataactttatctcgtcagaactgttcgttctggcggcacttgagtctcgcggcacgctggccgacatcctgaaagcagcaggggcgaccaccgccaacattactcaagcgattgaacaaatgcgtggaggtgaaagcgtgaacgatcaaggtgctgaagaccaacgtcaggctttgaaaaaatataccatcgaccttaccgaacgagccgaacagggcaaactcgatccggtgattggtcgtgatgaagaaattcgccgtaccattcaggtgctgcaacgtcgtactaaaaataacccggtactgattggtgaacccggcgtcggtaaaactgccatcgttgaaggtctggcgcagcgtattatcaacggcgaagtgccggaagggttgaaaggccgccgggtactggcgctggatatgggcgcgctggtggctggggcgaaatatcgcggtgagtttgaagaacgtttaaaaggcgtgcttaacgatcttgccaaacaggaaggcaacgtcatcctatttatcgacgaattacataccatggtcggcgcgggtaaagccgatggcgcaatggacgccggaaacatgctgaaaccggcgctggcgcgtggtgaattgcactgcgtaggtgccacgacgcttgacgaatatcgccagtacattgaaaaagatgctgcgctggaacgtcgtttccagaaagtgtttgttgccgagccttctgttgaagataccattgcgattctgcgtggcctgaaagaacgttacgaattgcaccaccatgtgcaaattactgacccggcaattgttgcagcggcgacgttgtctcatcgctacattgctgaccgtcagctgccggataaagccatcgacctgatcgatgaagcagcatccagcattcgtatgcagattgactcaaaaccagaagaactcgaccgactcgatcgtcgtatcatccagctcaaactggaacaacaggcgttaatgaaagagtctgatgaagccagtaaaaaacgtctggatatgctcaacgaagaactgagcgacaaagaacgtcagtactccgagttagaagaagagtggaaagcagagaaggcatcgctttctggtacgcagaccattaaagcggaactggaacaggcgaaaatcgctattgaacaggctcgccgtgtgggggacctggcgcggatgtctgaactgcaatacggcaaaatcccggaactggaaaagcaactggaagccgcaacgcagctcgaaggcaaaactatgcgtctgttgcgtaataaagtgaccgacgccgaaattgctgaagtgctggcgcgttggacggggattccggtttctcgcatgatggaaagcgagcgcgaaaaactgctgcgtatggagcaagaactgcaccatcgcgtaattggtcagaacgaagcggttgatgcggtatctaacgctattcgtcgtagccgtgcggggctggcggatccaaatcgcccgattggttcattcctgttcctcggcccaactggtgtggggaaaacagagctttgtaaggcgctggcgaactttatgtttgatagcgacgaggcgatggtccgtatcgatatgtccgagtttatggagaaacactcggtgtctcgtttggttggtgcgcctccgggatatgtcggttatgaagaaggtggctacctgaccgaagcggtgcgtcgtcgtccgtattccgtcatcctgctggatgaagtggaaaaagcgcatccggatgtcttcaacattctgttgcaggtactggatgatgggcgtctgactgacgggcaagggagaacggtcgacttccgtaatacggtcgtcattatgacctctaacctcggttccgatctgattcaggaacgcttcggtgaactggattatgcgcacatgaaagagctggtgctcggtgtggtaagccataacttccgtccggaattcattaaccgtatcgatgaagtggtggtcttccatccgctgggtgaacagcacattgcctcgattgcgcagattcagttgaaacgtctgtacaaacgtctggaagaacgtggttatgaaatccacatttctgacgaggcgctgaaactgctgagcgagaacggttacgatccggtctatggtgcacgtcctctgaaacgtgcaattcagcagcagatcgaaaacccgctggcacagcaaatactgtctggtgaattggttccgggtaaagtgattcgcctggaagttaatgaagaccggattgtcgccgtccagtaa

SEQ ID NO: 6162 - DNA, 981 bp, Escherichia coli
  CDS (1)...(981)
atggcacaacgagtacagctcactgcaacggtgtccgaaaaccaactcggtcaacgcttagatcaggctttggccgaaatgttcccggattattcacgttcgcgaataaaagaatggatcctcgaccagcgagtgctggttaacggcaaagtttgtgataagccgaaagaaaaagtattgggtggcgagcaggttgccatcaacgctgagattgaagaagaagcgcgttttgaaccgcaggatatcccgctggatatcgtctatgaagatgaagacattattatcattaataaaccgcgcgacctggtggtacatcctggcgcgggtaacccggatggcacggtactgaatgcgttgcttcattactatccacccattgccgatgtaccgcgtgcgggcatcgtccatcgtctggataaagacaccactggcctgatggttgtggcaaaaaccgttccggctcagacgcgtttagtcgaatctttgcaacggcgtgaaattactcgtgagtatgaagcggtggcgattggtcatatgaccgcaggtggcacggtggacgagccaatcagtcgccacccgaccaaacgtacccatatggcggtgcatccgatgggcaaaccagcggtgactcactatcgcatcatggaacacttccgtgtgcacacgcgtctgcggttgcgtctggaaactggacgtacgcaccagatccgcgtgcatatggcccatatcactcatccgctggtgggcgatccggtttatggtggccgtccgcgtccgccaaaaggtgcttcggaagcatttatctccacgctgcgtaagtttgaccgccaggcgctacatgcaaccatgctgcgtctttatcacccgatctccggcatcgaaatggaatggcatgcgcctattccacaagatatggtggagctgattgaggtgatgcgcgccgatttcgaagaacataaggatgaagtggactggttatga

SEQ ID NO: 6163 - DNA, 348 bp, Escherichia coli
  CDS (1)...(348)
atgagcaacattattaagcaacttgaacaagagcagatgaagcaggacgtaccttccttccgtccgggtgataccgtggaagtgaaagtatgggttgttgaaggttccaaaaaacgtctgcaggcattcgagggcgtggttatcgctattcgtaaccgcggtctgcactctgcattcactgttcgtaaaatttccaacggcgaaggcgttgagcgtgtcttccagactcactctccggtagttgacagcatttctgtcaaacgtcgtggtgctgttcgtaaagctaaactgtactacctgcgtgagcgtactggtaaggctgctcgtatcaaagagcgtcttaactaa

SEQ ID NO: 6164 - DNA, 768 bp, Escherichia coli
  CDS (1)...(768)
atgtggattggcataattagcctgtttcctgaaatgttccgcgcaattaccgattacggggtaactggccgggcagttaaaaatggcctgctgagcatccagagctggagtcctcgcgacttcacgcatgaccggcaccgtaccgtggacgatcgtccttacggcggcggaccggggatgttaatgatggtgcaacccttgcgggacgccattcatgcagcaaaagccgcggcgggtgaaggcgcaaaggtgatttatctgtcaccacagggacgcaagcttgatcaagcgggcgtcagcgaactggcaacgaatcaaaaattgattctggtgtgcggtcgctacgaaggtatagatgagcgcgtgatccaaaccgaaattgacgaagaatggtcaatcggcgattacgttctcagtggtggtgagttaccagcaatgacgctgattgactccgtttcccggtttattccgggagtactgggacatgaagcctcggcaacggaagattcctttgctgaaggattgctggattgcccgcactatacgcggcctgaggtgttagaagggatggaagttccgccagtgttactgtcgggcaaccatgccgagatacgtcgctggcgtttgaaacagtcgctgggccgtacctggcttagaagacctgaacttctggaaaacctggctctgactgaagagcaagcaaggttgctggcggagttcaaaacggaacacgcacaacagcaacataaacatgatgggatggcgtaa

SEQ ID NO: 6165 - DNA, 249 bp, Escherichia coli
  CDS (1)...(249)
atggtaactattcgtttagcacgtcacggcgctaaaaagcgtccgttctaccaggttgttgtcgctgacagccgtaatgcacgcaacggtcgcttcatcgagcgcgttggtttcttcaacccaatcgctagcgaaaaagaagaaggcactcgcctggatctggatcgcatcgctcactgggttggccagggcgcaactatttctgatcgcgttgctgcgctgatcaaagaagtaaacaaagcagcttaa

SEQ ID NO: 6166 - DNA, 1362 bp, Escherichia coli
  CDS (1)...(1362)
atgtttgataatttaaccgatcgtttgtcgcgcacgctgcgcaatatcagtggccgtggacgcctcactgaagacaacgtaaaagatacgctgcgcgaagtgcgcatggcgctgctggaggcggacgtagctctgccggtagtgcgtgagtttatcaatcgcgtaaaagagaaagcggttggtcatgaagttaataagagcctgacgccggggcaggagttcgtcaaaatagtccgtaacgaactggttgcggcgatgggcgaagagaaccagaccctgaacctggctgcgcaaccgcctgcggtcgtactgatggcgggcctgcaaggtgccggtaaaacaaccagcgttggtaaactcggtaagttcctgcgcgagaagcacaagaagaaagtgctggtggtttctgccgacgtttatcgcccggcggcaatcaaacagcttgagacgctggcagagcaggtgggcgttgatttcttcccttctgatgttggtcagaagccggtagatatcgttaacgcggcgctgaaagaagccaaactgaaattctacgacgtgctgctggtggataccgctggtcgtctgcacgttgacgaagcgatgatggacgagatcaaacaagtccatgcgtcgattaacccggttgaaaccctgtttgtggttgacgccatgaccggtcaggatgcggccaatacggcaaaagcattcaatgaagcgttaccgcttaccggcgtagtgttgaccaaagtggacggcgatgcccgcggcggtgcggcgctctctattcgtcacatcactggcaaaccgatcaagttcctcggtgttggcgagaaaactgaggcgctggagccgttccatccggaccgcatcgcgtcgcgtattctcggcatgggcgacgtactgtcgctgatcgaagatatcgaaagcaaagttgaccgcgcgcaggcagagaaattagccagcaagctgaaaaaaggtgacggcttcgatctcaacgactttcttgagcagctgcgccagatgaaaaatatgggcggcatggctagtctgatgggcaagctgccgggcatggggcagatcccggataacgtcaagtcacagatggacgataaagtgctggtgcgtatggaagccatcatcaactcgatgacgatgaaagagcgcgctaagccagaaatcatcaaaggttcgcgtaaacgccgtattgctgccggttgcggtatgcaggtgcaggacgttaaccgtcttctgaaacagttcgacgacatgcagcgcatgatgaagaaaatgaagaagggcggaatggcgaagatgatgagaagcatgaagggtatgatgcccccaggcttccctggtcgctaa

SEQ ID NO: 6167 - DNA, 1449 bp, Escherichia coli
  CDS (1)...(1449)
atgaaacttaacgacagtaacttattccgccagcaggcgttgattaacggggaatggctggacgccaacaatggtgaagccatcgacgtcaccaatccggcgaacggcgacaagctgggtagcgtgccgaaaatgggcgcggatgaaacccgcgccgctatcgacgccgccaaccgcgccctgcccgcctggcgcgcgctcaccgccaaagaacgcgccaccattctgcgcaactggttcaatttgatgatggagcatcaggacgatttagcgcgcctgatgaccctcgaacagggtaaaccactggccgaagcgaaaggcgaaatcagctacgccgcctcctttattgagtggtttgccgaagaaggcaaacgcatttatggcgacaccattcctggtcatcaggccgataaacgcctgattgttatcaagcagccgattggcgtcaccgcggctatcacgccgtggaacttcccggcggcgatgattacccgcaaagccggtccggcgctggcagcaggctgcaccatggtgctgaagcccgccagtcagacgccgttctctgcgctggcgctggcggagctggcgatccgcgcgggcgttccggctggggtatttaacgtggtcaccggttcggcgggcgcggtcggtaacgaactgaccagtaacccgctggtgcgcaaactgtcgtttaccggttcgaccgaaattggccgccagttaatggaacagtgcgcgaaagacatcaagaaagtgtcgctggagctgggcggtaacgcgccgtttatcgtctttgacgatgccgacctcgacaaagccgtggaaggcgcgctggcctcgaaattccgcaacgccgggcaaacctgcgtctgcgccaaccgcctgtatgtgcaggacggcgtgtatgaccgttttgccgaaaaattgcagcaggcagtgagcaaactgcacatcggcgacgggctggataacggcgtcaccatcgggccgctgatcgatgaaaaagcggtagcaaaagtggaagagcatattgccgatgcgctggagaaaggcgcgcgcgtggtttgcggcggtaaagcgcacgaacgcggcggcaacttcttccagccgaccattctggtggacgttccggccaacgccaaagtgtcgaaagaagagacgttcggccccctcgccccgctgttccgctttaaagatgaagctgatgtgattgcgcaagccaatgacaccgagtttggccttgccgcctatttctacgcccgtgatttaagccgcgtcttccgcgtgggcgaagcgctggagtacggcatcgtcggcatcaataccggcattatttccaatgaagtggccccgttcggcggcatcaaagcctcgggtctgggtcgtgaaggttcgaagtatggcatcgaagattacttagaaatcaaatatatgtgcatcggtctttaa

SEQ ID NO: 6168 - DNA, 1401 bp, Escherichia coli
  CDS (1)...(1401)
atggggcaatcatcgcaaccacatgagttaggcggcgggctgaagtcacgccacgtcaccatgttgtctattgccggtgttatcggcgcaagtctgtttgtcggttccagcgtcgccatcgccgaagcgggcccggcggtattactggcctatctgttcgccgggctactggtggttatgattatgcggatgttggcggaaatggcggttgccacgcccgataccggttcgttttccacctatgccgataaagccattggtcgctgggcgggctataccatcggctggttgtactggtggttttgggtactggttatcccgctggaagccaacatcgccgccatgatcctgcactcatgggttccaggcattcccatctggttattttccctcgtcattaccctcgccttaactggcagtaacttattaagcgttaaaaactacggcgaatttgagttctggctggcgctgtgcaaagtcatcgctatcctggcctttattttccttggtgcagtcgcaattagcggtttttacccgtatgccgaagtgagcgggatctcaagattgtgggatagcggcggctttatgcccaacggtttcggtgcggtattaagcgcgatgttgatcaccatgttctcgtttatgggcgcagaaattgtcaccattgccgccgcggaatccgacacgccggaaaaacatattgtccgcgccaccaactcggttatctggcgtatttctatcttctatttatgttctatttttgtcgtcgtggcattaattccgtggaatatgcccggactaaaagccgtcggttcttatcgctcggtactggaattgctcaatattccccatgcgaaattaatcatggactgcgtgatattactttccgtaaccagttgcctgaactcggcgctgtataccgcgtcaaggatgctctactccttaagtcgtcgcggtgatgctcccgcggtaatgggtaaaatcaaccgcagtaaaaccccgtacgtggcggtgttactctccaccggcgcggcattcttaacggtggtggtgaactattacgcgcctgcgaaggtatttaaatttctgatcgacagctccggcgctatcgccctgctggtttatttagtcatcgccgtttcacagttgcggatgcgcaaaattctgcgagcagaaggaagcgaaattcgcttgcgaatgtggctttatccgtggctcacctggctagtcatcggctttattacctttgtgttggtagtgatgctattccgtccggcgcaacagttagaagtgatctccaccggcttattagcgatagggattatctgtaccgtgccaattatggctcgctggaaaaagctggtattgtggcaaaaaacacccgttcataatacgcgctga

SEQ ID NO: 6169 - DNA, 2145 bp, Escherichia coli
  CDS (1)...(2145)
ttggcaacgacaaccgcagaatgcctgacgcaggaaacgatggattaccacgcgctgaatgcgatgcttaacctctacgatagcgcaggtcgcattcagttcgataaagaccgccaggccgttgacgcctttattgcgacgcatgtgcgtccgaacagtgtgaccttcagtagccagcagcagcgcctgaactggctggtcaacgaaggttactatgatgaaagcgttcttaatcgctactctcgcgactttgtcattacgctgtttacccacgcacacaccagcggttttcgtttccagacattcctcggggcatggaagttttacaccagctatacgttgaagacattcgacggtaaacgttatctggaagattttgccgatcgagtaacgatggtggcgctgacgctggcacaaggcgatgagacgctggcgttgcaactgaccgatgaaatgctgtcaggacgctttcagccagccacgccaacattcctcaactgcggtaagcagcagcgcggcgaactggtttcctgttttttgctgcgtattgaagacaatatggagtcgattggtcgggcggtaaattccgcactgcagctgtcgaaacgcggcggcggcgtagcatttttgctgtcgaatctgcgagaagcgggcgcgccaattaaacgtattgaaaatcaatcttctggcgtaattccggtgatgaaaatgctggaagacgcattttcctatgccaaccaactcggcgctcgtcagggggctggtgcagtctatttacatgctcatcatcccgatattctgcgttttctcgacacgaaacgggaaaatgccgacgaaaaaatccgcattaaaacactgtcgcttggcgtggtgatcccggatatcactttccatctggcaaaagagaatgcgcagatggcgctgttttcgccttatgacgtagagcgagtttatggcaagccgtttgccgatgtggccatcagccaacactatgacgaactggttgccgatgaacgcattcgcaaaaaatacctcaacgcccgtgatttcttccagcgactggcagaaatccagtttgagtccggctatccctacatcatgtatgaagacacggtaaaccgtgctaaccctatcgccgggcgcataaatatgagtaatctctgctcagaaattttgcaggttaacagcgcctcagagtatgacgagaatctcgactatacccgcacaggccatgatatttcctgcaatttaggttcgttgaatattgcgcacaccatggattcccccgattttgcccgcacggtagagactgccgtgcgcggtttaacggcagtatcagatatgagtcatatccgcagcgtgccgtccatcgaagccggaaatgccgcctcgcacgccatcggactggggcagatgaatttacacggctatctggcgcgagaaggcatcgcttatggttcgccggaagcactggatttcaccaatctctatttctatgccatcacctggcatgcactgcgtacctcgatgttgctggcacgcgaacgcggtgaaaccttcgccgggttcaaacagtcacgctatgccagtggtgaatattttagccaatatctgcaagggaactggcagccgaaaacggcgaaagttggcgaactgtttacccgtagcggtattacgttacctacccgtgagatgtgggcgcagctgcgcgacgacgtgatgcgctacggcatatacaaccagaatcttcaggcggtgccgccaaccggttctatctcttatatcaaccatgctacgtcgagtattcatccgattgtggcgaaagtagagatacgcaaagagggcaaaacaggacgcgtttactaccctgccccgtttatgactaacgagaatctggcgctgtatcaggacgcttacgaaattggcgcagaaaagatcatcgacacctacgcggaagcgactcgccatgtcgatcaggggctgtcgctgacgctttttttccccgataccgccaccactcgcgatatcaacaaagcgcagatttacgcctggcgcaagggtatcaaaacgctctattacatccgcctgcgtcagatggcgctggaaggcactgaaattgaaggctgcgtctcctgtgcactttaa

SEQ ID NO: 6170 - DNA, 960 bp, Escherichia coli
  CDS (1)...(960)
atgaaactctcacgtatcagcgccatcaactggaacaagatatctgacgataaagatctggaggtgtggaatcgcctgaccagcaatttctggctaccagaaaaggtgccgctgtcgaacgatattcctgcctggcagacattaactgtcgtagaacaacaactgacgatgcgcgtttttactggcctgacgctgctcgacacgctgcaaaatgttatcggcgcgccttctctgatgcccgatgcactcacgcctcatgaagaagcggtattatcgaatatcagctttatggaagcggttcatgcccgctcttacagttcgattttctcgacgctatgccagaccaaagatgtcgatgccgcctacgcctggagtgaagaaaacgcaccgttgcagcgaaaagctcagattattcagcaacattatcgcggtgatgatccgctgaaaaagaaaatcgccagtgtgtttcttgaatcttttttgttctattccggtttctggctgccgatgtatttttccagccgcggaaagctgaccaataccgcggacctgatccgtctgattatccgcgatgaagcagtccacggttactacataggctataaatatcagaaaaacatggaaaagatatctctgggacaacgtgaagagttgaagagtttcgccttcgatttgttgctggaactctacgacaacgagttgcaatacaccgatgagctgtacgccgaaaccccgtgggctgacgatgtgaaagcgtttctctgttacaacgccaataaggctttgatgaatctgggctacgaaccgttatttcccgcagaaatggcggaagtgaatccggcaatcctcgccgcgctttcgccgaatgccgatgaaaatcacgatttcttttccggttcaggctcctcttatgtgatggggaaagcggttgaaacagaagatgaagactggaatttctga

SEQ ID NO: 6171 - DNA, 531 bp, Escherichia coli
  CDS (1)...(531)
atggatagttcgtttacgcccattgaacaaatgctaaaatttcgcgccagccgccacgaagattttccttatcaggagatccttctgactcgtctttgcatgcacatgcaaagcaagctgctggagaaccgcaataaaatgctgaaggctcaggggattaacgagacgttgtttatggcgttgattacgctggagtctcaggaaaaccacagtattcagccttctgaattaagttgtgctcttggatcatcccgtaccaacgcgacgcgtattgccgatgaactggaaaaacgcggttggatcgaacgtcgtgaaagcgataacgatcgccgctgcctgcatctgcaattaacggaaaaaggtcacgagtttttgcgcgaggttttaccaccgcagcataactgcctgcatcaactctggtccgcgctcagcacaacagaaaaagatcagctcgagcaaatcacccgcaaattgctctcccgtctcgaccagatggaacaagacggtgtggttctcgaagcgatgagctaa

SEQ ID NO: 6172 - DNA, 2631 bp, Escherichia coli
  CDS (1)...(2631)
atgagcaagagcaccgctgagatccgtcaggcgtttctcgactttttccatagtaagggacatcaggtagttgccagcagctccctggtaccccataacgacccaactttgttgtttaccaacgccgggatgaaccagttcaaggatgtgttccttgggctcgacaagcgtaattattcccgcgctaccacttcccaacgctgcgtgcgtgcgggtggtaaacacaacgacctggaaaacgtcggttacaccgcgcgtcaccataccttcttcgaaatgctgggcaacttcagcttcggcgactatttcaaacacgatgccattcagtttgcatgggaactgctgaccagcgaaaaatggtttgccctgccgaaagagcgtctgtgggttaccgtctatgaaagcgacgacgaagcctacgaaatctgggaaaaagaagtagggatcccgcgcgaacgtattattcgcatcggcgataacaaaggtgcgccatacgcatctgacaacttctggcagatgggtgacactggtccgtgcggcccgtgcaccgaaatcttctacgatcacggcgaccacatttgggggggccctccgggaagcccggaagaagacggcgaccgctacattgagatctggaacatcgtcttcatgcagttcaaccgccaggccgatggcacgatggaaccgctgccgaagccgtctgtagataccggtatgggtctggagcgtattgctgcggtgctgcaacacgttaactctaactatgacatcgacctgttccgcacgctgatccaggcggtagcgaaagtcactggcgcaaccgatctgagcaataaatcgctgcgcgtaatcgctgaccacattcgttcttgtgcgttcctgatcgcggatggcgtaatgccgtccaatgaaaaccgtggttatgtactgcgtcgtatcattcgtcgcgcagtgcgtcacggtaatatgctcggcgcgaaagaaaccttcttctacaaactggttggtccgctgatcgacgttatgggctctgcgggtgaagacctgaaacgccagcaggcgcaggttgagcaggtgctgaagactgaagaagagcagtttgctcgtactctggagcgcggtctggcgttgctggatgaagagctggcaaaactttctggtgatacgctggatggtgaaactgctttccgtctgtacgacacctatggcttcccggttgacctgacggctgatgtttgtcgtgagcgcaacatcaaagttgacgaagctggttttgaagctgcaatggaagagcagcgtcgtcgcgcgcgcgaagccagcggctttggtgccgattacaacgcaatgatccgtgttgacagtgcatctgaatttaaaggctatgaccatctggaactgaacggcaaagtgactgcgctgtttgttgatggtaaagcggttgatgccatcaatgcaggccaggaagctgtggtcgtgctggatcaaacgccattctatgcggaatccggcggtcaggttggcgataaaggcgaactgaaaggcgctaacttctcctttgcggtggaagatacgcagaaatacggccaggcgattggtcacatcggtaaacttgctgcgggttctctgaaagtgggcgacgcggtgcaggctgatgttgatgaggctcgtcgcgcccgtattcgtctgaatcactccgcaacgcacctgatgcacgctgcgctgcgccaggttctgggtactcatgtatcgcagaaaggttcactggttaacgacaaggtgctgcgcttcgacttctcacacaacgaagcgatgaaaccagaagagattcgtgcggtcgaagacctggtgaacacacagattcgtcgcaatttgccgatcgaaaccaacatcatggatctcgaagcggcgaaagcgaaaggtgcgatggcgctgttcggcgagaagtatgatgagcgcgtacgcgtgctgagcatgggcgatttctctaccgagttgtgtggcggtactcacgccagccgcactggtgatattggtctgttccgcatcatctctgaatcgggtactgctgcaggcgttcgtcgtatcgaagcggtaaccggagaaggtgctatcgccaccgttcatgcagacagcgatcgcttaagcgaagtcgcgcatctgctgaaaggcgatagcaataatctggctgataaagtgcgctcagtactggaacgtacgcgtcagctggaaaaagagttacaacagcttaaagaacaagctgccgcacaggagagcgcaaatctttccagtaaggcaattgatgttaatggtgttaagctgttggttagcgagcttagcggtgttgagccgaaaatgttgcgtaccatggttgacgatttaaaaaatcagctggggtcgacaattatcgtgctggcaacggtagtcgaaggtaaggtttctctgattgcaggcgtatctaaggacgtcacagatcgtgtgaaagcaggggaactgattggtatggtcgctcagcaggtgggcggcaagggtggtggacgtcctgacatggcgcaagccggtggtacggatgctgcggccttacctgcagcgttagccagtgtgaaaggctgggtcagcgcgaaattgcaataa

SEQ ID NO: 6173 - DNA, 1425 bp, Escherichia coli
  CDS (1)...(1425)
atgtcagtatttccagaaagttttttatggggcggcgcgcttgccgccaaccagtctgaaggtgcgttccgtgaaggtgacaaaggtctgaccactgtcgatatgatcccacacggcgagcatcgaatggcggtgaaactggggctggaaaaacgttttcagttgcgagatgacgagttttatcccagccatgaggcgacggatttttatcatcgttataaagaagatatcgccctgatggcagagatgggattcaaggttttccgtacctcaattgcctggagccgtctctttccgcagggcgatgaaatcacgcccaatcagcagggcattgctttttatcgttctgtctttgaagagtgtaaaaagtacggtatcgaaccgctggtcacgttgtgccacttcgatgtgccgatgcatctggtcaccgaatatggctcctggcgtaaccgcaagctggtggagtttttcagccgctacgccagaacctgctttgaagcatttgatggtctggtgaaatactggctaaccttcaatgaaatcaacattatgttgcatagcccgttctccggcgcgggtctggtgtttgaagaaggtgaaaatcaggatcaggtgaaatatcaggccgcgcatcaccagctggttgccagtgcgctagccaccaaaatcgcccatgaggttaacccgcaaaatcaggtgggctgtatgctggcgggcggtaacttctacccttacagttgcaagccggaagatgtctgggcggcgctggagaaagaccgggaaaacctgttttttatcgatgtgcaggcgcggggcacgtatccggcttactctgcccgcgtattccgcgaaaaaggggtaaccatcaacaaagcaccgggcgatgatgaaatcctgaaaaacaccgtcgattttgtctctttcagctattacgcctcgcgctgcgcctcggcggagatgaacgccaacaacagcagtgcggcgaacgtggtgaaatcgctgcgtaatccgtatctacaggtgagcgactggggctggggaattgatccactcggtctgcgtatcaccatgaatatgatgtacgatcgttatcagaagccgctgtttctggtggaaaacggcctgggcgcaaaagatgaatttgctgccaatggcgagattaacgacgactatcgcatcagctacttacgcgaacatatccgcgcaatgggcgaagcgattgcagacggcattccgctgatgggctacaccacatggggctgtattgatttagtttccgcctctacgggtgaaatgagcaaacgctacggctttgtctttgttgaccgtgacgacgcaggcaacggtacgctgacgcgcacgcgtaagaaatcattctggtggtataaaaaagtgattgccagtaatggggaagatttagagtag

SEQ ID NO: 6174 - DNA, 873 bp, Escherichia coli
  CDS (1)...(873)
atgtgtacaacatgcggttgcggtgaaggcaacctgtatatcgagggtgatgaacataaccctcattccgcgtttcgtagcgcgccatttgccccggcggcacgcccgaagatgaaaatcaccggcattaaagcgcctgaatttacccccagccagactgaagaaggcgacctgcattacggtcatggcgaagcgggcactcacgcaccgggcatgagccagcgtcggatgctggaagtcgaaattgacgtgctggacaaaaataaccgtctggctgaacgcaaccgcgcgcgctttgctgcccgcaagcaactggtgctcaacctggtttccagccctggttccggtaaaaccaccctgctgacggaaaccctaatgcgcctgaaagacagcgttccgtgcgcagttattgaaggcgaccagcaaaccgtgaacgatgccgcacgcattcgcgctaccggcacaccagcgattcaggtgaacaccggtaaaggctgccatcttgacgcacagatgattgccgacgccgcaccgcgtctgccactggacgataacggtattctgtttatcgaaaacgttggcaacctcgtatgcccggccagcttcgatctcggtgaaaaacacaaagtggcggtgctttccgttaccgaaggtgaagacaaaccactgaaatatccgcatatgtttgccgccgcctcgctgatgctgctcaacaaagttgacctgttgccgtatctcaactttgacgttgaaaagtgcatcgcctgcgcccgcgaagtcaatccagaaattgaaatcatccttatttccgccaccagcggcgaagggatggaccagtggctgaactggctggagacacagcgatgtgcatag

SEQ ID NO: 6175 - DNA, 2562 bp, Escherichia coli
  CDS (1)...(2562)
atgagtgcaatagaaaatttcgacgcccatacgcccatgatgcagcagtatctcaggctgaaagcccagcatcccgagatcctgctgttttaccggatgggtgatttttatgaactgttttatgacgacgcaaaacgcgcgtcgcaactgctggatatttcactgaccaaacgcggtgcttcggcgggagagccgatcccgatggcggggattccctaccatgcggtggaaaactatctcgccaaactggtgaatcagggagagtccgttgccatctgcgaacaaattggcgatccggcgaccagcaaaggtccggttgagcgcaaagttgtgcgtatcgttacgccaggcaccatcagcgatgaagccctgttgcaggagcgtcaggacaacctgctggcggctatctggcaggacagcaaaggtttcggctacgcgacgctggatatcagttccgggcgttttcgcctgagcgaaccggctgaccgcgaaacgatggcggcagaactgcaacgcactaatcctgcggaactgctgtatgcagaagattttgctgaaatgtcgttaattgaaggccgtcgcggcctgcgccgtcgcccgctgtgggagtttgaaatcgacaccgcgcgccagcagttgaatctgcaatttgggacccgcgatctggtcggttttggcgtcgagaacgcgccgcgcggactttgtgctgccggttgtctgttgcagtatgcgaaagatacccaacgtacgactctgccgcatattcgttccatcaccatggaacgtgagcaggacagcatcattatggatgccgcgacgcgtcgtaatctggaaatcacccagaacctggcgggtggtgcggaaaatacgctggcttctgtgctcgactgcaccgtcacgccgatgggcagccgtatgctgaaacgctggctgcatatgccagtgcgcgatacccgcgtgttgcttgagcgccagcaaactattggcgcattgcaggatttcaccgccgggctacagccggtactgcgtcaggtcggcgacctggaacgtattctggcacgtctggctttacgaactgctcgcccacgcgatctggcccgtatgcgccacgctttccagcaactgccggagctgcgtgcgcagttagaaactgtcgatagtgcaccggtacaggcgctacgtgagaagatgggcgagtttgccgagctgcgcgatctgctggagcgagcaatcatcgacacaccgccggtgctggtacgcgacggtggtgttatcgcatcgggctataacgaagagctggatgagtggcgcgcgctggctgacggcgcgaccgattatctggagcgtctggaagtccgcgagcgtgaacgtaccggcctggacacgctgaaagttggctttaatgcggtgcacggctactacattcaaatcagccgtgggcaaagccatctggcacccatcaactacatgcgtcgccagacgctgaaaaacgccgagcgctacatcattccagagctaaaagagtacgaagataaagttctcacctcaaaaggcaaagcactggcactggaaaaacagctttatgaagagctgttcgacctgctgttgccgcatctggaagcgttgcaacagagcgcgagcgcgctggcggaactcgacgtgctggttaacctggcggaacgggcctataccctgaactacacctgcccgaccttcattgataaaccgggcattcgcattaccgaaggtcgccatccggtagttgaacaagtactgaatgagccatttatcgccaacccgctgaatctgtcgccgcagcgccgcatgttgatcatcaccggtccgaacatgggcggtaaaagtacctatatgcgccagaccgcactgattgcgctgatggcctacatcggcagctatgtaccggcacaaaaagtcgagattggacctatcgatcgcatctttacccgcgtaggcgcggcagatgacctggcgtccgggcgctcaacctttatggtggagatgactgaaaccgccaatattttacataacgccaccgaatacagtctggtgttaatggatgagatcgggcgtggaacgtccacctacgatggtctgtcgctggcgtgggcgtgcgcggaaaatctggcgaataagattaaggcattgacgttatttgctacccactatttcgagctgacccagttaccggagaaaatggaaggcgtcgctaacgtgcatctcgatgcactggagcacggcgacaccattgcctttatgcacagcgtgcaggatggcgcggcgagcaaaagctacggcctggcggttgcagctctggcaggcgtgccaaaagaggttattaagcgcgcacggcaaaagctgcgtgagctggaaagcatttcgccgaacgccgccgctacgcaagtggatggtacgcaaatgtctttgctgtcagtaccagaagaaacttcgcctgcggtcgaagctctggaaaatcttgatccggattcactcaccccgcgtcaggcgctggagtggatttatcgcttgaagagcctggtgtaa

SEQ ID NO: 6176 - DNA, 711 bp, Escherichia coli
  CDS (1)...(711)
atggcaaccactcatttggatgtttgcgccgtggttccggcggccggatttggccgtcgaatgcaaacggaatgtcctaagcaatatctctcaatcggtaatcaaaccattcttgaacactcggtgcatgcgctgctggcgcatccccgggtgaaacgtgtcgtcattgccataagtcctggcgatagccgttttgcacaacttcctctggcgaatcatccgcaaatcaccgttgtagatggcggtgatgagcgtgccgattccgtgctggcaggtctgaaagccgctggcgacgcgcagtgggtattggtgcatgacgccgctcgtccttgtttgcatcaggatgacctcgcgcgattgttggcgttgagcgaaaccagccgcacgggggggatcctcgccgcaccagtgcgcgatactatgaaacgtgccgaaccgggcaaaaatgccattgctcataccgttgatcgcaacggcttatggcacgcgctgacgccgcaatttttccctcgtgagctgttacatgactgtctgacgcgcgctctaaatgaaggcgcgactattaccgacgaagcctcggcgctggaatattgcggattccatcctcagttggtcgaaggccgtgcggataacattaaagtcacgcgcccggaagatttggcactggccgagttttacctcacccgaaccatccatcaggagaatacataa

SEQ ID NO: 6177 - DNA, 1299 bp, Escherichia coli
  CDS (1)...(1299)
atgtccaaaatcgtaaaaatcatcggtcgtgaaatcatcgactcccgtggtaacccgactgttgaagccgaagtacatctggagggtggtttcgtcggtatggcagctgctccgtcaggtgcttctactggttcccgtgaagctctggaactgcgcgatggcgacaaatcccgtttcctgggtaaaggcgtaaccaaagctgttgctgcggtaaacggcccgatcgctcaggcgctgattggcaaagatgctaaagatcaggctggcattgacaagatcatgatcgacctggacggcaccgaaaacaaatccaaattcggcgcgaacgcaatcctggctgtatctctggctaacgccaaagctgctgcagctgctaaaggtatgccgctgtacgagcacatcgctgaactgaacggtactccgggcaaatactctatgccggttccgatgatgaacatcatcaacggtggtgagcacgctgacaacaacgttgatatccaggaattcatgattcagccggttggcgcgaaaactgtgaaagaagccatccgcatgggttctgaagttttccatcacctggcaaaagttctgaaagcgaaaggcatgaacactgctgttggtgacgaaggtggctatgcgccgaacctgggttccaacgctgaagctctggctgttatcgctgaagctgttaaagctgctggttatgaactgggcaaagacatcactttggcgatggactgcgcagcttctgaattctacaaagatggtaaatacgttctggctggcgaaggcaacaaagcgttcacctctgaagaattcactcacttcctggaagaactgaccaaacagtacccgatcgtttctatcgaagacggtctggacgaatctgactgggacggtttcgcataccagaccaaagttctgggcgacaaaatccagctggttggtgacgacctgttcgtaaccaacaccaagatcctgaaagaaggtatcgaaaaaggtatcgctaactccatcctgatcaaattcaaccagatcggttctctgaccgaaactctggctgcaatcaagatggcgaaagatgctggctacactgcagttatctctcaccgttctggcgaaactgaagacgctaccatcgctgacctggctgttggtactgctgcaggccagatcaaaactggttctatgagccgttctgaccgtgttgctaaatacaaccagctgattcgtatcgaagaagctctgggcgaaaaagcaccgtacaacggtcgtaaagagatcaaaggccaggcataa

SEQ ID NO: 6178 - DNA, 1638 bp, Escherichia coli
  CDS (1)...(1638)
atgacaacgaactatatttttgtgaccggcggggtcgtatcctctctgggtaaaggcattgccgcagcctccctcgcagccattcttgaagcccgtggcctcaatgtgaccatcatgaaactggatccgtacatcaacgtcgatccaggtactatgagcccaatccaacacggggaagtgttcgttactgaagacggcgctgaaaccgacctggacctggggcactacgagcgtttcattcgtaccaaaatgagccgccgcaacaacttcaccacgggtcgtatctactctgacgttctgcgtaaagaacgccgcggtgactacctcggcgcaaccgtgcaggttattccgcacatcactaacgcaatcaaagagcgcgtgctggaaggtggcgaaggtcatgacgtagtactggtagaaatcggcggtacagtaggtgatatcgaatccttgccgttcctcgaagcgattcgccagatggctgttgaaattggccgtgagcacactctgtttatgcacctgacgctggtgccgtacatggcagcgtctggtgaagtcaaaaccaaaccgactcagcactctgtaaaagagctgctctccatcggtatccagcctgacatcctgatttgtcgttcagatcgcgctgttccggcgaacgaacgtgcgaagattgcattgttctgtaatgttccggaaaaagcggttatttctctgaaagacgtcgattccatctataaaattccgggcctgttgaaatctcaggggctggacgattatatttgtaaacgattcagcttaaactgcccggaagcgaatctgtccgaatgggaacaggttatcttcgaagaagcgaacccggtaagtgaagtcaccatcggtatggtcggcaagtacattgaactgccggatgcttataaatcagtgatcgaagcactgaaacacggtgggctgaagaatcgtgtcagcgtcaacatcaaactgatcgattcacaagatgttgaaacgcgcggcgttgaaatccttaaaggtctggacgcaatcctcgtacctggcggtttcggctatcgtggcgtagaaggcatgattacgaccgcgcgttttgcgcgtgagaacaatattccttatctgggcatttgcctgggtatgcaggtggcgttaattgattacgctcgccatgttgccaacatggagaacgccaactctacggaatttgtgccagactgtaagtacccggttgtggcgctgattaccgagtggcgcgatgaaaacggcaacgttgaagttcgtagcgagaagagcgatctcggcggtaccatgcgtctcggcgcacagcagtgccagttggttgacgatagcctggttcgccagctgtacaatgcgccgacaattgttgagcgtcatcgtcaccgttacgaagtcaacaacatgctgttgaaacagattgaagatgcaggtctgcgcgttgcgggccgttccggggatgatcagttggtcgagatcatcgaagttccgaatcacccgtggttcgtggcttgccagttccatccggagtttacttctactccacgtgatggtcacccgctgtttgcaggctttgtgaaagccgccagcgagttccagaaacgtcaggcgaagtaa

SEQ ID NO: 6179 - DNA, 2235 bp, Escherichia coli
  CDS (1)...(2235)
atggttgcggtaagaagtgcacatatcaataaggctggtgaatttgatccggaaaaatggatcgcaagtctgggtattaccagccagaagtcgtgtgagtgcttagccgaaacctgggcgtattgtctgcaacagacgcaggggcatccggatgccagtctgttattgtggcgtggtgttgagatggtggagatcctctcgacattaagtatggacattgacacgctgcgggcggcgctgcttttccctctggcggatgccaacgtagtcagcgaagatgtgctgcgtgagagcgtcggtaagtcggtcgttaaccttattcacggcgtgcgtgatatggcggcgatccgccagctgaaagcgacgcacactgattctgtttcctccgaacaggtcgataacgttcgccggatgttattggcgatggtcgatgattttcgctgcgtagtcatcaaactggcggagcgtattgctcatctgcgcgaagtaaaagatgcgccggaagatgaacgtgtactggcggcaaaagagtgtaccaacatctacgcaccgctggctaaccgtctcggaatcggacaactgaaatgggaactggaagattactgcttccgttacctccatccaaccgaatacaaacgaattgccaaactgctgcatgaacggcgtctcgaccgcgaacactacatcgaagagttcgttggtcatctgcgcgctgagatgaaagctgaaggcgttaaagcggaagtgtatggtcgtccgaaacacatctacagcatctggcgtaaaatgcagaaaaagaacctcgcctttgatgagctgtttgatgtgcgtgcggtacgtattgtcgccgagcgtttacaggattgctatgccgcactggggatagtgcacactcactatcgccacctgccggatgagtttgacgattacgtcgctaacccgaaaccaaacggttatcagtctattcataccgtggttctggggccgggtggaaaaaccgttgagatccaaatccgcaccaaacagatgcatgaagatgcagagttgggtgttgctgcgcactggaaatataaagagggcgcggctgctggcggcgcacgttcgggacatgaagaccggattgcctggctgcgtaaactgattgcgtggcaggaagagatggctgattccggcgaaatgctcgacgaagtacgtagtcaggtctttgacgaccgggtgtacgtctttacgccgaaaggtgatgtcgttgatttgcctgcgggatcaacgccgctggacttcgcttaccacatccacagtgatgtcggacaccgctgcatcggggcaaaaattggcgggcgcattgtgccgttcacctaccagctgcagatgggcgaccagattgaaattatcacccagaaacagccgaaccccagccgtgactggttaaacccaaacctcggttacgtcacaaccagccgtgggcgttcgaaaattcacgcctggttccgtaaacaggaccgtgacaaaaacattctggctgggcggcaaatccttgacgacgagctggaacatctggggatcagcctgaaagaagcagaaaaacatctgctgccgcgttacaacttcaatgatgtcgacgagttgctggcggcgattggtggcggggatatccgtctcaatcagatggtgaacttcctgcaatcgcaatttaataagccgagtgccgaagagcaggacgccgccgcgctgaagcaacttcagcaaaaaagctacacgccgcaaaaccgcagtaaagataacggtcgcgtggtagtcgaaggtgttggcaacctgatgcaccacatcgcgcgctgctgccagccgattcctggagatgagattgtcggcttcattacccaggggcgcggtatttcagtacaccgcgccgattgcgaacaactggcggaactgcgctcccatgcgccagaacgcattgttgacgcggtatggggtgagagctactccgccggatattcgctggtggtccgcgtggtagctaatgatcgtagtgggttgttacgtgatatcacgaccattctcgccaacgagaaggtgaacgtgcttggcgttgccagccgtagcgacaccaaacagcaactggcgaccatcgacatgaccattgagatttacaacctgcaagtgctggggcgcgtgctgggtaaactcaaccaggtgccggatgttatcgacgcgcgtcggttgcacgggagttag

SEQ ID NO: 6180 - DNA, 918 bp, Escherichia coli
  CDS (1)...(918)
atgtctaaacgattaccaccgctaaatgccttacgagtttttgatgccgcagcacgccatttaagtttcactcgcgcagcagaagagctttttgtgacccaagccgcagtaagtcatcaaatcaagtctcttgaggattttttggggctaaaactgttccgccgccgtaatcgttcactcctgctgaccgaggaagggcaaagctatttcctcgatatcaaagagatattttcgcaattaaccgaagcgacgcgtaaactccaggcccgtagcgccaagggggcgttgacggtcagtttactccccagtttcgccattcattggttggttccgcgactttccagctttaattcagcttatccgggaattgacgttcgaatccaggcggttgatcgtcaggaagataagctggcggatgatgttgatgtggcgatattttatggtcggggcaactggccggggctacgggtggaaaaactgtacgccgaatatttattgccggtgtgttcgccgctactgctgactggcgaaaaacccttgaagacaccggaagatctggctaaacatacgttattacatgatgcttcgcgccgtgactggcagacatatacccgacagttggggttaaatcatatcaacgttcagcaagggccaatttttagccatagcgccatggtgctgcaagcggctatccacgggcagggagtggcgctggcaaataacgtgatggcgcaatctgaaatcgaggccggacgtcttgtttgcccgtttaatgatgttctggtcagtaaaaatgctttttatctggtttgtcatgacagtcaggcagaactgggtaaaatagccgcctttcgccaatggatcctggcgaaagccgctgctgaacaagaaaaattccgctttcgttatgaacaataa

SEQ ID NO: 6181 - DNA, 2247 bp, Escherichia coli
  CDS (1)...(2247)
atgctcactcgcctgcgcgaaatagtcgaaaaggtagccagcgcaccacgcctgaatgaggcgttaaatattctggttaccgacatctgtcttgcgatggataccgaggtctgttcggtctacctggccgatcatgatcgacgttgttactacctgatggcgacccgggggctgaaaaaaccacgcggtcgcactgtaacgctcgcgtttgatgaagggatcgtcggcctggttggcaggctggcggaaccgataaaccttgcagatgcgcaaaagcaccccagcttcaaatacatcccctccgtaaaagaagaacgtttccgcgcgtttttaggcgtaccaattattcaacgtcgccagttgcttggtgtactggtggtacagcaacgagagttgcgccagtatgacgaaagtgaagaatccttcctggtgacgcttgccacccagatggcagctattctttctcagtcgcagttgactgccttgtttgggcaatatcgccagacgcgaatccgcgcattaccggcagcacctggtgtggcgattgccgaaggctggcaggatgccacgttacctttaatggaacaggtgtatcaggcatcaacgctggatccggctctggaacgcgaacgactgaccggggcgctggaagaagcggcaaacgagtttcgccgctacagcaaacgctttgccgccggtgcacaaaaagaaacggcggctattttcgatctttactcgcacctgctttcggacacccggctgcgtcgcgaattgtttgccgaggttgataaaggctcggtggcagagtgggcggtaaaaacggtcattgaaaaatttgccgaacagtttgccgcgctaagtgataactatctcaaagagcgggctggcgatttacgtgcgctgggtcagcgattgctgtttcatcttgatgacgctaatcaagggccgaacgcctggccggaacgtttcattctggtggcagatgaactgtcagcgacaacgcttgctgagctgccccaggatcgcttagtcggtgttgtcgtgcgagatggcgcagccaactcccatgctgcgatcatggtacgtgcgctggggatccctaccgtgatgggcgcggatattcagccttcggtgctgcatcgtaggacgctgatcgttgatggctatcgcggtgaattgctggtcgatccggagccggtactgctgcaagaatatcagcggctaattagtgaagagattgagcttagccgtctggcggaagatgacgtcaatttacccgcgcagttaaaaagcggtgagcgtataaaagtcatgctcaatgctggtttaagcccggaacatgaagaaaaactgggcagccgtattgatggcatcggtctttatcgcactgaaatcccattcatgctgcaaagtggtttcccgtcggaagaagaacaggtggcgcagtatcaggggatgctgcaaatgttcaatgataaacccgtcaccttgcgtacgctggatgtcggagcagataagcagctgccttacatgccgatcagcgaagagaatccatgcctgggttggcgtgggattcgcattacgctcgatcagccggagatcttcttgatccaggtgcgggcgatgctgcgtgctaatgccgctacgggcaacctgaatattctgttgccgatggtcacaagcctcgatgaagttgatgaagcacgccgcctgattgaacgtgccggacgtgaagtcgaggagatgatcggttacgaaattcccaaaccacgtatcggcatcatgctggaagtgccgtcaatggtatttatgctgccgcatctggcaaagcgggtcgatttcatctctgttggcaccaacgatctgactcaatacattctggccgttgatcgcaacaatacccgggtggcgaacatttatgacagtcttcatcctgcaatgttacgagctctggcgatgatcgcccgggaagcggaaatacatggaatcgatctccgtttgtgcggtgaaatggcgggcgatcccatgtgcgtggcaatcctcattgggcttgggtatcgccatctgtctatgaacggacgttctgtagcgcgggcaaaatacctgctgcggcgcattgattatgccgaagcagaaaatcttgcgcagcgtagtctggaagcgcaactggcgaccgaagttcgccatcaggttgcagcctttatggagcgtcgcggcatgggcgggctgattcgcggagggttatag

SEQ ID NO: 6182 - DNA, 762 bp, Escherichia coli
  CDS (1)...(762)
atgattttaagtgcattttctctcgaaggtaaagttgcggtcgtcactggttgtgatactggactgggtcaggggatggcgttggggctggcgcaagcgggctgtgacattgttggcattaacatcgttgaaccgactgaaaccatcgagcaggtcacagcgctggggcgtcgttttttaagcctgaccgccgatctgcgaaagattgatggtattccagcactgctggatcgcgcggtagcggagtttggtcatattgatatcctggtgaataacgccggattgattcgccgcgaagatgctctcgagttcagcgaaaaggactgggacgatgtcatgaacctgaatatcaagagcgtattcttcatgtctcaggcagcggcgaaacactttatcgcgcaaggcaatggcggcaagattatcaatatcgcgtcaatgctctccttccagggcgggatccgtgtgccttcttataccgcatcaaaaagcggcgtgatgggtgtgacgcgattgatggcgaacgaatgggctaaacacaacattaatgttaatgcgatagccccgggttacatggcgaccaacaatactcaacaactacgggcagatgaacaacgtagcgcggaaattctcgaccgcattccagctggtcgttggggactgccgagtgacctgatggggccgatagtgttccttgcctccagcgcttcagattatgtgaatggttataccattgccgtggatggcggttggctggcgcgttaa

SEQ ID NO: 6183 - DNA, 1185 bp, Escherichia coli
  CDS (1)...(1185)
gtgatgaaagacgttgtgattgtcggggcgttacggacacctatcggctgctttcgtggtgcgttagcgggtcattccgccgtggaacttggtagtctggtcgtgaaagcgttaatagaacgtaccggcgttcctgcatatgcggtggatgaagtaattcttggtcaggtgttgactgcaggggcagggcagaatccggcaaggcaatcggctattaaaggtggtctgcctaatagcgtttctgcaatcactattaatgacgtttgcggttccgggcttaaagcactgcatctggctactcaggcgatacagtgtggcgaggctgatattgtcatcgccggtggccaggaaaacatgagccgcgcaccacatgttctgactgatagccgcaccggtgcacagcttggcaatagccagttggttgacagtcttgtgcatgatgggttgtgggatgccttcaatgattatcatattggtgtcaccgccgaaaatctggctcgcgaatatggcatcagccgtcagttgcaggatgcttacgcacttagctcgcaacaaaaagcgcgagcggcgattgacgccggacgatttaaagatgagatcgtcccggtaatgacccaaagtaacgggcagacgttggttgttgataccgatgaacagccacgcactgacgccagcgcagaaggcttagcccgtttaaatccttcatttgatagtctcggttctgtgacagcgggtaatgcatcatccataaacgatggcgcagctgcggtaatgatgatgagcgaagccaaagcacgagcgttgaatttacccgtgctggcccgcattcgcgcatttgccagcgttggtgtagatccggcattgatgggaattgcgccggtgtatgcgacccgccgttgcctggagcgtgtaggctggcagttggctgaagtcgatcttatcgaggctaatgaagcgtttgctgcacaggcgctttcggttggcaagatgcttgagtgggatgagcgtcgggtcaatgtcaatggtggcgcgatcgcactcggtcacccgataggcgcttccggttgccgaatcctggtttctctggttcatgaaatggtgaaacgtaatgcccgcaaaggactggcaacgctttgtatcggcgggggccagggtgtggcattgaccattgaacgtgacgaatag

SEQ ID NO: 6184 - DNA, 2259 bp, Escherichia coli
  CDS (1)...(2259)
atgcgcgtcgatgccattgctaaggtcaccgggcgggcacgatatactgacgattatgttatggcgggcatgtgttatgcgaaatatgtacgtagccctatcgcacatggttatgccgtaagtattaatgatgaacaagccagaagtttgccgggcgtactggcgatttttacctgggaagatgtgcctgatattccattcgctacagctgggcatgcctggacacttgacgaaaacaagcgcgataccgccgatcgcgcactgctaactcgccatgttcgtcatcatggtgacgccgttgccatcgtcgtggcccgcgatgaactcacggcagaaaaagcggcgcaattggtcagcattgagtggcaagaattacccgttatcaccacgccagaagcggcgctggcagaagacgctgcaccaatccataacggtggcaatttactgaaacaaagcacgatgtcgacgggtaatgtccaacaaacaatcgatgccgccgactaccaggtacaggggcactatcagacccccgttattcaacattgtcacatggaaagcgtaacatcgctggcgtggatggaggatgactcgcgaattaccatcgtttccagcacccagatcccgcacattgttcgccgcgtggttggtcaggcgctggatattccctggtcatgcgtacgagtcatcaaaccatttgtcggtggcggttttggtaataaacaggatgtactggaagagccaatggcggcattcctgaccagcaagcttggcggcattccggtgaaagtttcccttagccgtgaagagtgtttcctcgcaacccgtacccgccacgcttttaccattgacgggcaaatgggcgtgaaccgcgacggaacattgaaaggttatagtctggatgttctgtctaacaccggcgcttatgcatctcacgggcactccatcgcttctgcgggggggaataaagtcgcttacctttatcctcgttgtgcctacgcttacagttcaaagacctgctataccaacctcccctcggctggtgcgatgcgtggttatggcgcgccacaagtcgtatttgccgttgagtctatgcttgatgacgccgcgacagcgttaggtattgatcctgttgaaattcgtttacgcaacgccgcccgcgaaggagatgctaatccgctcacgggcaaacgtatttacagcgcagggttgccggagtgtcttgaaaaaggccggaaaatctttgaatgggaaaaacgccgtgcagaatgccagaaccagcaaggcaatttgcgccgcggcgttggcgtcgcctgttttagctacacctctaacacctggcctgtcggcgtagaaatagcaggcgcgcgccttctgatgaatcaggatggaaccatcaacgtgcaaagcggcgcgacggaaatcggtcagggtgccgacaccgtcttctcgcaaatggtggcagaaaccgtgggggttccggtcagcgacgttcgcgttatttcaactcaagataccgacgttacgccgttcgatcccggcgcatttgcctcacgccagagctatgttgccgcgcctgcgctgcgcagtgcggcactattattaaaagagaaaatcatcgctcacgccgcagtcatgctacatcagtcagcgatgaatctgaccctgataaaaggccatatcgtgctggttgaacgaccggaagagccgttaatgtcgttaaaagatttggcgatggacgctttctaccaccctgaacgcggcgggcagctctctgctgaaagctccatcaaaaccaccactaacccaccggcgtttggctgtacctttgttgatctgacggtcgatattgcgctgtgcaaagtcaccatcaaccgcatcctcaacgttcatgattcagggcatattcttaatccactgctggcagaaggtcaggtacacggcggaatgggaatgggcattggctgggcgctatttgaagagatgatcatcgatgctaaaagcggcgtggtccgtaaccccaatctgctggattacaaaatgccgaccatgccggatctgccacaactggaaagcgcgttcgtcgaaatcaatgagccgcaatccgcatacggacataagtcactgggtgagccaccaataattcctgttgccgctgctattcgtaacgcggtgaagatggctaccggtgttgcaatcaatacactgccgctgacgccaaaacggttatatgaagagttccatctggcaggattgatttga

SEQ ID NO: 6185 - DNA, 1212 bp, Escherichia coli
  CDS (1)...(1212)
atggctaagaatattccattcaaactgattcttgaaaaagcaaaagattaccaggcggatatgactcgcttcctgcgcgacatggttgctattcccagtgaaagctgcgacgagaaacgcgtagtacatcgtattaaagaagagatggaaaaagtcggcttcgataaagttgaaatcgacccgatgggcaacgttctcggttatatcggccacggcccgcgtctggtggcaatggacgctcatatcgataccgtcggcattggcaacatcaaaaactgggacttcgatccgtacgaaggcatggaaactgatgaactgattggtggtcgcggtacttccgaccaggaaggtggcatggcctctatggtttatgccggtaaaatcattaaagacctcggtctggaagatgaatataccctgctggttaccggtacggtgcaggaagaagactgcgacggtctgtgctggcagtacattattgaacaatccggcattcgcccggaatttgtggtcagtaccgaaccaaccgactgccaggtataccgtggtcagcgcggtcgtatggaaattcgtattgatgttcagggtgttagctgccacggttctgcaccagaacgcggtgataacgccattttcaaaatgggtccgattcttggcgaattacaagaactctcccaacgtctgggttatgacgaattcctcggcaaaggcaccctcaccgtttctgaaatcttcttcacatccccaagccgttgcgctgtagcagacagctgcgcagtttcaatcgaccgtcgtctgacctggggcgaaacctgggaaggcgcgctggacgaaatccgcgccctgcctgcagtacagaaagctaacgcggttgtttctatgtacaactacgaccgtccgtcctggactggcctggtttacccaaccgaatgctacttcccgacctggaaagtggaagaagatcacttcaccgttaaagcactggtgaatgcctacgaagggctgtttggcaaagcgccggttgttgataagtggaccttctcaactaacggcgtatctatcatgggccgtcacggcattccggtgatcggctttggcccgggtaaagaacctgaagcgcatgcacctaacgaaaaaacctggaaatctcacctggtgacctgtgccgcgatgtacgctgcaatcccgttaagctggctggcaacagagtaa

SEQ ID NO: 6186 - DNA, 933 bp, Escherichia coli
  CDS (1)...(933)
atgagtaagaaaattgttctcgccctgggcgggaatgcgctgggcgatgacctggccgggcaaatgaaagcggtaaaaattacttctcaggcaattgttgatttaattgcccagggacatgaagttatcgtcactcatggtaacgggccgcaggtgggcatgattaaccaggcctttgaagctgccgcaaaaactgaagcgcactcgccaatgctgccgatgtctgtctgtgttgcattaagccagggttatattggttacgatctacaaaacgctttaagagaagaactgctttctcggggcattaataaacctgtagcaacgctggttactcaggtcgaagtcgacgctaacgatccggcattcctcaacccgaccaagccgatcggttcgttctttaccgagcaagaagcagagcaactgacaaaacagggttacactctgaaagaagatgctggtcgcggctatcgccgtgttgttgcctcgccaaaaccggttgatatcattgaaaaagaaacggttaaagctctggtagatgcaggtcaggtggtgatcaccgttggcggtggtggtatccctgttattcgtgaaggtaaccatctgcgtggtgccagcgcggttatcgataaagactgggccagcgcccgtttagcagaaatgattgatgccgatatgctgatcattctgactgcggtagaaaaagtggccattaacttcggtaaagagaatgaacagtggctcgatcgcctgtcattaagtgatgctgaacgctttatcgaagaaggtcattttgcgaaaggttctatgctgcctaaagtggaagctgccgcctcgtttgctcgctctcgcgcaggtcgtgaagcactgattaccgtattgagcaaagcgaaagaagggattgaaggcaaaacaggaacggtgatttgtcagtaa

SEQ ID NO: 6187 - DNA, 1320 bp, Escherichia coli
  CDS (1)...(1320)
atgatgtcaggagaacacacgttaaaagcggtacgaggcagttttattgatgtcacccgtacgatcgataacccggaagagattgcctctgcgctgcggtttattgaggatggtttattactcattaaacagggaaaagtggaatggtttggcgaatgggaaaacggaaagcatcaaattcctgacaccattcgcgtgcgcgactatcgcggcaaactgatagtaccgggctttgtcgatacacatatccattatccgcaaagtgaaatggtgggggcctatggtgagcaattgctggagtggttgaataaacacaccttccctactgaacgtcgttatgaggatttagagtacgcccgcgaaatgtcggcgttcttcatcaagcagcttttacgtaacggaaccaccacggcgctggtgtttggcactgttcatccgcaatctgttgatgcgctgtttgaagccgccagtcatatcaatatgcgtatgattgccggtaaggtgatgatggaccgcaacgcaccggattatctgctcgacactgccgaaagcagctatcaccaaagcaaagaactgatcgaacgctggcacaaaaatggtcgtctgctatatgcgattacgccacgcttcgccccgacctcatctcctgaacagatggcgatggcgcaacgcctgaaagaagaatatccggatacgtgggtacatacccatctctgtgaaaacaaagatgaaattgcctgggtgaaatcgctttatcctgaccatgatggttatctggatgtttaccatcagtacggcctgaccggtaaaaactgtgtctttgctcactgcgtccatctcgaagaaaaagagtgggatcgtctcagcgaaaccaaatccagcattgctttctgtccgacctccaacctttacctcggcagcggcttattcaacttgaaaaaagcatggcagaagaaagttaaagtgggcatgggaacggatatcggtgccggaaccactttcaacatgctgcaaacgctgaacgaagcctacaaagtattgcaattacaaggctatcgcctctcggcatatgaagcgttttacctggccacgctcggcggagcgaaatctctgggccttgacgatttgattggcaactttttacctggcaaagaggctgatttcgtggtgatggaacccaccgccactccgctacagcagctgcgctatgacaactctgtttctttagtcgacaaattgttcgtgatgatgacgttgggcgatgaccgttcgatctaccgcacctacgttgatggtcgtctggtgtacgaacgcaactaa

SEQ ID NO: 6188 - DNA, 1518 bp, Escherichia coli
  CDS (1)...(1518)
atgtctgaacaacacgcacagggcgctgacgcggtagtcgatcttaacaatgaactgaaaacgcgtcgtgagaagctggcgaacctgcgcgagcaggggattgccttcccgaacgatttccgtcgcgatcatacctctgaccaattgcacgcagaattcgacggcaaagagaacgaagaactggaagcgctgaacatcgaagtcgccgttgctggccgcatgatgacccgtcgtattatgggtaaagcgtctttcgttaccctgcaggacgttggcggtcgcattcagctgtacgttgcccgtgacgatctcccggaaggcgtttataacgagcagttcaaaaaatgggacctcggcgacatcctcggcgcgaaaggtaagctgttcaaaaccaaaaccggcgaactgtctatccactgcaccgagttgcgtctgctgaccaaagcactgcgtccgctgccggataaattccacggcttgcaggatcaggaagcgcgctatcgtcagcgttatctcgatctcatctccaacgatgaatcccgcaacacctttaaagtgcgctcgcagatcctctctggtattcgccagttcatggtgaaccgcggctttatggaagttgaaacgccgatgatgcaggtgatccctggcggtgccgctgcgcgtccgtttatcacccaccataacgcgctggatctcgacatgtacctgcgtatcgcgccggaactgtacctcaagcgtctggtggttggtggcttcgagcgtgtattcgaaatcaaccgtaacttccgtaacgaaggtatttccgtacgtcataacccagagttcaccatgatggaactctacatggcttacgcagattacaaagatctgatcgagctgaccgaatcgctgttccgtactctggcacaggatattctcggtaagacggaagtgacctacggcgacgtgacgctggacttcggtaaaccgttcgaaaaactgaccatgcgtgaagcgatcaagaaatatcgcccggaaaccgacatggcggatctggacaacttcgactctgcgaaagcaattgctgaatctatcggcatccacgttgagaagagctggggtctgggccgtatcgttaccgagatcttcgaagaagtggcagaagcacatctgattcagccgaccttcattactgaatatccggcagaagtttctccgctggcgcgtcgtaacgacgttaacccggaaatcacagaccgctttgagttcttcattggtggtcgtgaaatcggtaacggctttagcgagctgaatgacgcggaagatcaggcgcaacgcttcctggatcaggttgccgcgaaagacgcaggtgacgacgaagcgatgttctacgatgaagattacgtcaccgcactggaacatggcttaccgccgacagcaggtctgggaattggtatcgaccgtatggtaatgctgttcaccaacagccataccatccgcgacgttattctgttcccggcgatgcgtccggtaaaataa

SEQ ID NO: 6189 - DNA, 1734 bp, Escherichia coli
  CDS (1)...(1734)
gtgaaacaacagatacaacttcgtcgccgtgaagtcgatgaaacggcagacttgcccgctgaattgcctcccttgctgcgccgtttatacgccagccggggagtacgcagtgcgcaagaactggaacgcagtgttaaaggtatgctgccctggcagcaactgagcggcgtcgaaaaggccgttgagatcctttacaacgcttttcgcgaaggaacgcggattattgtggtcggtgatttcgacgccgacggcgcgaccagcacggctctaagcgtgctggcgatgcgctcgcttggttgcagcaatatcgactacctggtaccaaaccgtttcgaagacggttacggcttaagcccggaagtggtcgatcaggcccatgcccgtggcgcgcagttaattgtcacggtggataacggtatttcctcccatgcgggggttgagcacgctcgctcgttgggcatcccggttattgttaccgatcaccatttgccaggcgacacattacccgcagcggaagcgatcattaaccctaacttgcgcgactgtaatttcccgtcgaaatcactggcaggcgtgggtgtggcgttttatctgatgctggcgctgcgcacctttttgcgcgatcagggctggtttgatgagcgtaacatcgcaattcctaacctggcagaactgctggatctggtcgcgctggggacagtggcggacgtcgtgccgctggacgctaataatcgcattctgacctggcaggggatgagtcgcatccgagccggaaagtgccgtccggggattaaagcgctgcttgaagtggcaaaccgtgatgcacaaaaactcgccgccagcgatttaggttttgcgctggggccacgtctcaatgctgccggacgactggacgatatgtccgtcggtgtggcgctgttgttgtgcgacaacatcggcgaagcgcgcgtgctggcaaatgaactcgatgcgctaaaccagacgcgaaaagagatcgaacaaggaatgcaaattgaagccctgaccctgtgcgagaaactggagcgcagccgtgacacgctacccggcgggctggcaatgtatcaccccgaatggcatcagggcgttgtcggtattctggcttcgcgcatcaaagagcgttttcaccgtccggttatcgcgtttgcgccagcaggtgacggtacgctgaaaggttccggtcgctccattcaggggctgcatatgcgtgatgcgctggagcgattagacacactctaccctggcatgatgctgaagtttggcggtcatgcgatggcggcgggtttgtcgctggaagaggataaattcaaactctttcaacaacggtttggcgaactggttactgagtggctggacccttcgctattgcaaggcgaagtggtatcagacggtccgttaagcccggccgaaatgaccatggaagtggcgcagctgctgcgcgatgctggcccgtgggggcagatgttcccggagccgctgtttgacggtcatttccgtctgctgcaacagcggctggtgggcgaacgtcatttgaaggtgatggtcgaaccggtcggcggcggtccactgctggatggtattgcttttaatgtcgataccgccctctggccggataacggcgtgcgcgaagtgcaactggcttataagctcgatatcaacgagtttcgcggcaaccgcagcctgcaaattatcatcgacaatatctggccaatttag

SEQ ID NO: 6190 - DNA, 897 bp, Escherichia coli
  CDS (1)...(897)
gtgaaacaggatctggcacgcatcgagcagtttcttgatgctctgtggctggaaaaaaatctggctgaaaatacgttgaacgcttaccgtcgcgatctgtcaatgatggtggagtggttgcatcaccgcgggttgacgctggcgacggcgcaaagtgacgatttgcaggcattactggcagaacggctggagggcgggtataaagccaccagctcagcgcgtttgctgagtgcagtgcgccgattgttccagtatctttatcgcgaaaagtttcgtgaagacgatcccagtgcgcatctcgcttcaccgaaattgccccagcgtttgccaaaagatttaagcgaagcgcaggtcgaacgtttattacaggcaccattaatcgatcagccactggagctacgcgataaagccatgcttgaagtgttgtatgctaccgggctgcgtgtctctgaactggtcggactgacaatgagtgatatcagcctgcgtcagggcgtggtacgggtcattggtaaaggcaacaaagagcgtctggtgccgttaggtgaagaggcggtttactggctggaaacctatctggaacatgggcgtccgtggctgctgaatggtgtgtcaattgacgtgttgtttcccagccagcgtgcgcagcagatgacgcgacagaccttctggcaccgtattaaacattatgctgtgctggcgggtatcgacagcgaaaagctgtcaccgcatgtgttgcgtcacgcttttgccactcatttattaaatcatggtgcggatttacgcgtggtgcagatgctactgggccacagcgatctctccaccacgcaaatttatacgcatgtcgctaccgagcgtctgcggcaacttcatcaacagcatcacccgcgggcgtga

SEQ ID NO: 6191 - DNA, 1440 bp, Escherichia coli
  CDS (1)...(1440)
atgatagtgaaaaaactcaccttaccgaaagatttcttatggggcggcgcagttgccgctcatcaggtcgaaggcggctggaacaaaggcggaaaagggccgagcatttgtgacgttctgaccggtggcgcacacggcgtgccgcgcgaaatcaccaaagaagtcttgccaggaaaatactatccaaaccatgaagccgttgatttttatggtcactataaggaagacatcaagctatttgccgaaatgggcttcaaatgttttcgtacatccattgcctggacgcgcatttttccaaaaggcgatgaagctcagccaaacgaagaagggctgaagttctacgatgatatgttcgatgaactgctgaaatacaacatcgaaccggtgatcaccctctcccactttgaaatgccgctgcatctggtgcagcaatacggtagctggaccaaccgtaaagtggttgatttctttgtacgtttcgcggaagtggtatttgaacgctataagcacaaagtcaaatactggatgaccttcaacgaaattaacaaccagcgtaactggcgtgcaccgctgttcggttactgctgctccggcgtggtgtataccgagcatgaaaacccggaagagacgatgtatcaggtgctgcatcaccagtttgtcgccagcgccctggcggtgaaagctgcgcgtcgcattaacccggagatgaaagtcggctgtatgctggcgatggtgccgctctatccttactcctgtaacccggacgatgtgatgttcgctcaggagtcgatgcgcgaacgctacgtctttaccgatgtgcagctacgcggctattacccgtcctatgtgttgaacgagtgggagcgtcgcggatttaacatcaaaatggaagacggcgatctggatgtgctgcgtgaaggcacctgcgattatcttggtttcagctattacatgaccaatgcagtgaaggccgaaggcggcaccggcgatgcgatctctggttttgaaggcagcgtaccaaacccgtatgttaaagcatctgactggggctggcagattgatccagtaggtctgcgctatgcactttgcgaactgtatgagcgttatcagaggccgctgtttattgtcgaaaacggttttggcgcttacgacaaagtggaagaagatggcagcatcaacgacgactaccgcattgactacctgcgcgcccatatcgaagagatgaaaaaagcggtgacttacgatggcgtggatctgatgggctacacaccgtggggctgcatcgactgcgtgtcgttcaccaccgggcagtacagcaaacgctacggctttatctatgtgaataaacatgacgacggtactggcgatatgtcgcgttcacgtaagaagagctttaactggtacaaagaggtgattgccagcaacggcgagaagctttaa

SEQ ID NO: 6192 - DNA, 390 bp, Escherichia coli
  CDS (1)...(390)
atgagcaacgtaccagcagaactgaaatacagcaaagaacacgaatggctgcgtaaagaagccgacggcacttacaccgttggtattaccgaacatgctcaggagctgttaggcgatatggtgtttgttgacctgccggaagtgggcgcaacggttagcgcgggcgatgactgcgcggttgccgaatcggtaaaagcggcgtcagacatttatgcgccagtaagcggtgaaatcgtggcggtaaacgacgcactgagcgattccccggaactggtgaacagcgaaccgtatgcaggcggctggatctttaaaatcaaagccagcgatgaaagcgaactggaatcactgctggatgcgaccgcatacgaagcattgttagaagacgagtaa

SEQ ID NO: 6193 - DNA, 1095 bp, Escherichia coli
  CDS (1)...(1095)
atggcacaacagactcctttgtacgaacaacacacgctttgcggcgctcgcatggtggatttccacggctggatgatgccgctgcattacggttcgcaaatcgacgaacatcatgcggtacgtaccgatgccggaatgtttgatgtgtcacatatgaccatcgtcgatcttcgcggcagccgcacccgggagtttctgcgttatctgctggcgaacgatgtggcgaagctcaccaaaagcggcaaagccctttactcggggatgttgaatgcctctggcggtgtgatagatgacctcatcgtctactactttactgaagatttcttccgcctcgttgttaactccgccacccgcgaaaaagacctctcctggattacccaacacgctgaacctttcggcatcgaaattaccgttcgtgatgacctttccatgattgccgtgcaagggccgaatgcgcaggcaaaagctgccacactgtttaatgacgcccagcgtcaggcggtggaagggatgaaaccgttctttggcgtgcaggcgggcgatctgtttattgccaccactggttataccggtgaagcgggctatgaaattgcgctgcccaatgaaaaagcggccgatttctggcgtgcgctggtggaagcgggtgttaagccatgtggcttgggcgcgcgtgacacgctgcgtctggaagcgggcatgaatctttatggtcaggagatggacgaaaccatctctcctttagccgccaacatgggctggaccatcgcctgggaaccggcagatcgtgactttatcggtcgtgaagccctggaagtgcagcgtgagcatggtacagaaaaactggttggtctggtgatgaccgaaaaaggcgtgctgcgtaatgaactgccggtacgctttaccgatgcgcagggcaaccagcatgaaggcattatcaccagcggtactttctccccgacgctgggttacagcattgcgctggcgcgcgtgccggaaggtattggcgaaacggcgattgtgcaaattcgcaaccgtgaaatgccggttaaagtgacaaaacctgtttttgtgcgtaacggcaaagccgtcgcgtga

SEQ ID NO: 6194 - DNA, 1233 bp, Escherichia coli
  CDS (1)...(1233)
atggcaaaggtatcgctggagaaagacaagattaagtttctgctggtagaaggcgtgcaccaaaaggcgctggaaagccttcgtgcagctggttacaccaacatcgaatttcacaaaggcgcgctggatgatgaacaattaaaagaatccatccgcgatgcccacttcatcggcctgcgatcccgtacccatctgactgaagacgtgatcaacgccgcagaaaaactggtcgctattggctgtttctgtatcggaacaaaccaggttgatctggatgcggcggcaaagcgcgggatcccggtatttaacgcaccgttctcaaatacgcgctctgttgcggagctggtgattggcgaactgctgctgctattgcgcggcgtgccggaagccaatgctaaagcgcaccgtggcgtgtggaacaaactggcggcgggttcttttgaagcgcgcggcaaaaagctgggtatcatcggctacggtcatattggtacgcaattgggcattctggctgaatcgctgggaatgtatgtttacttttatgatattgaaaataaactgccgctgggcaacgccactcaggtacagcatctttctgacctgctgaatatgagcgatgtggtgagtctgcatgtaccagagaatccgtccaccaaaaatatgatgggcgcgaaagaaatttcactaatgaagcccggctcgctgctgattaatgcttcgcgcggtactgtggtggatattccggcgctgtgtgatgcgctggcgagcaaacatctggcgggggcggcaatcgacgtattcccgacggaaccggcgaccaatagcgatccatttacctctccgctgtgtgaattcgacaacgtccttctgacgccacacattggcggttcgactcaggaagcgcaggagaatatcggcctggaagttgcgggtaaattgatcaagtattctgacaatggctcaacgctctctgcggtgaacttcccggaagtctcgctgccactgcacggtgggcgtcgtctgatgcacatccacgaaaaccgtccgggcgtgctaactgcgctgaacaaaatcttcgccgagcagggcgtcaacatcgccgcgcaatatctgcaaacttccgcccagatgggttatgtggttattgatattgaagccgacgaagacgttgccgaaaaagcgctgcaggcaatgaaagctattccgggtaccattcgcgcccgtctgctgtactaa

SEQ ID NO: 6195 - DNA, 894 bp, Escherichia coli
  CDS (1)...(894)
atgaaacgcccggactacagaacattacaggcactggatgcggtgatacgtgaacgaggatttgagcgcgcggcacaaaagctgtgcattacacaatcagccgtctcacagcgcattaagcaactggaaaatatgttcgggcagccgctgttggtgcgtaccgtaccgccgcgcccgacggaacaagggcaaaaactgctggcactgctgcgccaggtggagttgctggaagaagagtggctgggcgatgaacaaaccggttcgactccgctgctgctttcactggcggtcaacgccgacagtctggcgacgtggttgcttcctgcactggctcctgtgttggctgattcgcctatccgcctcaacttgcaggtagaagatgaaacccgcactcaggaacgtctgcgccgcggcgaagtggtcggcgcggtgagtattcaacatcaggcgctgccgagttgtcttgtcgataaacttggtgcgctcgactatctgttcgtcagctcaaaaccctttgccgaaaaatatttccctaacggcgtaacgcgttcggcattactgaaagcgccagtggtcgcgtttgaccatcttgacgatatgcaccaggcctttttgcagcaaaacttcgatctgcctccaggcagcgtgccctgccatatcgttaattcttcagaagcgttcgtacaacttgctcgccagggcaccacctgctgtatgatcccgcacctgcaaatcgagaaagagctggccagcggtgaactgattgacttaacgcctgggctatttcaacgacggatgctctactggcaccgctttgctcctgaaagccgcatgatgcgtaaagtcactgatgcgttactcgattatggtcacaaagtccttcgtcaggattaa

SEQ ID NO: 6196 - DNA, 1164 bp, Escherichia coli
  CDS (1)...(1164)
atgtctgtaattaagatgaccgatctggatcttgctgggaaacgtgtatttatccgtgcggatctgaacgtaccagtaaaagacgggaaagtaaccagcgacgcgcgtatccgtgcttctctgccgaccatcgaactggccctgaaacaaggcgcaaaagtgatggtaacttcccacctgggtcgtcctaccgaaggcgagtacaacgaagaattctctctgctgccggttgttaactacctgaaagacaaactgtctaacccggttcgtctggttaaagattacctcgacggcgttgacgttgctgaaggtgaactggttgttctggaaaacgttcgcttcaacaaaggcgagaagaaagacgacgaaaccctgtccaaaaaatacgctgcactgtgtgacgtgttcgtaatggacgcattcggtactgctcaccgcgcgcaggcttctactcacggtatcggtaaattcgctgacgttgcgtgcgcaggcccgctgctggcagctgaactggacgcgctgggtaaagcactgaaagaacctgctcgcccgatggtggctatcgttggtggttctaaagtatctaccaaactgaccgttctggactccctgtctaaaatcgctgaccagctgattgttggtggtggtatcgctaacacctttatcgcggcacaaggccacgatgtgggtaaatccctgtacgaagctgacctggttgacgaagctaaacgtctgctgaccacctgcaacatcccggttccgtctgatgttcgcgtagcaaccgagttctctgaaactgcaccggctaccctgaaatctgttaacgatgtgaaagctgacgagcagatcctggatatcggtgatgcttccgctcaggaactggctgaaatcctgaagaatgcgaaaaccattctgtggaacggtccggttggcgtgttcgaattcccgaacttccgcaaaggtactgaaatcgtggctaacgctatcgcagacagcgaagcgttctccatcgctggcggcggcgacactctggcagcaatcgacctgttcggcattgctgacaaaatctcctacatctccactggcggcggcgcattcctcgaattcgtggaaggtaaagtactgcctgcagtagcgatgctcgaagagcgcgctaagaagtaa

SEQ ID NO: 6197 - DNA, 444 bp, Escherichia coli
  CDS (1)...(444)
atgcggcttagtgattattttccagaatcatcaatctcagttatacattcagcaaaagattggcaggaagctatcgatttctcgatggtatcattgctggataaaaactatatcagcgagaattacattcaggcaattaaagattccaccattaacaatggcccttattatattctcgcaccaggcgtggcaatgcctcatgcgcgaccggaatgtggggcgcttaaaaccgggatgtctttgacattacttgaacaaggtgtttattttccggggaatgacgaaccaattaaattactcatcggactctctgctgccgatgccgattcgcacattggcgctattcaggcgttaagtgaattactgtgcgaagaagaaatactcgaacaactcttaacagcatcatcagaaaaacaattagcggacattatcagccgcggataa

SEQ ID NO: 6198 - DNA, 1155 bp, Escherichia coli
  CDS (1)...(1155)
atggcaaaacacctttttacgtccgagtccgtctctgaagggcatcctgacaaaattgctgaccaaatttctgatgccgttttagacgcgatcctcgaacaggatccgaaagcacgcgttgcttgcgaaacctacgtaaaaaccggcatggttttagttggcggcgaaatcaccaccagcgcctgggtagacatcgaagagatcacccgtaacaccgttcgcgaaattggctatgtgcattccgacatgggctttgacgctaactcctgtgcggttctgagcgctatcggcaaacagtctcctgacatcaaccagggcgttgaccgtgccgatccgctggaacagggcgcgggtgaccagggtctgatgtttggctacgcaactaatgaaaccgacgtgctgatgccagcacctatcacctatgcacaccgtctggtacagcgtcaggctgaagtgcgtaaaaacggcactctgccgtggctgcgcccggacgcgaaaagccaggtgacttttcagtatgacgacggcaaaatcgttggtatcgatgctgtcgtgctttccactcagcactctgaagagatcgaccagaaatcgctgcaagaagcggtaatggaagagatcatcaagccaattctgcccgctgaatggctgacttctgccaccaaattcttcatcaacccgaccggtcgtttcgttatcggtggcccaatgggtgactgcggtctgactggtcgtaaaattatcgttgatacctacggcggcatggcgcgtcacggtggcggtgcattctctggtaaagatccatcaaaagtggaccgttccgcagcctacgcagcacgttatgtcgcgaaaaacatcgttgctgctggcctggccgatcgttgtgaaattcaggtttcctacgcaatcggcgtggctgaaccgacctccatcatggtagaaactttcggtactgagaaagtgccttctgaacaactgaccctgctggtacgtgagttcttcgacctgcgcccatacggtctgattcagatgctggatctgctgcacccgatctacaaagaaaccgcagcatacggtcactttggtcgtgaacatttcccgtgggaaaaaaccgacaaagcgcagctgctgcgcgatgctgccggtctgaagtaa

SEQ ID NO: 6199 - DNA, 759 bp, Escherichia coli
  CDS (1)...(759)
gtggggagacgacgcggatttttaactatgcgtatcccccgcatttatcatcctgaaccactgaccagccattctcacatcgcgctttgcgaagatgccgccaaccatatcgggcgcgtactgcgcatggggccggggcaggcgttgcaattgtttgacggtagcaaccaggtctttgacgccgaaattaccagcgccagcaaaaaaagcgtggaagtgaaggtgctggaaggccagatcgacgatcgcgaatctccgctgcatattcacctcggtcaggtgatgtcgcgtggtgaaaaaatggaatttactatccagaaatcgatcgaactcggtgtaagcctcattacgccacttttttctgagcgctgcggcgttaaactggatagtgaacgtctgaacaagaagcttcagcagtggcagaagattgcaattgctgcctgtgagcagtgtggtcgtaaccgggtgccggaaatccgtccagcgatggatctggaagcctggtgtgcagagcaggatgaaggactgaaactgaatcttcacccgcgcgccagtaacagcatcaatacgttgccgttaccggttgaacgcgtccgcctgctgattggcccggaaggcggtttatcggcagatgaaattgccatgactgcccgctatcaatttactgatatcctgttgggacctcgcgttttgcgtacagagacaactgcgctcaccgccattaccgcgctacaagtacgatttggcgatttgggctaa

SEQ ID NO: 6200 - DNA, 705 bp, Escherichia coli
  CDS (1)...(705)
atgaacgatattgcgcataacctggcacaggtccgggacaaaatctcagcggctgcaacgcgttgcggccgttctccagaagaaattacgctgcttgcagtcagtaaaacaaaacctgcgagcgccatcgcagaagccattgatgccgggcagcgtcaatttggtgaaaactacgttcaggaaggggtagataaaattcgccactttcaggaactgggcgtaacaggattagaatggcattttattggcccgttgcagtctaataaaagccgcctggtggcagagcatttcgactggtgtcataccatcgaccgtttgcgcatcgctacccgtctcaacgaccagcgcccggcagaacttccccctcttaacgttctgattcaaattaacattagtgatgaaaacagtaagtccgggattcaactggctgaactggacgagctggcagctgcggtcgctgaactaccgcgtttacgtctgcgcgggttgatggcaatccctgcgcctgagtcagaatatgtaaggcagtttgaagttgcacgccaaatggctgtagcatttgccggactgaaaacgcgctacccgcatatcgacacgctctctctgggaatgtcggacgatatggaagccgccattgcggcaggtagcacgatggttcgtatcggcactgcaatttttggtgcgcgtgattactctaaaaaataa

SEQ ID NO: 6201 - DNA, 594 bp, Escherichia coli
  CDS (1)...(594)
atgcaaaaagttgtcctcgcaaccggcaatgtcggtaaagtgcgtgagctggcgtcgctgcttagcgacttcggtcttgatatcgtggcccaaacagacctcggcgttgattccgctgaagaaaccggcctgacctttatcgaaaacgcgattctgaaagcgcgccatgcggcaaaagtgaccgctttaccggcaattgccgacgactctggtctggcggtagatgtgcttggcggcgcgccgggcatttactccgcgcgttattccggtgaagacgcgaccgatcaaaagaatctgcaaaaactgctggaaacaatgaaagacgtaccggacgaccaacgtcaggcgcgtttccactgcgtgctggtatatctgcgtcacgcggaagatcccactccgctggtatgccacggtagctggccgggcgtgattactcgtgaaccagcgggcactggtggctttggttatgatccaatcttcttcgtaccttccgaagggaaaaccgccgccgaactgacccgcgaagaaaagagcgccatttcccaccgtggtcaggcgttgaaactgctgctggacgctttacgtaatggttaa

SEQ ID NO: 6202 - DNA, 885 bp, Escherichia coli
  CDS (1)...(885)
atgtctcatttaaaagacccgaccacgcagtattacactggtgaatatcccaaacagaaacaaccgacgccaggcatccaggcgaagatgacaccggtaccggattgcggcgagaaaacctatgttggtagcggtcgcctgaaagatcgtaaagcactggtgacagggggcgattccggaataggtcgcgctgccgccatcgcttacgcgcgtgaaggggctgacgtggcgatcagttatcttcccgtggaagaagaagacgctcaggatgtgaaaaagatcattgaagaatgcggacgcaaagccgttctgctgccaggcgatttaagcgatgagaaatttgcccgttcgctggttcacgaagcgcacaaggcgttaggcgggctggatattatggcgctggtcgccgggaaacaggttgccattccggatattgcagacctcaccagcgaacagtttcaaaagacctttgccattaacgttttcgcgctgttctggctaacccaggaagcgatccccctgctaccgaaaggtgcaagtatcatcaccacttcgtcaatccaggcataccagccaagtccgcatttactggactatgcggctacgaaggcggcgattctgaactacagccgtggcttggcaaaacaggtcgcggagaaaggtattcgggtgaatattgtcgcgccaggcccgatctggacagcactgcaaatttccggcggacaaacgcaggataagatcccgcagtttggtcagcaaacgccgatgaaacgtgcggggcaaccggcggaactggcccctgtatatgtttatctggcaagtcaggagtcgagctacgtcaccgcagaagtgcacggcgtgtgcggcggcgagcatttaggttaa

SEQ ID NO: 6203 - DNA, 711 bp, Escherichia coli
  CDS (1)...(711)
gtgggttatcgctcgattgataccgccgcggcctacaagaacgaagaaggtgtcggcaaagccctgaaaaatgcctcagtcaacagagaagaactgttcatcaccactaagctgtggaacgacgaccacaagcgcccccgcgaagccctgctcgacagcctgaaaaaactccagcttgattatatcgacctctacttaatgcactggcccgttcccgctatcgaccattatgtcgaagcatggaaaggcatgatcgaattgcaaaaagagggattaatcaaaagcatcggcgtgtgcaacttccagatccatcacctgcaacgcctgattgatgaaactggcgtgacgcctgtgataaaccagatcgaacttcatccgctgatgcaacaacgccagctacacgcctggaacgcgacacacaaaatccagaccgaatcctggagcccattagcgcaaggagggaaaggcgttttcgatcagaaagtcattcgcgatctggcagataaatacggcaaaaccccggcgcagattgttatccgctggcatctggatagcggcctggtggtgatcccgaaatcggtcacaccttcacgtattgccgaaaactttgatgtctgggatttccgtctcgacaaagacgaactcggcgaaattgcaaaactcgatcagggcaagcgtctcggtcccgatcctgaccagttcggcggctaa

SEQ ID NO: 6204 - DNA, 1434 bp, Escherichia coli
  CDS (1)...(1434)
atgaaagtaacgctgccagagtttgaacgtgcaggagtgatggtggttggtgatgtgatgctggatcgttactggtacggccccaccagtcgtatctcgccggaagcgccggtgcccgtggttaaagtgaataccatcgaagaacgtccgggcggcgcggctaacgtggcgatgaatatcgcttctctcggtgctaatgcacgcctggtcgggttgacgggcattgacgatgcagcgcgcgcgctgagtaaatctctggccgacgtcaacgtcaaatgcgacttcgtttctgtaccgacgcatccgaccattaccaaattacgggtactttcccgcaaccaacagctgatccgtctggattttgaagaaggtttcgaaggtgttgatccgcagccgctgcacgagcggattaatcaggcgctgagttcgattggcgcgctggtgctttctgactacgccaaaggtgcgctggcaagcgtacagcagatgatccaactggcgcgtaaagcgggtgttccggtgctgattgatccaaaaggtaccgattttgagcgctaccgcggcgctacgctgttaacgccgaatctctcggaatttgaagctgttgtcggtaaatgtaagaccgaagaagagattgttgagcgcggcatgaaactgattgccgattacgaactctcggctctgttagtgacccgttccgaacagggtatgtcgctgctgcaaccgggtaaagcgccgctgcatatgccaacccaagcgcaggaagtgtatgacgttaccggtgcgggcgacacggtgattggcgtcctggcggcaacgctggcagcgggtaattcgctggaagaagcctgcttctttgccaatgcggcggctggcgtggtggtcggcaaactgggaacctccacggtttcgccgatcgagctggaaaatgctgtacgtggacgtgcagatacaggctttggcgtgatgaccgaagaggaactgaagctggccgtagcggcagcgcgtaaacgtggtgaaaaagtggtgatgaccaacggtgtctttgacatcctgcacgccgggcacgtctcttatctggcaaatgcccgcaagctgggtgaccgcttgattgttgccgtcaacagcgatgcctccaccaaacggctgaaaggggattcccgcccggtaaacccactcgaacagcgtatgattgtgctgggcgcactggaagcggtcgactgggtagtgtcgtttgaagaggacacgccgcagcgcttgatcgccgggatcttgccagatctgctggtgaaaggcggcgactataaaccagaagagattgccgggagtaaagaagtctgggccaacggtggcgaagtgttggtgctcaactttgaagacggttgctcgacgaccaacatcatcaagaagatccaacaggataaaaaaggctaa

SEQ ID NO: 6205 - DNA, 1302 bp, Escherichia coli
  CDS (1)...(1302)
atggctcaggaaatcgaattaaagtttattgttaatcacagtgccgttgaggcgttgcgtgaccatctcaatacgctgggcggcgagcaccatgaccccgtgcagttgctgaatatttactacgaaacgccggataactggctgcgtgggcacgatatgggcttacgtattcgtggcgaaaacggtcgctatgagatgaccatgaaagttgcaggaagagtgacaggcggcttacatcagcgcccggaatataacgtggcgttgagcgaaccgacgctcgacctggcgcagttaccgacggaagtctggccgaacggcgaattgcccgccgatctcgcctcccgcgtgcagccgctgttcagcaccgatttttatcgcgaaaaatggctggtggcggtcgatggtagccaaattgaaatcgccctcgaccagggggaagtgaaagcgggtgaatttgctgaacctatctgtgagctggaactggaactgcttagcggcgacacgcgcgcggtgctgaaactggcgaaccaactggtatcgcaaaccggattacgccagggcagcctgagcaaagcggcgcgtggctatcatctggcgcagggcaatccggcgcgtgaaatcaaaccgaccaccattttgcatgttgcggcaaaagccgatgtggaacaggggctggaagcggcgctcgagctggcgttagcgcaatggcagtatcatgaagaactgtgggtacgcggcaacgatgcggcgaaagaacaggtgctggcagccattagcctggtccgtcatacgctgatgctgttcggtggtattgtgccgcgtaaagcgagcactcacttacgtgatctgctgactcaatgcgaggcgaccattgcttctgcggtgtctgccgtgacggcggtctactctaccgaaacggcaatggcgaagctggcgttgaccgaatggttggtaagcaaagcatggcagccatttttagatgccaaagcgcagggcaaaatcagcgactccttcaaacgctttgccgatatccatctttcccgccatgccgctgaactgaaaagcgttttctgccagccgttaggcgatcgctaccgtgaccagttgccacgcctgacgcgtgatattgactcaatactgttgctggcgggttactatgatcctgtcgtcgcgcaagcctggctggagaactggcaggggctgcatcacgctattgcgaccgggcaacgcatcgaaattgaacatttccgtaatgaggcaaacaatcaggaaccgttctggttgcacagcggaaaacgttaa

SEQ ID NO: 6206 - DNA, 618 bp, Escherichia coli
  CDS (1)...(618)
atgagtgcaatcgcgcctggaatgatcctcatcgcgtacctctgcggctccatttccagtgccattctggtttgccgcttgtgtgggctgcccgatccgcgaaccagcggctccggcaatccaggcgcaaccaatgtgttacgtatcggtggcaagggagcagccgtagcagtactgattttcgacgttctgaaaggaatgttgcccgtctggggcgcgtatgaattaggtgtcagccccttctggctaggcttaattgccatcgccgcctgtcttggacacatctggcccgttttcttcggatttaaaggaggaaaaggcgttgctaccgcttttggtgccatcgcacccattggctgggatctcaccggagtaatggcgggaacctggttactgaccgtgctattgagcggatactcgtcgctgggagcgattgtcagtgcactgattgctccgttttatgtctggtggtttaagccacaattcaccttcccggtttcgatgctctcttgcctgatcctgctgcgtcatcatgacaacatccaacgtctgtggcgtcgtcaggagacaaaaatctggacgaaattcaaaagaaagcgcgaaaaggatcccgagtga

SEQ ID NO: 6207 - DNA, 1014 bp, Escherichia coli
  CDS (1)...(1014)
atgcgtgtactgggtattgaaacttcctgcgatgaaaccggcatcgccatttacgacgatgaaaaaggtttgttagccaaccaattgtatagtcaggtgaaattgcacgctgactacggcggcgtcgtgcctgaactggcctcccgcgatcatgtgcgtaaaaccgtaccgttgatccaggcggcgctaaaggagtctggtttaacggcaaaagacattgatgctgtggcctataccgcaggccctggattagtcggcgcgctactggttggcgcgaccgtggggcgttctctggcgtttgcctgggacgttccggcgatccctgtacaccatatggaagggcatctgttagcgccgatgctggaagataacccgccggaatttccgtttgttgcgctgcttgtttccggcggtcatacgcagttaatcagcgtgactggcattggtcagtacgagctgctcggcgagtctatcgatgatgccgccggggaagcgtttgataaaaccgcgaagctgctggggctggattatcctggcgggccgttactgtcgaaaatggcggctcagggtactgccgggcgctttgtcttcccgcgtccgatgaccgaccgtccggggctggatttcagcttctccggcctgaaaaccttcgcggcaaataccattcgtgacaacggcaccgacgaccagacgcgtgctgatatcgcccgcgcctttgaagatgcggtggtcgatacgctgatgattaagtgcaagcgggcgctggatcagacgggctttaagcgactggtcatggcgggcggcgtgagtgctaaccgtacgttacgggcgaagctggctgaaatgatgaaaaaacgccgcggcgaagtgttctacgcgcgtccggaattttgtactgataacggcgcgatgatcgcctatgccggaatggtgcggtttaaagcaggcgcgacggcggatctcggcgttagcgtgcgtccgcgctggccgctggcggagttaccggctgcgtaa

SEQ ID NO: 6208 - DNA, 216 bp, Escherichia coli
  CDS (1)...(216)
atgccggtaattaaagtacgtgaaaacgagccgttcgacgtagctctgcgtcgcttcaagcgttcctgcgaaaaagcaggtgttctggcggaagttcgtcgtcgtgagttctatgaaaaaccgactaccgaacgtaagcgcgctaaagcttctgcagtgaaacgtcacgcgaagaaactggctcgcgaaaacgcacgccgcactcgtctgtactaa

SEQ ID NO: 6209 - DNA, 2019 bp, Escherichia coli
  CDS (1)...(2019)
atgagctacccgtcgctgttcgccccgctggatttaggttttaccacgttaaaaaaccgcgtgttgatgggctcaatgcacaccgggctggaggaatacccggacggtgccgagcggctggcagcgttttatgccgaacgcgcccgtcacggcgtggcgctgattgtcagcggcggcattgcaccagatttaacaggcgttggcatggaaggtggcgcaatgctcaacgacgccagccagatcccacaccatcgcaccattaccgaagcggtacatcaggaaggcggcaaaatagccctgcaaattttgcataccgggcgctacagctaccaaccgcatctggtcgccccgtccgcattgcaggcccccatcaaccgtttcgtgccccatgagttaagccatgaagagatcctgcaactgatcgacaatttcgcccgctgcgcgcaactggcgcgggaggcaggatacgacggtgtagaggtgatgggttccgaagggtatttgatcaacgaatttctgacgctgcgcaccaatcagcgtagtgaccagtggggcggcgattaccgcaaccggatgcgatttgccgtagaagtagtgcgtgcggtgcgcgaacgcgtcggcaacgacttcattattatctaccgactgtcgatgctcgacctggtcgaagacggcgggacttttgccgaaacggtagagctggcgcaggccattgaagcggcgggcgcgaccattatcaacaccggcattggctggcatgaagcacgtattccgaccattgccacgcccgtgccgcgcggcgcatttagctgggtcacgcgcaaactgaaaggccacgtctcgctgccgctggtaaccaccaaccggattaacgatccgcaggttgccgacgatattctctcgcgcggcgatgccgatatggtatcgatggcgcgaccgtttcttgctgatgcggagctgctgtcaaaagcgcaatcgggacgagccgatgagatcaacacttgtattggctgcaatcaggcctgtctcgatcaaatcttcgttggcaaagtcacctcgtgcctggtgaatcctcgcgcctgccacgaaaccaaaatgccaatccttcccgccgtgcagaaaaaaaatctggcggtggtcggtgcgggacctgctgggctggcgtttgccattaacgcggcggcgcgtgggcatcaggtaacattgtttgacgctcatagcgagattggcgggcagtttaatatcgccaaacagatccccggcaaagaggagttttacgaaacgctgcgctattaccgccggatgatcgaagtgacgggcgtgacgctaaaactcaatcacaccgtgacggcggatcagttacaggctttcgatgaaacgatcctcgccagtgggatcgtgccgcgcactccgcccatcgacgggatcgatcatccgaaggtattgagttatctcgatgtactgcgcgacaaagcgccggttggcaacaaagttgccatcatcggttgtggcgggattggttttgatacggcgatgtatttaagtcagccgggcgaatccaccagccagaatatcgccgggttctgtaatgaatgggggatcgacagtagcctacaacaggctggtggcttaagcccgcagggaatgcagatcccccgtagcccacggcagattgtgatgctccagcgcaaagccagcaaaccaggacaggggttaggcaaaaccaccggctggatccatcgcaccaccctgctctcgcggggtgtgaaaatgatcccaggcgtaagttatcagaagattgacgatgacgggctgcatgtggtgatcaacggcgaaacgcaggtattagcagtggacaatgtggtgatctgcgcagggcaagagccaaaccgcgcgctggcgcaaccgctgattgatagcgggaaaacggtgcatttaattggcggctgcgatgtggctatggagctggacgcacgacgggcaattgcccagggaacacggctggcgctggagatttaa

SEQ ID NO: 6210 - DNA, 405 bp, Escherichia coli
  CDS (1)...(405)
atggcggacactcatcacgcacaagggcccggtaaaagcgttctgggcatcgggcagcgaattgtttctatcatggttgaaatggtagagacacgtctgcggctggcggtggtggagctggaagaggaaaaagcgaatctctttcaacttttactgatgctgggcctgacgatgcttttcgctgcatttggtcttatgagcctgatggtgctaattatttgggcggttgacccgcaatatcgcctgaatgcgatgattgccaccaccgtggtgttgctgctactggcactgattggcggtatctggacgctacgtaaatcgcgtaagtctacgttgctgcgccatacacgccatgagttagcaaacgatcggcagctgctcgaggaggagtcccgtgagcagtaa

SEQ ID NO: 6211 - DNA, 771 bp, Escherichia coli
  CDS (1)...(771)
atgaataacgatgttttcccgaataaattcaaagccgcactggctgcgaaacaggtacaaattggttgctggtcagcactctctaacccgattagcactgaagttcttggtttggctgggtttgactggctggtgctggatggcgaacatgcgccaaacgatatctccacgtttattccgcagttaatggccttgaaaggcagcgccagcgcgccagtagtgcgagtgccgaccaacgagccggtaattattaagcgtcttctggatatcggtttctataacttcctgattccttttgtagaaacaaaagaggaagcagagctggcggtggcatcaacccgttacccaccggaaggcattcgcggcgtctccgtttctcaccgcgccaatatgtttggcaccgtggcggattatttcgctcagtcgaacaagaacatcactattctggtccagatagaaagtcagcagggcgtagataacgtcgatgccattgccgctaccgaaggcgtagacggcatcttcgtcggccccagcgatctggccgcggcattaggccatctcggcaatgcatcacacccggatgtacaaaaagcaattcagcacatttttaaccgtgccagcgcgcacggcaaacccagcggtatcctcgcgccggtcgaagccgatgcgcgtcgttatctggaatggggcgcgacgtttgtggctgtcggcagcgatctcggcgtcttccgctctgccactcagaaactggctgatacctttaaaaaataa

SEQ ID NO: 6212 - DNA, 861 bp, Escherichia coli
  CDS (1)...(861)
atgaaacaacaccaatcggcggataattctcagggccagctttacattgtaccgacgccaatcggcaatctggcggatatcacccagcgtgcgttagaggtattacaggccgttgatctgattgccgccgaggatactcgtcacaccggtttattgctgcaacattttgggattaatgcccggttgtttgcgctgcacgaccataacgaacaacaaaaagctgaaacgctgctggcgaagctgcaagaggggcaaaacattgcgctggtttccgatgccggaacgccgctaattaacgatcctggctaccatctggtgcgtacctgccgtgaagcggggatccgcgtggtgccgctacccgggccgtgtgctgctatcactgcgttaagcgcagcgggtttaccctctgaccgtttctgttacgaaggctttttacctgccaaatcaaaaggccgccgtgatgcgctaaaagccattgaagcggagccgcgcacgctgattttttatgaatctacccaccgtctgttagatagcctggaagatatcgttgcggtattaggcgaatcccgctacgtggttctggcgcgtgagctgaccaaaacctgggaaaccattcacggcgcgcccgttggcgagctgctggcgtgggtaaaggaagatgaaaaccgtcgcaaaggcgaaatggtgctgattgtcgaaggtcataaagcacaggaagaagacttacccgccgatgccctgcgcacgctggcgctgctacaggcagaactgccgctgaaaaaagcggcggcgctggccgcagaaattcacggcgtgaagaaaaatgcgctgtataagtatgcgctggagcagcaggggtaa

SEQ ID NO: 6213 - DNA, 1008 bp, Escherichia coli
  CDS (1)...(1008)
atgactgataaaaccattgcgttttcgctactcgatctggcccccattcccgaaggttcttcagcgcgagaagcattctcccactctctcgatctcgcccgtctggctgaaaagcgcggctatcatcgctactggctggcagaacaccacaatatgactggcattgccagtgctgccacgtcggtattgatcggctatctggcggcgaataccaccacgctgcatctggggtctggcggcgtgatgttgcctaaccactcaccgttggtcattgcagaacagttcggcacgcttaatacactctatccggggcgaatcgatttggggctgggtcgtgctccgggtagtgaccaacggacaatgatggcgctacgtcgtcatatgagcggcgatattgataatttcccccgcgatgtggcggagctggtggactggtttgacgcccgcgatcccaatccgcatgtgcgcccggtaccaggctatggcgagaaaatccccgtgtggttgttaggctccagcctttacagcgcgcaactggcggcgcagcttggtctgccgtttgcgtttgcctcacacttcgcgccggatatgctgttccaggcgctgcatctttatcgcagcaacttcaaaccgtcagcacggctggaaaaaccatacgcgatggtgtgcatcaatattatcgccgccgacagcaaccgcgacgctgaatttctgtttacctcaatgcagcaagcctttgtgaagctgcgccgtggcgaaaccgggcaactgccgccgccgattcaaaatatggatcagttctggtcaccgtctgagcagtatggcgtgcagcaggcgctgagtatgtcgttggtaggtgataaagcgaaagtgcgtcatggcttgcagtcgatcctgcgcgaaaccgacgccgatgagattatggtcaacgggcagattttcgaccaccaggcgcggctgcattcgtttgagctggcgatggatgttaaggaagagttgttgggatag

SEQ ID NO: 6214 - DNA, 1941 bp, Escherichia coli
  CDS (1)...(1941)
atgatgagttatgtagactggccgccattaattttgaggcacacgtactacatggctgaattcgaaaccacttttgcagatctgggcctgaaggctcctatccttgaagcccttaacgatctgggttacgaaaaaccatctccaattcaggcagagtgtattccacatctgctgaatggccgcgacgttctgggtatggcccagacggggagcggaaaaactgcagcattctctttacctctgttgcagaatcttgatcctgagctgaaagcaccacagattctggtgctggcaccgacccgcgaactggcggtacaggttgctgaagcaatgacggatttctctaaacacatgcgcggcgtaaatgtggttgctctgtacggcggccagcgttatgacgtgcaattacgcgccctgcgtcaggggccgcagatcgttgtcggtactccgggccgtctgctggaccacctgaaacgtggcactctggacctctctaaactgagcggtctggttctggatgaagctgacgaaatgctgcgcatgggcttcatcgaagacgttgaaaccattatggcgcagatcccggaaggtcatcagaccgctctgttctctgcaaccatgccggaagcgattcgtcgcattacccgccgctttatgaaagagccgcaggaagtgcgcattcagtccagcgtgactacccgtcctgacatcagccagagctactggactgtctggggtatgcgcaaaaacgaagcactggtacgtttcctggaagcggaagattttgatgcggcgattatcttcgttcgtaccaaaaacgcgactctggaagtggctgaagctcttgagcgtaacggctacaacagcgccgcgctgaacggtgacatgaaccaggcgctgcgtgaacagacactggaacgcctgaaagatggtcgtctggacatcctgattgcgaccgacgttgcagcccgtggcctggacgttgagcgtatcagcctggtagttaactacgatatcccgatggattctgagtcttacgttcaccgtatcggtcgtaccggtcgtgcgggtcgtgctggccgcgcgctgctgttcgttgagaaccgcgagcgtcgtctgctgcgcaacattgaacgtactatgaagctgactattccggaagtagaactgccgaacgcagaactgctaggcaaacgccgtctggaaaaattcgccgctaaagtacagcagcagctggaaagcagcgatctggatcaataccgcgcactgctgagcaaaattcagccgactgctgaaggtgaagagctggatctcgaaactctggctgcggcactgctgaaaatggcacagggtgaacgtactctgatcgtaccgccagatgcgccgatgcgtccgaaacgtgaattccgtgaccgtgatgaccgtggtccgcgcgatcgtaacgaccgtggcccgcgtggtgaccgtgaagatcgtccgcgtcgtgaacgtcgtgatgttggcgatatgcagctgtaccgcattgaagtgggccgcgatgatggtgttgaagttcgtcatatcgttggtgcgattgctaacgaaggcgacatcagcagccgttacattggtaacatcaagctgtttgcttctcactccaccatcgaactgccgaaaggtatgccgggtgaagtgctgcaacactttacgcgcactcgcattctcaacaagccgatgaacatgcagttactgggcgatgcacagccgcatactggcggtgagcgtcgtggcggtggtcgtggtttcggtggcgaacgtcgtgaaggcggtcgtaacttcagcggtgaacgccgtgaaggtggccgtggtgatggtcgtcgttttagcggcgaacgtcgtgaaggccgcgctccgcgtcgtgatgattctaccggtcgtcgtcgtttcggtggtgatgcgtaa

SEQ ID NO: 6215 - DNA, 2205 bp, Escherichia coli
  CDS (1)...(2205)
atgcgcagaagatcgggtattaacaccagtgccgtaaggtactgtctaagaaagagaaaggatattacattgcttaatccgatcgttcgtaaattccagtacggccaacacaccgtgactctggaaaccggcatgatggctcgtcaggctactgccgctgttatggttagcatggatgacaccgcggtattcgttaccgttgttggccagaaaaaagccaaaccaggtcaggacttcttcccactgaccgttaactatcaggagcgtacctacgctgctggtcgtatcccgggtagcttcttccgtcgtgaaggccgcccaagcgaaggcgaaaccctgatcgcgcgtctgattgaccgcccgattcgcccgctgttcccggaaggcttcgtcaacgaagttcaggttatcgccaccgtggtttctgttaacccgcaagttaacccggatatcgtcgcgatgattggtgcttccgcagcgctgtctctgtctggtattccgttcaatggcccgattggtgctgcccgcgtaggttacatcaatgaccagtacgtactgaacccgactcaggacgagctgaaagagagcaaactggatctggttgttgccggtactgaagccgctgtactgatggttgaatctgaagctcaactgctgagcgaagaccagatgctgggcgcagtagtgttcggtcatgaacaacagcaggttgttattcagaacatcaatgaactggtgaaagaagccggtaaaccgcgttgggactggcagccggagccggtaaacgaagcgctaaacgcgcgcgttgctgcactggctgaagctcgcctgagcgatgcttaccgcatcaccgacaaacaagagcgttatgcgcaggttgatgtcatcaaatctgaaaccatcgcgacgctgcttgctgaagacgaaaccctggacgaaaacgaactgggtgaaattctgcacgcgatcgagaaaaacgttgttcgtagccgcgtactggcaggcgaaccgcgtatcgacggtcgtgaaaaagatatgatccgtggtctggatgtgcgtactggcgtgctgccgcgtactcacggttctgcgctgttcacccgtggtgaaacgcaggcgctggttaccgcaacgctgggtactgctcgtgacgcgcaggttcttgatgaactgatgggcgaacgtaccgataccttcctgttccactacaacttccctccgtactccgtaggcgaaaccggcatggtcggttctccgaagcgtcgtgaaattggtcacggtcgtctggcgaagcgcggcgtgctggcagtcatgccggatatggacaaattcccgtacaccgtacgtgttgtgtctgaaatcactgaatccaacggttcctcttctatggcttccgtgtgcggcgcgtctctggcgctgatggacgcaggtgtgccgatcaaagctgccgttgcgggtatcgcaatgggtctggtgaaagaaggcgacaactacgttgtactgtctgacattttgggcgacgaagatcacctgggcgatatggacttcaaagttgcaggttcccgcgacggtatctctgcactgcagatggatatcaaaattgaaggtatcaccaaagagatcatgcaggttgcgctgaaccaggctaaaggtgcgcgtctgcatatcctgggcgtaatggaacaggcgatcaacgcgccgcgtggcgatatctctgagttcgcaccgcgtatccataccatcaagatcaacccggacaagatcaaagatgttatcggtaaaggcggttctgtaatccgtgctctgaccgaagaaactggcaccaccatcgaaatcgaagatgacggtactgtgaagattgcagcgaccgacggcgagaaagcgaaacatgctattcgtcgtatcgaagagatcactgcagaaatcgaagtgggccgcgtctacactggtaaagtgacccgtatcgttgactttggcgcatttgttgccatcggcggcggtaaagaaggtctggtccacatctctcaaatcgctgacaaacgcgttgagaaagtgaccgattacctgcagatgggtcaggaagtaccggtgaaagttctggaagttgatcgccagggccgtatccgtctgagcattaaagaagcgactgagcagtctcaacctgctgcagcaccggaagctccggctgctgaacagggcgagtaa

SEQ ID NO: 6216 - DNA, 270 bp, Escherichia coli
  CDS (1)...(270)
atgtctctaagtactgaagcaacagctaaaatcgtttctgagtttggtcgtgacgcaaacgacaccggttctaccgaagttcaggtagcactgctgactgcacagatcaaccacctgcagggccactttgcagagcacaaaaaagatcaccacagccgtcgtggtctgctgcgcatggtttctcagcgtcgtaaactgctcgactacctgaaacgtaaagacgtagcacgttacacccagctcatcgagcgcctgggtctgcgtcgctaa

SEQ ID NO: 6217 - DNA, 2673 bp, Escherichia coli
  CDS (1)...(2673)
atgacagatgtaacgattaaaacgctggccgcagagcgacagacctccgtggaacgcctggtacagcaatttgctgatgcaggtatccggaagtctgctgacgactctgtgtctgcacaagagaaacagactttgattgaccacctgaatcagaaaaattcaggcccggacaaattgacgctgcaacgtaaaacacgcagcacccttaacattcctggtaccggtggaaaaagcaaatcggtacaaatcgaagtccgcaagaaacgcacctttgtgaaacgcgatccgcaagaggctgaacgccttgcagcggaagagcaagcgcagcgtgaagcggaagagcaagcccgtcgtgaggcagaagaatcggctaaacgcgaggcgcaacaaaaagctgaacgtgaggccgcagaacaagctaagcgtgaagctgctgaacaagcgaaacgtgaagctgcggaaaaagacaaagtgagcaatcaacaagacgatatgactaaaaacgcccaggctgaaaaagcccgccgtgagcaggaagctgcagagctcaagcgtaaagctgaagaagaagcgcgtcgtaaactcgaagaagaagcacgtcgcgttgctgaagaagcacgtcgtatggcggaagaaaacaaatggactgataacgcggaaccgactgaagattccagcgattatcacgtcactacttctcaacatgctcgccaggcagaagacgaaagcgatcgtgaagtcgaaggcggccgtggccgtggtcgtaacgcgaaagcagcgcgtccgaagaaaggcaacaaacacgctgaatcaaaagctgatcgtgaagaagcacgcgcagcagtacgtggcggtaaaggcggaaaacgtaaaggttcttcgctgcagcaaggcttccagaagcctgctcaggccgttaaccgtgacgttgtgatcggcgaaactatcaccgttggcgaactggcgaacaagatggcggttaaaggctctcaggtcatcaaagcgatgatgaaactgggcgcaatggcaaccatcaaccaggttatcgatcaggaaaccgcacagctggttgctgaagagatgggccataaagttatcctgcgtcgtgaaaacgagctggaagaggcggtaatgagcgaccgtgacacgggtgctgcggctgaaccgcgcgcgccggttgtgaccatcatgggtcacgttgaccacggtaaaacctctctgctggactacattcgttcaacgaaagtggcctctggcgaagcgggcggcattacccagcacattggtgcataccacgttgaaactgaaaacggcatgatcaccttcctggacaccccggggcacgccgcgtttacttcaatgcgtgctcgtggtgcgcaggcaacggacatcgtagtcctggttgttgctgccgacgacggtgtgatgccgcagaccatcgaagcaatccagcacgcgaaagcggcgcaggtaccggtggtggttgcagtgaacaagatcgataaaccagaagctgatccggatcgcgttaagaacgaactctcccagtacggcatcctgccggaagagtggggcggtgaaagccagttcgtacacgtatctgcgaaagcgggtaccggtatcgatgaactgctggacgctatcctgctgcaggcggaagttctggagctgaaagcggtacgtaaaggtatggcgagcggtgcggttatcgaatccttcctcgataaaggtcgtggtccggttgctaccgttctggtacgtgaaggtactctgcacaagggcgatatcgttctgtgtggcttcgaatacggtcgtgttcgtgcgatgcgtaacgaactgggtcaggaagtgctggaagcgggtccgtccattccggtggaaatcctcggcctgtccggcgtaccggctgcgggtgatgaagttaccgttgtacgtgacgagaagaaagcgcgtgaagttgcactctatcgtcagggtaaattccgcgaagttaaactggcgcgtcagcagaaatctaaactcgagaacatgttcgccaacatgaccgaaggcgaagttcacgaagtgaatatcgtcctgaaggcagacgtacagggttctgtcgaagcgatctccgactccttgctgaaactgtctactgacgaagttaaagtgaagatcatcggttctggcgtaggtggtatcaccgaaaccgacgccaccctggctgcggcgtccaacgccatcctggttggctttaacgtacgtgctgatgcctctgcacgtaaagtgattgaagcggaaagcctggatctgcgttactactccgtcatctataacctgattgacgaagtgaaagcggcgatgagcggtatgctgtctccggaactgaaacagcagattatcggtctggcggaagttcgtgacgtgttcaaatcgccgaaatttggtgccatcgcaggctgtatggttaccgaaggtgtggttaaacgtcacaacccgatccgcgttctgcgtgacaacgtggttatctacgaaggcgagctggagtccctgcgccgcttcaaagatgacgttaacgaagtccgtaacggtatggaatgtggtatcggcgttaagaactacaacgacgtccgcactggcgatgtgatcgaagtattcgaaatcatcgagatccaacgtaccattgcttaa

SEQ ID NO: 6218 - DNA, 1488 bp, Escherichia coli
  CDS (1)...(1488)
atgaacaaagaaattttggctgtagttgaagccgtatccaatgaaaaggcgctacctcgcgagaagattttcgaagcattggaaagcgcgctggcgacagcaacaaagaaaaaatatgaacaagagatcgacgtccgcgtacagatcgatcgcaaaagcggtgattttgacactttccgtcgctggttagttgttgatgaagtcacccagccgaccaaggaaatcacccttgaagccgcacgttatgaagatgaaagcctgaacctgggcgattacgttgaagatcagattgagtctgttacctttgaccgtatcactacccagacggcaaaacaggttatcgtgcagaaagtgcgtgaagccgaacgtgcgatggtggttgatcagttccgtgaacacgaaggtgaaatcatcaccggcgtggtgaaaaaagtaaaccgcgacaacatctctctggatctgggcaacaacgctgaagccgtgatcctgcgcgaagatatgctgccgcgtgaaaacttccgccctggcgaccgcgttcgtggcgtgctctattccgttcgcccggaagcgcgtggcgcgcaactgttcgtcactcgttccaagccggaaatgctgatcgaactgttccgtattgaagtgccagaaatcggcgaagaagtgattgaaattaaagcagcggctcgcgatccgggttctcgtgcgaaaatcgcggtgaaaaccaacgataaacgtatcgatccggtaggtgcttgcgtaggtatgcgtggcgcgcgtgttcaggcggtgtctactgaactgggtggcgagcgtatcgatatcgtcctgtgggatgataacccggcgcagttcgtgattaacgcaatggcaccggcagacgttgcttctatcgtggtggatgaagataaacacaccatggatatcgccgttgaagccggtaacctggcgcaggcgattggccgtaacggtcagaacgtgcgtctggcttcgcagctgagcggttgggaactcaacgtgatgaccgttgacgacctgcaggctaagcatcaggcggaagcgcacgcagcgatcgacaccttcaccaaatatctcgacatcgacgaagacttcgcgactgttctggtagaagaaggcttctcgacgctggaagaattggcctatgtgccgatgaaagagctgttggaaatcgaaggccttgatgagccgaccgttgaagcactgcgcgagcgtgctaaaaatgcactggccaccattgcacaggcccaggaagaaagcctcggtgataacaaaccggctgacgatctgctgaaccttgaaggggtagatcgtgatttggcattcaaactggccgcccgtggcgtttgtacgctggaagatctcgccgaacagggcattgatgatctggctgatatcgaagggttgaccgacgaaaaagccggagcactgattatggctgcccgtaatatttgctggttcggtgacgaagcgtaa

SEQ ID NO: 6219 - DNA, 1338 bp, Escherichia coli
  CDS (1)...(1338)
atgagtaatcgtaaatatttcggtaccgatgggattcgtggtcgtgtaggggatgcgccgatcacacctgattttgtgcttaagctgggttgggccgcgggtaaagtgctggcgcgccacggctcccgtaagattattattggtaaagacacgcgtatttctggctatatgctggagtcagcactggaagcgggtctggcggcagcgggcctttccgcactcttcactggcccgatgccaacaccggccgtggcttatctgacgcgtaccttccgcgcagaggccggaattgtgatatctgcatcgcataacccgttctacgataatggcattaaattcttctctatcgacggcaccaaactgccggatgcggtagaagaggccatcgaagcggaaatggaaaaggagatcagctgcgttgattcggcagaactgggtaaagccagccgtatcgttgatgccgcgggtcgctatatcgagttttgcaaagccacgttcccgaacgaacttagcctcagtgaactgaagattgtggtggattgtgcaaacggtgcgacttatcacatcgcgccgaacgtgctgcgcgaactgggggcgaacgttatcgctatcggttgtgagccaaacggtgtaaacatcaatgccgaagtgggggctaccgacgttcgcgcgctccaggctcgtgtgctggctgaaaaagcggatctcggtattgccttcgacggcgatggcgatcgcgtgattatggttgaccatgaaggcaataaagtcgatggcgatcagatcatgtatatcatcgcgcgtgaaggtcttcgtcagggccagctgcgtggtggcgctgtgggtacattgatgagcaacatggggcttgaactggcgctgaaacagttaggaattccatttgcgcgcgcgaaagtgggtgaccgctacgtactggaaaaaatgcaggagaaaggctggcgtatcggtgcagagaattccggtcatgtgatcctgctggataaaactactaccggtgacggcatcgttgctggcttgcaggtgctggcggcgatggcacgtaaccatatgagcctgcacgacctttgcagcggcatgaaaatgttcccgcagattctggttaacgtacgttacaccgcaggtagcggcgatccacttgagcatgagtcagttaaagccgtgaccgcagaggttgaagctgcgctgggcaaccgtggacgcgtgttgctgcgtaaatccggcaccgaaccgttaattcgcgtgatggtggaaggcgaagacgaagcgcaggtgactgaatttgcacaccgcatcgccgatgcagtaaaagccgtttaa

SEQ ID NO: 6220 - DNA, 894 bp, Escherichia coli
  CDS (1)...(894)
gtgctccggggttttttcttatcaattcataccagggataacatcatgaaactctttgcccagggtacttcactggaccttagccatcctcacgtaatggggatcctcaacgtcacgcctgattccttttcggatggtggcacgcataactcgctgatagatgcggtgaaacatgcgaatctgatgatcaacgctggcgcgacgatcattgacgttggtggcgagtccacgcgcccaggggcggcggaagttagcgttgaagaagagttgcaacgtgttattcctgtggttgaggcaattgctcaacgcttcgaagtctggatctcagtcgatacatccaaaccagaagtcatccgtgagtcagcgaaagttggcgctcacattattaatgatatccgctccctttccgaacctggcgctctggaggcggctgcagaaaccggtttaccggtttgtctgatgcatatgcagggaaatccaaaaaccatgcaggaagctccgaagtatgacgatgtctttgcagaagtgaatcgctactttattgagcaaatagcacgttgcgagcaggcgggtatcgcaaaagagaaattgttgctcgaccccggattcggtttcggtaaaaatctctcccataactattcattactggcgcgcctggctgaatttcaccatttcaacctgccgctgttggtgggtatgtcacgaaaatcgatgattgggcagctgctgaacgtggggccgtccgagcgcctgagcggtagtctggcctgtgcggtcattgccgcaatgcaaggcgcgcacatcattcgtgttcatgacgtcaaagaaaccgtagaagcgatgcgggtggtggaagccactctgtctgcaaaggaaaacaaacgctatgagtaa

SEQ ID NO: 6221 - DNA, 1935 bp, Escherichia coli
  CDS (1)...(1935)
atggcgaaaaacctaatactctggctggtcattgccgttgtgctgatgtcagtattccagagctttgggcccagcgagtctaatggccgtaaggtggattactctaccttcctacaagaggtcaataacgaccaggttcgtgaagcgcgtatcaacggacgtgaaatcaacgttaccaagaaagatagtaaccgttataccacttacattccggttcaggatccgaaattactggataacctgttgaccaagaacgtcaaggttgtcggtgaaccgcctgaagaaccaagcctgctggcttctatcttcatctcctggttcccgatgctgttgctgattggtgtctggatcttcttcatgcgtcaaatgcagggcggcggtggcaaaggtgccatgtcgtttggtaagagcaaagcgcgcatgctgacggaagatcagatcaaaacgacctttgctgacgttgcgggctgcgacgaagcaaaagaagaagttgctgaactggttgagtatctgcgcgagccgagccgcttccagaaactcggcggtaagatcccgaaaggcgtcttgatggtcggtcctccgggtaccggtaaaacgctgctggcgaaagcgattgcaggcgaagcgaaagttccgttctttactatctccggttctgacttcgtagaaatgttcgtcggtgtgggtgcatcccgtgttcgtgacatgttcgaacaggcgaagaaagcggcaccgtgcatcatctttatcgatgaaatcgacgccgtaggccgccagcgtggcgctggtctgggcggtggtcacgatgaacgtgaacagactctgaaccagatgctggttgagatggatggcttcgaaggtaacgaaggtatcatcgttatcgccgcgactaaccgtccggacgttctcgacccggccctgctgcgtcctggccgtttcgaccgtcaggttgtggtcggcttgccagatgttcgcggtcgtgagcagatcctgaaagttcacatgcgtcgcgtaccattggcacccgatatcgacgcggcaatcattgcccgtggtactcctggtttctccggtgctgacctggcgaacctggtgaacgaagcggcactgttcgctgctcgtggcaacaaacgcgttgtgtcgatggttgagttcgagaaagcgaaagacaaaatcatgatgggtgcggaacgtcgctccatggtgatgacggaagcgcagaaagaatcgacggcttaccacgaagcgggtcatgcgattatcggtcgcctggtgccggaacacgatccggtgcacaaagtgacgattatcccacgcggtcgtgcgctgggtgtgactttcttcttgcctgagggcgacgcaatcagcgccagccgtcagaaactggaaagccagatttctacgctgtacggtggtcgtctggcagaagagatcatctacgggccggaacatgtatctaccggtgcgtccaacgatattaaagttgcgaccaacctggcacgtaacatggtgactcagtggggcttctctgagaaattgggtccactgctgtacgcggaagaagaaggtgaagtgttcctcggccgtagcgtagcgaaagcgaaacatatgtccgatgaaactgcacgtatcatcgaccaggaagtgaaagcactgattgagcgtaactataatcgtgcgcgtcagcttctgaccgacaatatggatattctgcatgcgatgaaagatgctctcatgaaatatgagactatcgacgcaccgcagattgatgacctgatggcacgtcgcgatgtacgtccgccagcgggctgggaagaaccaggcgcttctaacaattctggcgacaatggtagtccaaaggctcctcgtccggttgatgaaccgcgtacgccgaacccgggtaacaccatgtcagagcagttaggcgacaagtaa

SEQ ID NO: 6222 - DNA, 258 bp, Escherichia coli
  CDS (1)...(258)
atggcacataaaaaggctggcggctccacacgtaacggtcgcgattcagaagctaaacgcctgggcgttaagcgtttcggtggcgaatccgttctggcgggtagcatcatcgttcgtcaacgtggtaccaaattccacgctggcgctaacgtaggttgcggtcgtgaccacactctgtttgctaaagcagacggtaaagtgaaattcgaagttaaaggcccgaaaaaccgtaaatttatcagcatcgaagctgaataa

SEQ ID NO: 6223 - DNA, 312 bp, Escherichia coli
  CDS (1)...(312)
atgtacgcggttttccaaagtggtggtaaacaacaccgagtaagcgaaggtcagaccgttcgcctggaaaagctggacatcgcaactggcgaaactgttgagttcgctgaagtgctgatgatcgcaaacggtgaagaagtcaaaatcggcgttcctttcgttgatggcggcgtaatcaaagctgaagttgttgctcacggtcgtggcgagaaagttaaaatcgttaagtttcgtcgtcgtaaacactatcgtaagcagcagggccatcgtcagtggttcactgatgtgaaaattactggcatcagcgcctaa

SEQ ID NO: 6224 - DNA, 972 bp, Escherichia coli
  CDS (1)...(972)
atgaatttagaaaaaatcaatgagttaaccgcgcaagatatggcgggtgttaatgcggcaatccttgagcagcttaattccgacgtccaactgatcaatcagttaggctattacatcgtcagcggcggcggtaaacgtattcgtccgatgattgctgtactggctgcacgagctgttggctatgagggaaatgcgcatgtcaccattgctgccctgatcgagtttatccacacggcgactctgctacacgacgacgttgtggatgaatcagatatgcgcaggggtaaagctaccgccaacgccgcatttggcaatgccgccagcgtgctggtaggcgattttatttatacccgcgctttccagatgatgaccagcctcggttcgctcaaagtgctggaagtcatgtcagaagccgtaaacgtcatcgcagaaggtgaagttctgcaactgatgaacgttaacgatccggacatcactgaagaaaactacatgcgcgttatctatagcaaaaccgcgcgtctgtttgaggctgccgcgcagtgttccgggattctggctggctgtacgccggaggaggagaaaggcctgcaggattatgggcgctatctcggcactgctttccagttgatcgacgatttactcgattacaatgccgatggcgaacagttaggtaaaaatgtcggcgacgatctgaacgaaggtaaaccgacgctgccgctgctgcatgcgatgcatcatggcacaccagaacaggcacagatgatccgtaccgccatcgaacagggtaacggtcgccatcttctggaaccggttctggaagcaatgaacgcttgtggatctcttgaatggacgcgtcagcgtgccgaggaagaagcagacaaagccatcgcagcgttacaggtgctcccggacaccccttggcgagaagcactcatcggcctcgcgcacatcgctgttcaacgcgatcgttaa

SEQ ID NO: 6225 - DNA, 1260 bp, Escherichia coli
  CDS (1)...(1260)
atggataaatttcgtgttcaggggccaacgaagctccagggcgaagtcacaatttccggcgctaaaaatgctgctctgcctatcctttttgccgcactactggcggaagaaccggtagagatccagaacgtcccgaaactgaaagacgtcgatacatcaatgaagctgctaagccagctgggtgcgaaagtagaacgtaatggttctgtgcatattgatgcccgcgacgttaatgtattctgcgcaccttacgatctggttaaaaccatgcgtgcttctatctgggcgctggggccgctggtagcgcgctttggtcaggggcaagtttcactacctggcggttgtacgatcggtgcgcgtccggttgatctacacatttctggcctcgaacaattaggcgcgaccatcaaactggaagaaggttacgttaaagcttccgtcgatggtcgtttgaaaggtgcacatatcgtgatggataaagtcagcgttggcgcaacggtgaccatcatgtgtgctgcaaccctggcggaaggcaccacgattattgaaaacgcagcgcgtgaaccggaaatcgtcgataccgcgaacttcctgattacgctgggtgcgaaaattagcggtcagggcaccgatcgtatcgtcatcgaaggtgtggaacgtttaggcggcggtgtctatcgcgttctgccggatcgtatcgaaaccggtactttcctggtggcggcggcgatttctcgcggcaaaattatctgccgtaacgcgcagccagatactctcgacgccgtgctggcgaaactgcgtgacgctggagcggacatcgaagtcggcgaagactggattagcctggatatgcatggcaaacgtccgaaggctgttaacgtacgtaccgcgccgcatccggcattcccgaccgatatgcaggcccagttcacgctgttgaacctggtggcagaagggaccgggtttatcaccgaaacggtctttgaaaaccgctttatgcatgtgccagagctgagccgtatgggcgcgcacgccgaaatcgaaagcaataccgttatttgtcacggtgttgaaaaactttctggcgcacaggttatggcaaccgatctgcgtgcatcagcaagcctggtgctggctggctgtattgcggaagggacgacggtggttgatcgtatttatcacatcgatcgtggctacgaacgcattgaagacaaactgcgcgctttaggtgcaaatattgagcgtgtgaaaggcgaataa

SEQ ID NO: 6226 - DNA, 855 bp, Escherichia coli
  CDS (1)...(855)
atggtactgatgatcgtcagcggacgttcaggttcaggtaaatctgtcgccctgcgtgcgctggaagatatgggtttttactgcgtggataaccttcccgtagtgttgttacccgatctggctcgaaccctggccgatcgcgagatttctgccgccgtcagcattgatgttcgtaatatgccggagtcaccagaaatattcgaacaggcgatgagtaacctgcctgacgctttctcaccgcaactcctgttcctggatgccgaccgtaataccttaattcgtcgttacagtgacacgcgccgactgcatccgctttccagcaaaaacctgtcgctggaaagtgctatcgacaaagaaagcgatttgctggagcctctgcgttcgcgagcggatctgattgtcgatacctcagaaatgtccgttcacgagctggctgaaatgctgcgtacccgtctgctgggtaaacgtgaacgcgaactgaccatggtctttgagtctttcggcttcaaacacggtatccctatcgatgcagattacgtctttgacgtgcgcttcttgccgaacccgcactgggatccgaaactgcgtccaatgacaggtcttgataaacctgtcgccgcgttcctcgaccgccacacagaagtacacaattttatctaccagacgcgaagctatcttgagctatggttacctatgctggaaaccaacaaccgtagctacttgacggtcgccattggttgtaccggcgggaagcaccgttcggtgtatattgcagagcaactggcagactacttccgctcgcgcggtaaaaacgtccagtcacgccatcgtacgctggaaaaacgtaaaccatga

SEQ ID NO: 6227 - DNA, 729 bp, Escherichia coli
  CDS (1)...(729)
atgagtaaaagccgcttaacggtgtttagtttcgttcgccgttttcttttgcggttaatggttgtcctcgccgttttctggggcgggggcatcgcgttgtttagcgttgcgcctgttcccttctcagcggtaatggtcgagcgacaggtcagcgcctggctgcatggcaattttcgttacgtggcacattctgactgggtcagtatggatcaaatctcgccgtggatgggactggcggtgattgccgcagaagatcagaaatttcctgagcactggggctttgatgtcgcttccattgagaaagccctggcgcacaacgagcgcaatgaaaaccgtattcgcggtgcttcaacgatttctcaacagacagccaaaaatctctttttatgggatgggcgtagctgggttcgaaaagggctggaagccggattaacgctggggatagaaacggtctggagcaaaaagcgtatcctgacggtttacctgaatatcgccgaatttggcgacggtgtgtttggcgtcgaagctgcggcacaacgttatttccacaaacccgcgagcaaacttacccggtcggaagctgcattactggcagctgtattacctaatccacttcgtttcaaagtctcctcgccatcgggctacgtgcgtagccgtcaggcgtggattttacggcagatgtatcagttaggcggtgagccgtttatgcaacaacaccagctggattaa

SEQ ID NO: 6228 - DNA, 4554 bp, Escherichia coli
  CDS (1)...(4554)
atgacacgcaaaccccgtcgccacgctctttctgtgcccgtgcgcagcggttcggaagtggggttcccgcagagcctgggggaggttcacgatatgttgtacgataaatcccttgagagggataactgtggtttcggcctgatcgcccacatagaaggcgaacctagccacaaggtagtgcgtactgcaatacacgcactggcccgcatgcagcaccgtggcgcgattctcgccgatggtaaaaccggcgacggttgcggcttgctgttacaaaaaccggatcgcttttttcgcatcgttgcgcaggagcgcggctggcgtttagcaaaaaactacgctgtcgggatgctcttcctgaataaagatcctgaactcgccgctgccgcacgccgcatcgttgaagaagaactgcaacgcgaaaccttgtcgattgtgggctggcgtgatgtccccactaacgaaggcgtgctgggtgaaatcgccctctcctctctgccacgcattgagcaaatttttgtgaacgccccggcaggctggcgtccacgcgatatggagcgccgtctgtttatcgcccgccgccgcattgaaaagcgtctcgaagccgacaaagacttctacgtctgtagcctgtcgaatctggtgaacatctataaaggtctgtgtatgccgacggatctgccgcgcttttatctggatcttgcggacctgcgtctggaatcggccatttgcctgttccaccagcgcttctccactaacaccgtaccgcgctggccgctggcgcaaccgttccgctatctggcgcataacggtgaaatcaacaccatcaccggtaaccgccaatgggcgcgtgcgcgtacttataaattccagacaccgcttatccctgacctgcacgacgccgcaccgttcgtcaacgaaaccggctctgactccagttcgatggataacatgctggaactgctgctggcaggcgggatggatatcatccgcgccatgcgtctattagtaccacccgcctggcagaacaacccggatatggacccggaactgcgtgccttctttgactttaactccatgcatatggagccgtgggatggcccggcgggcatcgtgatgtccgacggtcgttttgccgcctgtaacctcgaccgtaacggtctgcgtccggcgcgctacgtcatcaccaaagataagctcatcacctgcgcctctgaagtcggtatctgggattaccagcctgacgaagtggtcgaaaaaggccgcgtcgggccaggcgaactgatggttatcgacacccgcagtgggcgtattctgcactcggcagaaaccgatgacgatctgaaaagccgccatccatataaagagtggatggagaaaaacgtccgccgactggtaccgtttgaagatctgcccgatgaagaagtgggtagccgcgaactggacgacgacacgcttgccagctaccagaaacagtttaactacagcgcggaagagctggactccgtaattcgcgtactgggcgaaaacggtcaggaagcggtcggttcgatgggcgatgataccccattcgccgtgctctccagtcagccgcgcattatttacgactacttccgccagcagtttgcccaggtgactaacccgccaatcgacccgctgcgtgaagcgcatgttatgtcgctcgccaccagtatcggtcgtgaaatgaacgtcttttgcgaagcagagggccaggcgcaccgtttaagctttaaatcgccgattctgctctactccgatttcaaacagctcacgacgatgaaagaggagcactaccgcgcagatacgctggatatcacctttgacgtcactaaaaccacgctcgaagcgacagtcaaagagctgtgcgacaaagccgaaaaaatggtacgtagcggcaccgtgctgctggtgctctccgaccggaatatcgctaaagatcgcctgccggttccagccccgatggcggttggcgcgatccagacccgtctggtcgatcaaagcctgcgttgcgatgccaacatcatcgtcgaaaccgccagcgcccgcgatccgcaccacttcgccgtgttgctgggcttcggcgcgacggctatttatccataccttgcctatgaaacgctgggccgcctggtagacacccatgcgattgccaaagattatcgtaccgtgatgctcaactaccgtaacggcatcaacaaaggcttgtacaaaatcatgtccaaaatgggcatctccaccatcgcctcttaccgctgctcgaaactgtttgaagcggtcggtctacacgatgatgtagtgggcctgtgcttccagggggcggtcagccgcattggtggagcaagctttgaagacttccagcaggatctgctgaatctgtcgaaacgtgcctggctggcgcgtaagcccatcagccagggcggtctgctgaaatacgtccacggcggcgaataccacgcctacaacccggacgtggtgcgcacgctgcaacaagcggtacaaagcggcgagtacagcgactatcaggaatacgcgaagctggttaatgagcgtccggcaaccacgctgcgcgatctgctggcaattacgccgggtgaaaacgcggtcaacattgctgatgttgaaccggcaagcgaactgtttaaacgctttgataccgccgcgatgtctatcggcgcgttaagcccggaagcccacgaggcgctggcggaagcgatgaacagcatcggcggtaattcgaactccggtgaaggcggcgaagacccggcgcgctacggcaccaacaaagtgtcgcgcatcaagcaggtggcttccggtcgctttggggttactccggcgtatctggtcaatgccgacgtcattcagattaaagtcgcccagggcgcgaagccaggcgaaggcggtcagttgccgggtgataaagtcacgccttacatcgccaaactgcgctattcggtgcccggagtgacgctgatctccccgccgccgcaccacgatatctactctatcgaggacttagcgcagctcattttcgacctcaagcaggttaacccgaaagcgatgatctccgtgaagctggtttccgaaccgggagtaggcaccatcgcgactggcgtggcaaaagcttatgcggacttgatcaccatcgcaggctatgacggcggcaccggcgcaagtccgctttcatcggtgaaatacgcaggctgtccgtgggagctggggcttgttgaaacccagcaggcgctggttgctaacggcttgcgtcacaagatccgtttgcaggtcgatggcggcctgaaaacgggtgtcgatatcatcaaggcggcgattctcggcgcagaaagcttcggcttcggcactggcccgatggtggcgctcggctgtaaatatctacgtatttgccatctgaacaactgcgcaacgggtgtagcaactcaggatgacaaactgcgtaagaaccactatcacggcctgccattcaaggtgacgaattactttgagtttatcgcccgtgaaacccgcgagctgatggcacagcttggcgtaacacgtctggtggatctgattggtcgcaccgacctgctgaaagagctggacggtttcaccgccaaacagcagaagctggcgctgtcgaagctgctggagactgccgaaccgcatccaggtaaggcactctactgcaccgaaaacaacccgccgtttgataacggcctgctgaacgcgcagttgctgcaacaggcgaaaccgtttgtcgatgagcgccagagcaaaaccttctggttcgatattcgcaacaccgaccgttctgtcggcgcgtcgctttcaggctatatcgcccagacgcacggcgatcaggggctggcagccgatcctatcaaagcgtacttcaacggcaccgcaggccagagcttcggcgtgtggaacgcgggcggcgtggaactgtacctgaccggtgatgccaacgactatgtcggtaaaggcatggcgggcggcttaatcgccattcgtcctccggttggttccgccttccgcagccatgaagcaagcattatcggcaacacctgcctgtatggcgcgaccggtggtcgtctgtatgccgcaggccgcgcgggtgaacgtttcggcgtgcgtaactccggtgctatcaccgtggtagaaggcattggcgacaacggttgtgaatatatgacgggtggtatcgtctgcattctgggtaaaaccggcgttaacttcggtgcgggcatgaccggcggtttcgcttacgttctcgatgaaagcggcgatttccgcaaacgcgttaacccggaactggtcgaggtcttaagcgttgacgctctggcgatccatgaagagcatctgcgtggtcttatcaccgagcatgtgcagcataccggctctcagcgcggtgaagagattctggcgaactggtcaaccttcgccactaaatttgcgctggttaaaccgaagtccagtgatgtaaaagcactgctgggtcaccgtagtcgtagcgcagctgagttgcgcgtgcaggcgcagtaa

SEQ ID NO: 6229 - DNA, 393 bp, Escherichia coli
  CDS (1)...(393)
atggctgaaaatcaatactacggcactggtcgccgcaaaagttccgcagctcgcgttttcatcaaaccgggcaacggtaaaatcgtaatcaaccaacgttctctggaacagtacttcggtcgtgaaactgcccgcatggtagttcgtcagccgctggaactggtcgacatggttgagaaactggacctgtacatcaccgttaaaggtggtggtatctctggtcaggctggtgcgatccgtcacggtatcacccgcgctctgatggaatacgacgagtccctgcgttctgaactgcgtaaagctggcttcgttactcgtgacgctcgtcaggttgaacgtaagaaagtcggtctgcgtaaagcacgtcgtcgtccgcagttctccaaacgttaa

SEQ ID NO: 6230 - DNA, 429 bp, Escherichia coli
  CDS (1)...(429)
atgaaaacttttacagctaaaccagaaaccgtaaaacgcgactggtatgttgttgacgcgaccggtaaaactctgggccgtctggctactgaactggctcgtcgcctgcgcggtaagcacaaagcggaatacactccgcacgtagataccggtgattacatcatcgttctgaacgctgacaaagttgctgtaaccggcaacaagcgtactgacaaagtgtactatcaccacaccggccacatcggtggtatcaaacaagcgacctttgaagagatgattgctcgccgtcctgagcgtgtgattgaaatcgcggttaaaggcatgttgccaaaaggcccgctgggtcgtgctatgttccgtaaactgaaagtttacgcgggtaacgagcacaaccacgcggcacagcaaccgcaagttcttgacatctaa

SEQ ID NO: 6231 - DNA, 1968 bp, Escherichia coli
  CDS (1)...(1968)
atgggtattttctccattgctaaccaacatattcgctttgcggtaaaactggcgaccgccattgtactggcgctgtttgttggctttcacttccagctggaaacgccacgctgggcggtactgacagcggcgattgttgccgccggtacggcctttgctgcgggaggtgaaccgtattctggcgctattcgctatcgtggctttttgcgcatcatcggcacatttattggctgtattgccggactggtgatcatcattgcgatgatccgcgcaccattattgatgattctggtgtgctgtatctgggccggtttttgtacctggatatcctcgctggtacgaatagaaaactcgtatgcgtgggggctggccggttataccgcgctgatcattgtgatcaccattcagccggaaccattgcttacgccgcagtttgccgtcgaacgttgtagcgagatcgttatcggtattgtgtgtgcgattatggcggatttgctcttttctccgcgatcgatcaaacaagaagtggatcgagagctggaaagtttgctggtcgcgcaatatcaattaatgcaactctgtatcaagcatggcgatggtgaagttgtcgataaagcctggggcgacctggtgcgacgcaccacggcgctacaaggcatgcgcagcaacctgaatatggaatcttcccgctgggcgcgggccaatcgacgtttaaaagcgatcaatacgctatcgctgacgctgattacccaatcctgcgaaacttatcttattcagaatacgcgcccggaattgatcactgatactttccgcgaattttttgacacgccggtagaaaccgcgcaggacgtccacaagcagctcaaacgcctgcggagagttatcgcctggaccggggaacgggaaacgcctgtcaccatttatagctgggtcgcggcggcaacgcgttatcagcttctcaagcgcggcgttatcagtaacacaaaaatcaacgccaccgaagaagagatcctgcaaggcgaaccggaagtaaaagtagagtcagccgaacgtcatcatgcaatggttaacttctggcgaaccacactttcctgcattctgggcacgcttttctggctgtggacgggctggacttccggcagtggtgcaatggtgatgattgcggtagtgacgtcactggcaatgcgtttgccgaatccacgcatggtggcgatcgactttatctacgggacgctggccgcgctgccgttagggctgctctactttttggtgattatccctaatacccaacagagcatgttgctgctgtgcattagcctggcagtgctgggattcttcctcggtatagaagtacagaaacggcgactgggctcgatgggggcactggccagcaccataaatattatcgtgctggataacccgatgactttccatttcagtcagtttctcgacagcgcattagggcaaatcgtcggctgtgtgctcgcgttcaccgttattttgctggtgcgggataaatcgcgcgacaggaccggacgtgtactgcttaatcagtttgtttctgccgctgtttccgcgatgactaccaatgtggcacgtcgtaaagagaaccacctcccggcactttatcagcagctgtttttgctgatgaataagttcccaggggatttgccgaaatttcgcctggcgctgacgatgattatcgcgcaccagcgcctgcgtgatgcaccgatcccggttaacgaggatttatcggcgtttcaccgacaaatgcgccgcacagcagaccatgtgatatctgcccgtagcgatgataaacgtcgtcggtactttggccagttgctggaagaactggaaatctaccaggaaaagctacgcatctggcaagcgccaccgcaggtgacggaaccggtaaatcggctggcggggatgctccataagtatcaacatgcgttgaccgatagttaa

SEQ ID NO: 6232 - DNA, 471 bp, Escherichia coli
  CDS (1)...(471)
atggatattcgtaagattaaaaaactgatcgagctggttgaagaatcaggcatctccgaactggaaatttctgaaggcgaagagtcagtacgcattagccgtgcagctcctgccgcaagtttccctgtgatgcaacaagcttacgctgcaccaatgatgcagcagccagctcaatctaacgcagccgctccggcgaccgttccttccatggaagcgccagcagcagcggaaatcagtggtcacatcgtacgttccccgatggttggtactttctaccgcaccccaagcccggacgcaaaagcgttcatcgaagtgggtcagaaagtcaacgtgggcgataccctgtgcatcgttgaagccatgaaaatgatgaaccagatcgaagcggacaaatccggtaccgtgaaagcaattctggtcgaaagtggacaaccggtagaatttgacgagccgctggtcgtcatcgagtaa

SEQ ID NO: 6233 - DNA, 1350 bp, Escherichia coli
  CDS (1)...(1350)
atgctggataaaattgttattgccaaccgcggcgagattgcattgcgtattcttcgtgcctgtaaagaactgggcatcaagactgtcgctgtgcactccagcgcggatcgcgatctaaaacacgtattactggcagatgaaacggtctgtattggccctgctccgtcagtaaaaagttatctgaacatcccggcaatcatcagcgccgctgaaatcaccggcgcagtagcaatccatccgggttacggcttcctctccgagaacgccaactttgccgagcaggttgaacgctccggctttatcttcattggcccgaaagcagaaaccattcgcctgatgggcgacaaagtatccgcaatcgcggcgatgaaaaaagcgggcgtcccttgcgtaccgggttctgacggcccgctgggcgacgatatggataaaaaccgtgccattgctaaacgcattggttatccggtgattatcaaagcctccggcggcggcggcggtcgcggtatgcgcgtagtgcgcggcgacgctgaactggcacaatccatctccatgacccgtgcggaagcgaaagctgctttcagcaacgatatggtttacatggagaaatacctggaaaatcctcgccacgtcgagattcaggtactggctgacggtcagggcaacgctatctatctggcggaacgtgactgctccatgcaacgccgccaccagaaagtggtcgaagaagcgccagcaccgggcattaccccggaactgcgtcgctacatcggcgaacgttgcgctaaagcgtgtgttgatatcggctatcgcggtgcaggtactttcgagttcctgttcgaaaacggcgagttctatttcatcgaaatgaacacccgtattcaggtagaacacccggttacagaaatgatcaccggcgttgacctgatcaaagaacagctgcgtatcgctgccggtcaaccgctgtcgatcaagcaagaagaagttcacgttcgcggccatgcggtggaatgtcgtatcaacgccgaagatccgaacaccttcctgccaagtccgggcaaaatcacccgtttccacgcacctggcggttttggcgtacgttgggagtctcatatctacgcgggctacaccgtaccgccgtactatgactcaatgatcggtaagctgatttgctacggtgaaaaccgtgacgtggcgattgcccgcatgaagaatgcgctgcaggagctgatcatcgacggtatcaaaaccaacgttgatctgcagatccgcatcatgaatgacgagaacttccagcatggtggcactaacatccactatctggagaaaaaactcggtcttcaggaaaaataa

SEQ ID NO: 6234 - DNA, 3105 bp, Escherichia coli
  CDS (1)...(3105)
atggcaaacttttttattcgacgaccgatatttgcatgggtgctggccattattctgatgatggcgggcgcactggcgatcctacaattgcccgtcgctcagtatccaacaattgcaccgcctgcggtttctgtttcagcaaactatccgggcgctgatgcgcagaccgtgcaggatacggtgacgcaggttatcgaacagaatatgaacggtatcgataacctgatgtatatgtcctccaccagcgattccgccggtagcgtgacaattacccttaccttccagtccgggaccgatcctgatatcgcgcaagtgcaggtgcagaacaaactccagctcgccacgccgttgctgccgcaggaggttcagcagcaggggatcagtgttgaaaagtccagtagcagctatttgatggtggcgggctttgtctctgataacccaggcaccacacaggacgatatctcggactatgtggcctctaacgttaaagatacgcttagccgtctgaatggcgtcggtgacgtacagcttttcggcgcacagtatgcgatgcgtatctggctggatgccgatctgctaaacaaatataaactgacaccggttgatgtgattaaccagttgaaggtacagaacgatcagatcgctgccggacagttgggcggaacgccagcgttaccagggcaacaattgaacgcctcgattattgctcagacgcggtttaaaaatccggaagaattcggcaaagtgaccctgcgcgtaaacagtgacggctcggtggtacgcctgaaagatgtcgcacgggttgaacttggcggtgaaaactataacgttatcgctcgtatcaacggaaaaccggcggcgggcctggggattaagctggcaaccggcgcgaatgctctcgataccgcgaaagccattaaggcaaaactggcggaattacagccattcttcccgcagggaatgaaggttctctacccttatgacaccacgccattcgtccagctttctattcacgaagtggtaaaaacgctgttcgaagccattatgctggtgttcctggtgatgtatctgttcttgcagaatatgcgagcaacgctgatccccaccattgcggtacccgtggtgttgttagggacgtttgccatcctcgccgcttttggttactccatcaacacactaacgatgttcgggatggtgcttgccatcgggctgctcgtcgatgatgcgatagtggtggtggagaacgtcgagcgcgtgatgatggaggataagctcccgccaaaagaagcgacggaaaaatcgatgtcgcaaattcagggcgcactggtgggtatcgcgatggtgctgtcagcggtatttattccgatggcattcttcggcggttctactggggcaatttatcgccagttctctatcaccatcgtttcggcaatggcgctttctgttctggtggcattgattcttacccctgcgttatgtgcaacgctgcttaaacccgtctctgctgagcatcacgaaaataagggcggtttcttcggttggtttaataccaccttcgatcatagcgttaaccactacaccaacagcgtcggcaaaatcctcggatccacaggacgatatttactgatctatgcgctgattgttgcaggaatggtggtgttgtttttacgtcttccgtcttccttcttacctgaagaggatcagggtgtctttctgaccatgattcagttacccgctggcgcgacgcaagagcggacgcaaaaagtgttggatcaagttacggattactatctgaagaacgagaaagcgaacgttgaaagtgtctttacggttaacggctttagcttcagcggccaggcacaaaacgccggtatggccttcgtcagtctgaaaccgtgggaagagcgtaatggtgacgaaaacagtgcggaagcggtaatccatcgtgccaaaatggaattgggcaagatccgcgacggttttgtcattccattcaatatgccagccattgttgaactgggcacggcaacgggtttcgactttgagttaattgatcaggctgggctgggtcacgatgccctaacccaggcccgtaaccagttgcttggtatggcggcgcaacatcctgccagcttagtcagcgtgcgccctaatggcctggaagacaccgcgcagtttaaactggaagttgaccaggaaaaggcgcaggcattaggtgtttcactttctgacatcaatcagaccatttcaacggcgctgggtgggacttacgttaacgacttcatcgaccgtggccgcgtgaaaaagttgtatgttcaggcggatgccaaattccgtatgctgccagaagatgtcgataaactttatgtccgcagcgccaacggcgaaatggtgccattctcggcctttaccacttcacattgggtgtatggctctccgcgactggaacgctacaacggtctgccgtcaatggagattcagggggaagccgcgccaggaaccagttccggcgatgccatggcgttgatggaaaaccttgcgtcaaaattacctgcgggcattggttatgactggacgggtatgtcgtatcaggaacgcttatcgggaaaccaggctcccgctctggtagcaatttcctttgtggttgttttcctgtgccttgctgcactctatgaaagctggtcaattcctgtctcggttatgttggtagtgccgttagggattgtcggcgtgctgctggcggcgacactctttaatcaaaaaaatgacgtctactttatggtgggcttgctaacgacaattggcttgtcggccaaaaacgctattttgatcgttgagttcgctaaagatctcatggagaaagagggtaaaggtgttgttgaagcgacactgatggcagtacgtatgcgtctgcgtcctatcctgatgacctctctcgcctttattctcggcgtattaccgctagctatcagtaacggtgccggcagtggcgcgcagaacgctgtgggtatcggggtaatgggaggaatggtctctgcaacgttgctggcaatcttcttcgtaccggtgttctttgtggtgatccgccgttgctttaaaggataa

SEQ ID NO: 6235 - DNA, 819 bp, Escherichia coli
  CDS (1)...(819)
atggaaacctatgctgtttttggtaatccgatagcccacagcaaatcgccattcattcatcagcaatttgctcagcaactgaatattgaacatccctatgggcgcgtgttggcacccatcaatgatttcatcaacacactgaacgctttctttagtgctggtggtaaaggtgcgaatgtgacggtgccttttaaagaagaggcttttgccagagcggatgagcttactgaacgggcagcgttggctggtgctgttaataccctcatgcggttagaagatggacgcctgctgggtgacaataccgatggtgtaggcttgttaagcgatctggaacgtctgtcttttatccgccctggtttacgtattctgcttatcggcgctggtggagcatctcgcggcgtactactgccactcctttccctggactgtgcggtgacaataactaatcggacggtatcccgcgcggaagagttggctaaattgtttgcgcacactggcagtattcaggcgttgagtatggacgaactggaaggtcatgagtttgatctcattattaatgcaacatccagtggcatcagtggtgatattccggcgatcccgtcatcgctcattcatccaggcatttattgctatgacatgttctatcagaaaggaaaaactccttttctggcatggtgtgagcagcgaggctcaaagcgtaatgctgatggtttaggaatgctggtggcacaggcggctcatgcctttcttctctggcacggtgttctgcctgacgtagaaccagttataaagcaattgcaggaggaattgtccgcgtga

SEQ ID NO: 6236 - DNA, 384 bp, Escherichia coli
  CDS (1)...(384)
atgcgccatcgtaagagtggtcgtcaactgaaccgcaacagcagccatcgccaggctatgttccgcaatatggcaggttcactggttcgtcatgaaatcatcaagacgactctgcctaaagcgaaagagctgcgccgcgtagttgagccgctgattactcttgccaagactgatagcgttgctaatcgtcgtctggcattcgcccgtactcgtgataacgagatcgtggcaaaactgtttaacgaactgggcccgcgtttcgcgagccgtgccggtggttacactcgtattctgaagtgtggcttccgtgcaggcgacaacgcgccgatggcttacatcgagctggttgatcgttcagagaaagcagaagctgctgcagagtaa

SEQ ID NO: 6237 - DNA, 990 bp, Escherichia coli
  CDS (1)...(990)
atgcagggttctgtgacagagtttctaaaaccgcgcctggttgatatcgagcaagtgagttcgacgcacgccaaggtgacccttgagcctttagagcgtggctttggccatactctgggtaacgcactgcgccgtattctgctctcatcgatgccgggttgcgcggtgaccgaggttgagattgatggtgtactacatgagtacagcaccaaagaaggcgttcaggaagatatcctggaaatcctgctcaacctgaaagggctggcggtgagagttcagggcaaagatgaagttattcttaccttgaataaatctggcattggccctgtgactgcagccgatatcacccacgacggtgatgtcgaaatcgtcaagccgcagcacgtgatctgccacctgaccgatgagaacgcgtctattagcatgcgtatcaaagttcagcgcggtcgtggttatgtgccggcttctacccgaattcattcggaagaagatgagcgcccaatcggccgtctgctggtcgacgcatgctacagccctgtggagcgtattgcctacaatgttgaagcagcgcgtgtagaacagcgtaccgacctggacaagctggtcatcgaaatggaaaccaacggcacaatcgatcctgaagaggcgattcgtcgtgcggcaaccattctggctgaacaactggaagctttcgttgacttacgtgatgtacgtcagcctgaagtgaaagaagagaaaccagagttcgatccgatcctgctgcgccctgttgacgatctggaattgactgtccgctctgctaactgccttaaagcagaagctatccactatatcggtgatctggtacagcgtaccgaggttgagctccttaaaacgcctaaccttggtaaaaaatctcttactgagattaaagacgtgctggcttcccgtggactgtctctgggcatgcgcctggaaaactggccaccggcaagcatcgctgacgagtaa

SEQ ID NO: 6238 - DNA, 621 bp, Escherichia coli
  CDS (1)...(621)
atggcaagatatttgggtcctaagctcaagctgagccgtcgtgagggcaccgacttattccttaagtctggcgttcgcgcgatcgataccaagtgtaaaattgaacaagctcctggccagcacggtgcgcgtaaaccgcgtctgtctgactatggtgtgcagttgcgtgaaaagcaaaaagttcgccgtatctatggtgtgctggagcgtcagttccgtaactactacaaagaagcagcacgtctgaaaggcaacaccggtgaaaacctgttggctctgctggaaggtcgtctggacaacgttgtataccgtatgggcttcggtgccactcgtgcagaagcacgtcagctggttagccataaagcaattatggtaaacggtcgtgttgttaacatcgcttcttatcaggttagtccgaatgacgttgtaagcattcgtgagaaagcgaagaagcagtctcgcgtgaaagccgctctggagctggctgagcagcgtgaaaagccaacctggctggaagttgatgctggcaagatggaaggtacgtttaagcgtaagccggagcgttctgatctgtctgcggacattaacgaacacctgatcgtcgagctttactccaagtaa

SEQ ID NO: 6239 - DNA, 390 bp, Escherichia coli
  CDS (1)...(390)
atggcaaaggcaccaattcgtgcacgtaaacgtgtaagaaaacaagtctctgacggcgtggctcatatccatgcttctttcaacaacaccatcgtgactatcactgatcgtcagggtaacgcgttgggttgggcaacagccggtggttccggtttccgtggttctcgcaaatccactccgtttgcagctcaggttgcagcagagcgttgcgctgacgccgtgaaagaatacggcatcaagaatctggaagttatggttaaaggtccgggtccaggccgcgaatctactattcgtgctctgaacgccgcaggtttccgcatcactaacattactgatgtgactccgatccctcataacggttgtcgtccgccgaaaaaacgtcgcgtataa

SEQ ID NO: 6240 - DNA, 357 bp, Escherichia coli
  CDS (1)...(357)
gtggcccgtatagcaggcattaacattcctgatcataagcatgccgtaatcgcattaacttcgatttatggcgtcggcaagacccgttctaaagccatcctggctgcagcgggtatcgctgaagatgttaagatcagtgagctgtctgaaggacaaatcgacacgctgcgtgacgaagttgccaaatttgtcgttgaaggtgatctgcgccgtgaaatcagcatgagcatcaagcgcctgatggatcttggttgctatcgcggtttgcgtcatcgtcgtggtctcccggttcgcggtcagcgtaccaagaccaacgcacgtacccgtaagggtccgcgcaaaccgatcaagaaataa

SEQ ID NO: 6241 - DNA, 117 bp, Escherichia coli
  CDS (1)...(117)
atgaaagttcgtgcttccgtcaagaaattatgccgtaactgcaaaatcgttaagcgtgatggtgtcatccgtgtgatttgcagtgccgagccgaagcataaacagcgccaaggctga

SEQ ID NO: 6242 - DNA, 1332 bp, Escherichia coli
  CDS (1)...(1332)
atggctaaacaaccgggattagattttcaaagtgccaaaggtggcttaggcgagctgaaacgcagactgctgtttgttatcggtgcgctgattgtgttccgtattggctcttttattccgatccctggtattgatgccgctgtacttgccaaactgcttgagcaacagcgaggcaccatcattgagatgtttaacatgttctctggtggtgctctcagccgtgcttctatctttgctctggggatcatgccgtatatttcggcgtcgatcattatccagctgctgacggtggttcacccaacgttggcagaaattaagaaagaaggggagtctggtcgtcgtaagatcagccagtacacccgctacggtactctggtgctggcaatattccagtcgatcggtattgctaccggtctgccgaatatgcctggtatgcaaggcctggtgattaacccgggctttgcattctacttcaccgctgttgtaagtctggtcacaggaaccatgttcctgatgtggttgggcgaacagattactgaacgaggtatcggcaacggtatttcaatcattatcttcgccggtattgtcgcgggactcccgccagccattgcccatactatcgagcaagcgcgtcaaggcgacctgcacttcctcgtgttgctgttggttgcagtattagtatttgcagtgacgttctttgttgtatttgttgagcgtggtcaacgccgcattgtggtaaactacgcgaaacgtcagcaaggtcgtcgtgtctatgctgcacagagcacacatttaccgctgaaagtgaatatggcgggggtaatcccggcaatcttcgcttccagtattattctgttcccggcgaccatcgcgtcatggttcgggggcggtactggttggaactggctgacaacaatttcgctgtatttgcagcctgggcaaccgctttatgtgttactctatgcgtctgcaatcatcttcttctgtttcttctacacggcgttggttttcaacccgcgtgaaacagcagataacctgaagaagtccggtgcatttgtaccaggaattcgtccgggagagcaaacggcgaagtatatcgataaagtaatgacccgcctgaccctggttggtgcgctgtatattacctttatctgcctgatcccggagttcatgcgtgatgcaatgaaagtaccgttctacttcggtgggacctcactgcttatcgttgttgtcgtgattatggactttatggctcaagtgcaaactctgatgatgtccagtcagtatgagtctgcattgaagaaggcgaacctgaaaggctacggccgataa

SEQ ID NO: 6243 - DNA, 435 bp, Escherichia coli
  CDS (1)...(435)
atgcgtttaaatactctgtctccggccgaaggctccaaaaaggcgggtaaacgcctgggtcgtggtatcggttctggcctcggtaaaaccggtggtcgtggtcacaaaggtcagaagtctcgttctggcggtggcgtacgtcgcggtttcgagggtggtcagatgcctctgtaccgtcgtctgccgaaattcggcttcacttctcgtaaagcagcgattacagccgaaattcgtctgtctgacctggctaaagtagaaggcggtgtagtagacctgaacacgctgaaagcggctaacattatcggtatccagatcgagttcgcgaaagtgatcctggctggcgaagtaacgactccggtaactgttcgtggcctgcgtgttactaaaggcgctcgtgctgctatcgaagctgctggcggtaaaatcgaggaataa

SEQ ID NO: 6244 - DNA, 180 bp, Escherichia coli
  CDS (1)...(180)
atggcaaagactattaaaattactcaaacccgcagtgcaatcggtcgtctgccgaaacacaaggcaacgctgcttggcctgggtctgcgtcgtattggtcacaccgtagagcgcgaggatactcctgctattcgcggtatgatcaacgcggtttccttcatggttaaagttgaggagtaa

SEQ ID NO: 6245 - DNA, 504 bp, Escherichia coli
  CDS (1)...(504)
atggctcacatcgaaaaacaagctggcgaactgcaggaaaagctgatcgcggtaaaccgcgtatctaaaaccgttaaaggtggtcgtattttctccttcacagctctgactgtagttggcgatggtaacggtcgcgttggttttggttacggtaaagcgcgtgaagttccagcagcgatccagaaagcgatggaaaaagcccgtcgcaatatgattaacgtcgcgctgaataacggcactctgcaacaccctgttaaaggtgttcacacgggttctcgcgtattcatgcagccggcttccgaaggtaccggtatcatcgccggtggtgcaatgcgcgccgttctggaagtcgctggggttcataacgttctggctaaagcctatggttccaccaacccgatcaacgtggttcgtgcaactattgatggcctggaaaatatgaattctccagaaatggtcgctgccaagcgtggtaaatccgttgaagaaattctggggaaataa

SEQ ID NO: 6246 - DNA, 354 bp, Escherichia coli
  CDS (1)...(354)
atggataagaaatctgctcgtatccgtcgtgcgacccgcgcacgccgcaagctccaggagctgggcgcaactcgcctggtggtacatcgtaccccgcgtcacatttacgcacaggtaattgcaccgaacggttctgaagttctggtagctgcttctactgtagaaaaagctatcgctgaacaactgaagtacaccggtaacaaagacgcggctgcagctgtgggtaaagctgtcgctgaacgcgctctggaaaaaggcatcaaagatgtatcctttgaccgttccgggttccaatatcatggtcgtgtccaggcactggcagatgctgcccgtgaagctggccttcagttctaa

SEQ ID NO: 6247 - DNA, 534 bp, Escherichia coli
  CDS (1)...(534)
atgtctcgtgttgctaaagcaccggtcgttgttcctgccggcgttgacgtaaaaatcaacggtcaggttattacgatcaaaggtaaaaacggcgagctgactcgtactctcaacgatgctgttgaagttaaacatgcagataataccctgaccttcggtccgcgtgatggttacgcagacggttgggcacaggctggtaccgcgcgtgccctgctgaactcaatggttatcggtgttaccgaaggcttcactaagaagctgcagctggttggtgtaggttaccgtgcagcggttaaaggcaatgtgattaacctgtctctgggtttctctcatcctgttgaccatcagctgcctgcgggtatcactgctgaatgtccgactcagactgaaatcgtgctgaaaggcgctgataagcaggtgatcggccaggttgcagcggatctgcgcgcctaccgtcgtcctgagccttataaaggcaagggtgttcgttacgccgacgaagtcgtgcgtaccaaagaggctaagaagaagtaa

SEQ ID NO: 6248 - DNA, 393 bp, Escherichia coli
  CDS (1)...(393)
atgagcatgcaagatccgatcgcggatatgctgacccgtatccgtaacggtcaggccgcgaacaaagctgcggtcaccatgccttcctccaagctgaaagtggcaatcgccaacgtgctgaaggaagaaggttttattgaagattttaaagttgaaggcgacaccaagcctgaactggaacttactctgaagtatttccagggcaaagctgttgtagaaagcattcagcgtgtcagccgcccaggtctgcgcatctataaacgtaaagatgagctgccgaaagttatggcgggtctgggtatcgcagttgtttctacctctaaaggtgttatgactgatcgtgcagcgcgccaggctggtcttggtggcgaaattatctgctacgtagcctaa

SEQ ID NO: 6249 - DNA, 306 bp, Escherichia coli
  CDS (1)...(306)
atggctaagcaatcaatgaaagcacgcgaagtaaaacgcgtagctttagctgataaatacttcgcgaaacgcgctgaactgaaagcgatcatctctgatgtgaacgcttccgacgaagatcgttggaacgctgttctcaagctgcagactctgccgcgtgattccagcccgtctcgtcagcgtaaccgctgccgtcaaacaggtcgtccgcatggtttcctgcggaagttcgggttgagccgtattaaggtccgtgaagccgctatgcgcggtgaaatcccgggtctgaaaaaggctagctggtaa

SEQ ID NO: 6250 - DNA, 540 bp, Escherichia coli
  CDS (1)...(540)
atggcgaaactgcatgattactacaaagacgaagtagttaaaaaactcatgactgagtttaactacaattctgtcatgcaagtccctcgggtcgagaagatcaccctgaacatgggtgttggtgaagcgatcgctgacaaaaaactgctggataacgcagcagcagacctggcagcaatctccggtcaaaaaccgctgatcaccaaagcacgcaaatctgttgcaggcttcaaaatccgtcagggctatccgatcggctgtaaagtaactctgcgtggcgaacgcatgtgggagttctttgagcgcctgatcactattgctgtacctcgtatccgtgacttccgtggcctgtccgctaagtctttcgacggtcgtggtaactacagcatgggtgtccgtgagcagatcatcttcccagaaatcgactacgataaagtcgaccgcgttcgtggtttggatattaccattaccactactgcgaaatctgacgaagaaggccgcgctctgctggctgcctttgacttcccgttccgcaagtaa

SEQ ID NO: 6251 - DNA, 315 bp, Escherichia coli
  CDS (1)...(315)
atggcagcgaaaatccgtcgtgatgacgaagttatcgtgttaaccggtaaagataaaggtaaacgcggtaaagttaagaatgtcctgtcttccggcaaggtcattgttgaaggtatcaacctggttaagaaacatcagaagccggttccggccctgaaccaaccgggtggcatcgttgaaaaagaagccgctattcaggtttccaacgtagcaatcttcaatgcggcaaccggcaaggctgaccgtgtaggctttagattcgaagacggtaaaaaagtccgtttcttcaagtctaacagcgaaactatcaagtaa

SEQ ID NO: 6252 - DNA, 372 bp, Escherichia coli
  CDS (1)...(372)
atgatccaagaacagactatgctgaacgtcgccgacaactccggtgcacgtcgcgtaatgtgtatcaaggttctgggtggctcgcaccgtcgctacgcaggcgtaggcgacatcatcaagatcaccatcaaagaagcaattccgcgtggtaaggtcaaaaaaggtgatgtgctgaaggcggtagtggtgcgcaccaagaagggtgttcgtcgcccggacggttctgtcattcgcttcgatggtaatgcttgtgttcttctgaacaacaacagcgagcagcctatcggtacgcgtatttttgggccggtaactcgtgagcttcgtagtgagaagttcatgaaaattatctctctggcaccagaagtactctaa

SEQ ID NO: 6253 - DNA, 255 bp, Escherichia coli
  CDS (1)...(255)
atgaccgataaaatccgtactctgcaaggtcgcgttgttagcgacaaaatggagaaatccattgttgttgctatcgaacgttttgtgaaacacccgatctacggtaaattcatcaagcgtacgaccaaactgcacgtacatgacgagaacaacgaatgcggtatcggtgacgtggttgaaatccgcgaatgccgtccgctgtccaagactaaatcctggacgctggttcgcgttgtagagaaagcggttctgtaa

SEQ ID NO: 6254 - DNA, 192 bp, Escherichia coli
  CDS (1)...(192)
atgaaagcaaaagagctgcgtgagaagagcgttgaagagctgaacaccgagctgctgaacctgctgcgtgagcagttcaacctgcgtatgcaggctgcaagtggccagctgcaacagtctcacctgttgaagcaagtgcgtcgcgatgtcgcacgcgttaagactttactgaacgagaaggcgggtgcgtaa

SEQ ID NO: 6255 - DNA, 411 bp, Escherichia coli
  CDS (1)...(411)
atgttacaaccaaagcgtacaaaattccgtaaaatgcacaaaggccgtaaccgcggtctggcgcagggtacggatgttagcttcggcagcttcggtctgaaagctgttggccgtggtcgtctgactgcccgtcagatcgaagcagcacgtcgtgctatgacccgtgcagttaagcgtcaaggtaagatctggatccgtgtgttcccggacaaaccgatcactgaaaagccgctggcagtgcgtatgggtaaaggtaaaggtaacgtggagtattgggttgccttgattcagccgggtaaagtcctgtatgaaatggacggtgttccggaagagctggcccgtgaagcattcaagctggcagcagcgaaactgccgattaaaaccacctttgtaactaagacggtgatgtaa

SEQ ID NO: 6256 - DNA, 702 bp, Escherichia coli
  CDS (1)...(702)
atgggtcagaaagtacatcctaatggtattcgcctgggtattgtaaaaccatggaactctacctggtttgcgaacaccaaagaattcgctgacaacctggacagcgattttaaagtacgtcagtacctgactaaggaactggctaaagcgtccgtatctcgtatcgttatcgagcgtccggctaagagcatccgtgtaaccattcacactgctcgcccgggtatcgttatcggtaaaaaaggtgaagacgtagaaaaactgcgtaaggtcgtagcggacatcgctggcgttcctgcacagatcaacatcgccgaagttcgtaagcctgaactggacgcaaaactggttgctgacagcatcacttctcagctggaacgtcgcgttatgttccgtcgtgctatgaagcgtgctgtacagaacgcaatgcgtctgggcgctaaaggtattaaagttgaagttagcggccgtctgggcggcgcggaaatcgcacgtaccgaatggtaccgcgaaggtcgcgtaccgctgcacactctgcgtgctgacatcgactacaacacctctgaagcgcacaccacttacggtgtaatcggcgttaaagtgtggatcttcaaaggcgagatcctgggtggtatggctgctgttgaacaaccggaaaaaccggctgctcagcctaaaaagcagcagcgtaaaggccgtaaataa

SEQ ID NO: 6257 - DNA, 333 bp, Escherichia coli
  CDS (1)...(333)
atggaaactatcgctaaacatcgccatgctcgttcttctgctcagaaggttcgccttgttgctgacctgattcgcggtaagaaagtgtcgcaggctctggatattttgacctacaccaacaagaaagcggctgtactggtcaagaaagttctggaatctgccattgctaacgctgaacacaacgatggcgctgacattgacgatctgaaagttacgaaaattttcgtagacgaaggcccgagcatgaagcgcattatgccgcgtgcaaaaggtcgtgcagatcgcatcctgaagcgcaccagccacatcactgtggttgtgtccgatcgctga

SEQ ID NO: 6258 - DNA, 279 bp, Escherichia coli
  CDS (1)...(279)
atgccacgttctctcaagaaaggtccttttattgacctgcacttgctgaagaaggtagagaaagcggtggaaagcggagacaagaagcccctgcgcacttggtcccgtcgttcaacgatctttcctaacatgatcggtttgaccatcgctgtccataatggtcgtcagcacgttccggtatttgtaaccgacgaaatggttggtcacaaactgggtgaattcgcaccgactcgtacttatcgcggccacgctgctgataaaaaagcgaagaagaaataa

SEQ ID NO: 6259 - DNA, 822 bp, Escherichia coli
  CDS (1)...(822)
atggcagttgttaaatgtaaaccgacatctccgggtcgtcgccacgtagttaaagtggttaaccctgagctgcacaagggcaaaccttttgctccgttgctggaaaaaaacagcaaatccggtggtcgtaacaacaatggccgtatcaccactcgtcatatcggtggtggccacaagcaggcttaccgtattgttgacttcaaacgcaacaaagacggtatcccggcagttgttgaacgtcttgagtacgatccgaaccgttccgcgaacatcgcgctggttctgtacaaagacggtgaacgccgttacatcctggcccctaaaggcctgaaagctggcgaccagattcagtctggcgttgatgctgcaatcaaaccaggtaacaccctgccgatgcgcaacatcccggttggttctactgttcataacgtagaaatgaaaccaggtaaaggcggtcagctggcacgttccgctggtacttacgttcagatcgttgctcgtgatggtgcttatgtcaccctgcgtctgcgttctggtgaaatgcgtaaagtagaagcagactgccgtgcaactctgggcgaagttggcaatgctgagcatatgctgcgcgttctgggtaaagcaggtgctgcacgctggcgtggtgttcgtccgaccgttcgcggtaccgcgatgaacccggtagaccacccacatggtggtggtgaaggtcgtaactttggtaagcacccggtaactccgtggggcgttcagaccaaaggtaagaagacccgcagcaacaagcgtactgataaattcatcgtacgtcgccgtagcaaataa

SEQ ID NO: 6260 - DNA, 303 bp, Escherichia coli
  CDS (1)...(303)
atgattcgtgaagaacgtctgctgaaggtgctgcgtgcaccgcacgtttctgaaaaagcgtctactgcgatggaaaaatccaacaccatcgtactcaaagttgctaaagacgcgaccaaagcagaaatcaaagctgctgtgcagaaactgtttgaagtcgaagtcgaagtcgttaacaccctggtagttaaagggaaagttaaacgtcacggacagcgtatcggtcgtcgtagcgactggaaaaaagcttacgtcaccctgaaagaaggccagaatctggacttcgttggcggcgctgagtaa

SEQ ID NO: 6261 - DNA, 606 bp, Escherichia coli
  CDS (1)...(606)
atggaattagtattgaaagacgcgcagagcgcgctgactgtttccgaaactaccttcggtcgtgatttcaacgaagcgctggttcaccaggttgttgttgcttatgcagctggtgctcgtcagggtactcgtgctcagaagactcgtgctgaagtaactggttccggtaaaaaaccgtggcgccagaaaggcaccggccgtgcgcgttctggttctatcaagagcccgatctggcgttctggtggcgtgacctttgctgctcgtccgcaggaccacagtcaaaaagttaacaagaagatgtaccgcggcgcgctgaaaagcatcctgtccgaactggtacgtcaggatcgtctgatcgttgtcgagaagttctctgtagaagcgccgaaaactaagctgctggcacagaaactgaaagacatggctctggaagatgtgctgatcatcaccggtgagctggacgaaaacctgttcctggctgcgcgcaacctgcacaaggttgacgtacgcgatgcaactggtatcgacccggttagcctgatcgccttcgacaaagtcgtaatgactgctgatgctgttaagcaagttgaggagatgctggcatga

SEQ ID NO: 6262 - DNA, 630 bp, Escherichia coli
  CDS (1)...(630)
atgattggtttagtcggtaaaaaagtgggtatgacccgtatcttcacagaagacggcgtttctatcccagtaaccgtaatcgaagttgaagcaaaccgcgttactcaggttaaagacctggctaacgatggctaccgtgctattcaggtgaccaccggtgctaaaaaagctaaccgtgtgaccaagcctgaagctggccacttcgctaaagctggcgtagaagctggccgtggtctgtgggaattccgcctggctgaaggcgaagagttcactgtaggtcagagcattagcgttgaactgtttgctgacgttaaaaaagttgacgtaactggcacctctaaaggtaaaggtttcgcaggtaccgttaagcgctggaacttccgtacccaggacgctactcacggtaactccttgtctcaccgcgttccgggttctatcggtcagaaccagactccgggcaaagtgttcaaaggcaagaaaatggcaggtcagatgggtaacgaacgtgtaaccgttcagagccttgacgtagtacgcgttgacgctgagcgcaacctgctgctggttaaaggtgctgtcccgggtgcaaccggtagcgacctgatcgttaaaccagctgtgaaggcgtaa

SEQ ID NO: 6263 - DNA, 312 bp, Escherichia coli
  CDS (1)...(312)
atgcagaaccaaagaatccgtatccgcctgaaagcgtttgatcatcgtctgatcgatcaagcaaccgcggaaatcgtcgagactgccaagcgcactggtgcgcaggtccgtggtccgatcccgctgccgacacgcaaagagcgcttcactgttctgatctccccgcacgtcaacaaagacgcgcgcgatcagtacgaaatccgtactcacttgcgtctggttgacatcgttgagccaaccgagaaaaccgttgatgctctgatgcgtctggatctggctgccggtgtagacgtgcagatcagcctgggttaa

SEQ ID NO: 6264 - DNA, 1965 bp, Escherichia coli
  CDS (1)...(1965)
atggactgcgtcatgaaaggactcaataaaatcacctgctgcttgctggcagcactactcatgccttgtgcaggacacgctgagaacgaacaatacggcgcgaacttcaataacgccgatatccgccagttcgtggaaatagtgggtcagcatcttggcaaaacgatcctgatcgacccttcggtacagggaaccatttccgtacgcagtaatgatacgtttagccaacaggagtactaccagttctttttaagtattcttgatctttacggttattccgtgatcacgctggacaatggttttctgaaagtggttcgctcagctaatgtaaaaacatcgccagggatgattgctgacagttctcgtccaggcgtaggtgatgagttggtcacccgaattgtaccgcttgagaacgttcctgctcgtgacctggcccccctgctccgccagatgatggatgcgggtagcgtcggtaatgttgtgcattatgaaccctccaacgttcttattctgaccggtcgtgcctccaccattaataaactgattgaagtcataaagcgcgttgatgtcatcggcacagagaagcagcaaattattcatctggaatatgcgtcagcggaagatctcgccgagattcttaatcaattaatcagcgaaagccacggtaaaagccagatgccagccctcctctccgcgaagattgtggcggataagcgaaccaactctcttatcatcagtggaccggaaaaagcacgccagcgcatcacttcattactgaaaagccttgatgtcgaagagagcgaggaaggaaatacccgggtttattacctgaaatatgctaaagccacgaatctggtggaagtgctaaccggtgtttccgaaaagctgaaagatgaaaaagggaatgcgcgtaagccctcctcttctggcgcgatggataacgtcgccattaccgccgatgaacagactaactctctggtcattaccgctgaccagtccgtccaggaaaaactcgccacggtaattgcgcgtctggacattcgccgtgcacaggtgctggttgaggcaatcatcgttgaagttcaggatggaaatggactaaacctcggcgtgcaatgggcgaataaaaacgttggcgcacagcaatttaccaataccggattaccgatttttaacgctgcgcaaggtgtggctgattataaaaagaatggtgggatcaccagcgcgaatcctgcctgggatatgtttagcgcctacaatggcatggccgcaggcttcttcaatggcgactggggagtactgcttaccgcgctggccagtaacaataaaaatgacatcctcgccaccccaagcatcgtaacgctggataataaactcgcgtccttcaacgtggggcaggatgtgccggtgctatccgggtcacagaccacttcaggggataacgtctttaataccgtcgaacgcaaaacggtggggacaaaactcaaagttactccgcaggtcaatgaaggcgacgcggtgttgctcgaaatagagcaggaagtctccagcgttgactcttcctctaactcgacgctcggcccgacgtttaatacccgtactattcaaaacgccgtgctggtcaaaaccggtgaaacggtggtcctgggcggattgctggatgatttttctaaagagcaagtgtcaaaggttcctctgcttggcgatattcctttagtggggcaactcttccgctatacctccaccgagcgcgctaaacgcaacctgatggtatttatccgtccgacgattatccgtgacgatgatgtttatcgctcactgtcaaaagagaaatacacccgttaccgtcaggagcaacaacagcggatcgacgggaaatcaaaagcgctggttggctcggaagatttgccggtgctggatgaaaacacgttcaacagtcacgcccctgcgccatcgtcacggtga

SEQ ID NO: 6265 - DNA, 1185 bp, Escherichia coli
  CDS (1)...(1185)
gtgtctaaagaaaaatttgaacgtacaaaaccgcacgttaacgttggtactatcggccacgttgaccacggtaaaactactctgaccgctgcaatcaccaccgtactggctaaaacctacggcggtgctgctcgtgcattcgaccagatcgataacgcgccggaagaaaaagctcgtggtatcaccatcaacacttctcacgttgaatacgacaccccgacccgtcactacgcacacgtagactgcccggggcacgccgactatgttaaaaacatgatcaccggtgctgctcagatggacggcgcgatcctggtagttgctgcgactgacggcccgatgccgcagactcgtgagcacatcctgctgggtcgtcaggtaggcgttccgtacatcatcgtgttcctgaacaaatgcgacatggttgatgacgaagagctgctggaactggttgaaatggaagttcgtgaacttctgtctcagtacgacttcccgggcgacgacactccgatcgttcgtggttctgctctgaaagcgctggaaggcgacgcagagtgggaagcgaaaatcctggaactggctggcttcctggattcttatattccggaaccagagcgtgcgattgacaagccgttcctgctgccgatcgaagacgtattctccatctccggtcgtggtaccgttgttaccggtcgtgtagaacgcggtatcatcaaagttggtgaagaagttgaaatcgttggtatcaaagagactcagaagtctacctgtactggcgttgaaatgttccgcaaactgctggacgaaggccgtgctggtgagaacgtaggtgttctgctgcgtggtatcaaacgtgaagaaatcgaacgtggtcaggtactggctaagccgggcaccatcaagccgcacaccaagttcgaatctgaagtgtacattctgtccaaagatgaaggcggccgtcatactccgttcttcaaaggctaccgtccgcagttctacttccgtactactgacgtgactggtaccatcgaactgccggaaggcgtagagatggtaatgccgggcgacaacatcaaaatggttgttaccctgatccacccgatcgcgatggacgacggtctgcgtttcgcaatccgtgaaggcggccgtaccgttggcgcgggcgttgttgctaaagttctgggctaa

SEQ ID NO: 6266 - DNA, 2115 bp, Escherichia coli
  CDS (1)...(2115)
atggctcgtacaacacccatcgcacgctaccgtaacatcggtatcagtgcgcacatcgacgccggtaaaaccactactaccgaacgtattctgttctacaccggtgtaaaccataaaatcggtgaagttcatgacggcgctgcaaccatggactggatggagcaggagcaggaacgtggtattaccatcacttccgctgcgactactgcattctggtctggtatggctaagcagtatgagccgcatcgcatcaacatcatcgacaccccggggcacgttgacttcacaatcgaagtagaacgttccatgcgtgttctcgatggtgcggtaatggtttactgcgcagttggtggtgttcagccgcagtctgaaaccgtatggcgtcaggcaaacaaatataaagttccgcgcattgcgttcgttaacaaaatggaccgcatgggtgcgaacttcctgaaagttgttaaccagatcaaaacccgtctgggcgcgaacccggttccgctgcagctggcgattggtgctgaagaacatttcaccggtgttgttgacctggtgaaaatgaaagctatcaactggaacgacgctgaccagggcgtaaccttcgaatacgaagatatcccggcagacatggttgaactggctaacgaatggcaccagaacctgatcgaatccgcagctgaagcttctgaagagctgatggaaaaatacctgggtggtgaagaactgactgaagcagaaatcaaaggtgctctgcgtcagcgcgttctgaacaacgaaatcatcctggtaacctgtggttctgcgttcaagaacaaaggtgttcaggcgatgctggatgcggtaattgattacctgccatccccggttgacgtacctgcgatcaacggtatcctggacgacggtaaagacactccggctgaacgtcacgcaagtgatgacgagccgttctctgcactggcgttcaaaatcgctaccgacccgtttgttggtaacctgaccttcttccgtgtttactccggtgtggttaactctggtgataccgtactgaactccgtgaaagctgcacgtgagcgtttcggtcgtatcgttcagatgcacgctaacaaacgtgaagagatcaaagaagttcgcgcgggcgacatcgctgctgctatcggtctgaaagacgtaaccactggtgacaccctgtgtgacccggatgcgccgatcattctggaacgtatggaattccctgagccggtaatctccatcgcagttgaaccgaaaaccaaagctgaccaggaaaaaatgggtctggctctgggccgtctggctaaagaagacccgtctttccgtgtatggactgacgaagaatctaaccagaccatcatcgcgggtatgggcgaactgcacctcgacatcatcgttgaccgtatgaagcgtgaattcaacgttgaagcgaacgtaggtaaaccgcaggttgcttaccgtgaaactatccgccagaaagttaccgatgttgaaggtaaacacgcgaaacagtctggtggtcgtggtcagtatggtcatgttgttatcgacatgtacccgctggagccgggttcaaacccgaaaggctacgagttcatcaacgacattaaaggtggtgtaatccctggcgaatacatcccggccgttgataaaggtatccaggaacagctgaaagcaggtccgctggcaggctacccggtagtagacatgggtattcgtctgcacttcggttcttaccatgacgttgactcctctgaactggcgtttaaactggctgcttctatcgcctttaaagaaggctttaagaaagcgaaaccagttctgcttgagccgatcatgaaggttgaagtagaaactccggaagagaacaccggtgacgttatcggtgacttgagccgtcgtcgtggtatgctcaaaggtcaggaatctgaagttactggcgttaagatccacgctgaagtaccgctgtctgaaatgttcggatacgcaactcagctgcgttctctgaccaaaggtcgtgcatcatacactatggaattcctgaagtatgatgaagcgccgagtaacgttgctcaggccgtaattgaagcccgtggtaaataa

SEQ ID NO: 6267 - DNA, 540 bp, Escherichia coli
  CDS (1)...(540)
atgccacgtcgtcgcgtcattggtcagcgtaaaattctgccggatccgaagttcggatcagaactgctggctaaatttgtaaatatcctgatggtagatggtaaaaaatctactgctgaatctatcgtatacagcgcgctggagaccctggctcagcgctctggtaaatctgaactggaagcattcgaagtagctctcgaaaacgtgcgcccgactgtagaagttaagtctcgccgcgttggtggttctacttatcaggtaccagttgaagtccgtccggttcgtcgtaatgctctggcaatgcgttggatcgttgaagctgctcgtaaacgcggtgataaatccatggctctgcgcctggcgaacgaactttctgatgctgcagaaaacaaaggtactgcagttaagaaacgtgaagacgttcaccgtatggccgaagccaacaaggcgttcgcacactaccgttggttatcccttcggagttttagtcaccaggcgggcgcttccagtaagcagcccgctttgggctacttaaattga

SEQ ID NO: 6268 - DNA, 375 bp, Escherichia coli
  CDS (1)...(375)
atggcaacagttaaccagctggtacgcaaaccacgtgctcgcaaagttgcgaaaagcaacgtgcctgcgctggaagcatgcccgcaaaaacgtggcgtatgtactcgtgtatatactaccactcctaaaaaaccgaactccgcgctgcgtaaagtatgccgtgttcgtctgactaacggtttcgaagtgacttcctacatcggtggtgaaggtcacaacctgcaggagcactccgtgatcctgatccgtggcggtcgtgttaaagacctcccgggtgttcgttaccacaccgtacgtggtgcgcttgactgctccggcgttaaagaccgtaagcaggctcgttccaagtatggcgtgaagcgtcctaaggcttaa

SEQ ID NO: 6269 - DNA, 1914 bp, Escherichia coli
  CDS (1)...(1914)
atgattgttttctcctcgttacaaattcgtcgcggcgtgcgcgtcctgctggataatgccaccgccaccatcaaccctgggcagaaagtcggcctggtgggtaaaaacggctgtggtaaatctaccctgctggcattgctgaaaaatgaaatcagcgccgacggcggcagctacacctttccgggaagctggcaactggcgtgggtgaatcaggaaacgccggcgttaccgcaagcggcgctggaatatgtcattgacggcgaccgtgaatatcgtcaactagaagcgcagctacacgacgccaacgaacgtaacgacgggcacgccattgcgaccattcatggcaagctggatgctattgacgcatggagtattcgctcccgtgctgccagcctgctgcacggcctcggtttcagcaatgaacaactggagcgcccggtaagtgatttttccgggggctggcgtatgcgtcttaaccttgcccaggcgctgatttgccgttcagacttgctgctgctcgacgaaccgactaaccacctcgatctcgatgccgttatctggctggaaaaatggctgaagagctatcagggcacgctgatcctgatctctcacgaccgcgacttcctcgatccgatcgtcgataaaattattcatatcgaacaacaaagcatgttcgagtacaccggcaactacagttcgtttgaagtacagcgcgccacccgtctggcgcagcaacaagcgatgtacgaaagccagcaggaacgcgtagcgcatctgcaaagttatatcgaccgtttccgtgccaaagccaccaaagcgaagcaggcccagagccgcattaagatgctcgagcgtatggagctaattgcccccgcgcacgtcgacaacccgttccgctttagcttccgcgcgccggaaagcctgccaaatccgttactgaagatggaaaaagtcagcgcgggctatggcgatcgcattattctcgactcgattaaactgaacctggtgcccggctcgcgtattggtctgttaggccgcaatggcgcgggtaaatcgacattaatcaaactgttagccggtgaacttgcgccagtcagcggtgaaattggtctggcgaaagggatcaaactcggctacttcgcccagcatcaacttgaatacctgcgcgccgacgaatcacctattcaacatctggcacgtttagcgccgcaggagctggaacaaaaactgcgtgactacctcggcggctttggtttccagggcgataaagtaaccgaagaaacgcgccgcttctccggtggggaaaaagcccgcctggtgctggcattaattgtctggcagcggccgaatctgctgctgctcgacgaaccgactaaccaccttgacctcgacatgcgtcaggcactcaccgaagcattaatcgagtttgaaggcgcgctggttgtcgtttcgcacgaccgtcatttgctgcgttccaccactgacgatctctacctggttcacgatcgtaaagtcgaaccgttcgacggcgatctggaagattatcaacagtggttgagcgacgtacaaaagcaggaaaaccagaccgacgaagcgccaaaagagaatgcgaacagcgcccaggcacgtaaagatcagaagcgtcgggaagctgagctgcgtgcgcaaacccagccactgcgtaaagagattgcccgtctggaaaaagagatggagaagctgaacgcgcaactggcgcaggcggaagagaaactcggcgacagcgaactgtatgaccagagccgtaaagcggagttgaccgcctgcctgcaacagcaagccagcgccaaatccggcctggaagagtgcgaaatggcatggctggaagcccaggagcagcttgagcagatgctgctggaaggccaaagcaactga

SEQ ID NO: 6270 - DNA, 1221 bp, Escherichia coli
  CDS (1)...(1221)
atggcaattgaacaaacagcaattacacgcgcgactttcgatgaagtgatcctgccgatttatgctccggcagagtttattccggtaaaaggtcagggcagccgaatctgggatcagcaaggcaaggagtatgtcgatttcgcgggtggcattgcagttacggcgttgggccattgccatcctgcgctggtgaacgcgttaaaaacccagggcgaaactctgtggcatatcagtaacgttttcaccaatgaaccggcgctgcgtcttgggcgtaaactgattgaggcaacgtttgccgaacgcgtggtgtttatgaactccggcacggaagctaacgaaaccgcctttaaactggcacgccattacgcctgtgtgcgtcatagcccgttcaaaaccaaaattattgccttccataacgcttttcatggtcgctcgctgtttaccgtttcggtgggtgggcagccaaaatattccgacggctttgggccgaaaccggcagacatcatccacgttccctttaacgatctccatgcagtgaaagcggtgatggatgatcacacctgtgcggtggtggttgagccgatccagggcgagggcggtgtgacggcagcgacgccagagtttttgcagggcttgcgcgagctgtgcgatcaacatcaggcattattggtgtttgatgaagtgcagtgcgggatggggcggaccggcgatttgtttgcttacatgcactacggcgttacgccggatattctgacctctgcgaaagcgttaggcggcggcttcccgattagcgccatgctgaccacggcggaaattgcttctgcgtttcatcctggttctcacggttccacctacggcggtaatcctctggcctgtgcagtagcgggggcggcgtttgatatcatcaatacccctgaagtgctggaaggcattcaggcgaaacgccagcgttttgttgaccatctgcagaagatcgatcagcagtacgatgtatttagcgatattcgcggtatggggctgttgattggcgcagagctgaaaccacagtacaaaggtcgggcgcgtgatttcctgtatgcgggcgcagaggctggcgtaatggtgctgaatgccggaccggatgtgatgcgttttgcaccgtcgctggtggtggaagatgcggatatcgatgaagggatgcaacgtttcgcccacgcggtggcgaaggtggttggggcgtaa

SEQ ID NO: 6271 - DNA, 2544 bp, Escherichia coli
  CDS (1)...(2544)
atgagcaaagtcagactcgcaattatcggtaacggtatggtcggccatcgctttatcgaagatcttcttgataaatctgatgcggccaactttgatattaccgttttctgtgaagaaccgcgcatcgcttatgaccgcgtacacctctcgtcttacttctctcaccacaccgccgaagagctgtcgctggtgcgcgaaggcttctacgagaaacacggcatcaaagttctggtcggcgaacgcgctatcaccatcaaccgtcaggagaaggtgattcactccagcgccggacgtaccgttttttatgacaagctgatcatggcaaccggttcctacccgtggatcccgccaatcaaaggttctgatactcaggactgctttgtctatcgcactattgaagacctcaacgccattgaatcctgcgcccgtcgcagcaaacgcggtgccgttgttggtggcggcctgttaggtctggaagccgcaggcgcgctgaaaaacttaggtattgaaacccacgttatcgaatttgcccctatgctgatggcagaacagcttgatcagatgggcggcgagcagctgcgtcgcaaaatcgaaagtatgggcgtgcgcgttcacaccagcaaaaacacccttgagattgtgcaggaaggtgttgaagcgcgtaaaaccatgcgttttgccgacggcagcgaactggaagtcgactttatcgtcttctctaccggtatccgtccgcgcgataagctggcaacccagtgtggtctggacgttgctccgcgtgggggtattgtcattaatgattcctgccagacttccgatccggatatctacgccatcggtgaatgcgcaagctggaacaaccgtgtatttggtctggtagcacctggctacaaaatggcgcaggtcgccgttgaccatattctcggtagcgaaaacgcctttgaaggtgctgaccttagcgccaagctgaaactgctgggcgtagacgtaggcggtattggtgatgcgcacggtcgcacgcctggcgcacgtagctacgtttacctcgacgaaagtaaagagatctacaaacgcctgattgtcagcgaagacaacaaaaccctgctcggtgcggtactggtgggcgataccagcgactacggtaacctgctgcaactggtgctgaacgctatcgaactgccggaaaacccggattccctgatcctgccagcacactcgggtagcggcaagccgtctatcggtgttgataaactgccggacagcgcgcaaatctgctcctgcttcgacgtcaccaaaggtgatctgattgctgccatcaacaaaggctgccacacagttgcggcgctgaaagctgaaaccaaagcgggtactggctgcggtggctgtatcccgctggtcactcaggtactgaacgcggaactggcgaaacagggcatcgaagttaacaacaacctgtgcgaacactttgcttattcgcgtcaggaactgttccatttgatccgcgttgaaggcattaaaaccttcgaagaactgctggcgaaacacggcaaaggctacggttgtgaagtttgtaaaccaaccgtcggttcgctgctggcctcctgctggaacgaatacattctgaagccggaacatactccgctgcaggattctaacgacaacttcctcgctaacatccagaaagacggcacctactcggtgatcccgcgttctccgggcggtgaaatcaccccggaagggctgatggcggtaggtcgtatcgcgcgtgaatttaatctctacaccaagatcactggctcccagcgtctggcgatgtttggcgcacagaaagacgatctgccggagatctggcgtcagctgattgaagccggcttcgaaaccggtcatgcctatgcgaaagcactgcgtatggcgaaaacctgcgtgggtagcacctggtgccgctacggcgttggcgacagcgtcggcctcggcgtggaactggaaaaccgctacaaaggcatccgtacgccgcacaaaatgaagttcggtgtctccggctgtacccgtgaatgttcagaagctcagggtaaagacgtgggtattatcgccactgaaaaaggctggaacctgtatgtttgcggtaacggcggcatgaaaccgcgtcatgcggatctgctggcggcggatatcgatcgcgaaacgctgatcaaatatctcgaccgcttcatgatgttctacatccgtactgccgacaaactgacgcgtaccgcaccgtggttagaaaacctcgaaggcggcatcgattacctgaaagcagtgatcattgacgacaaactggggctgaacgcacatctggaagaagagatggcgcgcctgcgtgaagcggtactgtgtgagtggactgaaacggtcaatacgccgtctgcgcagactcgcttcaaacacttcatcaacagcgacaagcgtgacccgaacgtgcagatggtgccagagcgcgaacagcaccgtccggcaacgccgtatgaacgtatcccagtaactctggtggaggacaacgcatga

SEQ ID NO: 6272 - DNA, 327 bp, Escherichia coli
  CDS (1)...(327)
atgagccagtggaaagacatctgcaaaatcgatgacatcctgcctgaaaccggcgtctgcgcgctgttaggtgacgagcaggtcgcgattttccgcccgtatcacagcgatcaggtgtttgcgatcagcaacatcgacccgttcttcgagtccagcgtgctgtcacgcggactgattgcggaacaccagggcgagctgtgggtcgccagcccgctgaaaaaacagcgttttcgcttaagcgacggcttgtgcatggaagacgaacagttttccgtcaaacattacgaagcgcgagtgaaagacggcgtggtgcagctgcgcggttaa

SEQ ID NO: 6273 - DNA, 1374 bp, Escherichia coli
  CDS (1)...(1374)
gtggatcatttgcctatattttgccaattacgcgatcgcgactgtctgattgtcggcggtggtgatgtcgcggaacgcaaagcaaggttgctgttagacgcaggcgctcgcttaacggtgaatgcattagcgtttattccacagttcaccgcatgggcagatgcaggcatgttaaccctcgtcgaagggccatttgatgaaagccttctcgacacctgctggctggcgattgcagcgacggatgatgacgcgcttaaccagcgcgtcagcgaagccgctgaagctcgtcgcatcttctgtaacgtggtcgatgcgccgaaagccgccagctttattatgccgtcgattattgaccgctcaccgctcatggtagcggtctcctctggcggcacctctccggttctggcacgcctgttgcgcgaaaaacttgaatcactgctgccgttacatctgggccaggtagcgaaatacgccgggcaattacgcgggcgagtgaaacaacagttcgccacgatgggtgagcgtcgccgtttctgggagaaattgttcgttaacgaccgcctggcgcagtcgctggcaaacaacgatcagaaagccattactgaaacgaccgaacagttaatcaacgaaccgctcgaccatcgcggtgaagtggtgctggttggtgcaggtccgggcgatgccgggctgctgacactgaaaggactgcaacaaattcagcaggcagatgtggtggtctacgaccgtctggtttctgacgatattatgaatctggtacgccgcgatgcggaccgtgttttcgtcggcaaacgcgcgggataccactgcgtaccccaggaagagattaaccagatcctgctgcgggaagcgcaaaaaggcaaacgcgtggtgcggctgaaaggtggcgatccgtttatttttggccgtggtggcgaagagctggaaacactgtgcaacgcgggtattccgttctcggtggttccgggtattaccgcagcttctggttgctctgcctattcgggtattccactcacgcatcgcgattatgcccagagcgtacgcttaattaccggacacttaaaaaccggtggcgagctggactgggaaaacctggcggcagaaaaacagacgctggtgttctatatggggttgaatcaggccgcgactattcagcaaaagctgattgaacacggaatgccaggcgaaatgccggtggcaattgtcgaaaacggtacggcagtcacgcagcgcgtgattgacggtacgctcacacagctgggagaactggcgcagcaaatgaacagtccatcgctaattattattggtcgggttgttggcctgcgcgataaactgaactggttctccaaccattaa

SEQ ID NO: 6274 - DNA, 1005 bp, Escherichia coli
  CDS (1)...(1005)
atgactaagcccatcgtttttagtggcgcacagccctcaggtgaattgaccattggtaactacatgggtgcgctgcgtcagtgggtaaacatgcaggatgactaccattgcatttactgtatcgttgaccaacacgcgatcaccgtgcgccaggatgcacagaagctgcgtaaagcgacgctggatacgctggccttgtatctggcttgtggtatcgatcctgagaaaagcaccatttttgttcagtcccacgtgccggaacatgcacagttaggctgggcactgaactgctatacctacttcggcgaactgagtcgcatgacgcagtttaaagataaatctgcgcgttatgccgagaacatcaacgctggtctgtttgactatccggtgctgatggcagcggacatcctgctgtatcaaactaatctggtaccggtgggtgaagaccagaaacagcacctcgaactgagccgcgatattgcccagcgtttcaacgcgctgtatggcgagatctttaaggtgccggagccgtttattccgaaatctggcgcgcgcgtaatgtcgctgctggagccgaccaagaagatgtccaagtctgacgataatcgcaataacgttatcggcctgctggaagatccgaaatcggtagtgaagaaaatcaaacgtgcggtcactgactccgacgagccgccggtagttcgctacgatgtgcagaacaaagcgggcgtttccaacctgttggatatcctttcagcggtaacgggccagagcatcccagaactggaaaaacagttcgaaggcaagatgtatggtcatctgaaaggtgaagtggctgatgccgtttccggtatgctgactgaattgcaggaacgctatcaccgtttccgcaacgatgaagccttcctgcaacaggtgatgaaagatggcgcggaaaaagccagcgcgcacgcttcccgtacgctaaaagcggtgtacgaagcgattggttttgtggcgaagccgtaa

SEQ ID NO: 6275 - DNA, 402 bp, Escherichia coli
  CDS (1)...(402)
atgaaagagaaacctgctgttgaggttcgactggataaatggctatgggctgcccgtttttataaaacccgcgcgctggcccgtgaaatgattgaaggcggtaaggtgcattacaacgggcagcgcagcaagccgagcaaaatcgtcgagctgaatgccacgctcactctgcgccagggaaatgacgaacgcacggtgattgtaaaggcgattactgaacagcgtcgccccgccagcgaggcagccttgctgtatgaagagactgcggaaagtgtagagaaacgcgaaaaaatggcgctggcacgtaaacttaatgccttaaccatgccgcacccggaccgacgcccggacaaaaaagagcgccgcgacctgttacgatttaaacacggcgacagtgaataa

SEQ ID NO: 6276 - DNA, 885 bp, Escherichia coli
  CDS (1)...(885)
atgattatgccgcaacatgaccaattacatcgctatctgtttgaaaactttgccgtgcgcggcgaactggtaaccgtttcggaaaccctgcaacagatccttgagaaccacgattatccgcagcccgttaaaaacgtgctggcagaactgctggttgcgaccagcctgttaaccgctacgctgaagtttgatggtgatatcaccgtacagctgcagggcgacggtccgatgaatctggcggttattaacggtaacaataaccagcagatgcgcggtgtggcgcgcgtgcagggcgaaattccagaaaatgccgacctgaaaacgctggtcggcaatggttacgtggtgatcaccattaccccgagcgaaggcgaacgctatcagggcgtagttggtctggaaggtgataccctggcggcctgcctggaagattactttatgcgttctgaacagctgccgacgcgcctgtttattcgcaccggcgacgtagacggcaaaccggctgcaggcggtatgttgttgcaggtaatgcctgcgcaaaatgcccagcaggacgactttgaccacctggcgacgctaaccgaaaccatcaaaaccgaagaactgctgaccttaccggcaaacgaagtgttgtggcgtttgtatcacgaagaagaggtgacggtttacgatccgcaggatgtggagttcaaatgcacctgctcgcgtgaacgttgcgccgatgcgctgaaaacgctgcctgatgaagaagttgatagcatcctggcggaagatggcgaaattgacatgcattgtgattactgcggtaaccactatctgttcaatgcgatggatattgctgaaatccgcaacaacgcgtctccggcagatccgcaagttcattaa

SEQ ID NO: 6277 - DNA, 1623 bp, Escherichia coli
  CDS (1)...(1623)
atgcgcgttaacaatggtttgaccccgcaagaactcgaggcttatggtatcagtgacgtacatgatatcgtttacaacccaagctacgacctgctgtatcaggaagagctcgatccgagcctgacaggttatgagcgcggggtgttaactaatctgggtgccgttgccgtcgataccgggatcttcaccggtcgttcaccaaaagataagtatatcgtccgtgacgataccactcgcgatactttctggtgggcagacaaaggcaaaggtaagaacgacaacaaacctctctctccggaaacctggcagcatctgaaaggcctggtgaccaggcagctttccggcaaacgtctgttcgttgtcgacgctttctgtggtgcgaacccggatactcgtctttccgtccgtttcatcaccgaagtggcctggcaggcgcattttgtcaaaaacatgtttattcgcccgagcgatgaagaactggcaggtttcaaaccagactttatcgttatgaacggcgcgaagtgcactaacccgcagtggaaagaacagggtctcaactccgaaaacttcgtggcgtttaacctgaccgagcgcatgcagctgattggcggcacctggtacggcggcgaaatgaagaaagggatgttctcgatgatgaactacctgctgccgctgaaaggtatcgcttctatgcactgctccgccaacgttggtgagaaaggcgatgttgcggtgttcttcggcctttccggcaccggtaaaaccaccctttccaccgacccgaaacgtcgcctgattggcgatgacgaacacggctgggacgatgacggcgtgtttaacttcgaaggcggctgctacgcaaaaactatcaagctgtcgaaagaagcggaacctgaaatctacaacgctatccgtcgtgatgcgttgctggaaaacgtcaccgtgcgtgaagatggcactatcgactttgatgatggttcaaaaaccgagaacacccgcgtttcttatccgatctatcacatcgataacattgttaagccggtttccaaagcgggccacgcgactaaggttatcttcctgactgctgatgctttcggcgtgttgccgccggtttctcgcctgactgccgatcaaacccagtatcacttcctctctggcttcaccgccaaactggccggtactgagcgtggcatcaccgaaccgacgccaaccttctccgcttgcttcggcgcggcattcctgtcgctgcacccgactcagtacgcagaagtgctggtgaaacgtatgcaggcggcgggcgcgcaggcttatctggttaacactggctggaacggcactggcaaacgtatctcgattaaagatacccgcgccattatcgacgccatcctcaacggttcgctggataatgcagaaaccttcactctgccgatgtttaacctggcgatcccaaccgaactgccgggcgtagacacgaagattctcgatccgcgtaacacctacgcttctccggaacagtggcaggaaaaagccgaaaccctggcgaaactgtttatcgacaacttcgataaatacaccgacacccctgcgggtgccgcgctggtagcggctggtccgaaactgtaa

SEQ ID NO: 6278 - DNA, 1353 bp, Escherichia coli
  CDS (1)...(1353)
atgaggcgattgcgcttctcgccacgaagttcatttgcccgtacgttattgctcatcgtcaccttgctgttcgccagcctggtgacgacttatctggtggtgctgaacttcgcgattttgccgagcctccagcagtttaataaagtcctcgcgtacgaagtgcgtatgttgatgaccgacaaactgcaactggaggacggcacgcagttggttgtgcctcccgctttccgtcgggagatctaccgtgagctggggatctctctctactccaacgaggctgccgaagaggcaggtctgcgttgggcgcaacactatgaattcttaagccatcagatggcgcagcaactgggcggcccgacggaagtgcgcgttgaggtcaacaaaagttcgcctgtcgtctggctgaaaacctggctgtcgcccaatatctgggtacgcgtgccgctgaccgaaattcatcagggcgatttctctccgctgttccgctatacgctggcgattatgctattggcgataggcggggcgtggctgtttattcgtatccagaaccgaccgttggtcgatctcgaacacgcagccttgcaggttggtaaagggattattccgccgccgctgcgtgagtatggcgcttcggaggtgcgttccgttacccgtgcctttaaccatatggcggctggtgttaagcaactggcggatgaccgcacgctgctgatggcgggggtaagtcacgacttgcgcacgccgctgacgcgtattcgcctggcgactgagatgatgagcgagcaggatggctatctggcagaatcgatcaataaagatatcgaagagtgcaacgccatcattgagcagtttatcgactacctgcgcaccgggcaggagatgccgatggaaatggcggatcttaatgcagtactcggtgaggtgattgctgccgaaagtggctatgagcgggaaattgaaaccgcgctttaccccggcagcattgaagtgaaaatgcacccgctgtcgatcaaacgcgcggtggcgaatatggtggtcaacgccgcccgttatggcaatggctggatcaaagtcagcagcggaacggagccgaatcgcgcctggttccaggtggaagatgacggtccgggaattgcgccggaacaacgtaagcacctgttccagccgtttgtccgcggcgacagtgcgcgcaccattagcggcacgggattagggctggcaattgtgcagcgtatcgtggataaccataacgggatgctggagcttggcaccagcgagcggggcgggctttccattcgcgcctggctgccagtgccggtaacgcgggcgcagggcacgacaaaagaagggtaa

SEQ ID NO: 6279 - DNA, 2223 bp, Escherichia coli
  CDS (1)...(2223)
gtgccgtttatcgcacgttatcgtaaggaaatcaccggcggtctggatgacacgcagctgcgtaatctggaaacgcgtctgagctatctgcgcgagctggaagagagacgtcaggcgatcctcaagtccatttccgagcaaggcaaactcaccgatgatctggcgaaggccatcaacgccaccctaagcaaaaccgaactcgaagacctctacctgccctacaaacctaaacgccgcacccgcgggcaaatcgccattgaagcagggcttgagccgttggctgacctgctgtggagcgatccgtcacacacgccagaagtcgccgctgcacaatatgtttatgccgataaaggcgtggcagataccaaagccgcgctggatggcgcgcgctatatcctgatggaacggtttgccgaagatgccgcgctgctggcgaaagtgcgtgattatctgtggaagaacgcgcatttggtttctacggtggtgagcggtaaagaagaggaaggggcgaaattccgcgactatttcgatcatcacgaaccgttgtccacggtgccttctcaccgcgcgctggcgatgttccgtgggcgtaacgaaggcgtacttcagctttcgctgaatgccgatccacagttcgatgagccgcccaaagagagctattgcgagcaaatcatcatggatcaccttggcctgcgcctgaacaatgccccggcggatagctggcgcaaaggcgtggtgagctggacgtggcgcatcaaggtgctgatgcatctggaaaccgaactgatgggcaccgtgcgcgaacgtgcggaagatgaagcaatcaacgtctttgcccgtaacctgcacgatctgctgatggcggcccctgccggactgcgtgcaacgatgggcctcgatccgggtctgcgtactggggtaaaagtggcggtggtcgatgccactggcaaactggtggcgaccgacaccatttacccgcacaccggacaggccgcaaaagcagcgatgaccgttgctgcgctgtgtgaaaaacataacgttgaactggtagcgatcggtaacggtacagcttcccgcgaaactgagcgtttctatctcgatgtgcagaagcagttcccgaaagtgaccgcgcagaaagtaatcgtcagcgaagcaggcgcgtcggtttactcggcttccgagctggctgcacaggagttcccggatctcgacgtttcgctgcgtggcgcggtgtctatcgcccgccgtttgcaggatccgctggcggagctggtgaaaatcgatccgaaatctatcggcgtaggtcagtatcagcatgacgtcagccagacgcaactggcccgcaaactggacgcagtagtagaagactgcgtaaacgccgttggcgtcgatctcaacactgcttctgttccgctgttaacccgcgtggcgggcctgacgcgcatgatggcgcaaaacatcgttgcctggcgcgatgagaacggtcagttccagaaccgtcagcaactgttaaaagtgagccgtctggggccgaaagccttcgagcagtgcgcgggcttcttgcgcattaaccacggtgataacccgctggacgcgtctaccgttcacccggaagcctatccggtggtggaacgcattctggcagcaacacagcaggcactgaaagatctgatgggtaacagcagcgaactgcgtaacctgaaagcgtctgactttactgatgagaaattcggtgtgccgacggtaaccgacatcatcaaagagctggaaaaaccgggtcgcgatccgcgtccggaatttaaaaccgctcagtttgccgatggcgtcgagacaatgaacgacctgcaaccgggtatgatcctcgaaggcgcagtgaccaacgtcaccaactttggcgcgtttgtcgatattggcgtgcatcaggacggcctggttcacatctcttcattgtcgaacaagtttgtggaagatccgcataccgtggtgaaagcgggcgacattgtgaaggtgaaagtgctggaagtggatcttcagcgtaaacgtatcgccctgactatgcgcctggatgagcagcctggcgaaaccaacgctcgtcgcggcggcggtaatgaacgcccgcaaaacaaccgcccggcagccaaaccacgcggtcgtgaagcgcagcctgccggtaatagcgcgatgatggatgcgctggcggcggcaatgggcaaaaaacgttaa

SEQ ID NO: 6280 - DNA, 1278 bp, Escherichia coli
  CDS (1)...(1278)
atgaaaccgatgcatattgcaatggcgctgctctctgccgcgatgttctttgtgctggcgggcgtctttatgggcgtgcaactggagctggatggcaccaaactggtggtcgacacggcttcggatgtccgttggcagtgggtgtttatcggcacggcggtggtctttttcttccagcttttgcgaccggctttccagaaagggttgaaaagcgtttccggaccgaagtttattctgcccgccattgatggctccacggtgaagcagaaactgttcctcgtggcgctgttggtgcttgcggtggcgtggccgtttatggtttcacgcgggacggtggatattgccaccctgaccatgatctacattatcctcggtctcgggctgaacgtggttgttggtctttctggtctgctggtgctggggtacggcggtttttacgccatcggcgcttacacttttgcgctgctcaatcactattacggcttgggcttctggacctgcctgccgattgctggattaatggcagcggcggcgggcttcctgctcggttttccggtgctgcgtttgcgcggtgactatctggcgatcgttaccctcggtttcggcgaaattgtgcgcatattgctgctcaataacaccgaaattaccggcggcccgaacggaatcagtcagatcccgaaaccgacactcttcggactcgagttcagccgtaccgctcgtgaaggcggctgggacacgttcagtaatttctttggcctgaaatacgatccctccgatcgtgtcatcttcctctacctggtggcgttgctgctggtggtgctaagcctgtttgtcattaaccgcctgctgcggatgccgctggggcgtgcgtgggaagcgttgcgtgaagatgaaatcgcctgccgttcgctgggcttaagcccgcgtcgtatcaagctgactgcctttaccataagtgccgcgtttgccggttttgccggaacgctgtttgcggcgcgtcagggctttgtcagcccggaatccttcacctttgccgaatcggcgtttgtgctggcgatagtggtgctcggcggtatgggctcgcaatttgcggtgattctggcggcaattttgctggtggtgtcgcgcgagttgatgcgtgatttcaacgaatacagcatgttaatgctcggtggtttgatggtgctgatgatgatctggcgtccgcagggcttgctgcccatgacgcgcccgcaactgaagctgaaaaacggcgcagcgaaaggagagcaggcatga

SEQ ID NO: 6281 - DNA, 1494 bp, Escherichia coli
  CDS (1)...(1494)
atggcgaaagaaaaaaaacgtggctttttttcctggctgggctttggtcaaaaagagcagaccccggaaaaagagacagaagttcagaatgaacaaccggttgtagaagaaatcgttcaggcgcaagagcctgtgaaggcctctgaacaagccgttgaagagcagccgcaagcgcatactgaagccgaggcggaaacttttgctgccgacgttgtggaagtcactgaacaggttgctgaaagtgaaaaagcgcagcctgaagcggaagtcgttgcacagccggaaccggtcgtagaagaaacgccggagccagtggctatcgaacgtgaagagctgccgttgccggaagacgtcaacgccgaagcggtttcgccagaagagtggcaggctgaagcggaaaccgtagagattgtcgaagcggcggaagaagaagcggctaaagaagaaattaccgacgaagagctggaaacggcgctggctgccgaagcggcagaagaggcggtgatggtggttcctccggcagaagaagagcagccggtggaagaaatcgctcaggagcaggaaaaaccgaccaaagaaggttttttcgcgcgcctgaaacgcagcctgttaaaaaccaaagaaaatctcggttccggatttatcagcctgttccgcggtaaaaaaatcgacgatgatctgtttgaggagctggaagagcagcttttgatcgccgatgtgggtgtggaaaccacacgtaaaattatcaccaatctgacggaaggcgcatcccgcaagcagcttcgtgacgccgaggcgctctatggcctgctgaaagaagagatgggcgagattctggcgaaagtcgatgagccgctgaatgttgaaggcaaagcgccgtttgtgatcctgatggtgggcgtcaacggtgtgggtaaaaccacgacgattggtaagctggcgcgtcagtttgagcagcagggtaaatcggtgatgctggcggcgggtgatactttccgtgcagctgcggttgaacagcttcaggtctggggtcagcgcaacaatattccggtgattgcccagcataccggggcggattccgcctctgttatcttcgacgccattcaggcagctaaagcgcgtaatatcgacgtcctgattgccgatacagccggacgcctgcagaacaaatcgcacctgatggaagagttgaagaaaatcgtccgcgtgatgaagaaactcgacgttgaagcgccgcatgaagttatgctgactattgatgccagcaccgggcagaacgcggtaagccaggccaaactgttccatgaagccgttggcttaaccggcatcacgctaacgaaactggacggcacggcgaaaggcggggtaattttctcggtggctgaccagtttggtatccctatccgctacattggtgtcggcgaacgtattgaggatttgcgtccgtttaaggcggacgactttatagaggcactttttgcccgagaggattaa

SEQ ID NO: 6282 - DNA, 1575 bp, Escherichia coli
  CDS (1)...(1575)
atgctctccacactccgccgcactctatttgcgctgctggcttgtgcgtcttttatcgtccatgccgctgcaccagatgaaatcaccaccgcctggccggtgaatgtcgggccactaaacccgcacctttacacgcctaaccagatgttcgcccagagcatggtttatgaaccattggtgaaatatcaggcagacggttcggtgatcccgtggctggcaaaaagctggactcattcagaagatggtaaaacctggaccttcaccctgcgtgatgacgtgaaattctccaacggtgaaccgttcgatgccgaggcggcggcagaaaacttccgcgcagtgctcgataaccgtcaacgtcacgcctggctggagctggcaaaccagattgttgatgttaaagcactcagtaaaacagagctgcaaattaccctgaaaagcgcctactatcctttcctgcaagaactggccctgccccgtcctttccgttttatcgctccctcgcagtttaaaaaccatgaaaccatgaacggaattaaagcgccgattggcaccggaccgtggattttgcaggaatcgaaactgaatcagtacgatgtcttcgtccgtaacgaaaactactggggcgaaaagccagcgattaaaaagatcacctttaacgtcatcccggacccgactacccgcgcggtggcgtttgaaactggcgatatcgacctgctgtacggaaacgaagggttattaccgctcgataccttcgcccgctttagccagaatccggcttaccacacccaactgtcacagccgatcgaaaccgtgatgctggcgctcaataccgccaaagcccccaccaacgagctggcagtacgtgaagctcttaattacgcggtaaacaaaaaatcgctgattgataacgcgttgtatggcacccagcaggtcgccgacaccctgtttgccccttctgtgccctacgccaacctcggcctgaaaccgagccagtacgatccgcaaaaagcgaaagcgttgctggaaaaagccggttggacgctgcctgcgggcaaagacatccgcgagaaaaatggtcagccgctgcgcattgaactttcgttcatcggcaccgatgcgttaagcaaatcgatggcggaaatcattcaggctgatatgcgccagattggcgcagatgtctcgctgattggcgaagaagagagcagtatctatgctcgtcagcgcgacggtcgttttggcatgattttccaccgcacctggggcgcgccatatgatccacacgccttcctcagttcaatgcgcgtaccgtcacacgctgacttccaggcacagcaaggattagccgacaaaccgctgattgataaagagatcggcgaagtgctggcgacccatgacgaaacgcaacgtcaggcgctgtatcgcgacattctgacccgtctgcatgacgaggcggtttatctgcctatcagttacatctcaatgatggtggtatcaaaaccggagctgggtaacatcccctacgcgccgatcgccaccgaaattccgttcgaacagattaaaccggtgaaaccttaa

SEQ ID NO: 6283 - DNA, 1203 bp, Escherichia coli
  CDS (1)...(1203)
gtggaaaggtttgatgccattattataggcgctggtgcggcgggtatgttctgttctgcgctggcaggtcaggcaggacgccgggttctgctgatcgataatggtaaaaaaccagggcgcaaaatccttatgtctggcggtgggcgctgcaactttaccaacctttatgtcgaaccaggcgcttatctgagccagaatccgcatttttgtaagtctgcactcgcacgttttacccagtgggatttcattgatctggtcaataaacacggcatcgcctggcacgagaaaacgttagggcaactcttctgcgatgactccgcgcagcagattgtcgacatgctggtggatgagtgcgagaagggcaatgtgaccttcagattgcgtagcgaagtgctgagtgtggcgaaggatgaaacaggcttcacgcttgatctgaacggcatgactgtcggttgcgaaaagctggtcatcgcgactggtgggctgtcaatgccggggctgggcgcgtcgccgtttggttataagattgccgaacaatttggcctcaacgtgctgccgacccgcgcgggtctggtgccattcactctgcataaaccgttgctcgaagagttacaggtgctggcgggcgtggcggtgccttccgtgattaccgctgaaaacggcaccgttttccgtgagaacttactcttcacccaccgcggcttgtctggaccggcggtgttgcagatttcaagctactggcaaccgggggaatttgtcagcatcaatctgctaccggatgtggacctcgaaaccttcctgaatgagcagcgtaacgcacatccgaatcaaagcctgaaaaacacactggcggttcatctaccgaagcggttggttgaacgcttacagcaactcgggcaaatcccggatgtttcgctaaaacagctcaacgtgcgtgaccaacaggcactgattagcacattgaccgactggcgcgtacaacccaacggcactgaaggctatcgcactgccgaagtgacgctcggcggcgtggacaccaacgaactctcttcacggacgatggaagcgcgcaaagtgcctgggctgtacttcatcggcgaagtgatggacgtcaccggctggctggggggctataacttccagtgggcgtggtcgagtgcgtgggcttgtgcgcaggatttgattgcagcaaagtcgtcctga

SEQ ID NO: 6284 - DNA, 1005 bp, Escherichia coli
  CDS (1)...(1005)
atgagtacgcaagaggccaccctgcaacaaccgctgttgcaggctatcgacctgaaaaaacattatccggtgaagaaaggcatgttcgcgccggaacgtctggttaaagcgctggatggcgtttcgtttaaccttgaacgtggcaaaacgctggcagtagtgggcgaatctggctgcggtaaatcgaccctcggtcggttgctgacgatgattgaaatgcccaccggtggcgagctgtattaccaggggcaggatctgcttaagcacgatccgcaggcgcagaagctgcgtcggcagaaaatccagatcgtcttccagaacccttacggttcgctgaatccgcgtaaaaaagtcgggcaaattcttgaagagccgctgctgatcaacaccagcttaagcaaagaacagcgtcgggaaaaagccctgtcgatgatggcgaaagtcggcctgaaaaccgagcactatgaccgctatccgcatatgttctccggcggtcagcgtcagcgtatcgccatcgcccgtggtctgatgctcgacccggatgtggtgattgccgatgaaccggtttccgcgctggatgtttcagtgcgcgcgcaggtgctgaatctgatgatggatttgcagcaggagttggggctgtcttatgtctttatctcccacgacctgtcggtggtggagcacattgctgatgaagtgatggtgatgtacctgggccgctgcgtggagaagggaacgaaagaccaaatcttcaataacccgcgccatccgtacactcaggcgctactttccgcgacgccgcgcctgaacccggacgatcgccgcgagcgcatcaagctcagcggtgaactaccaagcccactgaatccaccgccgggttgcgccttcaacgcccgctgtcgtcggcgcttcggcccctgcacccagttgcagccgcagctaaaagactacggcggtcaactggtagcttgttttgctgttgatcaggatgaaaatccgcagcgttaa

SEQ ID NO: 6285 - DNA, 912 bp, Escherichia coli
  CDS (1)...(912)
atgcaaaagtttgataccaggaccttccagggcttgatcctgaccttacaggattactgggctcgccagggctgcaccattgttcaaccattggacatggaagtcggcgcgggaacctctcacccaatgacctgtctgcgcgagctggggccagaaccgatggcggctgcttatgttcagccttctcgtcgcccgaccgatggtcgctacggcgaaaaccccaaccgtttacagcactactatcagttccaggtggtcattaagccatcgccggacaatattcaggagctgtacctcggttctctgaaagagctgggcatggacccgactattcacgacatccgtttcgtggaagataactgggaaaacccgacgctgggtgcctggggactgggctgggaagtgtggctgaacggcatggaagtgacgcagttcacttacttccagcaggttggtggtctggagtgtaaaccggttaccggcgagatcacctacggtctggaacgtctggccatgtacattcagggcgtagacagcgtttacgacctggtctggagcgacggcccgctgggtaaaaccacctacggcgacgtgttccatcagaacgaagtggagcagtccacttacaacttcgaatacgcggatgtggacttcctgttcacctgcttcgagcagtacgagaaagaagcgcagcagctgctggcgctggaaaatccgctgccgctgccagcctacgagcgtattctgaaagccgcccacagcttcaacctgctggatgcgcgtaaagccatctccgtcaccgagcgtcagcgctacattctgcgcattcgcaccctgaccaaagcagtggcagaagcatactacgcttcccgtgaagccctcggcttcccgatgtgcaacaaagataagtaa

SEQ ID NO: 6286 - DNA, 1455 bp, Escherichia coli
  CDS (1)...(1455)
atgtatatcgggatagatcttggcacctcgggcgtaaaagttattttgctcaacgagcagggtgaggtggttgctgcgcaaacggaaaagctgaccgtttcgcgcccgcatccactctggtcggaacaagacccggaacagtggtggcaggcaactgatcgcgcaatgaaagctctgggcgatcagcattctctgcaggacgttaaagcattgggtattgccggccagatgcacggagcaaccttgctggatgctcagcaacgggtgttacgccctgccattttgtggaacgacgggcgctgtgcgcaagagtgcactttgctggaagcgcgagttccgcaatcgcgggtgattaccggcaacctgatgatgcccggatttactgcgcctaaattgctatgggttcagcggcatgagccggagatattccgtcaaatcgacaaagtattattaccgaaagattacttgcgtctgcgtatgacgggggagtttgccagcgatatgtctgacgcagctggcaccatgtggctggatgtcgcaaagcgtgactggagtgacgtcatgctgcaggcttgcgacttatctcgtgaccagatgcccgcattatacgaaggcagcgaaattactggtgctttgttacctgaagttgcgaaagcgtggggtatggcgacggtgccagttgtcgcaggcggtggcgacaatgcagctggtgcagttggtgtgggaatggttgatgctaatcaggcaatgttatcgctggggacgtcgggggtctattttgctgtcagcgaagggttcttaagcaagccagaaagcgccgtacatagcttttgccatgcgctaccgcaacgttggcatttaatgtctgtgatgctgagtgcagcgtcgtgtctggattgggccgcgaaattaaccggcctgagcaatgtcccagctttaatcgctgcagctcaacaggctgatgaaagtgccgagccagtttggtttctgccttatctttccggcgagcgtacgccacacaataatccccaggcgaagggggttttctttggtttgactcatcaacatggccccaatgaactggcgcgagcagtgctggaaggcgtgggttatgcgctggcagatggcatggatgtcgtgcatgcctgcggtattaaaccgcaaagtgttacgttgattgggggcggggcgcgtagtgagtactggcgtcagatgctggcggatatcagcggtcagcagctcgattaccgtacggggggggatgtggggccagcactgggcgcagcaaggctggcgcagatcgcggcgaatccagagaaatcgctcattgaattgttgccgcaactaccgttagaacagtcgcatctaccagatgcgcagcgttatgccgcttatcagccacgacgagaaacgttccgtcgcctctatcagcaacttctgccattaatggcgtaa

SEQ ID NO: 6287 - DNA, 4134 bp, Escherichia coli
  CDS (1)...(4134)
atgagcggaaaaccggcagcgcgtcagggcgacatgacgcagtatggcggtagcattgttcagggttcagccggggtgcgcattggtgcccccaccggcgtggcctgttcggtgtgccccggcggagtgacgtccggccatccggtcaatcccctgctcggtgcaaaggtccttcccggtgaaaccgacatcgccctgcccggcccgctgccgttcatcctctcccgcacctacagcagttaccggacaaaaacgcccgcgccggtggggagcctcggccccggctggaaaatgcctgcggatatccgcttacagctgcgcgataacacactgatactcagtgataacggcggcagaagcctgtattttgagcacctgtttcccggtgaggacggttacagccgcagcgagtcactgtggctggtgcgcggcggcgtggcgaaactggatgaaggtcaccggctggccgcactctggcaggcgctgccggaagaactccgcttaagtccgcatcgttatctggcgacaaacagtccgcaggggccgtggtggctgctcggttggtgtgagcgggtgccggaagcggatgaggtgctgcctgcgccgctgccgccgtaccgggtactgaccgggctggtggaccgcttcgggcgcacacagacgttccaccgcgaagccgccggtgaattcagcggcgaaatcaccggcgtgacggatggtgcctggcgtcacttccggctggtactgaccacgcaggcgcagcgggcagaagaagcccggcagcaggccatttccggcgggacggaaccgtccgcttttcctgataccctgccgggttacaccgaatatggccgggacaacggcatccgtctgtctgccgtgtggctgacgcacgacccggaatacccggagaatttacctgccgcgccgctggtgcgctatggctggacgccacgcggcgaactggcggtggtgtatgaccgtagtggcaaacaggtgcgcagctttacttacgatgataaataccggggccggatggtggcgcaccgtcacacgggccggccggaaatccgttaccgttacgacagcgacgggcgggtgacagaacagctaaacccggcaggcttaagctacacgtatcagtatgagaaagaccgcatcaccatcaccgacagcctggaccgccgtgaagtgctgcacacgcagggcgaagccgggctgaagcgggtggtgaaaaaggaacacgcggacggcagcgtcacgcagagtcagtttgacgccgtgggcaggctcagggcacagacggatgccgcaggcaggacaacagagtacagcccggatgtggtgacgggcctcatcacgcgcataaccacgccggatggcagggcatcggcgttttactataaccaccacaaccagttaacgtcagccaccgggcctgacgggctggaattgcgccgggaatatgatgaattgggccgtctgattcaggaaactgcccctgacggcgatatcacccgctaccgttatgataatccacacagtgacttaccctgcgcaacggaagatgccaccggcagccggaaaaccatgacgtggagccgttacggtcagttgctgagcttcaccgactgttccggttatgtaacccgttatgaccatgaccgcttcgggcagatgacggcggtgcaccgcgaggaagggctgagtcagtaccgcgcatacgacagccgtggacagttaattgccgtgaaagacacgcagggccatgaaacgcggtatgaatacaacatcgccggtgacctgaccgccgtcattgccccggacggcagcagaaacgggacacagtacgatgcgtggggaaaggccgtccgtaccacgcagggcgggctaacgcgcagtatggaatacgatgctgccggacgggtcatccgcctgaccagtgaaaacggcagccacaccaccttccgttacgatgtacttgaccggctgatacaggaaaccggctttgacggccgcacacagcgttatcaccacgacctgaccggcaaacttatccgcagcgaggatgagggtctggtcacccactggcactatgacgaagcagaccgcctcacgcaccgcaccgtgaagggtgaaaccgcagagcggtggcagtatgacgaacgtggctggctgacagacatcagccatatcagcgaagggcaccgggtggcggtgcattacaggtatgatgagaaaggccggctgaccggtgagcgtcagacggtgcatcacccgcagacggaagcactgctctggcagcatgagaccagacatgcgtacaacgcgcaggggctggcgaaccgctgtataccggacagcctgcccgccgtggaatggctgacctacggcagcggttacctggcaggcatgaaactcggcgacacaccgctggtggagtacacccgcgaccgcctgcaccgggaaacgctgcgcagcttcggccgttatgaactcaccaccgcttatacccctgccgggcagttacagagccagcacctgaacagcctgctgtctgaccgcgattacacctggaacgacaacggcgaactcatccgcatcagcagcccgcgccagacccggagttacagctacagcaccaccggcaggctgaccggcgttcacaccaccgcagcgaatctggatatccgcatcccgtatgccacagacccggcaggtaaccgcctgcccgacccggagctgcacccggacagcaccctcagcatgtggccggataaccgtatcgcccgtgacgcgcactatctttaccggtatgaccgtcacggcaggctgacagagaaaaccgacctcatcccggaaggggttatccgcacggatgatgagcggactcaccggtaccattacgacagtcagcaccggctggtgcactacacgcggacacaatatgaagagccgctggtcgaaagtcgctatctttacgacccgctgggccgcagggtggcaaaacgggtgtggcggcgtgaacgggacctgacgggctggatgtcgctgtcacggaaaccgcaagtgacctggtacggctgggacggcgaccggctgaccacaatacagaacgacagaacccgcatccagacgatttatcagccggggagcttcacgccactcatcagagttgaaaccgccaccggtgagctggcgaaaacgcagcgccgcagcctggcggatgcgcttcagcagtccggcggcgaagacggtggcagtgtggtgttcccgccggtgctggtgcagatgctcgaccggctggaaagtgaaatcctggctgaccgggtgagtgaggaaagccgccgctggctggcatcgtgcggcctgaccgtggagcagatgcaaaaccagatggacccggtgtacacgccggcgcgaaaaatccacctgtaccactgcgaccatcgcggcctgccgctggcccttatcagcaaggaagggacaacagaatggtgcgcagaatacgatgaatggggcaacctgctgaatgaagagaacccgcatcagctgcagcagcttatccgcctgccggggcagcagtatgatgaggagtccggcctgtattacaaccgccaccgctattatgacccgctgcaggggcggtatatcactcaggatccgattgggctgaaggggggatggaatttttatcagtatccgttgaatccagttacgaatacagatcctctggggttagaagtttttcctagaccattccccttgccaattccatggcccaaaagccctgcacagcagcaagcagatgataatgctgcaaaagcattgacaaaatggtggaacgatacagcatcacaaagaatatttgactctctaatattgaataatccgggactagcattagatataacaatgatagcttctcgtggaaatgttgcagacacagggataactgatcgtgtcaatgacataataaatgacagattctggagtgatgggaaaaaacccgacagatgtgacgtacttcaggaactaattgattgtggtgatattagtgctaaagatgcaaaaagcacacagaaagcctggaattgtcgtcactccagacagtcaaacgataaaaaaagatag

SEQ ID NO: 6288 - DNA, 1149 bp, Escherichia coli
  CDS (1)...(1149)
atgaaagcattacattttggcgcaggtaatatcggtcgtggctttatcggtaaactgctggcagacgcgggtatccaactgacgtttgccgatgtcaatcaggtggtacttgatgccctgaatgcccgtcatagctatcaggtacatgtggttggtgaaaccgagcaggtagataccgtttccggcgtcaatgctgtcagcagcattggtgatgatgtcgttgatctgattgctcaggttgatttagtcactaccgccgttggcccggttgtgctggaacgtattgctccggcaatcgccaaagggcaggtgaaacgtaaagaacaaggtaatgaatccccgctgaacatcatcgcctgtgaaaacatggtacgcggtaccacgcagctgaaaggccatgtgatgaacgccctgccggaagacgccaaagcgtgggtagaagaacacgttggctttgtcgattccgccgttgaccgcatcgtaccgccttcggcttcggcaactaacgatccgctggaagtgacggtagaaaccttcagcgaatggattgtcgataaaacgcagttcaaaggcgcactgccgaacatcccaggcatggagttaaccgacaacctgatggcatttgtcgaacgtaaactcttcaccctgaacacgggtcatgctataaccgcgtacctcggaaaactggccggtcatcagaccattcgtgacgcgattctcgacgagaaaatccgcgcggtggtaaaaggtgcgatggaagaaagtggtgcagtattgatcaagcgctacggctttgacgctgacaagcatgcggcgtacatccagaaaattctcggccgttttgagaacccgtatctgaaagatgatgtagagcgcgtaggccgtcagccactgcgtaaactgagtgctggcgaccgtctgatcaagccactgctcggtacgctggaatatggtctgccacataaaaacctgattgaaggtattgccgctgcaatgcacttccgcagtgaagatgatccgcaggctcaggaactggcagcactgatcgctgacaaaggtccgcaggcggcgctggcacagatttccggtcttgatgccaacagcgaggttgtatccgaggcggtaaccgcttataaagcaatgcaataa

SEQ ID NO: 6289 - DNA, 777 bp, Escherichia coli
  CDS (1)...(777)
atgattgttttacccagacgcctgtcagacgaggttgccgatcgtgtgcgggcgctgattgatgaaaaaaacctggaagcgggcatgaagttgcccgctgagcgccaactggcgatgcaactcggcgtatcacgtaattcactgcgcgaggcgctggcaaaactggtgagtgaaggcgtgctgctcagtcgacgcggcggcgggacgtttattcgctggcgtcatgacacatggtcggagcaaaacatcgtccagccgctaaaaacactgatggccgatgatccggattacagtttcgatattctggaagcccgctacgccattgaagccagcaccgcatggcatgcggcaatgcgcgccacacctggcgacaaagaaaagattcagctttgctttgaagcaacgctaagtgaagacccggatatcgcctcacaagcggacgttcgttttcatctggcgattgccgaagcctcacataacatcgtgctgctgcaaaccatgcgcggtttcttcgatgtcctgcaatcctcagtgaagcatagccgtcagcggatgtatctggtgccaccggttttttcacaactgaccgaacaacatcaggctgtcattgacgccatttttgccggtgatgctgacggggcgcgtaaagcaatgatggcgcaccttagttttgttcacaccaccatgaaacgattcgatgaagatcaggctcgccacgcacggattacccgcctgcccggtgagcataatgagcattcgagggagaaaaacgcatga

SEQ ID NO: 6290 - DNA, 1191 bp, Escherichia coli
  CDS (1)...(1191)
atgattatttccgcagccagcgattatcgcgccgcagcgcaacgcattctgccgccgttcctgttccactatatggatggtggtgcatattctgaatacacgctgcgccgcaacgtggaagatttgtcagaagtggcgctgcgccagcgtattctgaaaaacatgtccgacttaagcctggaaacgacgctgtttaatgagaaattgtcgatgccggtggcactggctccggtgggtttgtgtggcatgtatgcgcgtcgtggcgaagttcaggcagccaaagcggcggacgcgcatggtattccgtttactctctcgacggtttccgtttgcccgattgaagaagtcgcgccagccatcaagcgcccaatgtggttccagctttatgtactgcgcgatcgcggctttatgcgtaacgcgctggagcgagcaaaagcagcgggttgttcgacgctggttttcaccgtggatatgccgacaccgggcgcacgctaccgtgatgcgcattcaggtatgagcggcccgaacgcggcaatgcgccgctacttgcaagcggtgacacatccgcaatgggcgtgggatgtgggcctgaacggtcgtccacatgatttaggtaatatctcagcttatctcggcaaaccgaccggactggaagattacatcggctggctggggaataacttcgatccgtccatctcatggaaagaccttgaatggatccgcgatttctgggatggcccgatggtgatcaaagggatcctcgatccggaagatgcgcgcgatgcagtacgttttggtgctgatggaattgtggtttctaaccacggtggccgccagctggacggtgtactctcttccgcccgtgcactgcctgctattgcagatgcggtgaaaggtgatatagccattctggcggatagcggaattcgtaacgggcttgatgtcgtgcgtatgattgcgctcggtgccgacaccgtactgctgggtcgtgctttcttgtatgcgctggcaacagcgggccaggcgggtgtagctaacctgctaaatctgatcgaaaaagagatgaaagtggcgatgacgctgactggcgcgaaatcgatcagcgaaattacgcaagattcgctggtgcaggggctgggtaaagagttgcctgcggcactggctcccatggcgaaagggaatgcggcatag

SEQ ID NO: 6291 - DNA, 822 bp, Escherichia coli
  CDS (1)...(822)
atgtcgtgtgaagaactggaaattgtctggaacaatattaaagccgaagccagaacgctggcggactgtgagccaatgctggccagtttttaccacgcgacgctactcaagcacgaaaaccttggcagtgcactgagctacatgctggcgaacaagctgtcatcgccaattatgcctgctattgctatccgtgaagtggtggaagaagcctacgccgctgacccggaaatgatcgcctctgcggcctgtgatattcaggcggtgcgtacccgcgacccggcagtcgataaatactcaaccccgttgttatacctgaagggttttcatgccttgcaggcctatcgcatcggtcactggttgtggaatcaggggcgtcgcgcactggcaatctttctgcaaaaccaggtttctgtgacgttccaggtcgatattcacccggcagcaaaaattggtcgcggtatcatgcttgaccacgcgacaggcatcgtcgttggtgaaacggcggtgattgaaaacgacgtatcgattctgcaatctgtgacgcttggcggtacgggtaaatctggtggtgaccgtcacccgaaaattcgtgaaggtgtgatgattggcgcgggcgcgaaaatcctcggcaatattgaagttgggcgcggcgcgaagattggcgcaggttccgtggtgctgcaaccggtgccgccgcataccaccgccgctggcgttccggctcgtattgtcggtaaaccagacagcgataagccatcaatggatatggaccagcatttcaacggtattaaccatacatttgagtatggggatgggatctaa

SEQ ID NO: 6292 - DNA, 1020 bp, Escherichia coli
  CDS (1)...(1020)
atgaaccaacgtaatgcttcaatgactgtgatcggtgccggctcgtacggcaccgctcttgccatcaccctggcaagaaatggccacgaggttgtcctctggggccatgaccctgaacatatcgcaacgcttgaacgcgaccgctgtaacgccgcgtttctccccgatgtgccttttcccgatacgctccatcttgaaagcgatctcgccactgcgctggcagccagccgtaatattctcgtcgtcgtacccagccatgtctttggtgaagtgctgcgccagattaaaccactgatgcgtcctgatgcgcgtctggtgtgggcgaccaaagggctggaagcggaaaccggacgtctgttacaggacgtggcgcgtgaggccttaggcgatcaaattccgctggcggttatctctggcccaacgtttgcgaaagaactggcggcaggtttaccgacagctatttcgctggcctcgaccgatcagacctttgccgatgatctccagcagctgctgcactgcggcaaaagtttccgcgtttacagcaatccggatttcattggcgtgcagcttggcggcgcggtgaaaaacgttattgccattggtgcggggatgtccgacggtatcggttttggtgcgaatgcgcgtacggcgctgatcacccgtgggctggctgaaatgtcgcgtcttggtgcggcgctgggtgccgaccctgccacctttatgggcatggcggggcttggcgatctggtgcttacctgtaccgacaaccagtcgcgtaaccgccgttttggcatgatgctcggtcagggcatggatgtacaaagcgcgcaggagaagattggtcaggtggtggaaggctaccgcaatacgaaagaagtccgcgaactggcgcatcgcttcggcgttgaaatgccaataaccgaggaaatttatcaagtattatattgcggaaaaaacgcgcgcgaggcagcattgactttactaggtcgtgcacgcaaggacgagcgcagcagccactaa

SEQ ID NO: 6293 - DNA, 1197 bp, Escherichia coli
  CDS (1)...(1197)
atgcgtggagaattttatcagcagttaaccaacgatctggaaaccgcacgggcggaagggttgtttaaagaagagcgcattattacgtctgcgcagcaagcagatatcactgtggctgatggaagccacgtcattaacttttgtgccaacaactatctcgggctggcgaatcatcctgatctgattgcggcggcaaaggcgggaatggattctcacggtttcggcatggcttcggtgcgttttatttgcggcactcaggacagccataaagagcttgaacaaaaactggcggccttcctggggatggaagatgcgattctctactcttcctgctttgatgctaacggtggcctgtttgaaacgcttctgggtgcggaagacgccattatctccgacgcactgaaccacgcgtctattattgatggtgtgcgtctgtgcaaagctaaacgctatcgctatgccaacaacgatatgcaggagctggaagcacgtctgaaagaagcgcgtgaagccggtgcgcgtcatgtgctgatcgccaccgatggtgtgttctcaatggacggcgtgattgccaacctgaagggcgtttgcgatctggcagataaatatgatgccctggtgatggtagacgactcccacgcggtcggttttgtcggtgaaaatggtcgtggttcccatgaatactgcgatgtgatgggccgggtcgatattatcaccggtacgcttggtaaagcgctgggcggggcttctggtggttataccgcggcgcgcaaagaagtggttgagtggctgcgccagcgttctcgtccgtacctgttctccaactcgctggcaccggccattgttgccgcgtccatcaaagtactggagatggtcgaagcgggcagcgaactgcgtgaccgtctgtgggcgaacgcgcgtcagttccgtgagcaaatgtcggcggcgggctttaccctggcgggagccgatcacgccattattccggtcatgcttggtgatgcggtagtggcgcagaaatttgcccgtgagctgcaaaaagagggcatttacgttaccggtttcttctatccggtcgttccgaaaggtcaggcgcgtattcgtacccagatgtctgcggcgcatacccctgagcaaattacgcgtgcagtagaagcatttacgcgtattggtaaacaactgggcgttatcgcctga

SEQ ID NO: 6294 - DNA, 237 bp, Escherichia coli
  CDS (1)...(237)
atgtcccgagtctgccaagttactggcaagcgtccggtgaccggtaacaaccgttcccacgcactgaacgcgactaaacgccgtttcctgccgaacctgcactctcaccgtttctgggttgagagcgagaagcgttttgtcaccctgcgcgtatctgctaaaggtatgcgtgtaatcgataaaaaaggcatcgatacagttctggctgaactgcgtgcccgtggcgaaaagtactaa

SEQ ID NO: 6295 - DNA, 813 bp, Escherichia coli
  CDS (1)...(813)
atggctattaaactcattgctatcgatatggatggcacccttctgctgcccgatcacaccatttcacccgccgttaaaaatgcgattgccgcagctcgcgcccgtggcgtgaatgtcgtgctaacgacgggtcgcccgtatgcaggtgtgcacaactacctgaaagagctgcatatggaacagccgggcgactactgcattacttataacggcgcgctggtacagaaggccgctgatggtagcaccgtggcgcaaactgctctcagctatgacgactatcgtttcctggaaaaactctctcgcgaagtcggttctcatttccacgccctggaccgcaccacgctgtacaccgccaaccgtgatatcagctactacacggtgcatgaatccttcgttgccaccattccgctggtgttctgcgaagcggagaaaatggaccccaatacccagttcctgaaagtgatgatgattgatgaacccgccatcctcgaccaggctatcgcgcgtattccgcaggaagtgaaagagaaatataccgtgctgaaaagtgcgccgtacttcctcgaaatcctcgataaacgcgttaacaaaggtacgggggtgaaatcactggccgacgtgttaggtattaaaccggaagaaatcatggcgattggcgatcaggaaaacgatatcgcaatgattgaatatgcaggcgtcggtgtggcgatggataacgctattccttcagtgaaagaagtggcgaactttgtcaccaaatctaaccttgaagatggcgtggcgtttgctattgagaagtatgtgctgaattaa

SEQ ID NO: 6296 - DNA, 2415 bp, Escherichia coli
  CDS (1)...(2415)
atgtcgaattcttatgactcctccagtatcaaagtcctgaaagggctggatgcggtgcgtaagcgcccgggtatgtatatcggcgacacggatgacggcaccggtctgcaccacatggtattcgaggtggtagataacgctatcgacgaagcgctcgcgggtcactgtaaagaaattatcgtcaccattcacgccgataactctgtctctgtacaggatgacgggcgcggcattccgaccggtattcacccggaagagggcgtatcggcggcggaagtgatcatgaccgttctgcacgcaggcggtaaatttgacgataactcctataaagtgtccggcggtctgcacggcgttggtgtttcggtagtaaacgccctgtcgcaaaaactggagctggttatccagcgcgagggtaaaattcaccgtcagatctacgaacacggtgtaccgcaggccccgctggcggttaccggcgagactgaaaaaaccggcaccatggtgcgtttctggcccagcctcgaaaccttcaccaatgtgaccgagttcgaatatgaaattctggcgaaacgtctgcgtgagttgtcgttcctcaactccggcgtttccattcgtctgcgcgacaagcgcgacggcaaagaagaccacttccactatgaaggcggcatcaaggcgttcgttgaatatctgaacaagaacaaaacgccgatccacccgaatatcttctacttctccactgaaaaagacggtattggcgtcgaagtggcgttgcagtggaacgatggcttccaggaaaacatctactgctttaccaacaacattccgcagcgtgacggcggtactcacctggcaggcttccgtgcggcgatgacccgtaccctgaacgcctacatggacaaagaaggctacagcaaaaaagccaaagtcagcgccaccggtgacgatgcgcgtgaaggcctgattgcggtcgtttccgtgaaagtgccggacccgaaattctcctcccagaccaaagacaaactggtttcttctgaggtgaaatcggcggttgaacagcagatgaacgaactgctggcagaatacctgctggaaaacccaaccgacgcgaaaatcgtggttggcaaaattatcgatgctgcccgtgcccgtgaagcgccgcgtcgcgcgcgtgaaatgacccgccgtaaaggtgcgctcgacttagcgggcctgccgggcaaactggcagactgccaggaacgcgatccggcgctttccgaactgtacctggtggaaggggactccgcgggcggctctgcgaagcaggggcgtaaccgcaagaaccaggcgattctgccgctgaagggtaaaatcctcaacgtcgagaaagcgcgcttcgataagatgctctcttctcaggaagtggcgacgcttatcaccgcgcttggctgtggtatcggtcgtgacgagtacaacccggacaaactgcgttatcacagcatcatcatcatgaccgatgcggacgtcgacggctcgcacattcgtacgctgctgttgaccttcttctatcgtcagatgccggaaatcgttgaacgcggtcacgtctacatcgctcagccgccgctgtacaaagtgaagaaaggcaagcaggaacagtacattaaagacgacgaagcgatggatcagtaccagatctctatcgcgctggacggcgcaacgctgcacaccaacgccagtgcaccggcattggctggcgaagcgttagagaaactggtatctgagtacaacgcgacgcagaaaatgatcaatcgtatggagcgtcgttatccgaaagcaatgctgaaagagcttatctatcagccgacgttgacggaagctgacctttctgatgagcagaccgttacccgctgggtgaacgcgctggtcagcgaactgaacgacaaagaacagcacggcagccagtggaagtttgatgttcacaccaatgctgagcaaaacctgttcgagccgattgttcgcgtgcgtacccacggtgtggatactgactatccgctggatcacgagtttatcaccggtggcgaatatcgtcgtatctgcacgctgggtgagaaactgcgtggcttgctggaagaagatgcgtttatcgaacgtggcgagcgtcgtcagccggtagccagcttcgagcaggcgctggactggctggtgaaagagtcccgtcgcggcctctccatccagcgttataaaggtctgggcgagatgaacccggaacagctgtgggaaaccactatggacccggaaagtcgtcgtatgctgcgcgttaccgttaaagatgcgattgctgccgaccagttgttcaccacgctgatgggcgacgccgttgaaccgcgccgtgcgtttattgaagagaacgccctgaaagcggcgaatatcgatatttaa

SEQ ID NO: 6297 - DNA, 1101 bp, Escherichia coli
  CDS (1)...(1101)
atgaaatttaccgtagaacgtgagcatttattaaaaccgctacaacaggtgagcggtccgttaggtggtcgtcctacgctaccgattctcggtaatctgctgttacaggttgctgacggtacgttgtcgctgaccggtactgatctcgagatggaaatggtggcacgtgttgcgctggttcagccacacgagccaggagcgacgaccgttccggcgcgcaaattctttgatatctgccgtggtctgcctgaaggcgcggaaattgccgtgcagctggaaggtgaacggatgctggtacgctccgggcgtagccgtttttcgctgtctaccctgccagcggcggatttcccgaacctcgatgactggcagagtgaagtcgaatttaccctgccgcaggcaacgatgaagcgtctgattgaagcgacccagttttctatggcgcatcaggacgttcgctattacttaaatggtatgctgtttgaaaccgaaggtgaagaactgcgcaccgtggcaaccgacggccaccgtctggcggtctgttcaatgccaattggtcaatctttgccaagccattcggtgatcgtaccgcgtaaaggcgtgattgaactgatgcgtatgctcgacggcggcgacaatccgctgcgcgtacagattggcagcaacaacattcgcgcccacgttggcgactttatcttcacctccaaactggtggatggtcgcttcccggattatcgccgcgttctgccgaagaacccggacaaacatctggaagctggctgcgatctgctcaagcaggcgtttgctcgcgcggcgattctctctaacgagaaattccgcggcgtacgtctttatgtcagcgaaaaccagctgaaaatcaccgccaacaacccggaacaggaagaagcggaagagatcctcgacgttacctatagcggtgcggagatggaaatcggcttcaacgtcagttatgtgctggatgttctgaacgcgctgaaatgcgaaaacgtccgcatgatgctgaccgattcggtttccagcgtgcagattgaagatgcggccagccagagcgcggcttatgttgtcatgccaatgagactgtaa

SEQ ID NO: 6298 - DNA, 1404 bp, Escherichia coli
  CDS (1)...(1404)
gtgtcactttcgctttggcagcagtgtcttgcccgattgcaggatgagttaccagccacagaattcagtatgtggatacgcccattgcaggcggaactgagcgataacacgctggccctgtacgcgccaaaccgttttgtcctcgattgggtacgggacaagtaccttaataatatcaatggactgctaaccagtttctgcggagcggatgccccacagctgcgttttgaagtcggcaccaaaccggtgacgcaaacgccacaagcggcagtgacgagcaacgtcgcggcccctgcacaggtggcgcaaacgcagccgcaacgtgctgcgccttctacgcgctcaggttgggataacgtcccggccccggcagaaccgacctatcgttctaacgtaaacgtcaaacacacgtttgataacttcgttgaaggtaaatctaaccaactggcgcgcgcggcggctcgccaggtggcggataaccctggcggtgcctataacccgttgttcctttatggcggcacgggtctgggtaaaactcacctgctgcatgcggtgggtaacggcattatggcgcgcaagccgaatgccaaagtggtttatatgcactccgagcgctttgttcaggacatggttaaagccctgcaaaacaacgcgatcgaagagtttaaacgctactaccgttccgtagatgcactgctgatcgacgatattcagttttttgctaataaagaacgatctcaggaagagtttttccacaccttcaacgccctgctggaaggtaatcaacagatcattctcacctcggatcgctatccgaaagagatcaacggcgttgaggatcgtttgaaatcccgcttcggttggggactgactgtggcgatcgaaccgccagagctggaaacccgtgtggcgatcctgatgaaaaaggccgacgaaaacgacattcgtttgccgggcgaagtggcgttctttatcgccaagcgtctacgatctaacgtacgtgagctggaaggggcgctgaaccgcgtcattgccaatgccaactttaccggacgggcgatcaccatcgacttcgtgcgtgaggcgctgcgcgacttgctggcattgcaggaaaaactggtcaccatcgacaatattcagaagacggtggcggagtactacaagatcaaagtcgcggatctcctttccaagcgtcgatcccgctcggtggcgcgtccgcgccagatggcgatggcgctggcgaaagagctgactaaccacagtctgccggagattggcgatgcgtttggtggccgtgaccacacgacggtgcttcatgcctgccgtaagatcgagcagttgcgtgaagagagccacgatatcaaagaagatttttcaaatttaatcagaacattgtcatcgtaa

SEQ ID NO: 6299 - DNA, 141 bp, Escherichia coli
  CDS (1)...(141)
atgaaacgcacttttcaaccgtctgtactgaagcgcaaccgttctcacggcttccgtgctcgtatggctactaaaaatggtcgtcaggttctggcacgtcgtcgtgctaaaggccgcgctcgtctgaccgtttctaagtaa

SEQ ID NO: 6300 - DNA, 1365 bp, Escherichia coli
  CDS (1)...(1365)
atgagcgataatgacactatcgtagcccaggccacgcctccgggacgtggcggcgttggcatcctgcgcatctccggcttcaaagcccgtgaagttgccgaaaccgtgctgggtaaactgcctaagccgcgctacgccgattatcttccgtttaaagacgccgacggcagcgtgctcgatcaggggattgcgctatggttccctggcccgaactcgttcaccggcgaagatgtgctggaactgcaaggtcatggcggtccggtgatcctcgacctgctgttaaaacgcattctgaccattcccggcctgcggattgctcgccctggtgagttttccgaacgcgcgtttcttaacgataaacttgacttagcccaggccgaggcgattgccgatcttatcgacgccagttcggaacaggcggcccgttcggcacttaactcgctgcaaggcgcattctccgcacgggttaatcatctggtagaagccctcacccacttgcgcatttacgtcgaagcggcaattgatttccccgatgaagagatcgatttcctctccgacggaaaaattgaagcccagctcaatgacgttattgccgatcttgatgcagtgcgtgctgaagcacgtcagggtagtttgttgcgcgaagggatgaaagtggtgattgccggacgtcctaacgccggtaaatcgagcctgttaaacgcgctggcggggcgtgaagcggcaatcgtaaccgatatcgccggaactacgcgtgacgtgctgcgtgagcatatccacattgacggaatgccgctgcatatcatcgataccgccgggctacgtgaagccagtgacgaagtagaacgtattggtatcgagcgcgcgtggcaggaaattgaacaggccgaccgcgtgctgtttatggtcgatggcaccacaacagacgccgtggatccggcagagatctggccggaatttattgcccgtctgccagcgaaactgccgatcaccgtggtgcgcaataaagccgatatcaccggcgaaacgctgggaatgagtgaagtgaacggtcacgcgttaattcgtctctcggcaaggactggtgaaggcgtggacgtgctgcgtaaccatctcaaacagagcatgggctttgacaccaacatggaaggcggcttcctggcgcgtcgtcgccacctacaggcgctggaacaggcagcggaacatctacaacagggcaaagcgcaactgttgggagcctgggcaggtgaactgctggcggaagagttgcgtctggcacagcagaacttaagcgaaatcaccggggaatttacttcagacgacctgctggggcggattttctccagcttctgtattggtaagtaa

SEQ ID NO: 6301 - DNA, 960 bp, Escherichia coli
  CDS (1)...(960)
atggctgcaaccaagcctgcttttaacccaccgggtaaaaagggcgacataattttcagcgtgctggtaaaactggcggcgctgattgtgctattgatgttgggtggcattattgtctctctgatcatctcctcctggccgagcattcagaaatttggtctggctttcctatggaccaaagagtgggatgcaccgaacgatatctacggggcgctggtgccgatctacggtacgttggtgacttcgtttatcgcgctgctgatcgccgtcccggtgagtttcggtatcgccctgttcctgactgagcttgcgcctggctggctgaaacgcccgctgggtatcgccattgagctgctggcagccattccaagtatcgtttacggcatgtggggcctgtttatctttgcgccgctgttcgccgtttactttcaggagccggtcggcaatatcatgtcgaatatcccgattgttggcgcgctgttctctggccccgcatttggtatcggtatcctcgcggcaggcgtgatcctcgccatcatgattattccgtacattgcggcggtaatgcgtgatgtgttcgaacaaaccccggtgatgatgaaagagtcggcctacggtattggctgcaccacctgggaagttatctggcgtatcgttcttccgttcaccaaaaatggtgttatcggcggcatcatgctggggctgggccgcgcgctcggtgaaaccatggcggtgacctttatcatcggtaacacctaccagctcgacagcgcctcgctgtatatgccgggcaacagtatcacctctgcgctggcgaacgaatttgcggaagcggaatccggtctgcacgttgccgcactgatggaactgggcctgatcctgtttgtgattaccttcatcgtcctcgccgcatcgaagtttatgattatgcgcctggctaagaatgagggggcacgctaa

SEQ ID NO: 6302 - DNA, 1830 bp, Escherichia coli
  CDS (1)...(1830)
atgtgtggaattgttggcgcgatcgcgcaacgtgatgtagcagaaatccttcttgaaggtttacgtcgtctggaataccgcggatatgactctgccggtctggccgttgttgatgcagaaggtcatatgacccgcctgcgtcgcctcggtaaagtccagatgctggcacaggcagcggaagaacatcctctgcatggcggcactggtattgctcacactcgctgggcgacccacggtgaaccttcagaagtgaatgcgcatccgcatgtttctgaacacattgtggtggtgcataacggcatcatcgaaaaccatgaaccgctgcgtgaagagctaaaagcgcgtggctataccttcgtttctgaaaccgacaccgaagtgattgcccatctggtgaactgggagctgaaacaaggcgggactctgcgtgaggccgttctgcgtgctatcccgcagctgcgtggtgcgtacggtacagtgatcatggactcccgtcacccggataccctgctggcggcacgttctggtagtccgctggtgattggcctggggatgggcgaaaactttatcgcttctgaccagctggcgctgttgccggtgacccgtcgctttatcttccttgaagagggcgatattgcggaaatcactcgccgttcggtaaacatcttcgataaaactggcgcggaagtaaaacgtcaggatatcgaatccaatctgcaatatgacgcgggcgataaaggcatttaccgtcactacatgcagaaagagatctacgaacagccgaacgcgatcaaaaacacccttaccggacgcatcagccacggtcaggttgatttaagcgagctgggaccgaacgccgacgaactgctgtcgaaggttgagcatattcagatcctcgcctgtggtacttcttataactccggtatggtttcccgctactggtttgaatcgctagcaggtattccgtgcgacgtcgaaatcgcctctgaattccgctatcgcaaatctgccgtgcgtcgtaacagcctgatgatcaccttgtcacagtctggcgaaaccgcggataccctggctggcctgcgtctgtcgaaagagctgggttaccttggttcactggcaatctgtaacgttccgggttcttctctggtgcgcgaatccgatctggcgctaatgaccaacgcgggtacagaaatcggcgtggcatccactaaagcattcaccactcagttaactgtgctgttgatgctggtggcgaagctgtctcgcctgaaaggtctggatgcctccattgaacatgacatcgtgcatggtctgcaggcgctgccgagccgtattgagcagatgctgtctcaggacaaacgcattgaagcgctggcagaagatttctctgacaaacatcacgcgctgttcctgggccgtggcgatcagtacccaatcgcgctggaaggcgcattgaagttgaaagagatctcttacattcacgctgaagcctacgctgctggcgaactgaaacacggtccgctggcgctaattgatgccgatatgccggttattgttgttgcaccgaacaacgaattgctggaaaaactgaaatccaacattgaagaagttcgcgcgcgtggcggtcagttgtatgtcttcgccgatcaggatgcgggttttgtaagtagcgataacatgcacatcatcgagatgccgcatgtggaagaggtgattgcaccgatcttctacaccgttccgctgcagctgctggcttaccatgtcgcgctgatcaaaggcaccgacgttgaccagccgcgtaacctggcaaaatcggttacggttgagtaa

SEQ ID NO: 6303 - DNA, 1371 bp, Escherichia coli
  CDS (1)...(1371)
atgttgaataatgctatgagcgtagtgatccttgccgcaggcaaaggcacgcgcatgtattccgatcttccgaaagtgctgcatacccttgccgggaaagcgatggttcagcatgtcattgatgctgcgaatgaattaggcgcagcgcacgttcacctggtgtacggtcacggcggcgatctgctaaaacaggcgctgaaagacgacaaccttaactgggtgcttcaggcagagcagctgggtacgggtcatgcaatgcagcaggccgcacctttctttgccgatgatgaagacattttaatgctctacggcgacgtgccgctgatctctgtcgaaacactccagcgtctgcgtgatgctaaaccgcagggtggcattggtctgctgacggtgaaactggatgatccgaccggttatggacgtatcacccgtgaaaacggcaaagttaccggcattgttgagcacaaagatgccaccgacgagcagcgtcagattcaggagatcaacaccggcattctgattgccaacggcgcagatatgaaacgctggctggcgaagctgaccaacaataatgctcagggcgaatactacatcaccgacattattgcgctggcgtatcaggaagggcgtgaaatcgtcgccgttcatccgcaacgtttaagcgaagtagaaggcgtgaataaccgcctgcaactctcccgtctggagcgtgtttatcagtccgaacaggctgaaaaactgctgttagcaggcgttatgctgcgcgatccagcgcgttttgatctgcgtggtacgctaactcacgggcgcgatgttgaaattgatactaacgttatcatcgagggcaacgtgactctcggtcatcgcgtgaaaattggcaccggttgcgtgattaaaaacagcgtgattggcgatgattgcgaaatcagtccgtataccgttgtggaagatgcgaatctggcagcggcctgtaccattggcccgtttgcccgtttgcgtcctggtgctgagttgctggaaggtgctcacgtcggtaacttcgttgagatgaaaaaagcgcgtctgggtaaaggctcgaaagctggtcatctgacttacctgggcgatgcggaaattggcgataacgttaacatcggcgcgggaaccattacctgcaactacgatggtgcgaataaatttaagaccattatcggcgacgatgtgtttgttggttccgacactcagctggtggccccggtaacagtaggcaaaggcgcgaccattgctgcgggtacaactgtgacgcgtaatgtcggcgaaaatgcattagctatcagccgtgtgccgcagactcagaaagaaggctggcgtcgtccggtaaagaaaaagtga

SEQ ID NO: 6304 - DNA, 1542 bp, Escherichia coli
  CDS (1)...(1542)
atgcaactgaattccaccgaaatcagcgaactgatcaagcagcgcattgctcagttcaatgttgtgagtgaagctcacaacgaaggtactattgtttctgtaagtgacggtgttatccgcattcacggcctggccgattgtatgcagggtgaaatgatctccctgccgggtaaccgttacgctatcgcactgaacctcgagcgcgactctgtaggtgcggttgttatgggtccgtacgctgaccttgccgaaggcatgaaagttaagtgtactggccgtatcctggaagttccggttggccgtggcctgctgggccgtgtggttaacactctgggtgcaccaatcgacggtaaaggtccgctggatcacgacggcttctctgctgtagaagcaatcgctccgggcgttatcgaacgtcagtccgtagatcagccggtacagaccggttataaagccgttgactccatgatcccaatcggtcgtggtcagcgtgaattgatcatcggtgaccgtcagacaggtaaaaccgcactggctatcgatgccatcatcaaccagcgcgattccggtatcaaatgtatctatgtcgctatcggccagaaagcgtccaccatttctaacgtggtacgtaaactggaagagcacggcgcactggctaacaccatcgttgtggtagcaaccgcgtctgaatccgctgcactgcaatacctggcaccgtatgccggttgcgcaatgggcgaatacttccgtgaccgcggtgaagatgcgctgatcatttacgatgacctgtctaaacaggctgttgcttaccgtcagatctccctgctgctccgtcgtccgccaggacgtgaagcattcccgggcgacgttttctacctccactctcgtctgctggagcgtgctgcacgtgttaacgccgaatacgttgaagccttcaccaaaggtgaagtgaaagggaaaaccggttctctgaccgcactgccgattatcgaaactcaggcgggtgacgtttctgcgttcgttccgaccaacgtaatctccattaccgatggtcagatcttcctggaaaccaacctgttcaacgccggtattcgtcctgcggttaacccgggtatttccgtatcccgtgttggtggtgcagcacagaccaagatcatgaaaaaactgtccggtggtatccgtaccgctctggcacagtatcgtgaactggcagcgttctctcagtttgcatccgaccttgacgatgcaacacgtaagcagcttgaccacggtcagaaagtgaccgaactgctgaaacagaaacagtatgcgccgatgtccgttgcgcagcagtctctggttctgttcgcagcagaacgtggttacctggcggatgttgaactgtcgaaaattggcagcttcgaagccgctctgctggcttacgtcgaccgtgatcacgctccgttgatgcaagagatcaaccagaccggtggctacaacgacgaaatcgaaggcaagctgaaaggcatcctcgattccttcaaagcaacccaatcctggtaa

SEQ ID NO: 6305 - DNA, 471 bp, Escherichia coli
  CDS (1)...(471)
gtgaatcttaacgcaacaatcctcggccaggccatcgcgtttgtcctgttcgttctgttctgcatgaagtacgtatggccgccattaatggcagccatcgaaaaacgtcaaaaagaaattgctgacggccttgcttccgcagaacgagcacataaggaccttgaccttgcaaaggccagcgcgaccgaccagctgaaaaaagcgaaagcggaagcccaggtaatcatcgagcaggcgaacaaacgccgctcgcagattctggacgaagcgaaagctgaggcagaacaggaacgtactaaaatcgtggcccaggcgcaggcggaaattgaagccgagcgtaaacgtgcccgtgaagagctgcgtaagcaagttgctatcctggctgttgctggcgccgagaagatcatcgaacgttccgtggatgaagctgctaacagcgacatcgtggataaacttgtcgctgaactgtaa

SEQ ID NO: 6306 - DNA, 816 bp, Escherichia coli
  CDS (1)...(816)
atggcttcagaaaatatgacgccgcaggattacataggacaccacctgaataaccttcagctggacctgcgtacattctcgctggtggatccacaaaaccccccagccaccttctggacaatcaatattgactccatgttcttctcggtggtgctgggtctgttgttcctggttttattccgtagcgtagccaaaaaggcgaccagcggtgtgccaggtaagtttcagaccgcgattgagctggtgatcggctttgttaatggtagcgtgaaagacatgtaccatggcaaaagcaagctgattgctccgctggccctgacgatcttcgtctgggtattcctgatgaacctgatggatttactgcctatcgacctgctgccgtacattgctgaacatgtactgggtctgcctgcactgcgtgtggttccgtctgcggacgtgaacgtaacgctgtctatggcactgggcgtatttatcctgattctgttctacagcatcaaaatgaaaggcatcggcggcttcacgaaagagttgacgctgcagccgttcaatcactgggcgttcattcctgtcaacttaatccttgaaggggtaagcctgctgtccaaaccagtttcactcggtttgcgactgttcggtaacatgtatgccggtgagctgattttcattctgattgctggtctgttgccgtggtggtcacagtggatcctgaatgtgccgtgggccattttccacatcctgatcattacgctgcaagccttcatcttcatggttctgacgatcgtctatctgtcgatggcgtctgaagaacattaa

SEQ ID NO: 6307 - DNA, 624 bp, Escherichia coli
  CDS (1)...(624)
gtgctcaacaaactctccttactgctgaaagacgcaggtatttcgcttaccgatcaccagaaaaaccagcttattgcctacgtgaatatgctgcataaatggaacaaagcgtacaacctgacttcggtccgcgatcctaatgagatgctggtacgccatattctcgatagcattgtggtggcaccgtatctgcaaggtgaacggtttatcgatgtcggcaccggaccaggactgccaggcattccactctctatcgtgcgtcctgaagcccatttcactctgttggatagccttggtaaacgcgtgcgtttccttcgtcaggtgcaacatgagcttaaactggagaatattgaaccagtacagagcagggtagaagagtttccttcagagccgccatttgatggcgtaattagccgcgcttttgcctctctgaacgatatggtgagctggtgccaccatcttcctggtgagcaaggccgtttctacgcgctgaaagggcaaatgccggaagatgaaatcgctttgttgcccgaagaatatcaggtcgaatcagtggttaaacttcaggttccagccctggatggcgaacgtcatctggtggtgattaaagcaaataaaatttaa

SEQ ID NO: 6308 - DNA, 1890 bp, Escherichia coli
  CDS (1)...(1890)
atgttttatccggatccttttgacgtcatcatcattggcgggggtcatgcaggcaccgaggccgcgatggccgcggcgcgtatgggtcaacagactctgcttttgacacacaatatcgacactctggggcagatgagctgcaacccggcgatcggcggtattgggaagggacatctggtaaaagaagtggatgcactcggcggtctgatggcgaaagcgatcgatcaggcgggtatccagtttaggatactaaacgcaagcaaaggaccggcggttcgcgctacccgagctcaggcggatcgtgtgctctaccgtcaggcggtacgtacggcgctggagaaccaaccgaacctgatgatcttccagcaggcggttgaagatcttattgtcgaaaacgatcgcgtggtcggtgctgttacccaaatgggactgaagttccgtgccaaagccgtcgtgctcaccgttgggacgttcctcgacggtaaaattcatatcggtctggataattacagcggtggccgtgctggtgatccgccgtccattccgctttctcgccgtttgcgtgaactgccgctgcgcgttggtcgtctgaaaaccgggacaccaccgcgtattgatgctcgaaccatcgactttagcgtactggcgcaacagcatggcgataacccaatgccggtattctcgtttatgggcaatgcgtcccagcatccccagcaggtgccgtgttatatcactcataccaacgagaaaacccatgatgtgatccgcagtaacctcgatcgtagcccaatgtacgcaggggtgatcgaaggtgtcggcccacgctactgcccgtcgatcgaagacaaagtcatgcgcttcgccgacagaaatcagcatcagatcttccttgaaccggaaggactgacctctaatgaaatttatccgaacggtatctccaccagcctgccgttcgatgtgcagatgcaaatcgtccgctctatgcaggggatggaaaacgcgaagatcgtgcgtccgggttatgccattgagtatgacttcttcgatcctcgcgacctgaaaccgacgctggagagcaagtttatccaggggctgttctttgctggtcagattaacggcactaccggttacgaagaagccgctgcgcaaggtttgctggccggtcttaacgctgcccgtctgtctgctgacaaagaaggttgggctccggcacgttctcaggcgtatctcggcgtactagttgatgacctgtgcactttaggaaccaaagaaccgtatcgtatgtttacttcgcgcgcagaatatcgtctgatgctacgcgaagataatgcggatctgcgtttgactgaaatcggtcgtgaactgggcctggtggatgacgaacgttgggcgcgctttaacgagaaacttgagaatatcgagcgtgagcgtcagcgtctgaaatcgacctgggtaaccccgtcggcggaagctgcagccgaagtgaatgctcacctgactgcgccgctttcccgtgaagccagtggtgaagatctgctgcgtcgtccggaaatgacttatgaaaaattaaccacgctgacgccgtttgcccctgcgttgacagacgaacaggcggcggaacaggttgagattcaggttaaatacgaaggttatatcgcgcgccagcaagatgagatcgaaaagcagctgcgtaacgagaacaccctgctacccgcgacactggattaccgccaggtatccggtctttctaacgaagtgatcgccaaacttaacgatcacaaaccagcctctatcggccaagcttcgcgtatttctggcgtcacgcctgcggccatctccattctgctggtgtggctgaaaaaacagggtatgctgcgtcgtagcgcataa

SEQ ID NO: 6309 - DNA, 930 bp, Escherichia coli
  CDS (1)...(930)
atgcaaaacgcaggcagcctcgttgttcttggcagcattaatgctgaccacattcttaatcttcaatcttttcctactccaggcgaaaccgtaaccggtaaccactatcaggttgcatttggcggcaaaggcgcgaatcaggctgtggctgctgggcgtagcggtgcgaatatcgcgtttattgcctgtacgggtgatgacagcattggtgagagcgttcgccagcagctcgccactgataacattgatattactccggtcagcgtgatcaaaggcgaatcaacaggtgtggcgctgatttttgttaatggcgaaggtgagaatgtcatcggtattcatgccggcgctaatgctgccctttccccggcgctggtggaagcgcaacgtgagcgtattgccaacgcgtcagcattattaatgcagctggaatcaccactcgaaagtgtgatggcagcggcgaaaatcgcccatcaaaataagactatcgttgcgcttaacccggctccggctcgcgaacttcctgacgaactgctggcgctggtggacattattacgccaaacgaaacggaagcagaaaagctcaccggtattcgtgttgaaaatgatgaagatgcagcgaaggcggcgcaggtactgcatgaaaaaggtatccgtactgtactgattactttaggaagtcgtggtgtatgggctagcgtgaatggtgaaggtcagcgcgttcctggattccgggtgcaggctgtcgataccattgctgccggagatacctttaacggtgcgttaatcacggcattgctggaagaaaaaccattgccagaggcgattcgttttgcccatgctgccgctgcgattgccgtaacacgtaaaggcgcacaaccttccgtaccgtggcgtgaagagatcgacgcatttttagacaggcagaggtga

SEQ ID NO: 6310 - DNA, 984 bp, Escherichia coli
  CDS (1)...(984)
atgaatggcgcacagtgggtggtacatgcgttgcgggcacagggtgtgaacaccgttttcggttatccgggtggcgcaattatgccggtttacgatgcattgtatgacggcggcgtggagcacttgctatgccgacatgagcagggtgcggcaatggcggctatcggttatgctcgtgctaccggcaaaactggcgtatgtatcgccacgtctggtccgggcgcaaccaacctgataaccgggcttgcggacgcactgttagattccatccctgttgttgccatcaccggtcaagtgtccgcaccgtttatcggcactgacgcatttcaggaagtggatgtcctgggattgtcgttagcctgtaccaagcacagctttctggtgcagtcgctggaagagttgccgcgcatcatggctgaagcattcgacgttgcctgctcaggtcgtcctggtccggttctggtcgatatcccaaaagatatccagttagccagcggtgacctggaaccgtggttcaccaccgttgaaaacgaagtgactttcccacatgccgaagttgagcaagcgcgccagatgctggcaaaagcgcaaaaaccgatgctgtacgttggcggtggcgtgggtatggcgcaggcagttccggctttgcgtgaatttctcgctgccacaaaaatgcctgccacctgtacgctgaaagggctgggcgcagtagaagcagattatccgtactatctgggcatgctggggatgcacggcaccaaagcggcaaacttcgcggtgcaggagtgtgacctgctgatcgccgtgggcgcacgttttgatgaccgggtgaccggcaaactgaacaccttcgcgccacacgccagtgttatccatatggatatcgacccggcagaaatgaacaagctgcgtcaggcacatgtggcattacaaggtgatttaaatgctctgttaccagcattacagcagccgttaaatcaatga

SEQ ID NO: 6311 - DNA, 1818 bp, Escherichia coli
  CDS (1)...(1818)
atggtcgtaatatggcgggtgctcgtgcgctgtgggcccaccggaatgaccgacgccgatttcggtaagccgattatcgcggttgtgaactcgttcacccaatttgtaccgggtcacgtccatctgcgcgatctcggtaaactggtcgccgaacaaattgaagcggctggcggcgttgccaaagagttcaacaccattgcggtggatgatgggattgccatgggccacggggggatgctttattcactgccatctcgcgaactgatcgctgattccgttgagtatatggtcaacgcccactgcgccgacgccatggtctgcatctctaactgcgacaaaatcaccccggggatgctgatggcttccctgcgcctgaatattccggtgatctttgtttccggcggcccgatggaggccgggaaaaccaaactttccgatcagatcatcaagctcgatctggttgatgcgatgatccagggcgcagacccgaaagtatctgactcccagagcgatcaggttgaacgttccgcgtgtccgacctgcggttcctgctccgggatgtttaccgctaactcaatgaactgcctgaccgaagcgctgggcctgtcgcagccgggcaacggctcgctgctggcaacccacgccgaccgtaagcagctgttccttaatgctggtaaacgcattgttgaattgaccaaacgttattacgagcaaaacgacgaaagtgcactgccgcgtaatatcgccagtaaggcggcgtttgaaaacgccatgacgctggatatcgcgatgggtggatcgactaacaccgtacttcacctgctggcggcggcgcaggaagcggaaatcgacttcaccatgagtgatatcgataagctttcccgcaaggttccacagctgtgtaaagttgcgccgagcacccagaaataccatatggaagatgttcaccgtgctggtggtgttatcggtattctcggcgaactggatcgcgcggggttactgaaccgtgatgtgaaaaacgtacttggcctgacgttgccgcaaacgctggaacaatacgacgttatgctgacccaggatgacgcggtaaaaaatatgttccgcgcaggtcctgcaggcattcgtaccacacaggcattctcgcaagattgccgttgggatacgctggacgacgatcgcgccaatggctgtatccgctcgctggaacacgcctacagcaaagacggcggcctggcggtgctctacggtaactttgcggaaaacggctgcatcgtgaaaacggcaggcgtcgatgacagcatcctcaaattcaccggcccggcgaaagtgtacgaaagccaggacgatgcggtagaagcgattctcggcggtaaagttgtcgccggagatgtggtagtaattcgctatgaaggcccgaaaggcggtccggggatgcaggaaatgctctacccaaccagcttcctgaaatcaatgggtctcggcaaagcctgtgcgctgatcaccgacggtcgtttctctggtggcacctctggtctttccatcggccacgtctcaccggaagcggcaagcggcggcagcattggcctgattgaagatggtgacctgatcgctatcgacatcccgaaccgtggcattcagttacaggtaagcgatgccgaactggcggcgcgtcgtgaagcgcaggacgctcgaggtgacaaagcctggacgccgaaaaatcgtgaacgtcaggtctcctttgccctgcgtgcttatgccagcctggcaaccagcgccgacaaaggcgcggtgcgcgataaatcgaaactggggggttaa

SEQ ID NO: 6312 - DNA, 1476 bp, Escherichia coli
  CDS (1)...(1476)
atggctaactacttcaatacactgaatctgcgccagcagctggcacagctgggcaaatgtcgctttatgggccgcgatgaattcgccgatggcgcgagctaccttcagggtaaaaaagtagtcatcgtcggctgtggcgcacagggtctgaaccagggcctgaacatgcgtgattctggtctcgatatctcctacgctctgcgtaaagaagcgattgccgagaagcgcgcgtcctggcgtaaagcgaccgaaaatggttttaaagtgggtacttacgaagaactgatcccacaggcggatctggtgattaacctgacgccggacaagcagcactctgatgtagtgcgcaccgtacagccactgatgaaagacggcgcggcgctgggctactcgcacggtttcaacatcgtcgaagtgggcgagcagatccgtaaagatatcaccgtagtgatggttgcgccgaaatgcccaggcaccgaagtgcgtgaagagtacaaacgtgggttcggcgtaccgacgctgattgccgttcacccggaaaacgatccgaaaggcgaaggcatggcgattgccaaagcctgggcggctgcaaccggtggtcaccgtgcgggtgtgctggaatcgtccttcgttgcggaagtgaaatctgacctgatgggcgagcaaaccatcctgtgcggtatgttgcaggctggctctctgctgtgcttcgacaagctggtggaagaaggtaccgatccagcatacgcagaaaaactgattcagttcggttgggaaaccatcaccgaagcactgaaacagggcggcatcaccctgatgatggaccgtctctctaacccggcgaaactgcgtgcttatgcgctttctgaacagctgaaagagatcatggcacccctgttccagaaacatatggacgacatcatctccggcgaattctcttccggtatgatggcggactgggccaacgatgataagaaactgctgacctggcgtgaagagaccggcaaaaccgcgtttgaaaccgcgccgcagtatgaaggcaaaatcggcgagcaggagtacttcgataaaggcgtactgatgattgcgatggtgaaagcgggcgttgaactggcgttcgaaaccatggtcgattccggcatcattgaagagtctgcatattatgaatcactgcacgagctgccgctgattgccaacaccatcgcccgtaagcgtctgtacgaaatgaacgtggttatctctgataccgctgagtacggtaactatctgttctcttacgcttgtgtgccgttgctgaaaccgtttatggcagagctgcaaccgggcgacctgggtaaagctattccggaaggcgcggtagataacgggcaactgcgtgatgtgaacgaagcgattcgcagccatgcgattgagcaggtaggtaagaaactgcgcggctatatgacagatatgaaacgtattgctgttgcgggttaa

SEQ ID NO: 6313 - DNA, 1260 bp, Escherichia coli
  CDS (1)...(1260)
atgaatcttaccgaattaaagaatacgccggtttctgagctgatcactctcggcgaaaatatggggctggaaaacctggctcgtatgcgtaagcaggacattatttttgccatcctgaagcagcacgcaaagagtggcgaagatatctttggtgatggcgtactggagatattgcaggatggatttggtttcctccgttccgcagacagctcctacctcgccggtcctgatgacatctacgtttcccctagccaaatccgccgtttcaacctccgcactggtgataccatctctggtaagattcgcccgccgaaagaaggtgaacgctattttgcgctgctgaaagttaacgaagttaacttcgacaaacctgaaaacgcccgcaacaaaatcctctttgagaacttaaccccgctgcacgcaaactctcgtctgcgtatggaacgtggtaacggttctactgaagatttaactgctcgcgtactggatctggcatcacctatcggtcgtggtcagcgtggtctgattgtggcaccgccgaaagccggtaaaaccatgctgctgcagaacattgctcagagcattgcttacaaccacccggattgtgtgctgatggttctgctgatcgacgaacgtccggaagaagtaaccgagatgcagcgtctggtaaaaggtgaagttgttgcttctacctttgacgaacccgcatctcgccacgttcaggttgcggaaatggtgatcgagaaggccaaacgcctggttgagcacaagaaagacgttatcattctgctcgactccatcactcgtctggcgcgcgcttacaacaccgttgttccggcgtcaggtaaagtgttgaccggtggtgtggatgccaacgccctgcatcgtccgaaacgcttctttggtgcggcgcgtaacgtggaagagggcggcagcctgaccattatcgcgacggcgcttatcgataccggttctaaaatggacgaagttatctacgaagagtttaaaggtacaggcaacatggaactgcacctctctcgtaagatcgctgaaaaacgcgtcttcccggctatcgactacaaccgttctggtacccgtaaagaagagctgctcacgactcaggaagaactgcagaaaatgtggatcctgcgcaaaatcattcacccgatgggcgaaatcgatgcaatggaattcctcattaataaactggcaatgaccaagaccaatgacgatttcttcgaaatgatgaaacgctcataa

SEQ ID NO: 6314 - DNA, 1170 bp, Escherichia coli
  CDS (1)...(1170)
gtgagcgcaaaggcgctcgccgcttattcgaagagaatcgatgtgaaagtactgactgtatttggtacgcgcccggaagccatcaagatggcgccgttggtgcatgcgttggcaaaagatcctttttttgaggctaaagtttgcgtcactgcgcagcatcgggagatgctcgatcaggtgctgaaactcttttccattgtacctgactacgatctcaacataatgcagccaggacagggcctgacagagataacctgtcggattctggaagggctaaaacctattcttgccgagttcaaaccagacgtcgtgctggttcacggcgatacgacgacgacgctggcaaccagcctggcggcgttttatcagcgtattcctgttggtcacgttgaggctggtctgcgcacgggcgatctctattcgccgtggccggaagaggctaaccgtacattgaccgggcatctggcgatgtatcacttctctccaaccgaaacttcccggcaaaacttgctgcgtgaaaacgttgcggatagccgaatcttcattaccggtaatacagtcattgatgcactgttatgggtgcgtgaccaggtgatgagcagcgacaagctgtcagaactggcggcaaattacccgtttatcgaccccgataaaaagatgattctggtgaccggtcacaggcgtgagagtttcggtcgtggctttgaagaaatctgccacgcgctggcagacatcgccaccacgcaccaggacatccagattgtctatccggtgcatctcaacccgaacgtcagagaaccggtcaatcgcattctggggcatgtgaaaaatgtcattctgatcgatccccaggagtatttaccgtttgtctggctgatgaaccacgcctggctgattttgaccgactcaggcggcattcaggaagaagcgccttcgctggggaaacctgtgctggtgatgcgcgataccactgagcgtccggaagcggtgacggcgggtacggtgcgtctggtaggcacggataagcagcgaattgtcgaggaagtgacgcgtcttttaaaagacgaaaacgaatatcaagctatgagccgcgcccataacccgtatggtgatggtcaggcatgctctcgcattctggaagcgttaaaaaataatcggatatcactatga

SEQ ID NO: 6315 - DNA, 963 bp, Escherichia coli
  CDS (1)...(963)
atgataatgacggtaacaagcatgttagacaatgttttaagaattgccacacgccaaagcccacttgcactctggcaggcacactatgtcaaagacaagttgatggcgagccatccgggcctggtcgttgaactggtaccgatggtgacgcgcggcgatgtgattcttgatacgccgctggcgaaagtaggcggaaaaggcttatttgtaaaagagctggaagtcgcgctcctcgaaaatcgcgccgatatcgccgtacactcaatgaaagatgtgccggttgaattcccgcaaggtctgggactggtcactatttgtgagcgtgaagatcctcgcgatgcctttgtgtccaataactatgacagtctggatgcgttaccggcaggcagtatcgtcgggacgtccagtttacgtcgccagtgccaactggctgaacgccgtccggatctgattatccgctccctgcgcggcaacgtcggcactcgcctgagcaaactggataacggcgaatacgatgccatcattcttgccgtagccggactaaaacgtttaggtctggagtcacgtattcgcgccggcttgccacccgagatttctcttccggcggtaggacaaggtgcggtgggtattgaatgccgccttgatgattcacgcactcgcgagctgcttgccgcgctgaatcaccacgaaactgcactgcgcgttaccgcagaacgcgccatgaatacccgtctcgaaggcggatgtcaggtgccaattggtagctacgccgagcttattgatggcgaaatctggctgcgtgcgctggtcggccggccggacggttcgcagattattcgcggtgaacgccgcggtgcgccgcaagatgccgaacaaatggggatttcgctggcagaagagctactgaataacggcgcgcgcgagatcctcgctgaagtctataacggagacgccccggcatga

SEQ ID NO: 6316 - DNA, 2163 bp, Escherichia coli
  CDS (1)...(2163)
atggacgtttcttacctgctcgacagccttaatgacaaacagcgcgaagcggtggccgcgccacgcagcaaccttctggtgctggcgggcgcgggcagtggtaagacgcgcgtactggtgcatcgtatcgcctggttgatgagcgtggaaaactgctcgccatactcgattatggcggtgacgtttaccaacaaagcggcggcggagatgcgtcatcgtatcgggcaactgatgggcacgagccagggcggtatgtgggtcggcaccttccacgggctggcgcaccgtttgctgcgtgcgcaccatatggacgccaatctgccgcaggatttccagatcctcgacagtgaagaccagctacgcctgcttaagcgtctgatcaaagccatgaacctcgacgagaagcagtggccgccgcggcaggcaatgtggtacatcaacagccagaaagatgaaggcctgcgtccgcatcatattcaaagctacggtaatccggtggagcagacctggcagaaggtgtatcaggcgtatcaggaagcgtgtgaccgcgcgggcctggtggacttcgccgagctgctgctgcgcgctcacgagttgtggcttaacaagccgcatatcctgcaacactaccgcgaacgttttaccaatatcctggtggacgaattccaggataccaacaacattcagtacgcgtggatccgcctgctggcgggcgacaccggcaaagtgatgatcgtcggtgatgacgaccagtcaatctacggctggcgcggggcgcaggtggagaatattcagcgtttccttaatgatttccccggtgccgaaactattcgtctggagcaaaactaccgctctaccagcaatattctgagcgccgctaacgccctgattgaaaacaataacgggcgtctgggtaaaaaactgtggaccgatggcgcggacggtgagcctatttccctctattgcgcttttaacgaactcgatgaagcgcgttttgtggttaaccgcatcaaaacctggcaggacaacggcggagcgcttgccgagtgcgccattctctaccgcagcaacgcccagtcgcgggtgctcgaagaggcgttattgcaggccagtatgccgtaccgtatttacggcgggatgcgcttcttcgaacgccaggaaatcaaagatgcgctctcgtatctgcgcctgattgccaaccgcaacgacgacgcggcctttgagcgtgtggtgaatacgccaacgcggggtattggtgaccggacgctggacgtggtacgtcagacatcgcgcgatcgccagttaacactctggcaggcatgtcgtgagctgttgcaggaaaaagccctcgccgggcgagctgccagcgccttgcagcgatttatggaattaatcgacgccttagcgcaggaaactgccgatatgccgctgcatgtacagactgaccgggtaattaaagactccggcctgcgtaccatgtatgagcaggagaagggcgaaaaaggtcagacgcgtatcgaaaacttagaggaactggtgacggcaacgcgccagttcagctacaacgaagaagacgaagatttaatgccgctgcaggcgttcctctcccatgcggcactggaagcaggtgaagggcaggcggatacctggcaggatgcggtgcagttgatgacgctacactcggcgaaaggcctggagttcccgcaggtgtttatcgttggtatggaagagggcatgttcccaagccagatgtcgctggatgaaggcgggcgtctggaagaagaacgccgtctggcctacgttggcgtaacccgcgcgatgcagaaactgacgctgacctacgcggaaacccgccgtctgtatggtaaagaggtttaccatcgcccgtcgcgctttatcggcgagctgccggaagagtgtgtggaagaggtgcgcctgcgcgccacggtaagccgcccggtcagccatcagcggatgggtacgccgatggtcgagaacgacagcggctacaagctcggccagcgcgtacgccacgctaagtttggtgaaggcaccattgtcaatatggaaggcagcggtgagcatagccgtttgcaggtggcatttcagggccagggtattaaatggctggtggcggcatacgcccggctggagtcggtgtaa

SEQ ID NO: 6317 - DNA, 1833 bp, Escherichia coli
  CDS (1)...(1833)
gtgaatgtggcgcaggcggaagtgttgaatctggagtccggagctaaacaggttttacaagaaacctttggctaccaacagtttcgccccggccaggaagaaattatcgacactgtgctttccggccgcgattgcctcgtcgtcatgcccactggtggcggaaaatccctttgctatcaaatccctgccttattgctaaacggccttaccgtggttgtttcaccgctgatttcgttgatgaaagatcaggtggatcaactgcaagccaacggcgtggcggcggcgtgccttaactcgacgcaaacccgcgaacagcaacttgaagtgatgacaggctgccgcaccgggcaaattcgtctgctttatatcgccccggaacgcctgatgctggataactttcttgagcatctggcgcactggaatccggtgttattagccgttgatgaagcgcactgtatctcccaatggggccacgatttccgcccggaatatgccgcgctcggtcagttgcgccagcggttcccgacgctgccgtttatggcgctgaccgccacagccgacgacaccacgcgccaggatatcgtgcgcctgctggggctgaacgatccgctgattcaaatcagcagttttgaccgtccgaatattcgctacatgctgatggagaagttcaaaccgctcgatcagttgatgcgctacgtgcaggaacagcgcggtaagtcaggcattatctactgcaacagccgcgcgaaagtagaagacaccgctgcgcgcctgcaaagcaagggaattagcgcggcggcctatcatgccgggctggaaaataatgttcgcgccgatgtgcaggaaaaattccagcgcgatgacctgcaaattgtggtggcgacggtggcgttcggcatgggcatcaataaaccaaacgttcgcttcgtggtccactttgatattccgcgcaatatcgaatcctattatcaggaaaccggacgcgccgggcgtgatggcctgcccgcggaagcgatgctgttttacgatccggctgatatggcgtggctgcgccgttgtctggaagagaagccgcaggggcagttgcaggatatcgagcgccacaaactcaatgcgatgggcgcgtttgccgaagcgcaaacttgccgtcgtctggtattgctgaactattttggcgaagggcgtcaggagccgtgcgggaactgcgatatctgcctcgatccgccgaaacagtacgacggttcaaccgatgctcagattgccctttccaccattggtcgtgtgaatcagcggtttgggatgggttatgtggtggaagtgattcgtggtgctaataaccagcgtatccgcgactatggtcatgacaaactgaaagtctatggcatgggccgtgataaaagccatgaacattgggtgagcgtgatccgccagctgattcacctcggcctggtgacgcaaaatattgcccagcattctgccctacaactgacagaggccgcgcgcccggtgctcgcggaatcctctttgcaacttgccgtgccgcgtatcgtggcgctcaaaccgaaagcgatgcagaaatcgttcggcggcaactatgatcgcaaactgttcgccaaattacgcaaactgcgtaaatcgatagccgatgaaagtaatgtcccgccgtacgtggtgtttaacgacgcaaccttgattgagatggctgaacagatgccgatcaccgccagcgaaatgctcagcgttaacggcgttgggatgcgcaagctggaacgctttggcaaaccgtttatggcgctgattcgtgcgcatgttgatggcgatgacgaagagtag

SEQ ID NO: 6318 - DNA, 756 bp, Escherichia coli
  CDS (1)...(756)
atggtggataagtcacaagaaacgacgcactttggttttcagaccgtcgcgaaggaacaaaaagcggatatggtcgcccacgttttccattccgtggcatcaaaatacgatgtcatgaatgatttgatgtcatttggtattcatcgtttgtggaagcgattcacgattgattgcagcggcgtacgccgtgggcagaccgtgctggatctggctggtggcaccggcgacctgacagcgaaattctcccgcctggtcggagaaactggcaaagtggtccttgctgatatcaatgaatccatgcccaaaatgggccgcgagaagctgcgtaatatcggtgtgattggcaacgttgagtatgttcaggcgaacgctgaggcgctgccgttcccggataacacctttgattgcatcaccatttcgtttggtctgcgtaacgtcaccgacaaagataaagcactgcgttcaatgtatcgcgtgctgaaacccggcggccgcctgctggtgcttgagttctcgaagccaattatcgagccgctgagcaaagcctatgatgcatactccttccatgtgctgccgcgtattggctcactggtcgcgaacgacgccgacagctaccgttatctggcagaatccatccgtatgcatcccgatcaggataccctgaaagccatgatgcaggatgccggattcgaaagtgtcgactactacaatctgacggcaggggttgtggcgctgcatcgtggttataagttctga

SEQ ID NO: 6319 - DNA, 1164 bp, Escherichia coli
  CDS (1)...(1164)
atggaacaggttgtcattgtcgatgcaattcgcaccccgatgggccgttcgaagggcggtgcttttcgtaacgtgcgtgcagaagatctctccgctcatttaatgcgtacgctgctggcgcgtaacccggcgctggaagcggcggccctcgacgatatttactggggttgtgtgcagcagacgctggagcagggttttaatatcgcccgtaacgcggcgctgctggcagaagtaccacactctgtcccggcggttaccgttaatcgcttgtgtggttcatccatgcaggcactgcatgacgcagcacgaatgatcatgactggcgatgcgcaggcatgtctggttggcggcgtggagcatatgggccatgtgccgatgagtcacggcgtcgattttcaccccggcctgagccgcaatgtcgccaaagcggcgggcatgatgggcttaacggcagaaatgctggcgcgtatgcacggtatcagccgtgaaatgcaggatgcctttgccgcgcggtcacacgcccgcgcctgggccgccacgcagtcggccgcatttaaaaatgaaatcatcccgaccggtggtcacgatgccgacggcgtcctgaagcagtttaattacgacgaagtgattcgcccggaaaccaccgtggaagccctcgccacgctgcgtccggcgtttgatccagtaaacggtatggtaacggcgggcacatcttctgcactttccgatggcgcagctgccatgctggtgatgagtgaaagccgcgcccatgaattaggtcttaagccgcgcgctcgtgtgcgttcgatggcggtcgttggttgtgacccatcgattatgggttacggcccggttccggcctcgaaactggcgctgaaaaaagcggggctttctgccagcgatatcggcgtgtttgaaatgaacgaagcctttgccgcgcagatcctgccatgtattaaagatctgggactaattgagcagattgacgagaagatcaacctcaacggtggcgcgatcgcgctgggtcatccgctgggttgttccggtgcgcgtatcagcaccacgctgctgaatctgatggaacgcaaagacgttcagtttggtctggcgacgatgtgtatcggtctgggtcagggtattgcgacggtgtttgagcgggtttaa

SEQ ID NO: 6320 - DNA, 2787 bp, Escherichia coli
  CDS (1)...(2787)
atggttcagatcccccaaaatccacttatccttgtagatggttcatcttatctttatcgcgcatatcacgcgtttcccccgctgactaacagcgcaggcgagccgaccggtgcgatgtatggtgtcctcaacatgctgcgcagtctgatcatgcaatataaaccgacgcatgcagcggtggtctttgacgccaagggaaaaacctttcgtgatgaactgtttgaacattacaaatcacatcgcccgccaatgccggacgatctgcgtgcacaaatcgaacccttgcacgcgatggttaaagcgatgggactgccgctgctggcggtttctggcgtagaagcggacgacgttatcggtactctggcgcgcgaagccgaaaaagccgggcgtccggtgctgatcagcactggcgataaagatatggcgcagctggtgacgccaaatattacgcttatcaataccatgacgaataccatcctcggaccggaagaggtggtgaataagtacggcgtgccgccagaactgatcatcgatttcctggcgctgatgggtgactcctctgataacattcctggcgtaccgggcgtcggtgaaaaaaccgcgcaggcattgctgcaaggtcttggcggactggatacgctgtatgccgagccagaaaaaattgctgggttgagcttccgtggcgcgaaaacaatggcagcgaagctcgagcaaaacaaagaagttgcttatctctcataccagctggcgacgattaaaaccgacgttgaactggagctgacctgtgaacaactggaagtgcagcaaccggcagcggaagagttgttggggctgttcaaaaagtatgagttcaaacgctggactgctgatgtcgaagcgggcaaatggttacaggccaaaggggcaaaaccagccgcgaagccacaggaaaccagtgttgcagacgaagcaccagaagtgacggcaacggtgatttcttatgacaactacgtcaccatccttgatgaagaaacactgaaagcgtggattgcgaagctggaaaaagcgccggtatttgcatttgataccgaaaccgacagccttgataacatctctgctaacctggtcgggctttcttttgctatcgagccaggcgtagcggcatatattccggttgctcatgattatcttgatgcgcccgatcaaatctctcgcgagcgtgcactcgagttgctaaaaccgctgctggaagatgaaaaggcgctgaaggtcgggcaaaacctgaaatacgatcgcggtattctggcgaactacggcattgaactgcgtgggattgcgtttgataccatgctggagtcctacattctcaatagcgttgccgggcgtcacgatatggacagcctcgcggaacgttggttgaagcacaaaaccatcacttttgaagagattgctggtaaaggcaaaaatcaactgacctttaaccagattgccctcgaagaagccggacgttacgccgccgaagatgcagatgtcaccttgcagttgcatctgaaaatgtggccggatctgcaaaaacacaaagggccgttgaacgtcttcgagaatatcgaaatgccgctggtgccggtgctttcacgcattgaacgtaacggtgtgaagatcgatccgaaagtgctgcacaatcattctgaagagctcacccttcgtctggctgagctggaaaagaaagcgcatgaaattgcaggtgaggaatttaacctttcttccaccaagcagttacaaaccattctctttgaaaaacagggcattaaaccgctgaagaaaacgccgggtggcgcgccgtcaacgtcggaagaggtactggaagaactggcgctggactatccgttgccaaaagtgattctggagtatcgtggtctggcgaagctgaaatcgacctacaccgacaagctgccgctgatgatcaacccgaaaaccgggcgtgtgcatacctcttatcaccaggcagtaactgcaacgggacgtttatcgtcaaccgatcctaacctgcaaaacattccggtgcgtaacgaagaaggtcgtcgtatccgccaggcgtttattgcgccagaggattatgtgattgtctcagcggactactcgcagattgaactgcgcattatggcgcatctttcgcgtgacaaaggcttgctgaccgcattcgcggaaggaaaagatatccaccgggcaacggcggcagaagtgtttggtttgccactggaaaccgtcaccagcgagcaacgccgtagcgcgaaagcgatcaactttggtctgatttatggcatgagtgctttcggtctggcgcggcaattgaacattccacgtaaagaagcgcagaagtacatggacctttacttcgaacgctaccctggcgtgctggagtatatggaacgcacccgtgctcaggcgaaagagcagggctacgttgaaacgctggacggacgccgtctgtatctgccggatatcaaatccagcaatggtgctcgtcgtgcagcggctgaacgtgcagccattaacgcgccaatgcagggaaccgccgccgacattatcaaacgggcgatgattgccgttgatgcgtggttacaggctgagcaaccgcgtgtacgtatgatcatgcaggtacacgatgaactggtatttgaagttcataaagatgatgttgatgccgtcgcgaagcagattcatcaactgatggaaaactgtacccgtctggatgtgccgttgctggtggaagtggggagtggcgaaaactgggatcaggcgcactaa

SEQ ID NO: 6321 - DNA, 1410 bp, Escherichia coli
  CDS (1)...(1410)
atgtccgctgaacacgtactgacgatgctgaacgagcacgaagtgaagtttgttgatttgcgcttcaccgatactaaaggtaaagaacagcacgtcactatccctgctcatcaggtgaatgctgaattcttcgaagaaggcaaaatgtttgacggctcctcgattggcggctggaaaggcattaacgagtccgacatggtgctgatgccagacgcatccaccgcagtgattgacccgttcttcgccgactccaccctgattatccgttgcgacatccttgaacctggcaccctgcaaggctatgaccgtgacccgcgctccattgcgaagcgcgccgaagattacctgcgttccactggcattgccgacaccgtactgttcgggccagaacctgaattcttcctgttcgatgacatccgtttcggatcatctatctccggttcccacgttgctatcgacgatatcgaaggcgcatggaactcctccacccaatacgaaggtggtaacaaaggtcaccgtccggcagtgaaaggcggttacttcccggttccaccggtagactcggctcaggatattcgttctgaaatgtgtctggtgatggaacagatgggtctggtggttgaagcccatcaccacgaagtagcgactgctggtcagaacgaagtggctacccgcttcaataccatgaccaaaaaagctgacgaaattcagatctacaaatatgttgtgcacaacgtagcgcaccgcttcggtaaaaccgcgacctttatgccaaaaccgatgttcggtgataacggctccggtatgcactgccacatgtctctgtctaaaaacggcgttaacctgttcgcaggcgacaaatacgcaggtctgtctgagcaggcgctgtactacattggcggcgtaatcaaacacgctaaagcgattaacgccctggcaaacccgaccaccaactcttataagcgtctggtcccgggctatgaagcaccggtaatgctggcttactctgcgcgtaaccgttctgcgtctatccgtattccggtggtttcttctccgaaagcacgtcgtatcgaagtacgtttcccggatccggcagctaacccgtacctgtgctttgctgccctgctgatggccggtcttgatggtatcaagaacaagatccatccgggcgaagccatggacaaaaacctgtatgacctgccgccagaagaagcgaaagagatcccacaggttgcaggctctctggaagaagcactgaacgaactggatctggaccgcgagttcctgaaagccggtggcgtgttcactgacgaagcaattgatgcgtacatcgctctgcgtcgcgaagaagatgaccgcgtgcgtatgactccgcatccggtagagtttgagctgtactacagcgtctaa

SEQ ID NO: 6322 - DNA, 1776 bp, Escherichia coli
  CDS (1)...(1776)
gtgatcgaaaaattgcgtaatatcgccatcatcgcgcacgtagaccatggtaaaaccaccctggtagacaagctgctccaacaatccggtacgttcgactctcgtgccgaaacccaagagcgcgtgatggactccaacgatttggagaaagagcgtgggattaccatcctcgcgaaaaacaccgctatcaaatggaatgattaccgtatcaacatcgttgataccccggggcacgccgacttcggtggtgaagttgaacgtgtaatgtccatggtagactcagtgctgctggtggttgacgcatttgacggcccgatgccgcaaacgcgcttcgtaaccaaaaaagcgtttgcttacggcctgaagccgattgttgttatcaacaaagttgaccgccctggcgcgcgtcctgattgggttgtggatcaggtattcgatctgttcgttaacctcgacgcgaccgacgagcagctggacttcccgatcgtttacgcttctgcgctgaacggtatcgcgggtctggaccacgaagatatggcggaagacatgaccccgctgtaccaggcgattgttgaccacgttcctgcgccggacgttgaccttgacggtccgttccagatgcagatttctcagctcgattacaacagctatgttggcgttatcggcattggccgcatcaagcgcggtaaagtgaagccgaaccagcaggtcactatcatcgatagcgaaggcaaaacccgcaacgcgaaagtcggtaaagtgctgggccacctcggtctggaacgtatcgaaaccgatctggcggaagctggcgatatcgttgcgatcacgggccttggcgaactgaacatttctgacaccgtttgcgacacgcaaaacgttgaagcgctgccggcactctccgttgatgagccgaccgtttctatgttcttctgcgttaacacctcgccgttctgcggtaaagaaggtaagttcgtaacgtctcgtcagatcctggatcgtctgaacaaagaactggtacacaacgttgcgctgcgcgtagaagaaaccgaagacgccgatgcgttccgcgtttctggtcgtggcgaactgcacctgtctgttctgatcgaaaacatgcgtcgtgaaggtttcgaactggcggtatcccgtccgaaagttatcttccgtgaaatcgacggtcgtaaacaagagccgtatgaaaacgtgactctggacgttgaagaacagcatcagggttctgtaatgcaggcgctgggcgaacgtaaaggcgacctgaaaaacatgaatccagacggtaaaggccgcgtacgtctcgactacgtgatcccaagccgtggtctgattggcttccgttctgagttcatgaccatgacttccggtactggtctgctgtactccaccttcagccactacgacgacgtacgtccgggtgaagtgggtcagcgtcagaacggcgtactgatctctaacggtcagggtaaagcggtcgcgttcgcgctgttcggtctgcaggatcgcggtaagctgttcctcggtcacggtgcagaagtttacgaaggtcagattatcggtattcatagccgctctaacgacctgactgtaaactgcctgaccggtaagaaactgaccaacatgcgtgcttccggtactgacgaagccgttgttctggttccgcctatccgcatgactctggaacaagctctggagttcatcgatgatgacgaactggtagaagtgactccgacctctatccgtattcgtaaacgtcactga

SEQ ID NO: 6323 - DNA, 699 bp, Escherichia coli
  CDS (1)...(699)
atgaataaaatcctgttagttgatgatgaccgagagctgacttccctattaaaggagctgctcgagatggaaggcttcaacgtgattgttgcccacgatggggaacaggcgcttgatcttctggacgacagcattgatttacttttgcttgacgtaatgatgccgaagaaaaatggtatcgacacattaaaagcacttcgccagacacaccagacgcctgtcattatgttgacggcgcgcggcagtgaacttgatcgcgttctcggccttgagctgggcgcagatgactatctcccgaaaccgtttaatgatcgtgagctggtggcacgtattcgcgcgatcctgcgccgttcgcactggagcgagcaacagcaaaacaacgacaacggttcaccgacactggaagttgatgccttagtgctgaatccaggccgtcaggaagccagcttcgacgggcaaacgctggagttaaccggtactgagtttaccctgctctatttgctggcacagcatctgggtcaggtggtttcccgtgaacatttaagccaggaagtgttgggcaaacgcctgacgcctttcgaccgcgctattgatatgcacatttccaacctgcgtcgtaaactgccggatcgtaaagatggtcacccgtggtttaaaaccttgcgtggtcgcggctatctgatggtttctgcttcatga

SEQ ID NO: 6324 - DNA, 369 bp, Escherichia coli
  CDS (1)...(369)
atgttcgacggcataagtttaaccgaacatcagcgtcagcagatgcgagatcttatgcaacaggcccggcacgaacagcctcctgttaatgttagcgaactggagacaatgcatcgccttgtcaccgcagaaaattttgatgaaaacgctgtgcgcgcacaggcagaaaaaatggcgaatgagcaaattgctcgtcaggttgagatggcaaaagtccgcaaccaaatgtatcgcctgttaacgccggagcagcaagcggttttaaacgagaaacatcaacaacgaatggagcagttgcgtgacgtgacgcaatggcaaaaaagttcatcgttgaagctattgagtagtagcaactcacgttcccagtag

SEQ ID NO: 6325 - DNA, 963 bp, Escherichia coli
  CDS (1)...(963)
atgattaagaaaatcggtgtgttgacaagcggcggtgatgcgccaggcatgaacgccgcaattcgcggggttgttcgttctgcgctgacagaaggtctggaagtaatgggtatttatgacggctatctgggtctgtatgaagaccgtatggtacagctagaccgttacagcgtgtctgacatgatcaaccgtggcggtacgttcctcggttctgcgcgtttcccggaattccgcgacgagaacatccgcgccgtggctatcgaaaacctgaaaaaacgtggtatcgacgcgctggtggttatcggcggtgacggttcctacatgggtgcaatgcgtctgaccgaaatgggcttcccgtgcatcggtctgccgggcactatcgacaacgacatcaaaggcactgactacactatcggtttcttcactgcgctgagcaccgttgtagaagcgatcgaccgtctgcgtgacacctcttcttctcaccagcgtatttccgtggtggaagtgatgggccgttattgtggagatctgacgttggctgcggccattgccggtggctgtgaattcgttgtggttccggaagttgaattcagccgtgaagacctggtaaacgaaatcaaagcgggtatcgcgaaaggtaaaaaacacgcgatcgtggcgattaccgaacatatgtgtgatgttgacgaactggcgcatttcatcgagaaagaaaccggtcgtgaaacccgcgcaactgtgctgggccacatccagcgcggtggttctccggtgccttacgaccgtattctggcttcccgtatgggcgcttacgctatcgatctgctgctggcaggttacggcggtcgttgtgtaggtatccagaacgaacagctggttcaccacgacatcatcgacgctatcgaaaacatgaagcgtccgttcaaaggtgactggctggactgcgcgaaaaaactgtattaa

SEQ ID NO: 6326 - DNA, 990 bp, Escherichia coli
  CDS (1)...(990)
atgaacaagtggggcgtagggttaacatttttgctggcggcaaccagcgttatggcaaaggatattcagcttcttaacgtttcatatgatccaacgcgcgaattgtacgaacagtacaacaaggcattcagcgcccactggaaacagcaaactggtgataacgtggtgattcgtcagtcacacggtggctcaggtaaacaagcgacgtcggtaatcaacggtattgaagctgatgttgtcacgctggctctggcctatgacgtggacgcaattgcggaacgcgggcggattgataaagagtggatcaaacgtctgccggataactccgcaccgtacacttccaccattgttttcctggtacgtaagggaaatccgaagcagatccatgactggaacgatctgattaaaccgggtgtttcggtgatcacgcctaatccgaaaagctctggtggcgcgcgctggaactacctggcagcctggggctacgcgctgcatcacaacaacaacgatcaggcaaaagcacaggattttgttcgggcactgtataaaaacgtcgaagttctggattctggcgcgcgtggctccactaacacttttgtcgagcgcggaattggcgatgtactgattgcctgggaaaacgaagctctgctggcagcgaatgaactggggaaagataaattcgaaatcgtcacgccgagtgagtctatcctcgcagagccaaccgtgtcggtggtcgataaagtggtcgagaaaaaaggtactaaagaggtggcggaagcctacctgaaatatctctactcgccagaaggtcaggaaattgccgcgaaaaactactaccgtccgcgcgacgctgaggtggcgaaaaagtacgaaaatgcgtttccaaagctgaagttattcaccattgatgaagagttcggcggctggacgaaagcgcaaaaagagcattttgctaacggcggtacgttcgatcagatcagcaaacgctga

SEQ ID NO: 6327 - DNA, 768 bp, Escherichia coli
  CDS (1)...(768)
atgcgacatcctttagtgatgggtaactggaaactgaacggcagccgccacatggttcacgagctggtttctaacctgcgtaaagagctggcaggtgttgctggctgtgcggttgcaatcgcaccaccggaaatgtatatcgatatggcgaagcgcgaagctgaaggcagccacatcatgctgggtgcgcaaaacgtggacctgaacctgtccggcgcattcaccggtgaaacctctgctgctatgctgaaagacatcggcgcacagtacatcatcatcggtcactctgaacgtcgtacttaccacaaagaatctgacgaactgatcgcgaaaaaattcgcggtgctgaaagagcagggcctgactccggttctgtgcatcggtgaaaccgaagctgaaaatgaagcgggcaaaactgaagaagtttgcgcacgtcagatcgacgcggtactgaaaactcagggtgctgcggcattcgaaggtgcggttatcgcttacgaacctgtatgggcaatcggtactggcaaatctgcaactccggctcaggcacaggctgttcacaaattcatccgtgaccacatcgctaaagttgacgctaacatcgctgaacaagtgatcattcagtacggcggctctgtaaacgcgtctaacgctgcagaactgtttgctcagccggatatcgacggcgcgctggttggtggtgcttctctgaaagctgacgccttcgcagtaatcgttaaagctgcagaagcggctaaacaggcttaa

SEQ ID NO: 6328 - DNA, 1509 bp, Escherichia coli
  CDS (1)...(1509)
atgactgaaaaaaaatatatcgttgcgctcgaccagggcaccaccagctcccgcgcggtcgtaatggatcacgatgccaatatcattagcgtgtcgcagcgcgaatttgagcaaatctacccaaaaccaggttgggtagaacacgacccaatggaaatctgggccacccaaagctccacgctggtagaagtgctggcgaaagccgatatcagttccgatcaaattgcagctatcggtattacgaaccagcgtgaaaccactattgtctgggaaaaagaaaccggcaagcctatctataacgccattgtctggcagtgccgtcgtaccgcagaaatctgcgagcatttaaaacgtgacggtttagaagattatatccgcagcaataccggtctggtgattgacccgtacttttctggcaccaaagtgaagtggatcctcgaccatgtggaaggctctcgcgagcgtgcacgtcgtggtgaattgctgtttggtacggttgatacgtggcttatctggaaaatgactcagggccgtgtccatgtgaccgattacaccaacgcctctcgtaccatgttgttcaacatccataccctggactgggacgacaaaatgctggaagtgctggatattccgcgcgagatgctgccagaagtgcgtcgttcttccgaagtatacggtcagactaacattggcggcaaaggcggcacgcgtattccaatctccgggatcgccggtgaccagcaggccgcgctgtttggtcagttgtgcgtgaaagaagggatggcgaagaacacctatggcactggctgctttatgctgatgaacactggcgagaaagcggtgaaatcagaaaacggcctgctgaccaccatcgcctgcggcccgactggcgaagtgaactatgcgttggaaggtgcggtgtttatggcaggcgcatccattcagtggctgcgcgatgaaatgaagttgattaacgacgcctacgattccgaatatttcgccaccaaagtgcaaaacaccaatggtgtgtatgtggttccggcatttaccgggctgggtgcgccgtactgggacccgtatgcgcgcggggcgattttcggtctgactcgtggggtgaacgctaaccacattatacgcgcgacgctggagtctattgcttatcagacgcgtgacgtgctggaagcgatgcaggccgactctggtatccgtctgcacgccctgcgcgtggatggtggcgcagtagcaaacaatttcctgatgcagttccagtccgatattctcggcacccgcgttgagcgcccggaagtgcgcgaagtcaccgcattgggtgcggcctatctcgcaggcctggcggttggcttctggcagaacctcgacgagctgcaagagaaagcggtgattgagcgcgagttccgtccaggcatcgaaaccactgagcgtaattaccgttacgcaggctggaaaaaagcggttaaacgcgcgatggcgtgggaagaacacgacgaataa

SEQ ID NO: 6329 - DNA, 531 bp, Escherichia coli
  CDS (1)...(531)
gtgacaactatagtaagcgtacgccgtaacggccatgtggtcatcgctggtgatggtcaggccacgttgggcaataccgtaatgaaaggcaacgtgaaaaaggtccgccgtctgtacaacgacaaagtcatcgcgggctttgcgggcggtactgcggatgcttttacgctgttcgaactgtttgaacgtaaactggaaatgcatcagggccatctggtcaaagccgccgttgagctggcaaaagactggcgtaccgatcgcatgctgcgcaaacttgaagcactgctggcagtcgcggatgaaactgcatcgcttatcatcaccggtaacggtgacgtggtgcagccagaaaacgatcttattgctatcggctccggcggcccttacgcccaggctgcggcgcgcgcgctgttagaaaacactgaacttagcgcccgtgaaattgctgaaaaggcgttggatattgcaggcgacatttgcatctataccaaccatttccacaccatcgaagaattaagctacaaagcgtaa

SEQ ID NO: 6330 - DNA, 1161 bp, Escherichia coli
  CDS (1)...(1161)
atgacgcgtaaacaggccaccatcgcagtgcgtagcgggttaaatgacgacgaacagtatggttgcgttgtcccaccgatccatctttccagcacctataactttaccggatttaatgaaccgcgcgcgcatgattactcgcgtcgcggcaacccaacgcgcgatgtggttcagcgtgcgctggcagaactggaaggtggtgctggtgcagtacttactaataccggcatgtccgcgattcacctggtaacgaccgtctttttgaaacctggcgatctgctggttgcgccgcacgactgctacggcggtagctatcgcctgttcgacagtctggcgaaacgcggttgctatcgcgtgttgtttgttgatcaaggcgatgaacaggcattacgggcagcgctggcagaaaaacccaaactggtactggtagaaagcccaagtaatccattgttacgcgtcgtggatattgcgaaaatctgccatctggcaagggaagtcggggcggtgagcgtggtggataacaccttcttaagcccggcattacaaaatccgctggcattaggtgccgatctggtgttgcattcatgcacgaaatatctgaacggtcactcagacgtagtggccggcgtggtgattgctaaagacccggacgttgtcactgaactggcctggtgggcaaacaatattggcgtgacgggcggcgcgtttgacagctatctgctgctacgtgggttgcgaacgctggtgccgcgtatggagctggcgcagcgcaacgcgcaggcgattgtgaaatacctgcaaacccagccgttggtgaaaaaactgtatcacccgtcgttgccggaaaatcaggggcatgaaattgccgcgcgccagcaaaaaggctttggcgcaatgttgagttttgaactggatggcgatgagcagacgctgcgtcgtttcctgggcgggctgtcgttgtttacgctggcggaatcattagggggagtggaaagtttaatctctcacgccgcaaccatgacacatgcaggcatggcaccagaagcgcgtgctgccgccgggatctccgagacgctgctgcgtatctccaccggtattgaagatggcgaagatttaattgccgacctggaaaatggcttccgggctgcaaacaaggggtaa

SEQ ID NO: 6331 - DNA, 663 bp, Escherichia coli
  CDS (1)...(663)
atggaactgtatctggacaccgctaacgtcgcagaagtcgaacgtctggcacgcatattccccattgccggggtgacaactaacccgagcattatcgctgccagcaaggagtccatatgggaagtgctgccgcgtctgcaaaaagcgattggtgatgagggcattctgtttgctcagaccatgagccgcgacgcgcaggggatggtggaagaagcgaagcgcctgcgcgacgctattccgggtattgtggtgaaaatcccggtgacttccgaaggtctggcagcaattaaaatactgaaaaaagagggtattactacacttggcactgctgtatatagcgccgcacaagggttattagccgcactggcaggggcaaaatacgttgctccgtatgttaaccgcgtagatgcccagggcggagacggcattcgtacggttcaggagctgcaaacgctgttagaaatgcacgcgccagaaagcatggtgctggcagccagctttaaaacgccgcgtcaggcgctggactgtttactggcaggatgtgaatccatcaccctgcccttagatgtagcgcaacaaatgctcaacacccctgcggtagagtcagctatagagaagttcgaacacgactggaatgccgcatttggcactactcatctctaa

SEQ ID NO: 6332 - DNA, 870 bp, Escherichia coli
  CDS (1)...(870)
atgagacagtctatggctaccaaactgcaggacgggaatacaccttgtctggcagctacaccttctgaaccacgtcccaccgtgctggtgtttgactccggcgtcggtgggttgtcggtctatgacgagatccggcatctcttaccggatctccattacatttatgctttcgataacgtcgctttcccgtatggcgaaaaaagcgaagcgtttattgttgagcgagtggtggcaattgtcaccgcggtgcaagaacgttatccccttgcgctggctgtggtcgcttgcaacactgccagtaccgtttcacttcctgcattacgcgaaaagttcgacttcccggttgttggtgtcgtgccggcgattaaacctgctgcacgtctgacggcaaatggcattgtcggattactggcaacccgcggaacagttaaacgttcttatactcatgagctgatcgcgcgtttcgctaatgaatgccagatagaaatgctgggctcggcagagatggttgagttggctgaagcgaagctacatggcgaagatgtttctctggatgcactaaaacgtatcctacgcccgtggttaagaatgaaagagccgccagataccgttgtattgggttgcacccatttccctctactacaagaagaactgttacaagtgctgccagagggaacccggctggtggattctggcgcagcgattgctcgccgaacggcctggttgttagaacatgaagccccggatgcaaaatctgccgatgcgaatattgccttttgtatggcaatgacgccaggagctgaacaattattgcccgttttacagcgttacggcttcgaaacgctcgaaaaactggcagttttaggctga

SEQ ID NO: 6333 - DNA, 1029 bp, Escherichia coli
  CDS (1)...(1029)
atgaaccactccttaaaaccctggaacacatttggcattgatcataatgctcagcacattgtatgtgccgaagacgaacaacaattactcaatgcctggcagtatgcaaccgcagaaggacaacccgttcttattctgggtgaaggaagtaatgtactttttctggaggactatcgcggcacggtgatcatcaaccggatcaaaggtatcgaaattcatgatgaacctgatgcgtggtatttacatgtaggagccggagaaaactggcatcgtctggtaaaatacactttgcaggaaggtatgcctggtctggaaaatctggcattaattcctggttgtgtcggctcatcacctatccagaatattggtgcttatggcgtagaattacagcgagtttgcgcttatgttgattctgttgaactggcgacaggcaagcaagtgcgcttaactgccaaagagtgccgttttggctatcgcgacagtatttttaaacatgaataccaggaccgcttcgctattgtagccgtaggtctgcgtctgccaaaagagtggcaacctgtactaacgtatggtgacttaactcgtctggatcctacaacagtaacgccacagcaagtatttaatgcggtgtgtcatatgcgcaccaccaaactccctgatccaaaagtgaatggcaatgccggtagtttcttcaaaaaccctgttgtatctgccgaaacggctaaagcattactgtcacaatttccaacagcaccaaattacccccaggcggatggttcagtaaaactggcagcaggttggcttatcgatcagtgccagctaaaagggatgcaaataggtggggctgcggtgcaccgtcaacaggcgttagttctcattaatgaagacaatgcaaaaagcgaagatgttgtacagctggcgcatcatgtaagacagaaagttggtgaaaaatttaatgtctggcttgagcctgaagtccgctttattggtgcatcaggtgaagtgagcgcagtggagacaatttcatga

SEQ ID NO: 6334 - DNA, 1185 bp, Escherichia coli
  CDS (1)...(1185)
atgtctaaagaaaagtttgaacgtacaaaaccgcacgttaacgtcggtactatcggccacgttgaccatggtaaaacaacgctgaccgctgcaatcactaccgtactggctaaaacctacggcggtgctgctcgcgcattcgaccagatcgataacgcgccggaagaaaaagctcgtggtatcaccatcaacacttctcacgttgaatacgacaccccgacccgtcactacgcacacgtagactgcccggggcacgccgactatgttaaaaacatgatcaccggtgctgcgcagatggacggcgcgatcctggtagttgctgcgactgacggcccgatgccgcagactcgtgagcacatcctgctgggtcgtcaggtaggcgttccgtacatcatcgtgttcctgaacaaatgcgacatggttgatgacgaagagctgctggaactggttgaaatggaagttcgtgaacttctgtctcagtacgacttcccgggcgacgacactccgatcgttcgtggttctgctctgaaagcgctggaaggcgacgcagagtgggaagcgaaaatcctggaactggctggcttcctggattcttacattccggaaccagagcgtgcgattgacaagccgttcctgctgccgatcgaagacgtattctccatctccggtcgtggtaccgttgttaccggtcgtgtagaacgcggtatcatcaaagttggtgaagaagttgaaatcgttggtatcaaagagactcagaagtctacctgtactggcgttgaaatgttccgcaaactgctggacgaaggccgtgctggtgagaacgtaggtgttctgctgcgtggtatcaaacgtgaagaaatcgaacgtggtcaggtactggctaagccgggcaccatcaagccgcacaccaagttcgaatctgaagtgtacattctgtccaaagatgaaggcggccgtcatactccgttcttcaaaggctaccgtccgcagttctacttccgtactactgacgtgactggtaccatcgaactgccggaaggcgtagagatggtaatgccgggcgacaacatcaaaatggttgttaccctgatccacccgatcgcgatggacgacggtctgcgtttcgcaatccgtgaaggcggccgtaccgttggcgcgggcgttgtagcaaaagttctgagctaa

SEQ ID NO: 6335 - DNA, 384 bp, Escherichia coli
  CDS (1)...(384)
atgagtgcgaataccgaagctcaaggaagcgggcgcggcctggaagcgatgaagtgggtcgttgtggtggcattgctcctggtggcgattgtcggcaactatctttatcgcgacattatgctgccgctgcgtgcgctggccgtagtaattctgattgctgcagcgggtggtgtcgcgctgttaacgacaaaaggtaaagctaccgttgcttttgcccgtgaagcgcgtaccgaagtccgtaaggtcatttggccgactcgccaggaaacattgcacaccacgctgattgtggctgcggttaccgcagtaatgtcactgatcctgtggggactggatggtattctggttcgcctggtatcctttatcactggcctgaggttctga

SEQ ID NO: 6336 - DNA, 546 bp, Escherichia coli
  CDS (1)...(546)
atgtctgaagctcctaaaaagcgctggtacgtcgttcaggcgttttccggttttgaaggccgcgtagcaacgtcgctgcgtgagcatatcaaattacacaacatggaagatttgtttggtgaagtcatggtaccaaccgaagaagtggttgaaatccgtggcggtcagcgtcgcaaaagcgaacgtaaattcttccctggctacgtcctcgttcagatggtgatgaacgacgcgagctggcacctggtgcgcagcgtaccgcgtgtgatgggcttcatcggcggtacttccgatcgtcctgcgccaatcagcgataaagaagtcgatgcgattatgaaccgcctgcagcaggttggtgataagccgcgtccgaaaacgctgtttgaaccgggtgaaatggtccgtgttaatgatggtccgttcgctgacttcaacggtgttgttgaagaagtggattacgagaaatctcgtctgaaagtgtctgtttctatcttcggtcgtgcgaccccggtagagctggacttcagccaggttgaaaaagcctaa

SEQ ID NO: 6337 - DNA, 429 bp, Escherichia coli
  CDS (1)...(429)
atggctaagaaagtacaagcctatgtcaagctgcaggttgcagctggtatggctaacccgagtccgccagtaggtccggctctgggtcagcagggcgtaaacatcatggaattctgcaaagcgttcaacgcaaaaactgattccatcgaaaaaggtctgccgattccggtagtaatcaccgtttacgctgaccgttctttcactttcgttaccaagaccccgccggcagcagttctgctgaaaaaagcggctggtatcaagtctggttccggtaagccgaacaaagacaaagtgggtaaaatttcccgcgctcagctgcaggaaatcgcgcagaccaaagctgccgacatgactggtgccgacattgaagcgatgactcgctccatcgaaggtactgcacgttccatgggcctggtagtggaggactaa

SEQ ID NO: 6338 - DNA, 705 bp, Escherichia coli
  CDS (1)...(705)
atggctaaactgaccaagcgcatgcgtgttatccgcgagaaagttgatgcaaccaaacagtacgacatcaacgaagctatcgcactgctgaaagagctggcgactgctaaattcgtagaaagcgtggacgtagctgttaacctcggcatcgacgctcgtaaatctgaccagaacgtacgtggtgcaactgtactgccgcacggtactggccgttccgttcgcgtagccgtatttacccaaggtgcaaacgctgaagctgctaaagctgcaggcgcagaactggtaggtatggaagatctggctgaccagatcaagaaaggcgaaatgaactttgacgttgttattgcttctccggatgcaatgcgcgttgttggccagctgggccaggttctgggtccgcgcggcctgatgccaaacccgaaagtgggtactgtaacaccgaacgttgctgaagcggttaaaaacgctaaagctggccaggttcgttaccgtaacgacaaaaacggcatcatccacaccaccatcggtaaagtggactttgacgctgacaaactgaaagaaaacctggaagctctgctggttgcgctgaaaaaagcaaaaccgactcaggcgaaaggcgtgtacatcaagaaagttagcatctccaccaccatgggtgcaggtgttgcagttgaccaggctggcctgagcgcttctgtaaactaa

SEQ ID NO: 6339 - DNA, 498 bp, Escherichia coli
  CDS (1)...(498)
atggctttaaatcttcaagacaaacaagcgattgttgctgaagtcagcgaagtagccaaaggcgcgctgtctgcagtagttgcggattcccgtggcgtaactgtagataaaatgactgaactgcgtaaagcaggtcgcgaagctggcgtatacatgcgtgttgttcgtaacaccctgctgcgccgtgctgttgaaggtactccgttcgagtgcctgaaagacgcgtttgttggtccgaccctgattgcatactctatggaacacccgggcgctgctgctcgtctgttcaaagagttcgcgaaagcgaatgcaaaatttgaggtcaaagccgctgcctttgaaggtgagctgatcccggcgtctcagatcgaccgcctggcaactctgccgacctacgaagaagcaattgcacgcctgatggcaaccatgaaagaagcttcggctggcaaactggttcgtactctggctgctgtacgcgatgcgaaagaagctgcttaa

SEQ ID NO: 6340 - DNA, 366 bp, Escherichia coli
  CDS (1)...(366)
atgtctatcactaaagatcaaatcattgaagcagttgcagctatgtctgtaatggacgttgtagaactgatctctgcaatggaagaaaaattcggtgtttccgctgctgctgctgtagctgtagctgctggcccggttgaagctgctgaagaaaaaactgaattcgacgtaattctgaaagctgctggcgctaacaaagttgctgttatcaaagcagtacgtggcgcaactggcctgggtctgaaagaagctaaagacctggtagaatctgcaccggctgctctgaaagaaggcgtgagcaaagacgacgcagaagcactgaaaaaagctctggaagaagctggcgctgaagttgaagttaaataa

SEQ ID NO: 6341 - DNA, 4029 bp, Escherichia coli
  CDS (1)...(4029)
atggtttactcctataccgagaaaaaacgtattcgtaaggattttggtaaacgtccacaagttctggatgtaccttatctcctttctatccagcttgactcgtttcagaaatttatcgagcaagatcctgaagggcagtatggtctggaagctgctttccgttccgtattcccgattcagagctacagcggtaattccgagctgcaatacgtcagctaccgccttggcgaaccggtgtttgacgtccaggaatgtcaaatccgtggcgtgacctattccgcaccgctgcgcgttaaactgcgtctggtgatctatgagcgcgaagcgccggaaggcaccgtaaaagacattaaagaacaagaagtctacatgggcgaaattccgctcatgacagacaacggtacctttgttatcaacggtactgagcgtgttatcgtttcccagctgcaccgtagtccgggcgtcttctttgactccgacaaaggtaaaacccactcttcgggtaaagtgctgtataacgcgcgtatcatcccttaccgtggttcctggctggacttcgaattcgatccgaaggacaacctgttcgtacgtatcgaccgtcgccgtaaactgcctgcgaccatcattctgcgcgccctgaactacaccacagagcagatcctcgacctgttctttgaaaaagttatctttgaaatccgtgataacaagctgcagatggaactggtgccggaacgcctgcgtggtgaaaccgcatcttttgacatcgaagctaacggtaaagtgtacgtagaaaaaggccgccgtatcactgcgcgccacattcgccagctggaaaaagacgacgtcaaactgatcgaagtcccggttgagtacatcgcaggtaaagtggttgctaaagactatattgatgagtctaccggcgagctgatctgcgcagcgaacatggagctgagcctggatctgctggctaagctgagccagtctggtcacaagcgtatcgaaacgctgttcaccaacgatctggatcacggcccatatatctctgaaaccttacgtgtcgacccaactaacgaccgtctgagcgcactggtagaaatctaccgcatgatgcgccctggcgagccgccgactcgtgaagcagctgaaagcctgttcgagaacctgttcttctccgaagaccgttatgacttgtctgcggttggtcgtatgaagttcaaccgttctctgctgcgcgaagaaatcgaaggttccggtatcctgagcaaagacgacatcattgatgttatgaaaaagctcatcgatatccgtaacggtaaaggcgaagtcgatgatatcgaccacctcggcaaccgtcgtatccgttccgttggcgaaatggcggaaaaccagttccgcgttggcctggtacgtgtagagcgtgcggtgaaagagcgtctgtctctgggcgatctggataccctgatgccacaggatatgatcaacgccaagccgatttccgcagcagtgaaagagttcttcggttccagccagctgtctcagtttatggaccagaacaacccgctgtctgagattacgcacaaacgtcgtatctccgcactcggcccaggcggtctgacccgtgaacgtgcaggcttcgaagttcgagacgtacacccgactcactacggtcgcgtatgtccaatcgaaacccctgaaggtccgaacatcggtctgatcaactctctgtccgtgtacgcacagactaacgaatacggcttccttgagactccgtatcgtaaagtgaccgacggtgttgtaactgacgaaattcactacctgtctgctatcgaagaaggcaactacgttatcgcccaggcgaactccaacttggatgaagaaggccacttcgtagaagacctggtaacttgccgtagcaaaggcgaatccagcttgttcagccgcgaccaggttgactacatggacgtatccacccagcaggtggtatccgtcggtgcgtccctgatcccgttcctggaacacgatgacgccaaccgtgcattgatgggtgcgaacatgcaacgtcaggccgttccgactctgcgcgctgataagccgctggttggtactggtatggaacgtgctgttgccgttgactccggtgtaactgcggtagctaaacgtggtggtgtcgttcagtacgtggatgcttcccgtatcgttatcaaagttaacgaagacgagatgtatccgggtgaagcaggtatcgacatctacaacctgaccaaatacacccgttctaaccagaacacctgtatcaaccagatgccgtgtgtgtctctgggtgaaccggttgaacgtggcgacgtgctggcagacggtccgtccaccgacctcggtgaactggcgcttggtcagaacatgcgcgtagcgttcatgccgtggaatggttacaacttcgaagactccatcctcgtatccgagcgtgttgttcaggaagaccgtttcaccaccatccacattcaggaactggcgtgtgtgtcccgtgacaccaagctgggtccggaagagatcaccgctgacatcccgaacgtgggtgaagctgcgctctccaaactggatgaatccggtatcgtttacattggtgcggaagtgaccggtggcgacattctggttggtaaggtaacgccgaaaggtgaaactcagctgaccccagaagaaaaactgctgcgtgcgatcttcggtgagaaagcctctgacgttaaagactcttctctgcgcgtaccaaacggtgtatccggtacggttatcgacgttcaggtctttactcgcgatggcgtagaaaaagacaaacgtgcgctggaaatcgaagaaatgcagctcaaacaggcgaagaaagacctgtctgaagaactgcagatcctcgaagcgggtctgttcagccgtatccgtgctgtgctggtagccggtggcgttgaagctgagaagctcgacaaactgccgcgcgatcgctggctggagctgggcctgacagacgaagagaaacaaaatcagctggaacagctggctgagcagtatgacgaactgaaacacgagttcgagaagaaactcgaagcgaaacgccgcaaaatcacccagggcgacgatctggcaccgggcgtgctgaagattgttaaggtatatctggcggttaaacgccgtatccagcctggtgacaagatggcaggtcgtcacggtaacaagggtgtaatttctaagatcaacccgatcgaagatatgccttacgatgaaaacggtacgccggtagacatcgtactgaacccgctgggcgtaccgtctcgtatgaacatcggtcagatcctcgaaacccacctgggtatggctgcgaaaggtatcggcgacaagatcaacgccatgctgaaacagcagcaagaagtcgcgaaactgcgcgaattcatccagcgtgcgtacgatctgggcgctgacgttcgtcagaaagttgacctgagtaccttcagcgatgaagaagttatgcgtctggctgaaaacctgcgcaaaggtatgccaatcgcaacgccggtgttcgacggtgcgaaagaagcagaaattaaagagctgctgaaacttggcgacctgccgacttccggtcagatccgcctgtacgatggtcgcactggtgaacagttcgagcgtccggtaaccgttggttacatgtacatgctgaaactgaaccacctggtcgacgacaagatgcacgcgcgttccaccggttcttacagcctggttactcagcagccgctgggtggtaaggcacagttcggtggtcagcgtttcggggagatggaagtgtgggcgctggaagcatacggcgcagcatacaccctgcaggaaatgctcaccgttaagtctgatgacgtgaacggtcgtaccaagatgtataaaaacatcgtggacggcaaccatcagatggagccgggcatgccagaatccttcaacgtattgttgaaagagattcgttcgctgggtatcaacatcgaactggaagacgagtaa

SEQ ID NO: 6342 - DNA, 4224 bp, Escherichia coli
  CDS (1)...(4224)
gtgaaagatttattaaagtttctgaaagcgcagactaaaaccgaagagtttgatgcgatcaaaattgctctggcttcgccagacatgatccgttcatggtctttcggtgaagttaaaaagccggaaaccatcaactaccgtacgttcaaaccagaacgtgacggccttttctgcgcccgtatctttgggccggtaaaagattacgagtgcctgtgcggtaagtacaagcgcctgaaacaccgtggcgtcatctgtgagaagtgcggcgttgaagtgacccagactaaagtacgccgtgagcgtatgggccacatcgaactggcttccccgactgcgcacatctggttcctgaaatcgctgccgtcccgtatcggtctgctgctcgatatgccgctgcgcgatatcgaacgcgtactgtactttgaatcctatgtggttatcgaaggcggtatgaccaacctggaacgtcagcagatcctgactgaagagcagtatctggacgcgctggaagagttcggtgacgaattcgacgcgaagatgggggcggaagcaatccaggctctgctgaagagcatggatctggagcaagagtgcgaacagctgcgtgaagagctgaacgaaaccaactccgaaaccaagcgtaaaaagctgaccaagcgtatcaaactgctggaagcgttcgttcagtctggtaacaaaccagagtggatgatcctgaccgttctgccggtactgccgccagatctgcgtccgctggttccgctggatggtggtcgtttcgcgacttctgacctgaacgatctgtatcgtcgcgtcattaaccgtaacaaccgtctgaaacgtctgctggatctggctgcgccggacatcatcgtacgtaacgaaaaacgtatgctgcaggaagcggtagacgccctgctggataacggtcgtcgcggtcgtgcgatcaccggttctaacaagcgtcctctgaaatctttggccgacatgatcaaaggtaaacagggtcgtttccgtcagaacctgctcggtaagcgtgttgactactccggtcgttctgtaatcaccgtaggtccatacctgcgtctgcatcagtgcggtctgccgaagaaaatggcactggagctgttcaaaccgttcatctacggcaagctggaactgcgtggtcttgctaccaccattaaagctgcgaagaaaatggttgagcgcgaagaagctgtcgtttgggatatcctggacgaagttatccgcgaacacccggtactgctgaaccgtgcaccgactctgcaccgtctgggtatccaggcatttgaaccggtactgatcgaaggtaaagctatccagctgcacccgctggtttgtgcggcatataacgccgacttcgatggtgaccagatggctgttcacgtaccgctgacgctggaagcccagctggaagcgcgtgcgctgatgatgtctaccaacaacatcctgtccccggcgaacggcgaaccaatcatcgttccgtctcaggacgttgtactgggtctgtactacatgacccgtgactgtgttaacgccaaaggcgaaggcatggtgctgactggcccgaaagaagcagaacgtctgtatcgctctggtctggcttctctgcatgcgcgcgttaaagtgcgtatcaccgagtatgaaaaagatgctaacggtgaattagtagcgaaaaccagcctgaaagacacgactgttggccgtgccattctgtggatgattgtaccgaaaggtctgccttactccatcgtcaaccaggcgctgggtaaaaaagcaatctccaaaatgctgaacacctgctaccgcattctcggtctgaaaccgaccgttatttttgcggaccagatcatgtacaccggcttcgcctatgcagcgcgttctggtgcatctgttggtatcgatgacatggtcatcccggagaagaaacacgaaatcatctccgaggcagaagcagaagttgctgaaattcaggagcagttccagtctggtctggtaactgcgggcgaacgctacaacaaagttatcgatatctgggctgcggcgaacgatcgtgtatccaaagcgatgatggataacctgcaaactgaaaccgtgattaaccgtgacggtcaggaagagaagcaggtttccttcaacagcatctacatgatggccgactccggtgcgcgtggttctgcggcacagattcgtcagcttgctggtatgcgtggtctgatggcgaagccggatggctccatcatcgaaacgccaatcaccgcgaacttccgtgaaggtctgaacgtactccagtacttcatctccacccacggtgctcgtaaaggtctggcggataccgcactgaaaactgcgaactccggttacctgactcgtcgtctggttgacgtggcgcaggacctggtggttaccgaagacgattgtggtacccatgaaggtatcatgatgactccggttatcgagggtggtgacgttaaagagccgctgcgcgatcgcgtactgggtcgtgtaactgctgaagacgttctgaagccgggtactgctgatatcctcgttccgcgcaacacgctgctgcacgaacagtggtgtgacctgctggaagagaactctgtcgacgcggttaaagtacgttctgttgtatcttgtgacaccgactttggtgtatgtgcgcactgctacggtcgtgacctggcgcgtggccacatcatcaacaagggtgaagcaatcggtgttatcgcggcacagtccatcggtgaaccgggtacacagctgaccatgcgtacgttccacatcggtggtgcggcatctcgtgcggctgctgaatccagcatccaagtgaaaaacaaaggtagcatcaagctcagcaacgtgaagtcggttgtgaactccagcggtaaactggttatcacttcccgtaatactgaactgaaactgatcgacgaattcggtcgtactaaagaaagctacaaagtaccttacggtgcggtactggcgaaaggcgatggcgaacaggttgctggcggcgaaaccgttgcaaactgggacccgcacaccatgccggttatcaccgaagtaagcggttttgtacgctttactgacatgatcgacggccagaccattacgcgtcagaccgacgaactgaccggtctgtcttcgctggtggttctggattccgcagaacgtaccgcaggtggtaaagatctgcgtccggcactgaaaatcgttgatgctcagggtaacgacgttctgatcccaggtaccgatatgccagcgcagtacttcctgccgggtaaagcgattgttcagctggaagatggcgtacagatcagctctggtgacaccctggcgcgtattccgcaggaatccggcggtaccaaggacatcaccggtggtctgccgcgcgttgcggacctgttcgaagcacgtcgtccgaaagagccggcaatcctggctgaaatcagcggtatcgtttccttcggtaaagaaaccaaaggtaaacgtcgtctggttatcaccccggtagacggtagcgatccgtacgaagagatgattccgaaatggcgtcagctcaacgtgttcgaaggtgaacgtgtagaacgtggtgacgtaatttccgacggtccggaagcgccgcacgacattctgcgtctgcgtggtgttcatgctgttactcgttacatcgttaacgaagtacaggacgtataccgtctgcagggcgttaagattaacgataaacacatcgaagttatcgttcgtcagatgctgcgtaaagctaccatcgttaacgcgggtagctccgacttcctggaaggcgaacaggttgaatactctcgcgtcaagatcgcaaaccgcgaactggaagcgaacggcaaagtgggtgcaacttactcccgcgatctgctgggtatcaccaaagcgtctctggcaaccgagtccttcatctccgcggcatcgttccaggagaccactcgcgtgctgaccgaagcagccgttgcgggcaaacgcgacgaactgcgcggcctgaaagagaacgttatcgtgggtcgtctgatcccggcaggtaccggttacgcgtaccaccaggatcgtatgcgtcgccgtgctgcgggtgaagctccggctgcaccgcaggtgactgcagaagacgcatctgccagcctggcagaactgctgaacgcaggtctgggcggttctgataacgagtaa

SEQ ID NO: 6343 - DNA, 636 bp, Escherichia coli
  CDS (1)...(636)
atgtatcagcctgattttcctcctgtaccttttcgttcaggactgtacccggtggtggacagcgtacagtggatcgaacgtctgttggatgcaggcgtacgtactctccagctacgcatcaaagatcggcgcgatgaagaggtggaagccgatgtcgtggcggcaattgcgctgggccgccgctataacgcgcgattgtttatcaacgattactggcggctggcgatcaagcatcaggcgtatggcgtccatttggggcaggaagatttgcaagccaccgatctcaatgccatccgcgcggcaggcctgcggctgggcgtttcgacacatgacgatatggaaatcgacgtcgcgctggcagcacgcccctcttatatcgcgctgggacatgtgttcccgacgcaaaccaaacagatgccttctgcaccgcaggggctggaacagctggcacggcatgttgagcgactggcggattatcccaccgtggcgattggcggtatcagtctggcacgcgcgcctgcggtgatagcaacgggtgtcggcagtatcgccgtcgtcagcgccattactcaagccgcagactggcgtttggcaacggcacagttgctggaaattgcaggagttggcgatgaatga

SEQ ID NO: 6344 - DNA, 1305 bp, Escherichia coli
  CDS (1)...(1305)
atgaaaacccgtacacaacaaattgaagaattacagaaagagtggactcaaccgcgttgggaaggcattactcgcccatacagtgcggaagatgtggtgaaattacgcggttcagtcaatcctgaatgcacgctggcgcaactgggcgcagcgaaaatgtggcgtctgctgcacggtgagtcgaaaaaaggctacatcaacagcctcggcgcactgactggcggtcaggcgctgcaacaggcgaaagcgggtattgaagcagtctatctgtcgggatggcaggtagcggcggacgctaacctggcggccagcatgtatccggatcagtcgctctatccggcaaactcggtgccagctgtggtggagcggatcaacaacaccttccgtcgtgccgatcagatccaatggtccgcgggcattgagccgggcgatccgcgctatgtcgattacttcctgccgatcgttgccgatgcggaagccggttttggcggtgtcctgaatgcctttgaactgatgaaagcgatgattgaagccggtgcagcggcagttcacttcgaagatcagctggcgtcagtgaagaaatgcggtcacatgggcggcaaagttttagtgccaactcaggaagctattcagaaactggtcgcggcgcgtctggcagctgacgtgacgggcgttccaaccctgctggttgcccgtaccgatgctgatgcggcggatctgatcacctccgattgcgacccgtatgacagcgaatttattaccggcgagcgtaccagtgaaggcttcttccgtactcatgcgggcattgagcaagcgatcagccgtggcctggcgtatgcgccatatgctgacctggtctggtgtgaaacctccacgccggatctggaactggcgcgtcgctttgcacaagctatccacgcgaaatatccgggcaaactgctggcttataactgctcgccgtcgttcaactggcagaaaaacctcgacgacaaaactattgccagcttccagcagcagctgtcggatatgggctacaagttccagttcatcaccctggcaggtatccacagcatgtggttcaacatgtttgacctggcaaacgcctatgcccagggcgagggtatgaagcactacgttgagaaagtgcagcagccggaatttgccgccgcgaaagatggctataccttcgtatctcaccagcaggaagtgggtacaggttacttcgataaagtgacgactattattcagggcggcacgtcttcagtcaccgcgctgaccggctccactgaagaatcgcagttctaa

SEQ ID NO: 6345 - DNA, 873 bp, Escherichia coli
  CDS (1)...(873)
atgctgcccgactcatcagtccgtttaaataaatacatcagcgaaagcggaatttgctcacgccgcgaagcggatcgctatatcgagcaaggcaatgtgttccttaatggcaagcgagccaccattggcgatcaggtgaaacccggcgacgttgtgaaagtaaacggtcagttgattgaacctcgggaagccgaagatttggtacttatcgccctgaacaagcccgttggtattgtaagcaccaccgaagatggcgagcgcgataacattgtcgatttcgttaaccacagcaaacgcgtgttcccgattggccgcctggataaagactcccaggggctgattttcctcaccaatcacggcgatctggtgaataagatcctgcgtgctggcaatgatcatgagaaagagtatctggtgacggtcgataaaccgattaccgaggagtttattcgcggcatgagtgcgggggtgccaatcctcgggacagtgaccaaaaagtgcaaagttaaaaaagaagcgccgtttgtcttccgcattaccctggtgcaggggctgaaccgtcagatccggcgcatgtgcgagcatttcggctatgaagtgaaaaagctggaacgcacgcgcatcatgaacgttagcttaagcggcattccgctgggggaatggcgcgatttaaccgacgatgagttaatcgacctctttaagctcattgaaaattcctcttccgaggtaaaacctaaagcgaaggccaaaccgaaaacagcgggcatcaaacgtccagtcgttaagatggaaaaaacggcggaaaaaggcggtcgcccggcgtccaacggtaagcgttttacctcgccggggcgtaaaaagaaggggcgctga

SEQ ID NO: 6346 - DNA, 210 bp, Escherichia coli
  CDS (1)...(210)
atgaataaagatgaagccggcggtaactggaaacagtttaaaggtaaagtgaaagagcaatggggcaaactgaccgatgatgatatgacgatcattgaaggtaaacgtgatcaactggtcggtaaaatccaggaacgttatggttatcagaaagatcaggcagaaaaagaggtcgtggattgggaaacccgcaatgaatatcgctggtaa

SEQ ID NO: 6347 - DNA, 984 bp, Escherichia coli
  CDS (1)...(984)
atggcaacacgaattgaatttcacaagcacggtggcccggaagtacttcaagccgtagagttcactcctgccgatccggcggagaatgaaatccaggtcgaaaataaagccatcggcatcaattttatcgacacatatatccgcagcggcctttacccgccgccatcgctacccagcggattaggcaccgaagcagcaggcatcgtgagtaaagtcggcagtggtgtaaagcatattaaggcaggcgatcgtgtagtctatgcgcagtcggcgttaggcgcttacagctctgtgcataacattattgcggataaagcggcgattctgcctgcggcaatttcttttgagcaagctgcggcatccttcctgaaaggcttaacggtttattatctgctgcgcaaaacctatgaaattaaacccgatgaacagttcctgttccacgcagcggctggcggcgttggcttaattgcctgccagtgggcaaaagccctgggcgcgaaacttatcggcaccgtaggaaccgcgcaaaaagcgcagagcgcgctaaaagcgggcgcgtggcaggttattaactatcgtgaagaggatctggtcgagcggttaaaagagatcaccggcggtaagaaagtgcgcgtggtgtacgattccgtgggcagagacacctgggaacggtcgctggattgcctgcaacgccgcggcttaatggtcagttttggcaactcatcaggtgcggttaccggtgtgaacttaggcattctcaatcaaaaaggctcgttgtatgtgacacgcccttccctgcaaggctatatcaccacgcgggaggaattaaccgaggccagtaatgaactgttctctttgattgccagcggtgtgattaaggtcgatgtcgccgagcagcagaaatatccgctgaaggatgcgcagcgtgcgcatgagattctggaaagccgggcgacgcaaggttccagcctgctgattccataa

SEQ ID NO: 6348 - DNA, 1416 bp, Escherichia coli
  CDS (1)...(1416)
atggcaggaaataaacccttcaacaaacagcaggctgaaccccgcgaacgcgatccacaagttgccgggctgaaagtgcctccgcactcgatcgaagcggagcagtcggtgttgggcggtttaatgctagataacgaacgctgggatgatgtagccgagcgtgtggtagcagacgatttttacacccgcccacaccgtcatatctttactgaaatggcgcgtttgcaggaaagcggtagccctatcgatctgattactcttgcggaatcgctggaacgccaggggcaactcgatagcgtcggtggttttgcttatctggcagagctgtcaaaaaatacgccaagtgcggctaacatcagtgcctatgcggacatcgtgcgtgaacgtgccgttgtccgtgagatgatctcggttgcgaatgagattgccgaagctggttttgatccgcaggggcgtaccagcgaagatctgctggatctggctgaatcccgcgtctttaaaattgccgaaagtcgtgcgaacaaagacgaagggccgaagaacatcgccgatgtgctcgacgcaaccgtggcgcgtattgagcagttgtttcagcagccacacgatggcgttaccggggtaaacaccggttatgacgatctcaacaaaaaaaccgctggcttgcagccgtcggatttgatcatcgtcgccgcgcgtccgtcgatgggtaaaacaacatttgcgatgaacctcgtcgaaaacgcggcgatgttgcaggataaaccggtacttatcttctcgctggagatgccatcagaacagatcatgatgcgttctctggcgtcgctgtcgcgcgttgaccagactaaaatccgtaccgggcagctcgatgacgaagactgggcgcgcatttccggcaccatgggtattttgctcgaaaaacgcaatatctatatcgatgactcctccggcctgacgccaacggaagtgcgttcccgcgcacgccgtattgcccgtgaacacggcggcatcgggcttatcatgatcgactacctgcaactgatgcgcgtaccggcgctttccgataaccgtacgctggaaattgcagaaatctctcgctcgctgaaagcactggcgaaagaactgaacgtgccggtggtggcgctgtcccagttgaaccgttctctggaacaacgtgccgacaaacgcccggtcaactccgacctgcgtgaatctggctctatcgagcaggatgcggacttgatcatgtttatctatcgtgatgaggtgtatcacgaaaacagtgatttaaaaggcatcgcggaaattattatcggtaaacaacgtaacggcccaatcgggacggtacgcctgacctttaacggtcaatggtcgcgcttcgacaactatgcggggccgcagtacgacgacgaataa

SEQ ID NO: 6349 - DNA, 1080 bp, Escherichia coli
  CDS (1)...(1080)
atgcaagcggcaactgttgtgattaaccgccgcgctctgcgacacaacctgcaacgtcttcgtgaactggcccctgccagtaaaatggttgcggtggtgaaagcgaacgcttatggtcacggtcttcttgagaccgcgcgaacgctccccgatgctgacgcctttggcgtagcccgtctcgaagaagctctgcgactgcgtgcggggggaatcaccaaacctgtactgttactcgaaggcttttttgatgccagagatctgccgacgatttctgcgcaacattttcataccgccgtgcataacgaagaacagctggctgcgctggaagaggctagcctggacgagccggttaccgtctggatgaaactcgataccggtatgcaccgtctgggcgtaaggccggaacaggctgaggcgttttatcatcgcctgacccagtgcaaaaacgttcgtcagccggtgaatatcgtcagccattttgcgcgcgcggatgaaccaaaatgtggcgcaaccgagaaacaactcgctatctttaataccttttgcgaaggcaaacctggtcaacgttccattgccgcgtcgggtggcattctgctgtggccacagtcgcattttgactgggtgcgcccgggcatcattctttatggcgtctcgccgctggaagatcgctccaccggtgccgattttggctgtcagccagtgatgtcactaacctccagcctgattgccgtgcgtgagcataaagccggagagcctgttggttatggtggaacctgggtaagcgaacgtgatacccgtcttggcgtagtcgcgatgggctatggcgatggttatccgcgcgccgcgccgtccggtacgccagtgctggtgaacggtcgcgaagtaccgattgtcgggcgcgtggcgatggatatgatctgcgtagacttaggtccacaggcgcaggacaaagccggggatccggtcattttatggggcgaaggtttgcccgtagaacgtatcgctgaaatgacgaaagtaagcgcttacgaacttattacgcgcctgacttcaagggtcgcgatgaaatacgtggattaa

SEQ ID NO: 6350 - DNA, 2823 bp, Escherichia coli
  CDS (1)...(2823)
atggataagatcgaagttcggggcgcccgcacccataatctcaaaaacatcaacctcgttatcccccgcgacaagctcattgtcgtgaccgggctttcgggttctggcaaatcctcgctcgctttcgacaccttatatgccgaagggcagcgccgttacgttgaatccctttccgcctacgcgcggcagtttctgtcactgatggaaaagccggacgtcgatcatattgaggggctttctcctgccatctcaattgagcagaaatcgacgtctcataacccgcgttctacggtggggacaatcaccgaaatccacgactatttgcgtttgttattcgcccgcgttggcgagccgcgctgtccggaccacgacgtcccgctggcggcgcaaaccgtcagccagatggtggataacgtgctgtcgcagccggaaggcaagcgtctgatgctactcgcgccaatcattaaagagcgcaaaggcgaacacaccaaaacgctggagaacctggcaagccagggctacatccgtgctcgtattgatggcgaagtctgcgatctttccgatccgccaaaactggaactgcaaaagaaacataccattgaagtggtggttgatcgcttcaaggtgcgtgacgatcttacccaacgtcttgccgagtcatttgaaaccgcgctggagctttccggtggtaccgcggtagtggcggatatggacgacccgaaagcggaagagctgctgttctccgccaacttcgcctgcccaatttgcggctacagtatgcgtgaactggagccgcgactgttttcgtttaacaacccggcgggggcctgcccgacctgcgacggccttggcgtacagcaatatttcgatcctgatcgagtgatccagaatccggaactgtcgctggctggtggtgcgatccgtggctgggatcgccgcaacttctattatttccagatgctgaaatcgctggcagatcactataagttcgacgtcgaagcgccgtggggcagcctgagcgcgaacgtgcataaagtggtgttgtacggttctggcaaagaaaacattgaattcaaatacatgaacgatcgtggcgatacctccattcgtcgtcatccgttcgaaggcgtgctgcataatatggagcgccgctataaagagacggaatccagcgcggtacgcgaagaattagccaagtttatcagtaatcgtccgtgcgccagctgcgaagggacgcgtctgcgtcgggaagcgcgccacgtgtatgtcgagaatacgccgctgcctgctatctccgacatgagcattggtcatgcgatggaattcttcaacaatctcaaactcgcaggtcagcgggcgaagattgcagaaaaaatccttaaagagatcggcgatcgtctgaaattcctcgttaacgtcggcctgaattacctgacgctttcccgctcggcagaaacgctttctggcggtgaagcacagcgtatccgtctggcgagccagattggtgcgggcctggttggcgttatgtacgtgctggacgagccgtctatcggcctgcaccagcgtgataacgagcgcctgttgggtacgcttatccatctgcgcgatctcggtaataccgtgattgtggtggagcacgacgaagacgcaattcgcgccgctgaccatgtgatcgacattggcccgggcgcaggtgttcacggcggtgaagtggtcgcagaaggtccgctggaagcgattatggcggtgccggagtcgttgaccgggcagtacatgagcggcaaacgcaagattgaagtgccgaagaaacgcgttccggcgaatccggaaaaagtgctgaagctgacaggcgcacgcggcaacaacctgaaggacgtgacgctgacgctgccggtgggtctgtttacctgcatcaccggggtttcaggttccggtaaatcgacgctgattaacgacacactgttcccgattgcccaacgccagttgaatggggcgaccatcgccgaaccagcaccgtatcgcgatattcaggggctggagcatttcgataaagtgatcgatatcgaccaaagcccaattggtcgtactccacgttctaacccggcgacctataccggcgtgtttacgcctgtgcgcgaactgtttgcgggcgtaccggaatcccgtgcgcgcggctatacgccgggacgtttcagctttaacgttcgtggcggacgctgcgaggcctgtcagggcgatggcgtgatcaaagtggagatgcacttcctgccggatatctacgtgccgtgcgaccagtgcaaaggtaaacgctataaccgtgaaacgctggagattaagtacaaaggcaaaaccatccacgaagtgctggatatgaccatcgaagaggcgcgtgagttctttgatgccgtacctgcactggcgcgtaagctgcaaacgttgatggacgttggcctgacgtacattcgactggggcagtccgcaaccaccctttcaggcggtgaagcccagcgcgtgaagctggcgcgtgaactgtcaaaacgcggcaccgggcagacgctgtatattctcgacgagccgaccaccggtctgcacttcgccgatattcagcaactgctcgacgtactgcataaactgcgcgatcagggcaacaccattgtggtgattgagcacaatctcgacgtgatcaaaaccgctgactggattgtcgacctgggaccagaaggcggcagtggtggcggcgagatcctcgtctccggtacgccagaaaccgtcgcggagtgcgaagcatcacacacggcacgcttccttaagccgatgctgtaa

SEQ ID NO: 6351 - DNA, 537 bp, Escherichia coli
  CDS (1)...(537)
atggccagcagaggcgtaaacaaggttattctcgttggtaatctgggtcaggacccggaagtacgctacatgccaaatggtggcgcagttgccaacattacgctggctacttccgaatcctggcgtgataaagcgaccggcgagatgaaagaacagactgaatggcaccgcgttgtgctgttcggcaaactggcagaagtggcgagcgaatatctgcgtaaaggttctcaggtttatatcgaaggtcagctgcgtacccgtaaatggaccgatcaatccggtcaggatcgctacaccacagaagtcgtggtgaacgttggcggcaccatgcagatgctgggtggtcgtcagggtggtggcgctccggcaggtggcaatatcggtggtggtcagccgcagggcggttggggtcagcctcagcagccgcagggtggcaatcagttcagcggcggcgcgcagtctcgcccgcagcagtccgctccggcagcgccgtctaacgagccgccgatggactttgatgatgacattccgttctga

SEQ ID NO: 6352 - DNA, 1959 bp, Escherichia coli
  CDS (1)...(1959)
atgagccaaattcacaaacacaccattcctgccaacatcgcagaccgttgcctgataaaccctcagcagtacgaggcgatgtatcaacaatctattaacgtacctgataccttctggggcgaacagggaaaaattcttgactggatcaaaccttaccagaaggtgaaaaacacctcctttgcccccggtaatgtgtccattaaatggtacgaggacggcacgctgaatctggcggcaaactgccttgaccgccatctgcaagaaaacggcgatcgtaccgccatcatctgggaaggcgacgacgccagccagagcaaacatatcagctataaagagctgcaccgcgacgtctgccgcttcgccaataccctgctcgagctgggcattaaaaaaggtgatgtggtggcgatttatatgccgatggtgccggaagccgcggttgcgatgctggcctgcgcccgcattggcgcggtgcattcggtgattttcggcggcttctcgccggaagccgttgccgggcgcattattgattccaactcacgactggtgatcacttccgacgaaggtgtgcgtgccgggcgcagtattccgctgaagaaaaacgttgatgacgcgctgaaaaacccgaacgtcaccagcgtagagcatgtggtggtactgaagcgtactggcgggaaaattgactggcaggaagggcgcgacctgtggtggcacgacctggttgagcaagcgagcgatcagcaccaggcggaagagatgaacgccgaagatccgctgtttattctctacacctccggttctaccggtaagccaaaaggtgtgctgcatactaccggcggttatctggtgtacgcggcgctgacctttaaatatgtctttgattatcatccgggtgatatctactggtgcaccgccgatgtgggctgggtgaccggacacagttacttgctgtacggcccgctggcctgcggtgcgaccacgctgatgtttgaaggcgtacccaactggccgacgcctgcccgtatggcgcaggtggtggacaagcatcaggtcaatattctctataccgcacccacggcgatccgcgcgctgatggcggaaggcgataaagcgatcgaaggcaccgaccgttcgtcgctgcgcattctcggttccgtgggcgagccaattaacccggaagcgtgggagtggtactggaaaaaaatcggcaacgagaaatgtccggtggtcgatacctggtggcagaccgaaaccggcggtttcatgatcaccccgctgcctggcgctaccgagctgaaagccggttcggcaacacgtccgttcttcggcgtgcaaccggcgctggtcgataacgaaggtaacccgctggagggggccaccgaaggtagcctggtaatcaccgactcctggccgggtcaggcgcgtacgctgtttggcgatcacgaacgttttgaacagacctacttctccaccttcaaaaatatgtatttcagcggcgacggcgcgcgtcgcgatgaagatggctattactggataaccgggcgtgtggacgacgtgctgaacgtctccggtcaccgtctggggacggcagagattgagtcggcgctggtggcgcatccgaagattgccgaagccgccgtagtaggtattccgcacaatattaaaggtcaggcgatctacgcctacgtcacgcttaatcacggggaggaaccgtcaccagaactgtacgcagaagtccgcaactgggtgcgtaaagagattggcccgctggcgacgccagacgtgctgcactggaccgactccctgcctaaaacccgctccggcaaaattatgcgccgtattctgcgcaaaattgcggcgggcgataccagcaacctgggcgatacctcgacgcttgccgatcctggcgtagtcgagaagctgcttgaagagaagcaggctatcgcgatgccatcgtaa

SEQ ID NO: 6353 - DNA, 2148 bp, Escherichia coli
  CDS (1)...(2148)
atgaaaaaagtcgtcacggtttgcccctattgcgcatcaggttgcaaaatcaacctggtcgtcgataacggcaaaatcgtccgggcggaggcagcgcaggggaaaaccaaccagggtaccctgtgtctgaagggttattatggctgggacttcattaacgatacccagatcctgaccccgcgcctgaaaacccccatgatccgtcgccagcgtggcggcaaactcgaacctgtttcctgggatgaggcactgaattacgttgccgagcgcctgagcgccatcaaagagaagtacggtccggatgccatccagacgaccggctcctcgcgtggtacgggtaacgaaaccaactatgtaatgcaaaaatttgcgcgcgccgttattggtaccaataacgttgactgctgcgctcgtgtctgacacggcccatcggttgcaggtctgcaccaatcggtcggtaatggcgcaatgagcaatgctattaacgaaattgataataccgatttagtgttcgttttcgggtacaacccggcggattcccacccaatcgtggcgaatcacgtaattaacgctaaacgtaacggggcgaaaattatcgtctgcgatccgcgcaaaattgaaaccgcgcgcattgctgacatgcacattgcactgaaaaacggctcgaacatcgcgctgttgaatgcgatgggccatgtcattattgaagaaaatctgtacgacaaagcgttcgtcgcttcacgtacagaaggctttgaagagtatcgtaaaatcgttgaaggctacacgccggagtcggttgaagatatcaccggcgtcagcgccagtgagattcgtcaggcggcacggatgtatgcccaggcgaaaagcgccgccatcctgtggggcatgggtgtaacccagttctaccagggcgtggaaaccgtgcgttctctgaccagcctcgcgatgctgaccggtaacctcggtaagccgcatgcgggtgttaacccggttcgtggtcagaacaacgttcagggtgcctgcgatatgggcgcgctgccggatacgtatccgggataccagtacgtgaaagatccggctaaccgcgagaaattcgccaaagcctggggcgtggaaagcctgccagcgcataccggctatcgcatcagcgagctgccgcaccgcgcagcgcatggcgaagtgcgtgccgcgtacattatgggcgaagatccgctacaaactgacgcggagctgtcggcagtacgtaaagcctttgaagatctggaactggttatcgttcaggacatctttatgaccaaaaccgcgtcggcggcggatgttattttaccgtcaacgtcgtggggcgagcatgaaggcgtgtttactgcggctgaccgtggcttccagcgtttcttcaaggcggttgaaccgaaatgggatctgaaaacggactggcaaatcatcagtgaaatcgccacccgtatgggttatccgatgcactacaacaacacccaggagatctgggatgagttgcgtcatctgtgcccggatttctacggtgcgacttacgagaaaatgggcgaactgggcttcattcagtggccttgccgcgatacttcagatgccgatcaggggacttcttatctgtttaaagagaagtttgataccccgaacggtctggcgcagttcttcacctgcgactgggtagcgccaatcgacaaactcaccgacgagtacccgatggtactgtcaacggtgcgtgaagttggtcactactcttgccgttcgatgaccggtaactgtgcggcactggcggcgctggctgatgaacctggctacgcacaaatcaataccgaagacgccaaacgtctgggtattgaagatgaggcattggtttgggtgcactcgcgtaaaggcaaaattatcacccgtgcgcaggtcagcgatcgtccgaacaaaggggcgatttacatgacctaccagtggtggattggtgcctgtaacgagctggttaccgaaaacttaagcccgattacgaaaacgccggagtacaaatactgcgccgttcgcgtcgagccgatcgccgatcagcgcgccgccgagcagtacgtgattgacgagtacaacaagttgaaaactcgcctgcgcgaagcggcactggcgtaa

SEQ ID NO: 6354 - DNA, 450 bp, Escherichia coli
  CDS (1)...(450)
atgaaaaagattgcatttggctgtgatcatgtcggtttcattttaaaacatgaaatagtggcacatttagttgagcgtggcgttgaagtgattgataaaggaacctggtcgtcagagcgtactgattatccacattacgccagtcaagtcgcactggctgttgctggcggagaggttgatggcgggattttgatttgtggtactggcgtcggtatttcgatagcggcgaacaagtttgccggaattcgcgcggtcgtctgtagcgaaccttattccgcgcaactttcgcggcagcataacgacaccaacgtgctggcttttggttcacgagtggttggcctcgaactggcaaaaatgattgtggatgcgtggctgggcgcacagtacgaaggcggtcgtcatcaacaacgcgtggaggcgattacggcaatagagcagcggagaaattga

SEQ ID NO: 6355 - DNA, 1137 bp, Escherichia coli
  CDS (1)...(1137)
atgattatcaataacgttaagctggtgctggaaaacgaggtggtaagcggttcgctggaggtgcagaacggcgaaatccgcgcctttgccgaaagccagagccgcctgccggaggcgatggacggcgaaggcggctggctgctgccggggctgattgagctgcataccgataatctggataaattcttcaccccgcgcccgaaagttgactggcctgcccactcggcgatgagcagccacgacgcgctgatggtggcgagcggcatcaccaccgtactggatgccgtggcaattggcgacgtgcgcgacggcggcgatcggctggagaatctggagaagatgatcaacgccatcgaagagacgcagaaacgcggcgtcaaccgcgccgagcaccgtctgcatctgcgctgcgaactgccgcatcacaccacgctgccgctgtttgaaaaactggtgcagcgcgagccggtgacgctggtgtcgctgatggaccactcgccgggccagcgccagttcgccaaccgcgagaagtatcgcgaatattatcagggcaaatactccctcactgatgcgcagatgcagcagtacgaagaagagcaactggcgctcgccgcacgctggtcgcagccgaatcgcgaatccatcgccgccctgtgccgcgcgcgaaaaattgcgcttgccagccacgatgacgccacccacgcccacgttgctgaatctcaccagcttggcagcgtgatcgccgaatttcccaccacgttcgaagcggcggaagcctcgcgcaagcatggcatgaacgtgctgatgggcgcgccgaatattgtgcgcggcggctcgcactccggcaacgtggcggccagtgaactggcgcagcttggcctgctggatatcctctcttccgactactaccccgccagcctgctcgatgcggcatttcgcgtcgccgatgaccagagcaaccgctttacgctgccgcaggcggtgaagctggtgactaaaaatccagcgcaggcgcttaatctccaggatcgcggggtgattggcgagggcaaacgcgccgacctggtgctggcgcatcgcaaggacaatcatattcatatcgaccacgtctggcgtcagggtaaaagggtgttctga

SEQ ID NO: 6356 - DNA, 1518 bp, Escherichia coli
  CDS (1)...(1518)
atgtctgaacaagaaacacggggagccaatgaggctattgattttaacgatgaactgagaaatcgccgcgaaaaactggcggcactacgtcagcaaggtgtggcgtttcccaatgattttcgccgcgaccatacctctgaccagttgcacgaagagtttgatgcgaaggataaccaggaactggaatccttaaacattgaagtctcggttgctggccgaatgatgacccgtcgtatcatggggaaagcctcctttgtaacgttgcaggatgtcggtggccgtattcaactgtacgttgcaagagatagcctgccagaaggtgtttataacgatcagtttaaaaaatgggatctgggtgacattatcggtgcccgcggtacgctgtttaagacgcaaacgggtgagctttccattcactgtactgagctgcgcctgctgactaaagcactacgtcctttaccagataaattccatggtctgcaggatcaggaagtccgttatcgtcaacgttatctggacctcatcgctaacgataaatcccgtcaaacgtttgttgtccgttcaaaaattctggccgctatccgtcaattcatggtcgcgcgcggctttatggaagtagaaaccccgatgatgcaggtaattccaggtggggcatctgctcgcccgtttattacccatcataatgctctggatttagatatgtatctgcgtatcgcgccggagctgtatctgaaacgtctggttgtaggcggttttgaacgggtattcgaaatcaaccgtaacttccgtaatgaaggtatttctgttcgccataatcctgagttcacaatgatggaactctacatggcgtatgcggattaccacgatttgattgaactgacagagtcactgttccgcaccctggcacaagaggttctgggtaccactaaagtcacttatggcgagcatgtgtttgatttcggcaaaccgtttgaaaaactcaccatgcgcgaagcaatcaaaaaatatcgtccagaaaccgatatggccgacctggataattttgatgctgctaaagcattagctgaatctatcggtattacggtagagaaaagctgggggttgggacgtattgtcacagagatctttgatgaagtggcagaagcacatctgattcagccaacctttattacggaatatccggcagaagtgtccccgctggcacgccgtaatgatgttaacccggaaatcaccgaccgttttgaattcttcatcggtggtcgtgaaatcggtaatggttttagcgaattaaacgacgcagaagatcaggctgaacgtttccaggaacaggttaatgctaaagctgcaggtgacgacgaagccatgttctatgacgaagattacgtgactgcgctggaatatggtctgccgccaaccgctggtctgggtattggtatcgaccgaatgattatgctgtttactaacagccatactattcgcgacgttattctcttcccggcgatgcgcccacagaaataa

SEQ ID NO: 6357 - DNA, 294 bp, Escherichia coli
  CDS (1)...(294)
atgaatattcgtccattgcatgatcgcgtgatcgtcaagcgtaaagaagttgaaactaaatctgctggcggcatcgttctgaccggctctgcagcggctaaatccacccgcggcgaagtgctggctgtcggcaatggccgtatccttgaaaatggcgaagtgaagccgctggatgtgaaagttggcgacatcgttattttcaacgatggctacggtgtgaaatctgagaagatcgacaatgaagaagtgttgatcatgtccgaaagcgacattctggcaattgttgaagcgtaa

SEQ ID NO: 6358 - DNA, 1260 bp, Escherichia coli
  CDS (1)...(1260)
atggcgtggaatcagcccggtaataacggacaagaccgcgacccgtggggaagcagcaaacctggcggcaactctgagggaaatggaaacaaaggcggtcgcgatcaagggccacctgatttagatgatatcttccgcaaactgagcaaaaagctcggtggtctgggcggcggtaaaggcaccggatctggcggtggcagttcatcgcaaggcccgcgcccgcagcttggcggtcgtgtcgttaccatcgcagcggcagcgattgtcattatctgggcggccagtggtttctataccattaaagaagccgaacgcggcgtggtaacacgctttggtaaattcagccatctggttgagccgggtctgaactggaaaccgacgtttatcgacgaagtcaaaccggtgaacgtggaagccgtgcgtgaactggccgcttctggtgtgatgctgacgtcggacgagaacgtagtgcgcgttgagatgaacgtgcagtaccgcgtcaccaatccggaaaaatatctgtatagcgtgaccagcccggatgacagcctgcgtcaggctaccgacagcgccctgcgtggagttatcggtaaatacaccatggaccgcattctgacggaaggtcgtaccgtgattcgtagcgatactcagcgcgaactggaagagacgattcgtccgtatgacatgggtatcacgctgctggacgtcaacttccaggctgctcgtccgccggaagaagtaaaagcggcgtttgacgatgcgattgccgcgcgtgaaaacgaacagcaatacattcgtgaagcagaagcgtataccaacgaagttcagccgcgtgcgaacggtcaggcgcaacgtatcctcgaagaggcgcgtgcgtacaaggcccagaccatcctggaagctcagggtgaagtggcgcgctttgctaaacttctgccggaatataaagccgcgccggaaattactcgcgagcgtctgtatatcgagacgatggaaaaagtgttgggtaacacccgcaaagtgctggttaacgataaaggtggcaacctgatggttctgccgttagaccagatgctgaaaggtggtaacgcccctgcggcgaagagcgataacggtgccagcaatctgctgcgtctgccgccagcctcttcctccacaaccagtggagcaagcaacacgtcgtccaccagtcagggcgatattatggaccaacgccgcgccaacgcgcagcgtaacgactaccagcgtcagggggaataa

SEQ ID NO: 6359 - DNA, 1299 bp, Escherichia coli
  CDS (1)...(1299)
atgggtaacaacgtcgtcgtactgggcacccaatggggtgacgaaggtaaaggtaagatcgtcgatcttctgactgaacgggctaaatatgttgtacgctaccagggcggtcacaacgcaggccatactctcgtaatcaacggtgaaaaaaccgttctccatcttattccatcaggtattctccgcgagaatgtaaccagcatcatcggtaacggtgttgtgctgtctccggccgcgctgatgaaagagatgaaagaactggaagaccgtggcatccccgttcgtgagcgtctgctgctgtctgaagcatgtccgctgatccttgattatcacgttgcgctggataacgcgcgtgagaaagcgcgtggcgcgaaagcgatcggcaccaccggtcgtggtatcgggcctgcttatgaagataaagtagcacgtcgcggtctgcgtgttggcgaccttttcgacaaagaaaccttcgctgaaaaactgaaagaagtgatggaatatcacaacttccagttggttaactactacaaagctgaagcggttgattaccagaaagttctggatgatacgatggctgttgccgacatcctgacttctatggtggttgacgtttctgacctgctcgaccaggcgcgtcagcgtggcgatttcgtcatgtttgaaggtgcgcagggtacgctgctggatatcgaccacggtacttatccgtacgtaacttcttccaacaccactgctggtggcgtggcgaccggttccggcctgggcccgcgttatgttgattacgttctgggtatcctcaaagcttactccactcgtgtaggtgcaggtccgttcccgaccgaactgtttgatgaaactggcgagttcctctgcaagcagggtaacgaattcggcgcaactacggggcgtcgtcgtcgtaccggctggctggacaccgttgccgttcgtcgtgcggtacagctgaactccctgtctggcttctgcctgactaaactggacgttctggatggcctgaaagaggttaaactctgcgtggcttaccgtatgccggatggtcgcgaagtgactaccactccgctggcagctgacgactggaaaggtgtagagccgatttacgaaaccatgccgggctggtctgaatccaccttcggcgtgaaagatcgtagcggcctgccgcaggcggcgctgaactatatcaagcgtattgaagagctgactggtgtgccgatcgatatcatctctaccggtccggatcgtactgaaaccatgattctgcgcgacccgttcgacgcgtaa

SEQ ID NO: 6360 - DNA, 1455 bp, Escherichia coli
  CDS (1)...(1455)
gtgcacaacattccgggtgtgtggaatacccggttacctcttcttcaggagatcgttatggagatcctctacaacatctttaccgtgttttttaaccaggtcatgaccaatgccccgttgttgctgggtattgtgacctgtctgggctacatcctactgcgcaaaagtgtcagcgttattattaaaggcacgattaaaaccataattggtttcatgttgttgcaggcagggtccggcatcctcaccagcaccttcaaaccggtggtggcgaaaatgtccgaagtctacggcattaacggcgcaatttccgatacctacgcttcaatgatggcaaccatcgaccgcatgggcgatgcctatagctgggtgggttacgccgtattgttagcgctggcgctgaacatctgttacgtgctgttgcgtcgcattaccggcattcgcacaatcatgttgaccggccacatcatgttccagcaggccgggttgattgccgttacgctgtttatcttcggctactccatgtggaccaccattatctgtaccgcgattctggtttcgctctactggggcatcacttccaacatgatgtacaagccgactcaggaagtgacggatggctgtggtttctccatcggtcaccagcagcagtttgcatcatggattgcctataaagtcgcgccgttcctcggcaaaaaagaggagagcgttgaagacctcaaattgccgggctggctgaacattttccacgacaacatcgtctccacggcgattgtgatgaccatcttctttggtgccattctgctctccttcggtatcgacaccgtgcaggcgatggcaggcaaagtgcactggacggtgtacatcctgcaaactggtttctcctttgcggtggcgatcttcatcatcacgcagggtgtgcgcatgtttgtggcggaactctctgaagcatttaacggcatttcccagcgcctgatcccaggtgcggttctggcgattgactgtgcagctatctatagcttcgcgccgaacgccgtggtctggggctttatgtggggcaccatcggtcagctgattgcggttggcatcctggtcgcctgcggctcctcgatcctgattattcctggctttatcccgatgttcttctctaacgccaccatcggcgtgttcgctaaccacttcggcggctggcgtgcggcgctgaagatttgtctggtgatggggatgatcgaaatctttggttgcgtctgggcggtgaaactcaccggtatgagtgcctggatgggcatggcggactggtcgattctggcaccgccgatgatgcaaggcttcttctccatcggtatcgcctttatggccgtcatcattgtaattgcactggcttatatgttcttcgctggccgcgcgctgcgcgcagaagaagatgcagaaaaacaactggcagaacagtctgcttaa

SEQ ID NO: 6361 - DNA, 396 bp, Escherichia coli
  CDS (1)...(396)
atgcgtcattacgaaatcgtttttatggtccatcctgaccagagcgaacaggttccgggcatgatcgagcgctacactgctgccatcactggtgcagaaggcaagatccaccgtctggaagactggggccgccgtcagctggcttacccgatcaacaaactgcacaaagcacactacgttctgatgaatgttgaagctccgcaggaagtgatcgatgagctggaaactaccttccgcttcaacgatgccgttatccgcagcatggttatgcgtaccaagcacgctgttaccgaagcatctccgatggttaaagcgaaagacgagcgccgtgagcgtcgcgatgatttcgcaaacgaaaccgctgatgatgctgaagctggggattctgaagagtaa

SEQ ID NO: 6362 - DNA, 228 bp, Escherichia coli
  CDS (1)...(228)
atggcacgttatttccgtcgtcgcaagttctgccgtttcaccgcggaaggcgttcaagagatcgactataaagatatcgctacgctgaaaaactacatcaccgaaagcggtaagattgtcccaagccgtatcaccggtacccgtgcaaaataccagcgtcagctggctcgcgctatcaaacgcgctcgctacctgtccctgctgccgtacactgatcgccatcagtaa

SEQ ID NO: 6363 - DNA, 450 bp, Escherichia coli
  CDS (1)...(450)
atgcaagttattctgcttgataaagtagcaaacctgggtagcctgggtgatcaggtaaacgttaaagcgggctatgctcgtaacttcctggtaccgcagggtaaagctgttccagctaccaagaaaaacattgaattcttcgaagctcgtcgcgctgaactggaagctaaactggctgaagttctggcagctgctaatgctcgcgctgagaaaatcaatgcactggaaactgttaccatcgcgtctaaagctggcgacgaaggtaaactgttcggttccatcggtactcgcgacatcgctgacgctgtaactgcagctggcgttgaagtggctaagagcgaagttcgtctgccgaacggcgttctgcgtaccactggcgaacacgaagtgagcttccaggttcacagcgaagtattcgcgaaagtgatcgtaaacgtagtagctgaataa

SEQ ID NO: 6364 - DNA, 663 bp, Escherichia coli
  CDS (1)...(663)
atggcttatcgcgaccaacctttaggtgaactggcgctctctattcctcgcgcttcagctctgtttcgtaaatatgatatggattactgctgtggcggtaagcagacgctggcgcgcgcggcggcacgtaaagaactggatgttgaggtcattgaagctgaactggcaaagctcgctgaacaaccgattgagaaagactggcgtagcgccccgctggcagaaatcatcgaccatatcatcgtgcgctaccacgatcgtcaccgcgagcaactgccggagctgattctgcaagcgactaaagtcgagcgcgttcacgccgacaaaccgagcgtgccaaaagggctgacaaaatacctgaccatgctgcatgaagagctttccagccacatgatgaaagaagagcagatcctcttcccgatgatcaaacaaggcatgggcagccaggcaatggggccaatcagcgtaatggaaagcgagcacgatgaagcgggcgaactgctggaagtgattaaacacaccaccaataacgtcacaccgccgccagaagcctgcaccacctggaaagcgatgtataacggcattaatgaactgattgatgacctgatggatcacatcagtctggaaaacaatgtactgttcccacgcgcgctggcgggtgagtga

SEQ ID NO: 6365 - DNA, 1026 bp, Escherichia coli
  CDS (1)...(1026)
gtgatgcctcaatctcttccggacaccactacgccaaaaaggcgctttcgctggccgacggggatgccgcagctggtagcactattgctggtgctgctggtcgatagcctggtagccccgcatttctggcaggtggtgcttcaggatgggcgtttgttcggtagccccatagacattcttaaccgtgcagctcccgttgcgttactggcgattggcatgacgctggtgatcgccaccggtgggattgatctctccgtaggggcggtgatggctatcgccggagccacaacggctgcgatgacggtcgcgggattcagcctgccgattgttttgttaagcgccctgggcaccggcatcctggcgggattgtggaacggcatactggtagcgatcctcaaaattcagccgtttgtcgccactctgatcctgatggtcgccgggcgcggcgtggcgcaactgatcaccgccgggcagatcgtcacgtttaactcgccggatctctcatggttcggcagtggatcgctgttgttcctgccaacgccggtcattatcgcggtgctgacgcttatcctgttctggctgttgacccgcaaaacggcgctggggatgtttatcgaagccgttggtatcaacattcgggcggcaaaaaatgccggggtaaacacgcgaatcatcgtcatgctcacttatgtgttgagcgggctgtgtgcggcgattgcgggcattatcgtggcggcggatattcgcggtgccgatgccaacaacgctgggttatggctggagctggacgccattctcgcggtggtgattggcggcggatcgctgatgggcgggcgctttaacctgctactttcggtggtgggggcgctgattattcaggggatgaacaccggaattttgctttcgggctttccgccagagatgaaccaggtggtgaaagcggtggtggtgctttgcgtgctgattgttcagtcgcaacgctttatcagtctgattaaaggagtacgtagccgtgataaaacgtaa

SEQ ID NO: 6366 - DNA, 552 bp, Escherichia coli
  CDS (1)...(552)
atgactaagcagcccgaagactggctcgacgacgttcccggtgatgacatcgaagacgaagacgatgaaattatctgggtcagtaaaagtgaaattaaacgtgatgccgaggagctaaaacgccttggcgcggaaattgttgatctggggaaaaacgcgctggataagatcccgttagatgcggatctgcgcgcggctattgagctcgcccagcgtattaagatggaaggtcgccgccgccagttgcagctcatcggtaagatgctgcgccagcgcgacgtagagcctattcgtcaggcgctggataagctgaaaaaccgtcacaaccagcaggtggtgctgttccataaactggaaaacctgcgcgatcgtctgatcgatcaaggtgatgacgccatcgctgaggtattaaatctgtggcccgatgccgatcgtcagcaactgcgtactctgatccgcaacgcgaagaaagagaaagaagggaataagccgccgaaatccgcacgccagattttccagtatctgcgcgagttagcggagaacgaagggtaa

SEQ ID NO: 6367 - DNA, 1656 bp, Escherichia coli
  CDS (1)...(1656)
atgactcatcttccccactggtggcaaaacggcgttatctaccagatttatccaaagagttttcaggacaccacgggtagcggtaccggcgatttacgtggcgttatccaacacctggactatctgcataaactgggcgttgatgccatctggctaacccccttttatgtctctccccaggtcgataacggttacgacgtagcgaactatacggcgattgatcccacctacggcacgctggacgattttgacgaactggtgacgcaggcaaaatcgcgcgggattcgtatcattctcgatatggtgtttaaccatacctctacccaacatgcctggtttcgcgaggcgctgaacaaagaaagcccttaccgccagttttatatctggcgcgatggagaaccagaaacgccaccgaacaactggcgttcaaaatttggcggtagtgcgtggcgctggcatgcggaaagcgaacagtactatttgcatctctttgcaccagaacaggcggatctcaactgggagaatccagcggtacgcgcagagctgaaaaaagtctgtgagttctgggccgatcgtggggtcgacgggttgcgcctggatgtggtgaatctgatctccaaagacccgcgtttccctgaagacctggacggcgacgggcgtcgcttctacaccgacgggccacgagcacacgagtttttgcacgagatgaaccgcgatgtgtttacgccacgcgggttaatgaccgtaggtgaaatgtcctccaccagccttgagcattgccagcgatacgcggctctgacaggcagtgaattgtcgatgacctttaattttcatcacctgaaggtcgattatcccggtggtgaaaaatggacgctggctaaacctgactttgtggcgttgaaaacattgttccgccactggcaacaaggaatgcacaacgtagcatggaatgccttgttctggtgtaaccacgatcagccgcgcattgtttctcgctttggtgatgaaggtgaataccgcgtgcctgcggcaaaaatgctggcgatggtgctgcatggcatgcagggaacgccgtatatctaccagggcgaagagattggcatgaccaacccgcatttcacgcgcattactgactatcgcgacgtagagagcctcaatatgtttgccgagctgcgcaacgatgggcgtgatgccgacgagttattggcaatcctcgccagtaaatcccgtgacaacagtcgcacgcccatgcaatggagcaacggcgataatgccgggtttacggctggcgaaccgtggattggcctgggcgataactatcaacaaatcaacgtagaagccgcgctggccgatgattcctcggtgttttacacctaccaaaagttaatcgcactgcgtaagcaggaagccatcctgacatggggcaattaccaggatctgctgccaaacagccctgtattgtggtgctatcgccgtgaatggaaggggcaaaccttgctggtcattgccaaccttagccgtgagatccaaccctggcaggcagggcaaatgcgcggcaactggcagcttgtgatgcataactacgaagaagcctcaccacaaccctgtgccatgaatttacggccttttgaggctgtctggtggttacagaagtaa

SEQ ID NO: 6368 - DNA, 2856 bp, Escherichia coli
  CDS (1)...(2856)
atggaaaagacatataacccacaagatatcgaacagccgctttacgagcactgggaaaagcagggctactttaagcctaatggcgatgaaagccaggaaagtttctgcatcatgatcccgccgccgaacgtcaccggcagtttgcatatgggtcacgccttccagcaaaccatcatggataccatgatccgctatcagcgcatgcagggcaaaaacaccctgtggcaggtcggtactgaccacgccgggatcgctacccagatggtcgttgagcgcaagattgccgcagaagaaggtaaaacccgtcacgactacggccgcgaagctttcatcgacaaaatctgggaatggaaagcggaatctggcggcaccattacccgtcagatgcgccgtctcggcaactccgtcgactgggagcgtgaacgcttcaccatggacgaaggcctgtccaatgcggtgaaagaagttttcgttcgtctgtataaagaagacctgatttaccgtggcaaacgcctggtaaactgggatccgaaactgcgcaccgctatctctgacctggaagtcgaaaaccgcgaatcgaaaggttcgatgtggcacatccgctatccgctggctgacggtgcgaaaaccgcagacggtaaagattatctggtggtcgcgactacccgtccagaaaccctgctgggcgatactggcgtagccgttaacccggaagatccgcgttacaaagatctgattggcaaatatgtcattctgccgctggttaaccgtcgtattccgatcgttggcgacgaacacgccgacatggaaaaaggcaccggctgcgtgaaaatcactccggcgcacgactttaacgactatgaagtgggtaaacgtcacgccctgccgatgatcaacatcctgacctttgacggcgatatccgtgaaagcgcccaggtgttcgataccaaaggtaacgaatctgacgtttattccagcgaaatccctgcagagttccagaaactggagcgttttgctgcacgtaaagcagtcgttgccgcagttgacgcgcttggcctgctggaagaaattaaaccgcacgacctgaccgttccttacggcgaccgtggcggcgtagttatcgaaccaatgctgaccgaccagtggtacgtgcgtgccgatgtcctggcgaaaccggcggttgaagcggttgagaacggcgacattcagttcgtaccgaagcagtacgaaaacatgtacttctcctggatgcgcgatattcaggactggtgtatctctcgtcagttgtggtggggtcaccgtatcccggcatggtatgacgaagcgggtaacgtttatgttggccgcaacgaagacgaagtgcgtaaagaaaataacctcggtgctgatgttgtcctgcgtcaggacgaagacgttctcgatacctggttctcttctgcgctgtggaccttctctacccttggctggccggaaaataccgacgccctgcgtcagttccacccaaccagcgtgatggtatctggtttcgacatcattttcttctggattgcccgcatgatcatgatgaccatgcacttcatcaaagatgaaaatggcaaaccgcaggtgccgttccacaccgtttacatgaccggcctgattcgtgatgacgaaggccagaagatgtccaaatccaagggtaacgttatcgacccactggatatggttgacggtatttcgctgccagaactgctggaaaaacgtaccggcaatatgatgcagccgcagctggcggacaaaatccgtaagcgcaccgagaagcagttcccgaacggtattgagccgcacggtactgacgcgctgcgcttcaccctggcggcgctggcgtctaccggtcgtgacatcaactgggatatgaagcgtctggaaggttaccgtaacttctgtaacaagctgtggaacgccagccgctttgtgctgatgaacacagaaggtcaggattgcggcttcaacggcggcgaaatgacgctgtcgctggcggaccgctggattctggcggagttcaaccagaccatcaaagcgtaccgcgaagcgctggacagcttccgcttcgatatcgccgcaggcattctgtatgagttcacctggaaccagttctgtgactggtatctcgagctgaccaagccggtaatgaacggtggcaccgaagcagaactgcgcggtactcgccatacgctggtgactgtactggaaggtctgctgcgcctcgcgcatccgatcattccgttcatcaccgaaaccatctggcagcgtgtgaaagtactttgcggtatcactgccgacaccatcatgctgcagccgttcccgcagtacgatgcatctcaggttgatgaagccgcactggccgacaccgaatggctgaaacaggcgatcgttgcggtacgtaacatccgtgcagaaatgaacatcgcgccgggcaaaccgctggagctgctgctgcgtggttgcagcgcggatgcagaacgtcgcgtaaatgaaaaccgtggcttcctgcaaaccctggcgcgtctggaaagtatcaccgtgctgcctgccgatgacaaaggtccggtttccgttacgaagatcatcgacggtgcagagctgctgatcccgatggctggcctcatcaacaaagaagatgagctggcgcgtctggcgaaagaagtggcgaagattgaaggtgaaatcagccgtatcgagaacaaactggcgaacgaaggctttgtcgcccgcgcaccggaagcggtcatcgcgaaagagcgtgagaagctggaaggctatgcggaagcgaaagcgaaactgattgaacagcaggctgttatcgccgcgctgtaa

SEQ ID NO: 6369 - DNA, 1512 bp, Escherichia coli
  CDS (1)...(1512)
atggagtttagtgtaaaaagcggtagcccggagaaacagcggagtgcctgcatcgtcgtgggcgtcttcgaaccacgtcgcctttctccgattgcagaacagctcgataaaatcagcgatgggtacatcagcgccctgctacgtcggggcgaactggaaggaaaaccggggcagacattgttgctgcaccatgttccgaatgtactttccgagcgaattctccttattggttgcggcaaagaacgtgagctggatgagcgtcagtacaagcaggttattcagaaaaccattaatacgctgaatgatactggctcaatggaagcggtctgctttctgactgagctgcacgttaaaggccgtaacaactactggaaagtgcgtcaggctgtcgagacggcaaaagagacgctctacagtttcgatcagctgaaaacgaacaagagcgaaccgcgtcgtccgctgcgtaagatggtgttcaacgtgccgacccgccgtgaactgaccagcggtgagcgcgcgatccagcacggtctggcgattgccgccgggattaaagcagcaaaagatctcggcaatatgccgccgaatatctgtaacgccgcttacctcgcttcacaagcgcgccagctggctgacagctacagcaagaatgtcatcacccgcgttatcggcgaacagcagatgaaagagctggggatgcattcctatctggcggtcggtcagggttcgcaaaacgaatcgctgatgtcggtgattgagtacaaaggcaacgcgtcggaagatgcacgcccaatcgtgctggtgggtaaaggtttaaccttcgactccggcggtatctcgatcaagccttcagaaggcatggatgagatgaagtacgatatgtgcggtgcggcagcggtttacggcgtgatgcggatggtcgcggagctacaactgccgattaacgttatcggcgtgttggcaggctgcgaaaacatgcctggcggacgagcctatcgtccgggcgatgtgttaaccaccatgtccggtcaaaccgttgaagtgctgaacaccgacgctgaaggccgcctggtactgtgcgacgtgttaacttacgttgagcgttttgagccggaagcggtgattgacgtggcgacgctgaccggtgcctgcgtgatcgcgctgggtcatcatattactggtctgatggcgaaccataatccgctggcccatgaactgattgccgcgtctgaacaatccggtgaccgcgcatggcgcttaccgctgggtgacgagtatcaggaacaactggagtccaattttgccgatatggcgaacattggcggtcgtcctggtggggcgattaccgcaggttgcttcctgtcacgctttacccgtaagtacaactgggcgcacctggatatcgccggtaccgcctggcgttctggtaaagcaaaaggcgccaccggtcgtccggtagcgttgctggcacagttcctgttaaaccgcgctgggtttaacggcgaagagtaa

SEQ ID NO: 6370 - DNA, 1278 bp, Escherichia coli
  CDS (1)...(1278)
ttgttgaggctccctaatatttactttaagggctatattagaataacacaggaaacaaatatggcaacagcatggtataaacaagttaatccaccacaacggaaagctcttttttccgcatggcttggatatgtatttgatggctttgattttatgatgatattttacattcttcatattataaaagcagatcttggcattacggatattcaggctactttaatagggacagtggccttcatagccagacctattggaggtggtttttttggtgccatggctgataaatatggtcgtaagccaatgatgatgtgggcaattttcatttactcagtcggaacaggccttagcggtattgctacaaacttatatatgctcgcagtttgccgttttattgttggcttagggatgtctggtgaatatgcatgtgcttcaacttatgcggtagaaagttggcctaaaaatcttcaatctaaagctagtgcttttttggtaagtggtttttctgttggaaatattattgcggcacaaataatccctcagtttgctgaagtatatggatggagaaactctttttttataggcctgttaccagttttactagttctttggatcagaaaaagtgctccagaaagtcaggagtggattgaagataaatataaggataaatcaacatttttgtctgtcttcagaaaaccacatctttcaatctctatgatcgttttcctcgtctgtttttgtctatttggtgcaaactggccgataaacggactacttccttcctacctggcagataatggagttaatacagtggtcatttcaactctgatgacaatagcaggtttaggaacactgacaggtacaatattttttggttttgttggtgataagattggtgtaaaaaaagcctttgtagtcggtctaataacttcatttattttcctttgtcctcttttttttatttctgtgaaaaactcttctcttataggattatgtctctttggattaatgtttacaaatttaggtattgcagggttggttccaaaatttatatatgattactttccaacaaaattaagaggattagggaccggtcttatttataacttaggggcaactggaggaatggccgcacctgtattagctacatacatttcaggatattatggcttaggtgtttcattattcattgttacggttgcattctctgccttattaattttgttagttggttttgatattccaggtaaaatttataaactatccgtggctaaatga

SEQ ID NO: 6371 - DNA, 957 bp, Escherichia coli
  CDS (1)...(957)
atgaaaattgcgctggttattttcatcacccttgccctggcgggctgtgcgctgttatcactccatatgggagtgatccccgtgccgtggcgcgcgctgctgaccgactggcaggccggacacgagcattattatgtattgatggagtaccgactgccgcgcttgctgctggcactgtttgtcggtgcagccctcgccgtggcgggcgtgctgatacaggggattgtgcgcaaccctctggcatcaccggatattctcggtgttaaccatgccgccagcctggcctctgtgggggctctacttcttatgccgtcactgcccgtgatggtgctgccgctgctggcctttgcgggcggcatggcggggttgatattgctgaagatgctggcaaagacccaccagccgatgaagctggcgctcaccggcgtggcgctttctgcatgctgggccagcctgacggattatctgatgctctcgcgcccgcaggatgtgaacaacgccctgctgtggctgaccggcagcttatggggccgtgactggagctttgtgaagattgccatcccgctgatgattttatttctgccgctgagcctgagtttttgccgcgatctcgacctccttgcactcggcgatgcgcgcgccaccacgctcggtgtgtcggtgccccatacccgattctgggctttgttactagctgtcgccatgacatctaccggcgtggccgcctgcggcccgattagctttattggtctcgtggtgccgcatatgatgcgtagcatcaccggtggacgtcaccgcagactgctgcctgtttcggccctgacaggtgcgttgctgttggtggttgccgatctgctggcgagaattattcatcccccactggagctcccggttggcgtgctgaccgccattatcggtgcgccgtggtttgtctggttgcttgtgagaatgcgataa

SEQ ID NO: 6372 - DNA, 909 bp, Escherichia coli
  CDS (1)...(909)
gtgattatgttggcatttatccgttttctttttgcaggcctgctgctggtgatcagccacgcctttgccgccacggttcaggacgaacacggcacgtttacactcgaaaaaacgccacaacggattgtggtgctggaactctcgttcgccgatgcgctggccgccgtggacgtcatcccgatcggtattgccgacgataacgatgcaaaacgcatcctgcccgaagtgcgtgcgcacctgaaaccgtggcagtccgtcggaacgcgcgcgcagccgagcctggaagccattgccgctctgaaaccagacctgatcattgccgacagcagtcgccatgcgggggtttacatcgccttgcagcaaatcgcgccggtactgctgcttaagtcccgcaacgaaacctacgctgaaaatttgcaatctgcggctatcatcggcgaaatggtgggtaaaaagcgagagatgcaggcacgtctggaacaacataaagagaggatggcgcagtgggccagccagcttcccaaagggacacgcgtggcctttggcacatcacgcgaacagcaattcaacctgcatactcaggagacctggaccggcagcgtgctggcctctctggggctgaacgttcccgctgcgatggcgggtgcgtccatgccgtccatcggcctggagcaactgctggcggtcaatcctgcctggctgctggttgcccactatcgcgaagagagcattgttaaacgctggcaacaagatccgctctggcagatgttaaccgccgcgcagaagcagcaggttgcttcggtcgacagtaacacctgggcgcggatgcgcggtatttttgctgcagagcgtattgccgctgacacggtaaaaatcttccaccatcagccgcttaccgttgtgaaatga

SEQ ID NO: 6373 - DNA, 954 bp, Escherichia coli
  CDS (1)...(954)
atgaatcctttgttaaccgattcccgccgtcaggcgctgcgttcagcttcccactggtatgccgtgctaagcggcgagcgcgtcagcccacaacaggaagcgcgctggcaacagtggtatgaacaggatcaggataaccagtgggcctggcagcaggttgaaaacctgcgcaaccagcttggcggtgtgcctggcgacgttgccagccgggcgttgcacgatacccgcctcacccgccgtcacgtgatgaaaggattactgctgttgctcggcgctggcggaggctggcagctctggcagtcggaaaccggcgaaggtctgcgggcagattaccgcaccgccaaaggcacagtcagccgtcagcaactggaagatggctccctgctcacgctgaatacccaaagcgcggcggatgtgcgttttgatgcgcatcagcgcaccgtccggctctggtacggtgaaatcgccattactaccgcgaaagatgccctgcaacgccccttccgtgtcctgacccgtcagggccagctcactgctttagggacagaatttaccgtccgccagcaggataatttcacgcagcttgacgtgcagcagcacgctgtggaagtgcttctcgccagtgcccccgcgcaaaaacgcatcgtgaacgctggtgaaagcctgcagttcagcgcctctgagtttggcgcagtgaaaccgctggatgacgagagtacaagctggacgaaggacatcctgagcttcagcgataaaccgctgggtgaggtgatagccacgctaacccgttaccgcaacggcgtgctgcgctgcgatcccgccgttgccgggctgcgcctgagcgggacgttcccgctgaaaaataccgatgcgatcctgaacgttatcgcgcaaacgcttcccgttaaaattcagtctattacgcggtactggataaacatttcaccactgtaa

SEQ ID NO: 6374 - DNA, 522 bp, Escherichia coli
  CDS (1)...(522)
atgtctgaccgcgccactaccacagcttccttaacgttcgagtcgctttatggcacacatcacggctggttgaaaagctggctgacgcgcaaactccagtctgcttttgatgcagatgacattgcccaggacacttttttgcgggtaatggtcagcgaaacgctctcgacgatccgcgatcctcgctccttcctctgcactatcgccaaacgcgtgatggtggacctgtttcgccgaaacgcgctggaaaaagcgtatctggagatgctggcgcttatgccggaggggggagcgccttcacctgaggaacgcgaaagccaactcgagaccctacaactcctcgacagcatgctggacgggctaaacggcaaaacacgtgaagcgtttctgctttcgcaactggatggtctgacatacagcgagattgcgcacaaactcggtgtttccatcagctccgtgaaaaaatacgtggcgaaagccgtcgagcactgcctgctgttccgtctggagtatgggttatga

SEQ ID NO: 6375 - DNA, 549 bp, Escherichia coli
  CDS (1)...(549)
atgaaaattaaaactctggcaatcgttgttctgtcggctctgtccctcagttctacagcggctctggccgctgccacgacggttaatggtgggaccgttcactttaaaggggaagttgttaacgccgcttgcgcagttgatgcaggctctgttgatcaaaccgttcagttaggacaggttcgtaccgcatcgctggcacaggaaggagcaaccagttctgctgtcggttttaacattcagctgaatgattgcgataccaatgttgcatctaaagccgctgttgcctttttaggtacggcgattgatgcgggtcataccaacgttctggctctgcagagttcagctgcgggtagcgcaacaaacgttggtgtgcagatcctggacagaacgggtgctgcgctgacgctggatggtgcgacatttagttcagaaacaaccctgaataacggaaccaataccattccgttccaggcgcgttattttgcaaccggggccgcaaccccgggtgctgctaatgcggatgcgaccttcaaggttcagtatcaataa

SEQ ID NO: 6376 - DNA, 1590 bp, Escherichia coli
  CDS (1)...(1590)
atgaacaataacgatctggtcgcgaagctgtggaagctgtgcgacaacctgcgcgatggcggcgtttcctatcaaaactacgtcaatgaactcgcctcgctgctgtttttgaaaatgtgtaaagagaccggtcaggaagcggaatacctgccggaaggttaccgctgggatgacctgaaatcccgcatcggccaggagcagttgcagttctaccgaaaaatgctcgtgcatttaggcgaagatgacaaaaagctggtacaggcagtttttcataatgttagtaccaccatcaccgagccgaaacaaataaccgcactggtcagcaatatggattcgctggactggtacaacggcgcgcacggtaagtcgcgcgatgacttcggcgatatgtacgaagggctgttgcagaagaacgcgaatgaaaccaagtctggtgcaggccagtacttcaccccgcgtccgctgattaaaaccattattcatctgctgaaaccgcagccgcgtgaagtggtgcaggacccggcggcaggtacggcgggctttttgattgaagccgaccgctatgttaagtcgcaaaccaatgatctggacgaccttgatggcgacacgcaggatttccagatccaccgcgcgtttatcggcctcgaactggtgcccggcacccgtcgtctggcactgatgaactgcctgctgcacgatattgaaggcaacctcgaccacggcggcgcaatccgtctgggcaacactctgggtagcgacggtgaaaacctgccgaaggcgcatattgtcgccactaacccgccgtttggcagcgccgcaggcaccaacattacccgcacctttgttcacccgaccagcaacaaacagttgtgctttatgcagcatattatcgaaacgctgcatcccggcggtcgtgcggcggtggtggtgccggataacgtgctgtttgaaggcggcaaaggcaccgacattcgtcgtgacctgatggataagtgtcatctgcacaccattctgcgtctgccgaccggtattttttacgctcagggcgtgaagaccaacgtgctgttctttaccaaagggacggtggcgaacccgaatcaggataagaactgtaccgatgatgtgtgggtgtatgacctgcgtaccaatatgccgagtttcggcaagcgcacaccgtttaccgacgagcatttgcagccgtttgagcgcgtgtatggcgaagacccgcacggtttaagcccgcgcactgaaggtgaatggagttttaacgccgaagagacggaagttgccgacagcgaagagaacaaaaacaccgaccagcatcttgctaccagccgctggcgcaagttcagccgtgagtggatccgcaccgcaaaatccgattcgctggatatctcctggctgaaagataaagacagtattgatgccgacagcctgccggagccggatgtattagcggcagaagcgatgggcgaactggtacaggcgctgtctgaactggatgcgctgatgcgtgaactgggggcgagcgatgaggccgatttgcagcgtcagttgctggaagaagcgtttggtggggtgaaggaatga

SEQ ID NO: 6377 - DNA, 1032 bp, Escherichia coli
  CDS (1)...(1032)
atgtctgcatttaccccggcaagtgaagtcttgctgcgtcacagtgatgatttcgaacaaagccgtattctgtttgccggagacttacaggatgacctgcccgcgcgtttagataccgcggccagccgtgctcatacccagcaattccaccactggcaggtattaagccgccagatgggggataacgcccgtttcagtctggtcgccacggcggatgacgtcgcagattgcgatacgctgatttactactggccgaagaacaaaccggaagcccagttccagttgatgaatttactttctctgctgccagtggggacagatatttttgtcgttggcgagaaccgcagcggcgtgcgcagcgccgagcagatgctggcagattatgcgccgttgaataaagtcgacagcgctcgtcgctgtggcctctattttggtcgtctggaaaaacagccggtatttgatgcggagaaattctggggcgaatacagcgtcgatggcctgacggtcaaaacgctgcctggcgtgtttagccgcgacggtctggatgtcggtagccagttgctgctctcgacgttaactccgcacacgaaaggtaaagtgctggatgtcggctgtggcgcgggcgtgctttcagttgcctttgcgcgccattcgccgaaaattcgtctcaccttgtgcgatgtctctgccccggcggtagaagccagccgcgcaacacttgcggccaacggtgttgaaggtgaagtctttgccagcaacgtcttttccgaggtgaaaggtcgttttgatatgatcatctccaacccgccgttccacgatgggatgcaaaccagcctggatgcggcgcaaacgctgattcgcggtgcggtgcgtcatcttaatagcggcggcgagctgcgaattgtagcgaacgccttcctgccttatccggacgtgctggatgagacatttggcttccacgaagtgatcgcgcaaacagggcgcttcaaggtgtatcgcgccattatgacccgccaggcgaagaaaggttaa

SEQ ID NO: 6378 - DNA, 1323 bp, Escherichia coli
  CDS (1)...(1323)
ttgtttctcgcacaagaaattattcgtaaaaaacgtgatggtcatgcgctgagcgatgaagaaattcgtttctttatcaacggtattcgcgacaacactatctccgaagggcagattgccgccctcgcgatgaccattttcttccacgatatgacaatgcctgagcgtgtctcgctgaccatggcgatgcgagattcaggaaccgttctcgactggaaaagcctgcatctgaatggcccgattgttgataaacactccaccggtggcgtcggcgatgtgacttcgctgatgttggggccgatggtcgcagcctgcggcggctatattccgatgatctctggtcgcggcctcggtcatactggcggtacgctcgacaaactggaatccatccctggcttcgacattttcccggatgacaaccgtttccgcgaaattattaaagacgtcggcgtggcgattatcggtcagaccagttcactggctccggctgataaacgtttctacgcgacccgtgatattaccgcaaccgtggactccatcccgctgatcaccgcctctattctggcgaagaaacttgcggaaggtctggacgcgctggtgatggacgtgaaagtgggtagcggcgcgtttatgccgacctacgaactctctgaagcccttgccgaagcgattgttggcgtggctaacggcgctggcgtgcgcaccaccgcgctgctcaccgacatgaatcaggtactggcctccagtgcaggtaacgcggttgaagttcgtgaagcggtgcagttcctgacgggtgaatatcgtaacccgcgtctgtttgatgtcacgatggcgctgtgcgtggagatgctgatctccggcaaactggcgaaagatgacgccgaagcgcgcgcgaaattgcaggcggtgctggacaacggtaaagcggcagaagtctttggtcgtatggtagcggcacaaaaaggcccgaccgacttcgttgagaactacgcgaagtatctgccgacagcgatgctgacgaaagcagtctatgctgataccgaaggttttgtcagtgaaatggatacccgcgcgctggggatggcagtggttgcaatgggcggcggacgccgtcaggcatctgacaccatcgattacagcgtcggctttactgatatggcgcgtctgggcgaccaggtagacggtcagcgtccgctggcggttatccacgcgaaagacgaaaacaactggcaggaagcggcgaaagcggtgaaagcggcaattaaacttgccgataaagcaccggaaagcacaccaactgtctatcgccgtatcagcgaataa

SEQ ID NO: 6379 - DNA, 1383 bp, Escherichia coli
  CDS (1)...(1383)
gtggcaaaagctccaaaacgcgcctttgtttgtaatgaatgcggggccgattatccgcgctggcaggggcagtgcagtgcctgtcatgcctggaacaccatcaccgaggtgcgtcttgctgcgtcgccaatggtggcgcgtaacgagcgtctcagcggctatgccggtagcgccggggtggcaaaagtccagaaactctccgatatcagccttgaagagctgccgcgtttttccaccggatttaaagagttcgaccgcgtactaggcggcggcgtggtgccaggaagtgccattctgattggcggtaaccctggtgcggggaaatccacgctgctactgcaaacgctgtgcaaactggcccagcagatgaaaacgctgtatgtcaccggcgaagagtcgctgcaacaggtggcaatgcgcgctcatcgccttggcctgccgactgacaatctcaatatgttgtcggaaaccagcatcgaacagatctgcctgattgccgaagaagagcaaccgaagctgatggtaattgactcgatccaggtgatgcatatggcggatgtacagtcatcgcctggtagcgtggcgcaggtgcgtgaaacggcggcttatttgacacgcttcgccaaaacgcgcggtgtggcgattgtcatggtggggcacgtaaccaaagatggttcgctggctggcccgaaagtgctggaacactgtatcgactgttcggtgcttttggatggcgatgccgactcccgttttcgcaccttgcgcagccataaaaaccgcttcggcgcggtgaatgagctgggcgtcttcgcgatgaccgaacaggggctgcgtgaagtcagcaacccttcggcaattttcttaagtcgcggcgatgaagtgacctccggtagctcagtgatggtggtatgggaaggaacgcgtccactgctggtggagattcaggcgctggtcgatcactcgatgatggcgaacccacgccgcgtggcagtggggctggaacaaaaccgtctggcaatcctgctggctgtgttgcaccgtcacggtggtctgcaaatggccgatcaggatgtgtttgtgaacgtggtcggcggcgtgaaggtaaccgaaaccagtgccgacttagcgttactgctggcgatggtttccagcctgcgcgacagaccgctgccgcaggatctggtggtgtttggtgaagtcgggctggcaggggagatccgcccggtgcccagcggtcaggaacgaatctctgaagcggcgaaacacggttttcgccgggcgattgttccggcggctaacgtgccgaaaaaagcgccggaagggatgcagatttttggcgttaaaaaactctccgacgcgcttagcgtgttcgacgacttataa

SEQ ID NO: 6380 - DNA, 1668 bp, Escherichia coli
  CDS (1)...(1668)
gtggctcaattcgtttataccatgcatcgtgtcggcaaagttgttccgccgaaacgtcatattttgaaaaacatctctctgagtttcttccctggggcaaaaattggtgtcctgggtctgaatggcgcgggtaagtccaccctgctgcgcattatggcgggcattgataaagacatcgaaggtgaagcgcgtccgcagccagacatcaagattggttatctgccgcaggaaccgcagctgaacccggaacacaccgtgcgtgagtccattgaagaagcggtttcagaagtggttaacgccctgaaacgcctggatgaagtgtatgcgctgtacgccgatccggatgccgattttgacaagctggccgctgaacaaggccgtctggaagagatcattcaggctcacgacggtcataatctgaacgtacagctggagcgtgcggcggatgcgctacgtctgccggactgggacgcgaaaatcgctaacctctccggtggtgaacgtcgtcgcgtagcgttgtgccgcctgctgctggaaaaaccagacatgctgctgctcgacgaaccgaccaaccacctggatgccgaatccgtggcctggctggaacgcttcctgcacgacttcgaaggcaccgttgtggcgattacccacgaccgttacttcctcgataacgttgcaggctggatcctcgaacttgaccgcggtgaaggtattccgtgggaaggtaactactcctcctggctggagcagaaagatcagcgcctggcgcaggaagcttcacaagaagcggcgcgtcgtaagtcgattgagaaagagctggaatgggtacgtcaaggtactaaaggccgtcagtcgaaaggtaaagcacgtctggcgcgctttgaagaactgaacagcaccgaatatcagaaacgtaacgaaaccaacgaactgtttattccacctggaccgcgtctgggcgataaagtgctggaagtcagcaacctgcgtaaatcctatggcgatcgtctgctgattgatgacctgagcttctcgatcccgaaaggagcgatcgtcgggatcatcggtccgaacggtgcgggtaaatcgaccctgttccgtatgatctctggtcaggaacagccggacagcggcaccatcactttgggtgaaacggtgaaactggcgtcggttgatcagttccgtgactcaatggataacagcaaaaccgtttgggaagaagtttccggcgggctggatatcatgaagatcggcaacaccgagatgccaagccgcgcctacgttggccgctttaactttaaaggggttgatcagggtaaacgcgttggtgaactctccggtggtgagcgcggtcgtctgcatctggcgaagctgctgcaggttggcggcaacatgctgctgctcgacgaaccaaccaacgacctggatatcgaaaccctgcgcgcgctggaaaacgccctgctggagttcccgggctgtgcgatggttatctcgcacgaccgttggttcctcgaccgtatcgccacgcacattctggattaccaggatgaaggtaaagttgagttcttcgaaggtaactttaccgagtacgaagagtacaagaaacgcacgctgggcgcagacgcgctggagccgaagcgtatcaagtacaagcgtattgcgaagtaa

SEQ ID NO: 6381 - DNA, 1422 bp, Enterococcus faecalis
  CDS (1)...(1422)
atgacaaaacaacaatttggcgtagtcggcatggctgtcatgggaaaaaatcttgctttaaacattgaaagcagaggctatacagttgcgctgtataaccgtacaggatcaaaaacaacagaagtggttgaagaacatcctgacaaaaactttcaagcaacatactcaattgaggaatttgtgaatgcaattgaaaaacctcgtcgaattatgttgatggttaaagctggacctgcaacagatgcgacaatccaagaattgttaccacaccttgataaaggcgacatcttaattgatggcggtaatacgttcttcaaagacacaatgcgacgtaatgaagaactagcaaactcaggaattaactttattggtactggcgtttctggcggagaagaaggagccttgaaaggaccatctatcatgcctggtggacaaaaagaagcgtatgagttagttgcgccaattcttgaaaaaatttcagctaaagcagaagacggtgaaccatgtgtgacttacattggcccaaatggtgctggacattatgtaaaaatggttcataatgggattgaatatggggacatgcaattaattgctgaatcctacgacttaatgaaacaaatcttaggtttatctgttgatgaaatggcagagattttcaaagaatggaacgaaggcgaattagacagttaccttatcgagatcacggctgacattttgacacgtaaagatgatgaaggaaccgaccaaccaatcgttgatgttattcttgatgcagcaggcaacaaaggaacaggtaaatggacaagccaaagtgcgttagatcttggcgtaccattaccattaattacagaatcagtatttgcacgttttatttcggcttacaaagaagaacgcgtaaaagcaagtggcattttatcaaaacctgcagcctttaactttgcaggcgataaaaaagaattgattgaaaaaattcgcgaagcattatactttagtaaattaatgagttatgcgcaaggttttgcacaactccgtacagcttctgaagaatacggatgggatttaccatttggtgaaattgcaaaaatctggcgagcaggttgtattatccgtgcacaattcttacaaaaaattaccgatgcatatgaaaaaaatccagcacttgaaaacttgttgttagatgaatactttgtagaaattacgaaaaaatatcaacaagccgttcgtgaagttgttgcgattgctgttcaagcaggtgttcctgtaccaacattctcatctgcaattgcttattacgattcttatcgttcagatcgcttaccagcgaatttaattcaagcacaacgtgattacttcggtgctcatacgtacgaacgcacagacaaagaaggaatctaccattacagctggtacaacgaagaataa

SEQ ID NO: 6382 - DNA, 414 bp, Enterococcus faecalis
  CDS (1)...(414)
atgcctacatttaacctattagtacgtaaacctcgtaaatctaaagtagaaaaatctgattcaccagccttaaacaaaggatataacagttttaagaaaactcaaacaaacgttaactctccgcaaaaacgtggagtttgtacacgtgtgggtacgatgacacctaaaaaaccgaactcagctttacgtaaatatgcccgtgttcgtttgtcaaacttaatcgaagttacagcttatatcccaggtatcggtcacaacttacaagaacacagcgtggtattattacgtggtggacgtgtaaaagacttaccaggggtacgttaccatatcgttcgtggtgcgcttgatactgccggtgttaacgaccgtaaacaaagccgctctaaatacggtacaaaacgtcctaaagcttaa

SEQ ID NO: 6383 - DNA, 471 bp, Enterococcus faecalis
  CDS (1)...(471)
atgcctcgtaaaggtcctgttgcaaaacgtgatgttttaccagatccaatttataactcaaaattagtaactcgcttaatcaaccgtgtaatggttgacggtaaacgcgggattgctgctaacattatctataattcatttgatatcatcaaagaatctacaggtaacgatccattggaagtttttgaacaagcaatgaaaaacgttatgcctgttcttgaagttaaagcacgtcgtgttgggggttctaactaccaagtaccagttgaagttcgtccagaacgtcgtacaactttaggtttacgttgggtagttaactacgcacgtctacgtggtgaacacacaatggaagaacgtctagcgaaagaaatcatggatgctgctaacaacactggcgcttctgttaaaaaacgcgaagacacacacaaaatggcagacgcaaaccgcgcatttgctcattatcgttggtaa

SEQ ID NO: 6384 - DNA, 2082 bp, Enterococcus faecalis
  CDS (1)...(2082)
atggcaagagaattttcacttgaaaaaactcgtaacattggtatcatggcccacgttgatgctggtaaaacaacaacaactgagcgtatcttgtactacactggtaaaatccataaaatcggcgaaacccatgaaggtgcttcacaaatggactggatggaacaagaacaagaacgtggtatcacgattacatccgctgcgacaactgcacagtggaaaggctaccgtgtaaatatcatcgatactccaggacacgtggacttcacaattgaagtacaacgttctctacgcgtattagatggtgcggtaacagttcttgactctcaatcaggtgtagaacctcaaacagaaactgtttggcgtcaagcgactgaatataaagttcctcgtattgtattctgtaacaaaatggataaaatcggtgcggacttcttctattcagtagaatcattacatgatcgtttacaagcaaacgctcatccaattcaaattccaatcggagctgaagaagacttcactggaatcattgacttgattaaaatgaaagctgaaatctacacaaatgatttgggaacagatattcaagaaactgatattcctgaagattatttagaaaaagcgcaagaatggcgcgaaaaattagttgaagctgttgctgaaactgacgaagacttaatgatgaaatatcttgaaggtgaagaaatcactgaagaagaattagtcgctggtatccgtcaagcaacaatcaacgttgagttcttccctgtattagctggttcagcattcaagaataaaggggttcaattaatgttggacgctgttcttgattacttaccatctccattagatatcgatgctatcaaagggatcgatactaaaacagacgaagaaacaactcgtccagctgatgacgaagcacctttcgcttcattagcatttaaagttatgactgacccattcgtaggtcgtttaactttcttccgtgtttattctggtgttcttgaaagtggttcatacgtattgaacgcttcaaaaggcaaaaaagaacgtatcggtcgtatcctacaaatgcacgccaacactcgtcaagaaattgacaaagtgtactctggtgatatcgctgctgctgttggtctaaaagacacaacaactggtgatacattatgtgcattagatgcaccagttattcttgaatctattgaattccctgatccagttatccaagtcgctgttgaacctaaatcaaaagctgaccaagataaaatgggcgtggctctacaaaaacttgctgaagaagatccatcattccgcgttgaaacaaacgttgaaactggtgaaacagttatctctggtatgggtgaattgcacttagacgttttagtagaccgtatgaaacgtgaattcaaagttgaagctaacgtaggtgctcctcaagtatcttaccgcgaaacattccgtgctgcgactaaagcagaaggtaaattcgttcgtcagtctggtggtaaaggacaatacggtcacgtatgggttgaatttacaccaaatgaagaagttaaaggctttgagtttgaaaacgcaattgtcggtggtgtggttcctcgtgaatacatcccagcagttgaaaaagggttagaagactctatgaacaacggtgttcttgctggttatccattagttgatatcaaagcaaaactttacgatggttcataccacgatgtcgattcaaatgaaacggccttccgtgtagctgcttctatggcattgaaagctgcggctaaaaatgcaaacccagttattttagaaccaatgatgaaagttacaattactgttcctgaagattacttaggtgatatcatgggacacgtaacaagtcgtcgtggacgtgttgaaggtatggaagcacacggtaactctcaaatcgttaatgcgatggtacctttagctgaaatgtttggttatgctacaacattacgttcagcaacacaaggacgcggtacatttatgatggtatttgaccactatgaagacgtacctaagtctgttcaagaagaaatcatcaagaaaaacggcggcaacgcataa

SEQ ID NO: 6385 - DNA, 1188 bp, Enterococcus faecalis
  CDS (1)...(1188)
atggcaaaagaaaaatttgaccgttctaaatcccatgttaacattggtactatcggacacgttgaccatggtaaaactacattaacagctgcaattgctactgtattatcaaaacacggtggcggggaagcacaaagctacgattctatcgataacgctccagaagaaaaagaacgtggaatcacaatcaacacttctcatatcgaatatgaaactgaaactcgtcactatgcacacgttgactgcccaggacacgcggactacgttaaaaacatgatcactggtgctgctcaaatggacggagctatcttagtagtttctgctgctgatggtcctatgcctcaaacacgtgaacatatcttattatcacgtaacgttggtgtaccatacatcgttgtattcttaaacaaaatggatatggttgatgacgaagaattattagaattagtagaaatggaagttcgtgacttattatcagaatacgatttcccaggcgatgatgttccagttatcgcaggttctgctttgaaagctttagaaggcgacgagtcttatgaagaaaaaatcttagaattaatggctgcagttgacgaatatatcccaactccagaacgtgatactgacaaaccattcatgatgccagtcgaagacgtattctcaatcactggacgtggtactgttgctacaggacgtgttgaacgtggtgaagttcgcgttggtgacgaagttgaaatcgttggtattaaagacgaaacatctaaaacaactgttacaggtgttgaaatgttccgtaaattattagactacgctgaagcaggcgacaacatcggtgctttattacgtggtgtagcacgtgaagatatcgaacgtggacaagtattagctaaaccagctacaatcactccacacacaaaattcaaagctgaagtatacgtattatcaaaagaagaaggcggacgtcacactccattcttcactaactaccgtcctcaattctacttccgtacaacagacgttactggtgttgtagaattgccagaaggtactgaaatggtaatgcctggtgataacgttgctatggacgttgaattaattcacccaatcgctatcgaagacggaactcgtttctctattcgtgaaggcggacgtactgtaggttcaggcgttgttactgaaatcgttaaataa

SEQ ID NO: 6386 - DNA, 891 bp, Enterococcus faecalis
  CDS (1)...(891)
atggaagaacaattagtcgattatttacactatttacaaatagagcggggcttatcaaataacacacgacggagttacgaacgagatttaaaaaaatacgtagcctttttacaagaacaaggcctgcattcttgggacgaagttgaccgttacatgattacagaatttttgcaatcccttcacgaagaacagcaagcttcagcaagtgtgattcggatgatttctagtttgagaggatttcatcaatttttacgtcaagaacgcttaagcgaacataatccgatgcaacatattgactcccccaagaaagttcaaaaattgccaagtacattatctgttgacgaagtgactcgattaattgaaacgcctgatacaagtaaaccactaggtatgcggaatcgtgctattttagaagtgatgtatgcaacgggcctgcgagttagtgaactaattgaaataaaattaggggatctgcatttatccattggtttattgcaaacaatcggaaaaggggacaaagaacgaattatccctttaggcgattatgcgattcaatggattgagcgctatatgaacgaagccagacctcaattgattaaaaaccatccgaatgaaacacacctgttcgttaatcatcatggtgaaccgttatctagacagggcatttggaaaaatttaaaacagattgttcgagaagcccagatagagaaaaatattaccccgcatacattacggcatagttttgcgacacatttgttggaaaatggcgcagaccttagaatcgttcaagaattattaggacatgcagatatctccacgacacaaatttatacacatattaccaaacaacgaatggcagatgtttataaggaacattttcctcgggcttaa

SEQ ID NO: 6387 - DNA, 717 bp, Enterococcus faecalis
  CDS (1)...(717)
atggaaagattacaaaaagcaattgctcatgctggggtgacttcgcgtcgcaaagcagaggaattaattgtcaaaggtcgcgtaaaagtcaacggccaagtggtcaaagaattaggaacacaagtaagtaaacaagataccgttgaagttgatggtgtaccaatttatcaagaagaatatggttattatttattctataaaccaagaggggttatttctgcggtgtctgacgataaaggccgtaaagtagtaacggattattttacagatgttactgagcgaatttatccagtcggtcgtctggattatgatacttctgggttgttacttttaacgaatgatggaagtttttcacaaaaattaacccatcctaaacatgaagtagataaagtctacgtagcaaaaattaaaggtgtaccaactaaacgagaactattgccattagccaaaggcattcgcattgatggcaaacgcacagcaccagccaattttcaaattctttcagcggatattaaaacaggtagcagtgtcgtggaattaacgattcatgaaggacgtaatcatcaagtgaagaaaatgtttcaagctgttggtttccctgttcaaaaattaaaacgtgaacgttacggtgaattaaccttacaaggtctgcgaccagggcaatatcgtgatttaactaaaaaagaaatcagtcaattattaaatcaagctaaataa

SEQ ID NO: 6388 - DNA, 408 bp, Enterococcus faecalis
  CDS (1)...(408)
atggcactttctaaattagataacttatatcgccaagtcattttggaccattctagccacccacatcaccacggaacgctagatgcgtctagccaaacaattgaactgaataatcctacttgtggagatgtgattgaactggatgtggccattgaagacggtgtgattaaagatatcgcctttcaaggaagtggctgttccatcagtaccgcaagtgctagtatgatgactgatgcagtcttaggaaaaacaatcgccgaagcaacggccttagcagaggatttctctcaacttgttcaaggaaatgaagtggccgaagatgaaaaattaggcgatgcagcaatgttaagcggcgtagctaaatttccacctgggttaaattgtgaaccttgggttggaaacccttaa

SEQ ID NO: 6389 - DNA, 777 bp, Enterococcus faecalis
  CDS (1)...(777)
atgaaagaaattacatcaacgaaaaataaccaattaaaagaatggaaaaaattatacaaaaagaagtaccgagaagaactgaaccaatatataatagaaggatttcatttagttgaagaagctgtgaaggccaatgccgatgtccagtggattttgtttaaccaaagaggtcaacaagaatggggaacttggttagctgaacaagaaacagaaaaattaatttttgttagtgatgaggttttaaatagcttgtcggagctgccaacttcacaaggaattttggcaattgtcaccttggaaacgcaacaagagcagtcgctttcttttaaaggtggttggttacttttagataatatccaagaccctggtaatgttggtacgatgattcgcacagctgatgcagcgggtttagcaggcgtgattttaggtaagggcacagcagatatttacaatacaaaagtgttgcgctcaatgcagggaagccactatcatttaccagttctccaacgagagttgactgaagtggttcaggcattcaagaagcaaggtctaccagttttcggtacagaactaaatgaagctgcgattgcttattatgaacaagaggcagtggaaaattatgcgttgattttaggcaatgaaggtagcggggtttcgccagaattgttagcagaaaccacgaaaaatctttatattccaatgaaaggtcaagcagaatcattgaatgtcgctatcgcagcgggcgtgttaatgttttactttgaaaataatcaataa

SEQ ID NO: 6390 - DNA, 786 bp, Enterococcus faecalis
  CDS (1)...(786)
atggcagtaatttctatgaaacaattcttagaagccggcgtacactttggtcaccaaactcgtcgctggaacccaaaaatgaagaaatatatcttcacagaaagaaacggtatctacatcattgacttacaaaaaacagtgaaattagtagatgcagcttacgattacatgaaaaacgttgcagaagaaggcggcgttgctttattcgtaggaactaaaaaacaagcacaagaagcaatcaaagatgaagcaatccgcgctggtcaatactatgtaaaccatcgttggttaggtggtacgttaactaactgggatacaatccaaaaacgtattgctcgcttgaaaaaaatcaatgcaatggaagaagacggcactttcgaagttttacctaagaaagaagttgctggcttaaacaaagaacgtgaacgtttagaaaaattcttaggtggtatcgctgatatgccaagaattccagatgtaatgtacatcgttgacccacgtaaagaacgcattgctgttcaagaagcacacaaattaaacattccaatcgttgcaatggttgatacaaactgtgatcctgatgagatcgatgttgtaatcccttcaaatgatgatgcaatccgcgctgtgaaattaatcactgctaaaatggctgacgctttcatcgaaggtaaccaaggggaagaccaagcaactgaagagttattcgttgaagaaacaccagaagcaacttcaatcgaagaaatcgttgatgttgttgaaggaaataacgaatcagctgaataa

SEQ ID NO: 6391 - DNA, 882 bp, Enterococcus faecalis
  CDS (1)...(882)
atggcagacgttacagctaaaatggtaaaagaattacgcgatatgactggcgttggaatgatggacgctaaaaaagcattagtaaaagtagaaggcgacatggaaaaagccgtagactttttacgtgaaaatggtatggctaaagcagcgaagaaaaatgaccgcattgcggctgaaggcttagcaaacgtagcaactgtgggtaacgttgcagcaatcgttgaagtaaactcagaaactgacttcgtttctaaaaacgaaatgttccaagatttagttaaagacattgcgactaaagttgctgaaaacaaaccagctacgatggaagaagcaatggctattaaaactgaaaaaggcacaatcgaatctgatttaatcgaagcaacaactgttatcggtgaaaaaatcagcttccgtcgttttgaagttgtcgaaaaagctgacaatgctgcatttggcgcttacttacacatgggtggccgtattgctgtattaacagttatcgatggcacaactgacgaagaagtagcgaaagatgttgctatgcacatcgcggcaatcaaccctcgctatgtcaacgaatctcaaattcctcaagaagaattagaacacgaaaaagctgtgttaactgaacaagcattaaacgaaggtaaaccagcaaatatcgttgaaaaaatggttgttggtcgtctacaaaaattcaaagcagaaatcgctttggttgaccaaccatttgttaaagatccagatatgactgtcgaaaaatttgttgcttctaaaggcggcgaagtgaaatcattcgtacgttttgaagttggcgaaggtatcgaaaaacgtgaagataactttgcggatgaagtaatgagccaaatgaaaaactaa

SEQ ID NO: 6392 - DNA, 558 bp, Enterococcus faecalis
  CDS (1)...(558)
atgtctaaagaagttttagcaacagccaaagaaaaaatgacaaaagcggaagaaagcttacgccgtgaattaggtcaaattcgtgctggtcgtgcgaacgcaagcctattagaccgtattcaagtagaatattatggtgcaccaacaccagttaaccaattagcaagtatcaatatcccagaagcacgggtattaatgattacaccgtttgacaaaaattctatcgctgacattgaaaaagctattcaaatgagtgatatcggcattagcccaaccaatgatggaaatgtcatccgtttagtgattccacaattaacggaagaacgtcggaaagaattagccaaagacgtgaaaaaagaagcggaaaactcaaaagttgctgtccgtaacgttcgtcgtgatgcaatggatgagttgaaaaaagctcaaaaaaatggcgacatcactgaagatgaattacgttcatttgaaaaagatgttcaaaaattaacagatgatagcatcaaaaatatcgatgcgattactgctgaaaaagaacaagaacttttagaagtataa

SEQ ID NO: 6393 - DNA, 819 bp, Enterococcus faecalis
  CDS (1)...(819)
atgagtgagaacggaaaaacgattaaaacaagttggagggaattgtacatgtctgtgttagaaatcaaaaatttacacgtatcaattgaagataaaaagattctaaaaggagtcgatttaacaattaatactggagaaatccatgcaattatgggacctaatggaactggtaaatctactttatcagcagcaattatgggaaatcctaactacgaagtcacagaaggagaaattctgtttgacggcgtcaacgttttagatttagaagtagacgaacgcgctcgcttaggcttattcttagcaatgcaatacccaagtgaaattccagggattaccaacgctgaattcatgcgtgcagcaatcaatgcaaaacgtgacgaagacaacaaaatgtcagtcatgcagttcttaaaaaaattagatagcaaaatggaattattaaatatgcctgaagaaatggctgagcgttacttaaacgaagggttttctggcggcgagaaaaaacgaaatgaaattttacaattattgatgttagagccaacgtttgccattttagatgaaattgattcaggcttagatatcgatgcgttaaaagtagtttctaaaggggttaatgaaatgcgcggcgagaactttggtgcgttaattattacccattatcaacgcttattgaactatatcacgccagatgttgttcatatcatgatggaaggccgcgttgtgaaaaccggtggggctgatttggcaaaacgtttagaaacagaaggctatgctggtatcagccaagaattaggtattgattacaaagaagaagcgtaa

SEQ ID NO: 6394 - DNA, 2643 bp, Enterococcus faecalis
  CDS (1)...(2643)
atgaaagaattaacaagtagtcaagttcgtcaaatgtatttagacttctttaagtctaaaggacattcagtagaaccaagtgcttctttagtaccagtaaacgatccaacattattatggattaactctggtgttgcaaccttgaaaaaatattttgatggctctgttgtgccagaaaatccaagaattacgaatgctcaaaaatctattcgtacaaatgatattgagaatgttgggaaaacggctcgtcatcatacaatgtttgaaatgttagggaacttctcaattggagattattttaaaaatgaagcgattcactgggcttgggaattcttaactggtgctgaatggcttgcttttgacccagaaaaattatatgtgactgtttatccgaaagatacagaagcaaaacgcatttggcgtgatgaagttggtttatctgaagaccatattattgatgtagaagataacttctgggatatcggtgctggtccaagtggtccggatacggaaatcttttatgatcgcggcgaagaatttttagatattccagaagatgatccagaaaattatcctggtggcgaaaatgaacgctatttagaaatttggaacttagtgttctctgaatttaaccatacaccagaagatacgtacgaaccattaccacataaaaacattgatacgggcatgggcttggaacgtgttgtatctatcattcaagatgcaccaacaaattttgaaactgatttatttatgccaatcattcatgcggtagaagctttaggaaccaacgtgaaatatggagatgcaccacaaacggatgtttcctttaaagtgattgctgaccatattcgtgctttatcctttgcaattggtgatggtgcgcttccttcaaatgaaggtcgtggctatgtgttacgtcgtttattacgtcgtgcggtaatgcacgggaaaaaattaggcattaatgaagcctttttatacaaattagtgcctgttgttggcgaaatcatggtaagctactatccagaagtattacaacaaaaagacttcatcgaaaaagtggttcggacagaagaagaacgtttccatgaaaccatcaatgaaggtttaagcatgttaaatgaggttattaaagaagttaaagatgcaaaaggcgatacattagatggaaaaattatcttcaaactttatgatacttttggcttccccgtagaattaacggaagaagttgcggaagatgaaggcttgaaagtcgatcatgctgggtttgaaacagaaatggaagcacagcgtgaacgcgctcgttctgcccgcagtaaagaaacttcaatgggtgttcaatctgctttattaacagatattaaagtagaaagtaaatttgttggctatacagaattaacacatgatagtgaattatttgttattattcaaggtgacgcactagtaaatgaagcatctgcaggaacagccgaattaatttttgctgaaacaccattttatgctgaaatgggtggacaaattgctgaccgcggctatgtaaaaaataccgcaggggaagtcgttgccaacgtggtggatgtgaaaaaagcaccaaacggtcaatttttacacaaagtagaagttttggcgccattagcagaaggccaaatttatcaattgcaagtggacgaacggatgcggacacgtattttgaaaaatcatacggcaacccatttattgcatcgtgctttaaaagatgtgttaggggagcatgccaaccaagcaggctcattagttgcaccaggacatctacgttttgactttactcattttgggcaagttacatcagaagaactagcgcggatggaagccatcgttaacgaaaaaatctgggaagctattcctgttgtcacaattgaaacagatattgatacagcgaaaaacatgggcgcaatggcgttatttggcgaaaaatatggcaaagaagtccgtgtagttaatattggggattactctatcgaattatgtggtggaacacacgttgctaatacagaagatatcgggattttcaaaattgtttctgaatctggaattggtgcaggagtacgccgtattgaagcagtgacgagtaaagaagcgtatcaacttttacaagaagaagaacgtcaattgaaagagattgctacactagttaaatcacctcaattaaaagaagtggttacgaaaacagagcaattgcaacaacaattacgtgatctacaaaaagaaaacgaacaattggcaggcaaattagcgaaccaacaagctggtgacatttttaaagatgtcaaagacatcaatggtgttcgttatattgccgctcaagtcaatgttaaagacatgaatcaattacgccaattggctgaccaatggaaacaaaaagaattgtctgatgtactagttctagcaactgcacaagatgaaaaagtaagcttgttagcggctatgacaaaagacatgaacggaaaaggcttaaaagccggtgacttaatcaaagcaattgcgccaaaagttggcggtggcggcggtggtcgtcctgatatggctcaagctggtgggaaaaatccagcagggattgcggatgccttagcagaagttgaaaactggttggcaaatgcctaa

SEQ ID NO: 6395 - DNA, 1254 bp, Enterococcus faecalis
  CDS (1)...(1254)
atgtatgaaaatttattacctcgttttttacgctatgtgaaaacagaaacacgctcagatgcaacaagcacaacgacaccatcaacacaaacacaagtagcctttgcacaaaccttaaaaaaagaattagaagaattaggaatgagcgatgttatttataacgaaacaaatggttttgtgattgctacgttacctagtaacgtggagaaagacgttcgttcaatcggctttattgcccatatggataccgctgattttaatgcagtgaatgtttctccgcaaattgttgagaactatgacggagaatcaacgattcctttagataaagaaggcaaattcactttaaatacgaaagactttcctaacttaaaaaattatcgtggtgaaacacttatcacaacagatggtaccactttattaggggctgatgataaatcaggtattgcggaaataatgacagccatggaatatttaattaatcacccagaaattaaacatggcaccattcgtgtggctttcggtcctgacgaagaaattggtgtaggtgccgacaaatttgatgtcgctcaatttaacgtggattttgcttatacaatggatggcggaccagtaggtgaattacaatttgaaacgtttaatgcggcgcaagcagaaattacaattcaagggaaaaacgttcatccaggaacagcaaaaaatacaatgattaatgcgttacaattaggaattgatttccataatgccttacctgctgacgaagttccagaaaaaacagcaggtgaagaaggcttttatcatttagcagcgtttgctggaacgccagaagaagctacaatgacgtatattattcgcgatcacaatcgcgagatttttgaagcacgtaaagctaaaattaaagaaattcagcaaacattgaatgcaccatttgatgaagaacgaatcaaagttgatttatttgatcaatactataatatgcgagaagtgattgaaaaagatatgtccattgtcgaaattgctaaacaagcaatggaagaattgtcaattcaaccaattattgaacctgttcgcggtggaacggatggctcaaaaatttcttatttagggattcccacaccaaatatctttgctggtggcgaaaatatgcatggccgttttgaatttgtttcattacaagccatggaaaaagcgaccaatgtgattattaaaattgctgaattatatgcaaaattaatgaggcacttaataggaaagtaa

SEQ ID NO: 6396 - DNA, 1359 bp, Enterococcus faecalis
  CDS (1)...(1359)
gtgaggcaagtgccttcatttaaacaatttcaatttcaaccttttatcaacgaagcactcgcagaaaaagggtttgaagaaccaacagaagtccaagaaaaattaatcccaatcattaagaaagggaaaagtgtcattggacaatcgcaaacaggaagtggaaagacgcatacttttttacttccattaatggataaagttaagccaactatcgacgaagtacaaattgtgattactgcgcctagtcgtgaattagccaatcaaatttatcaagaagcgcagcaactggctcgtttcagtcaaccagaaattcgagtgtcaaattttgttggcggaacagataaacaacgtcaattaaataaattaaagcatcagcaacctcatgtggtgattggtacaccagggcggattttagatatgatgaatgaacaagccttgaaagtgcatacggcttttgcctttgttgtcgatgaagcagacatgacattagatatgggctttttagcagaagtcgatcaaattgctggtcgtttgccagaaaaattacaaatgctcgttttttctgcaaccattccagaaaaattacgaccatttttaaaaaaatatttagaaaatccagtgattgaacatatcaaaccaaaagcagttatttcagaaacaattgacaattggttgatttccaccaaaggaaaaaacagcaatcaaataatttatcaattattaactatcgggcatccttatttagcgattgtttttgcaaatactaaacaaagagttgatgaaatcaccgattacttaaaagatcagggcctaaaagttgccaaaattcatggagacatcacaccacgcgaaagaaaacgtgtgatgcgtcaagttcaaaatcttgactaccaatatgtggtagctactgatttagccgcacgtgggattgatattgaaggggtttcacatgtcatcaatgcagaagttccacatgaattggacttctttatccatcgggttggccgcacaggacgtaatggattgaatgggactgccataacattatattcaccagcagatgatgaagcgattactcagattgagcagttaggtgtttctttcaaaccaaaagaaattaaaaatggtgagattgtagagacgtatgatcgtaatcgtcgaacaaaacgagaaaaatctcgagaagaattagacccaacgttaattggtttagtgaaaaagaaaaagaaaaaaattaaaccaggatacaagaaaaaaattaattgggcaattgaagacagcaataagaaaaaacgtaaaattgaacgtcgtcaaaaagatcgttctgctagaaaagcaaaaaagaattcttctaactaa

SEQ ID NO: 6397 - DNA, 2169 bp, Enterococcus faecalis
  CDS (1)...(2169)
atgacagttaatgaggtctgcggatcaggaatgaaggccgttattttggcgaaacaattgattcaattaggagaagcggaagttttaattgctggcgggattgagaatatgtcccaagcacctaaattacaacgatttaattacgaaacagaaagctatgatgcgcctttttctagtatgatgtacgatgggttaacggatgcctttagtggtcaagcaatgggcttaactgctgaaaatgtggccgaaaagtatcatgtaactagagaagagcaagatcaattttctgtacattcacaattaaaagcagctcaagcacaagcagaagggatattcgctgacgaaatagccccattagaagtatcaggaacgcttgtggagaaagatgaagggattcgccctaattcgagcgttgagaagctaggaacgcttaaaacagtttttaaagaagacggtactgtaacagcagggaatgcatcaaccattaatgatggggcttctgctttgattattgcttcacaagaatatgccgaagcacacggtcttccttatttagctattattcgagacagtgtggaagtcggtattgatccagcctatatgggaatttcgccgattaaagccattcaaaaactgttagcgcgcaatcaacttactacggaagaaattgatctgtatgaaatcaacgaagcatttgcagcaacttcaatcgtggtccaaagagaactggctttaccagaggaaaaggtcaacatttatggtggcggtatttcattaggtcatgcgattggtgccacaggtgctcgtttattaacgagtttaagttatcaattaaatcaaaaagaaaagaaatatggagtggcttctttatgtatcggcggtggcttaggactcgctatgctactagagagacctcagcaaaaaaaaaacagccgattttatcaaatgagtcctgaggaacgcctggcttctcttcttaatgaaggccagatttctgctgatacaaaaaaagaatttgaaaatacggctttatcttcgcagattgccaatcatatgattgaaaatcaaatcagtgaaacagaagtgccgatgggcgttggcttacatttaacagtggacgaaactgattatttggtaccaatggcgacagaagagccctcagtgattgcggctttgagtaatggtgcaaaaatagcacaaggatttaaaacagtgaatcaacaacgtttaatgcgtggacaaatcgttttttacgatgttgcagacgccgagtcattgattgatgaactacaagtaagagaaacggaaatttttcaacaagcagagttaagttatccatctatcgttaaacgcggcggcggcttaagagatttgcaatatcgtgcttttgatgaatcatttgtatctgtcgactttttagtagatgttaaggatgcaatgggggcaaatatcgttaacgctatgttggaaggtgtggccgagttgttccgtgaatggtttgcggagcaaaagattttattcagtattttaagtaattatgccacggagtcggttgttacgatgaaaacggctattccagtttcacgtttaagtaaggggagcaatggccgggaaattgctgaaaaaattgttttagcttcacgctatgcttcattagatccttatcgggcagtcacgcataacaaagggatcatgaatggcattgaagctgtcgttttagctacaggaaatgatacacgcgctgttagcgcttcttgtcatgcttttgcggtgaaggaaggtcgctaccaaggtttgactagttggacgctggatggcgaacaactaattggtgaaatttcagttccgcttgcgttagccacggttggcggtgccacaaaagtcttacctaaatctcaagcagctgctgatttgttagcagtgacggatgcaaaagaactaagtcgagtagtagcggctgttggtttggcacaaaatttagcggcgttacgggccttagtctctgaaggaattcaaaaaggacacatggctctacaagcacgttctttagcgatgacggtcggagctactggtaaagaagttgaggcagtcgctcaacaattaaaacgtcaaaaaacgatgaaccaagaccgagccttggctattttaaatgatttaagaaaacaataa

SEQ ID NO: 6398 - DNA, 1116 bp, Enterococcus faecalis
  CDS (1)...(1116)
atggcaaaggctaagaaacaaaaacctattgactttaaagagctaatggctaaagtcgacgctgatttcccaactttccaaatcttggatcaagatggaaaaattgtgaatgaagatttagtacctgatttatcggatgaggaattagttgaattaatgacacgcatggtttggtctcgtgtgttagaccaacgttctactgcattaaaccgtcaaggacgcttaggattcttcgcgccaacagctggacaagaagcaagccaattggcaagtcaatttgcaatggaaaaagaagactacttactaccaggttaccgtgatgtacctcaattagtacaacatggtttaccattaagagaagctttcttatggtctcgtggtcacgtagcagggaactactacgcggaagatttaaatgcattaccaccacaaattatcattggtgctcaatacatccaagcagctggtgttgctttaggattgaaaaaacgtggaaaagaaaatgttgtcttcacttatactggtgacggcggttcttcacaaggggacttctatgaagcaattaactttgctggtgcttaccaagcaaacggtgtcttcattatccaaaacaatggttttgcgatttctacacctcgtgaaaaacaaacagcggctaaaactttagctcaaaaagctgttgcagcaggaattcctggtattcaagttgatggtatggatccattagcagtttacgcaattgcaaaagaagcacgcgattggtcagctgcaggaaacggtccagttttaattgaaacattaacttatcgttatggtccacatactttatctggagacgatccaacacgttaccgttcaaaagaaatggatgacgaatgggtacaaaaagatccattgactcgtttccgtaaatatctaacagataaaggcttatggtctgaagcaaaagaagaagaaattattgaaaaaacaaaagaagaaatcaaagtagcgattgcagaagcggataaagcgccaaaacaaaaagtttctgatttcttgaaaaatatgtttgaagttcaacctcaaacaattaaagaacaaattgcattttatgaagcgaaggagtcgaaataa

SEQ ID NO: 6399 - DNA, 978 bp, Enterococcus faecalis
  CDS (1)...(978)
atggcacaaaaaactatgatccaagcaattacagatgccttagctcttgaattagagaaagacgaaaatgtcttaatcttcggtgaagacgttggtaacaacggtggggttttccgtgcaactgaaggtttacaagaaaaatttggtgaagaccgcgtcttcgatacacctttagctgaatctggtatcggtggattggctttcggtcttgccttgcaaggttaccgtcctgttcctgaaatccaattctttggtttcgtttttgaagtatttgacgaaatcgttggtcaaatggctcgtacgcgttaccgtatgggtggaactcgtaatatgccaattactgttcgtgccccatttggtggtggtgttcatacaccagaacttcactcagataacttagaaggattaatcgcacaatcaccaggtgttcgtgttgttattccatcaaacccttacgatgcaaaaggactattaatttcatctattcgtagtaacgatccagttgtctacttagagcacatgaaattataccgttcattccgtgaggaagtgccagacgaagcttatgaagtgcctttagataaagcggctgtaactcgtgaaggaacagacgtatcaatcatcacttacggcgctatggttcgtgaagcgattaaagcagctgatagcttagcgaaagacaatatttcagcagaaatcattgacttacgtacagtggctcctttagatgtggaaacaattattaactctgttgaaaaaactggccgtgtggttgtcgttcaagaagcacaaaaacaagctggcgttggcgctatggttgtttctgaaatttctgaacgtgccgtattatcattagaagcaccaatcggacgtgtatctgctccagatacaatcttcccattcggacaagcagaaaatatctggttaccaaatgcgaaagatatcgaagcaaaagctagagaaatcgtcgaattttaa

SEQ ID NO: 6400 - DNA, 1620 bp, Enterococcus faecalis
  CDS (1)...(1620)
atggcttatcagtttaaattaccggatatcggtgaagggattgccgaaggcgaaatcgttaaatggtttgtaaaacctggcgatacaatcaacgaagacgatacgttattagaagtacaaaatgacaaatcagtggaagaaattccatcaccagtaacaggtactgtaaaaaatatcgttgtaccagaaggaacagttgcaaacgttggtgacgtgttaatcgaaatcgacgcacctggtcacgaagataacgatgcagcaccagcagctcctgcacaagaacaaacaccagcacaacctgctgctgtaccaacaaccgaagcagctggcggatttttccaattcaaattaccagacatcggtgaaggaattgccgaaggcgaaatcgttaaatggttcgttaaagcgggcgacacaattaatgaagatgattcattattagaagtacaaaatgacaaatcagtagaagaaattccatcaccagtaacaggtactgtaaagaatatcgttgtaccagaaggaacagttgccaatgtgggtgacgtgttagttgaaattgacgcacctggtcataattcagcagcaccggcagccgcagcaccagctactgacgctcctaaagcggaagcatcagctccagccgcttcaacaggcgtagttgcagccgctgatccaaacaaacgcgttttagcaatgccatctgttcgtcagtatgcgcgtgaaaaagacgttgatattacacaagtaactgcaactggtaaaggtggccgtgtcattaaagcggatattgatgcctttgtctctggtggttctcaagcagcaccagctactgaagctgccgcaacagaagcagcacctaaagcggaagcagctgcacctaaagcagcgccaaaagcctttacttctgatttaggcgaaatggaaacacgtgaaaaaatgacaccaacacgtaaagcaattgctaaagcaatggttaacagcaaacacactgctcctcacgtaacattacatgatgaagtagaagtttctaaattatgggatcaccgtaagaaatttaaagatgttgctgctgcaaatggtacaaaattaacattcttaccatacgttgtaaaagcattgacttcaactgttcaaaaattcccaatcttgaatgcatcaatcgatgacgcagcacaagaaattgtttacaaaaattactttaacattggtatcgctactgatacagatcatggcttatatgtaccaaatgttaaaaatgctaatacgaagagcatgtttgctatcgctgatgaaatcaacgaaaaagcagcattggctatcgaaggtaaattaactgcacaagatatgcgtgatggtacaatcacaattagtaacattggttcagtcggtggcggctggtttacaccagtaatcaactaccctgaagttgctattttaggcgttggtacaattgcacaagaaccagttgttaatgcagacggcgaaatcgttgtgggacgcatgatgaaattatcattaagctttgaccaccgtatcgttgacggcgcaactgctcaaaaagcaatgaacaacattaaacgcttattagctgatccagaattactattaatggaaggatga

SEQ ID NO: 6401 - DNA, 1407 bp, Enterococcus faecalis
  CDS (1)...(1407)
atggtagtaggagatttcgccattgaactagatacagtcgtaatcggagctggtcctggaggatacgttgccgcaattcgtgccgcagaaatgggtcaaaaagttgcgattatcgaacgtgaatacatcggaggcgtttgtttaaacgttggatgtattccttcaaaagctttaattgctgctggacatcattaccaagaagcacaagattcttcaacttttggtgtaacagctaaaggagtcgaattagactttgcaaaaacacaagactggaaagataacacagttgtaaaatcattaacaggcggcgttggcatgttattgaaaaaacacaaagtagaaattattgaaggcgaagcattcttcgttgacgaaaatacattgcgtgttattcacccagactcagcacaaacttactcattcaataatgctattgtagcaacaggttctcgtccaattgaaatcccaggattcaaatttggcggacgcgtgttagattctacaggcggtttaaacttaaaagaagttcctaaaaaattcgttattatcggtggcggtgtcatcggtgctgaattaggtggcgcttatgctaacttaggttcagaagtaacaattttagaaggtagcccatcaattttaccaacttatgaaaaagatatggttaaagttgtcacagacgacttcaagaagaaaaacgtaacaatcgtgacttctgcaatggctaaagaagctgttgacaatggcgatagcgtcactgttaaatatgaagttaacggaaaagaagaaagtgttgaagcagattacgtaatggtcactgttggacgtcgtccaaacacagacgacttaggcttagaacaagcgggcgttgaaattggcgaacgtggtttaatcccagttgacaaccaaggacgtactaacgtgaaaaacatcttcgcaatcggcgacatcgtaccaggtgctgcgttagcgcataaagcaagctacgaagcaaaaattgctgctgaagcaatttctggtaagaaagttgcagttgattacaaagcaatgccagctgttgcctttactgatccagaattggcaagcgttggtatgactgttgcagaagcaaaagaagcgggaatcgaagcaaaaggctacaaattcccatttgctggtaacggccgtgcaatctctttagataaaactgaaggattcatgcgtttagttacaactgtagaagacaatgtcatcatcggtgcacaaattgccggtgtcggtgcaagtgacatgatttctgaattagctttagctattgaatctggcatgaatgcagaagacattgctttaacaatccacccacacccatcattgggcgaaattactatggatacagctgaattggctttaggtttaccaattcatatttaa

SEQ ID NO: 6402 - DNA, 1653 bp, Enterococcus faecalis
  CDS (1)...(1653)
atgaaaaagttaaaaatgatggggattatgttatttgttagtacggtcttggtaggttgtggcacaacagcagaaacaaaaagagacgagaaagcaactgagaaaaccagtgtctcgaaaaaagttttaaatttaatggagaactcggaaatcggttcaatggattctatttttacacaagatgaagccagtattaacgcacagtccaatgtctttgaagggttatatcaattggatgaaaaagatcaactaataccagctgccgctaaagagatgcctgaaatttctgaagatggcaaacgatataccattaaactaagagaagatggtaagtggtccaatggtgatgctgtaacagccaatgattttgtttttgcttggcgtaaattagcgaatcccaaaaaccaagccaattactttttcttgttagaaggaacgattctgaacggaacagctattacaaaagaggaaaaagcaccagaggaattgggtgtcaaagcgcttgatgattatactttggaggttactttggaaaagcctgtaccgtattttacgtcgttattggcattttctccatttttcccacaaaacgaagcattcgtgaaagaaaaagccaaagcctatggcacttcaagtaaaatgattgaatctaatggtccgtttttaatgaaaaattgggatcagtcagcgatgtcgtgggattttgtgcgtaatcccgactactacgataaagaaaaagtaaaatcagaaacgattcattttgaagttcttaaagaaaccaataccgtttataatttgtacgaatcaggtgaattagatgtggctgtcttaacaggagattttgctaaacaaaatcgagacaacccagactatgaagcaatcgaacggtcaaaagtctattccttacgtttaaaccaaaaaagaaacgaaaaaccatccatttttgcaaatgagaatgtccgcaaagctttagcttatgctttggataaaaaaagtttagtcgataatattttagcagatggctcaaaagaaatttatgggtacattccagaaaaatttgtatataacccagaaacgaatgaagattttcgtcaagaagcaggcgcccttgtcaaaacagacgccaaaaaagccaaagagtatttagataaagcaaaagcagagttaaacggagatgtagccattgaacttctttcaagagatggtgatagtgaccgaaaagttgctgaatttatccaaggccagttacaagaaacgttgcctggtctcactattaatgtcaaaacagttcctttaaataatgcgattgaattaatgagaaaaggggattatgaattgtctgttggcatgtggggacccgattatcaggatccaatgactttcttagaaagctcagttagtggtaaccgtatgaactattctagcccaacgtttgatcaactaattgaagaagcaacaactaaatacgcaaatgatcctgaaactcgttggcaaacattaattaaagctgaaaaagtattggtggaagaagatgccgctttaattcctttataccaagaggctcgtagtcagcttatacgaccaggtgtcaaaggtattcagtatcataacttcggtgcaacgagcacatataagtatgcctataaagaataa

SEQ ID NO: 6403 - DNA, 1656 bp, Enterococcus faecalis
  CDS (1)...(1656)
atggacaacaatgtctttgtcgggattgtcgctggtttagttgccgcggcaatgtataatcgtttctctggtgtgaaattgccaatggctttatcattctttagtggaaaacgtttagttcctattatgtcagctatttcgatgttagcaatctcagctgtcttattcttcttctggccagttgtttataacggattagttgcttttggtaaaggaatctctagcttaggtttcgtaggagctggcttgtatggtttctttaaccgactattaattccaacaggcttacaccatgctttgaattctgttttctggtttgatgttgctggtatcaatgatattgggaactttttagctggtcaacaagcgttagatactggtaaagcaattgtaggacaaacagggatgtatcaagctggtttcttcccagtaatgatgtttggtttaccagcaggtgcgtttgctatttatcaatgtgcacgtcctgagaagaaaaaagttacagcttcattaatgttagctgctggttttgcggctttctttacaggcgtaactgaacctttagaattctcatttatgttcgttgcttggcctttatatgttttacatgcagtctttacaggtatttctttagcattcgctgagtttatgcattggacagctggctttgcctttagtgcaggttttgtagacttcttcttaagtttgaaaaacccagtcgcgaatcatccaatgatgttggtggttcaaggacttgtctttgcagcaatttactacttcggtttccgttttgcaatcactaagtttaacttaatgacaccaggacgtgaagaaggcgatggcgaagaaacgccagatgttgcagaaggtgacaacaaatttgcttctctagctcgtcgtatttatgatggtttaggcgctgatgctaatgtaacttctattgataactgtacaactcgtttacgcttaacagtgaaagatacaggcaaagtggatcaagcaaaaattaaagcaactggggttcctggtgtgaaagtcattgatgacaccaatatccaagtgattgttggtacggaagtacaatttgttgctgacgaaatgcaacgattatataaccaccaagcgccagcaacaccagtcaaagaaacacctgtttctcaaccagttgttgaaaaaaaagcaccagtttcaacaaaagaaactgaattatattctgtagcgaatgggaaagttattcctatttctgaagtaccagatgatgttttctcagcaaaaatgatgggtgacggttttgctgtcgtaccaacagacggcaaagtttcaacacccgttgctggtaaaattactagcattttcccaacaaaacatgcgttaggtatccaaacagattcaggcattgaagtattattacacatgggtctagatactgttgagttacaaggtggaccatttacattacatgttgaagaaggccaagttgtaaaacaaggcgataaaattgcaaccattgatttagcggcattagaacaagctggcaaaaaatcagatttaattgttgttttcacaaatcaagatattgttgctcaatacgatttacaaaaagcaggtcaaacgacttcaatgaatgatgtaatcggaaatgttaccgtaaaataa

SEQ ID NO: 6404 - DNA, 1317 bp, Enterococcus faecalis
  CDS (1)...(1317)
atgtccatgtttttagatcaagtgacgattgatgtcaaagctggtaaaggcggcgacggaatggttgctttccgtagagaaaaatatgtaccagacgggggtcccgctggtggtgatggcggtcgcggtggcgacgttgttttagttgttgaagaaggattacgcacattaatggatttccggtttaatcgtcattttaaggcgacacctggagaaaatggtatgagtaaaggaatgcacggtcgtggttcagaagatttacttgtcaaagttccaccaggtacaacagttcgtgatgcagaaactggagccttaattggggatttaattgagaatggtcagaccttagtagtagcaaaaggcggacgcggtggtcgtgggaatattcgctttgcttccccaagaaaccctgcaccagaaattgccgaaaacggcgaaccgggccaagaacgtaaaattgaattagaattaaaagttttagcagatgttggcttagttgggtttccttctgtagggaaatcaacgttactctctgttatctcgtccgctcgtccgaaaattggtgcctatcattttacgacgttagttccaaacttaggaatggtgactactagtgacggtcgaagcttcgctgcagcagatttgccaggcttaattgaaggagcttctcaaggtgtcggcttaggaacacagttcttacgccatattgaacggacgcgtgttattttacatgtcattgatatgagtggcatggaaggacgcgatccttacgaagattatttggcaatcaataaagaattggcttcacacaatttacgtttgatggaacgacctcaaattattgttgccaataaaatggacatgcctgaagcagaagagaatttagcgaaatttaaagagcaacttgcgaaggaacgcaccgatgagtatgccgatgagctacctattttcccaatttctggggttactcgtaaaggtattgaacctttattaaatgcaacagctgacttgttggaagtaacgcctgaattcccattatatgaagatgaagtggtagaggaagaaaccgttcgttatggattccaaccagaaggtccagaatttacgattgatcgtgaaccagatgcttcatgggttttatctggtgaaaaattagaaaaattatttgaaatgacgaatttcgatcatgatgaaacagtaatgcgttttgcacgtcaattacgtggtatgggtgtcgatgaggcattacgagcacgtggcgcgaaagatggcgacattgttcggattggtaattttgaatttgaatttgtcgaataa

SEQ ID NO: 6405 - DNA, 1149 bp, Enterococcus faecalis
  CDS (1)...(1149)
atgacgaaaaaatttgttttggctccagactcatttaaagaaagtatgagtgcaaaagaagcctgtctggcaatggaaaaagggattttagctgtatttaaagatgcagacattcaacatgtcccgatggcagacggcggggaaggaacggtggattccttagtggatgcaacaggaggtacaagagtaccagtgcgcgtggcaggaccgcttcctgatcaaatcgttgaaacctattacggcttattaggtgaccaagaaacggtggtcattgaaatggcgaaagccaacggaattgaattggttaaagcagcagaacgtaatcccttgatcacttctacttatggtacaggagagatgattcaacatgcgctcaatcatggggcaaaaaaaatcattatcggcattggtggtagcgtgacaaatgatgggggtgcaggtatgattcaggcacttggtgcgcgtttgttagacaaggaagggcaagaattgacacgtggcggtggtgcattagataaactggcgcagatcgatttaacacagtttgatcaacgtatttttgctaccgaagttctagtagctagtgatgtgaataacccactaacagggccaacaggggcgtctcatgtctttggtccgcaaaaaggtgcgacagaagaaatggtggctcaattagataaaaacttagcccattatgcagcaatcatcaaaaaagaggtcggcattgatgttgagatgatgccaggcgcaggagctgctggtggtttgggtgcagggttactagcattcacaaaagctcagttacgcccagggattgatattgtcgtagaagtgaatcaattagaagaaaaaataaaagctgctgattatgtctttactggtgaaggcgggatggattttcaaacaaaattcggcaaagccccttatggcgtctcgcgtttggccaagaagtatcaaaaaccggttttcgcttgtgctggctatatcggcaaagatgtggatgtcctctatgaagaagggatgacggctatttttggaattttggccaaagccgaaccattggaagcagcattgaaaaatggaccagttaacttagaaagaaccgttgaaaatattgctcgtacattacagctggtgccttgtgactaa

SEQ ID NO: 6406 - DNA, 1710 bp, Enterococcus faecalis
  CDS (1)...(1710)
atgaataagtatcaattacctgtcgcgtcttgggttgaaagttttactgattggttaacttcaacatttgctggattattcagctttttacaaacaattggtcaaagtgtaatggacaacattactgccttactaacagccgtaccaccacttgtgctgatcgtgctattaacgattgctgctttctttatttctaataaaaaaatcggcttaagtttattcacgtttatcggcttaatgtttatctataatcaaaacttatggaacgatttaatgagtaccgttacgttagttttactttctagtgttatttccattatcattggtgtgccactagggattttaatggcgaaaagcgaaaaagccaagagtattattacaccgattttggacttcatgcaaacaatgcctggtttcgtttacttgattccagccgttgcattcttcggaattggtatggttcctggggtcttcgcctctgttatcttcgctttaccaccaaccgtacgctttacgaacttaggaattcgacaagtaccaaatgaacttgttgaagcagctgattcttacggtagtaccggctggcaaaaattattcaaattagaattacctttagccaaaaacacgattatggctggtgttaaccaaacaaccatgctagctctatcaatggtagttattgcttcaatgattggtgcgcctggattaggacgtggcgtcctttctgctttacaacgtgcgcaagtcgggaacggtttcgtaaatggtgtagctttagttattttagcgattatcattgaccgttttactcaacatttaaataataaaaaagcagcccctaaagcagctggtgccacctctaaaaagaaaaaatatgggattattgcagcggttgttgtaattgtcgctggcttagttggtgcttcaatttttacaacaacaaatgataagcaaatttccctttcttatgtggaatgggataccgaagtagcctccacacatgtggttgccgaagtcttaaaagatatggggtatgatgttaaaacgactcctttagataacgcaattatgtgggaatctgtagctaaaggtgaaacagatgccatggttggtgcgtggctgccaggaactcacgcagagcaatataaacaatataaagataaattagacgaccttggtgaaaaccttaaaggtgcgaagctaggaattgtcgtcccttcttatatggatgttgattctatcgaagatttatctgatcaagctgggaaaaagattactggaattgaacctggggctggtgttgttgcagcagcagagaaaactaaagaagcttatcctaatttgaaagattggtctgttgaaacttcttcatcaggtgccatgactgtcgccttaggacaagcaattaaaaacaacgaagacatcgttattactggctggtctcctcactggatgtttgcaaaatatgatttaaaatatttagctgatccaaaaggcactatgggcggcgaagaagcgattcacacaatggctcgccaaggcctaaaagaagatcaaccagaagcttacaaagtgttagataatttccattggacaactaaggatatggaatctgtcatgttagaaattaacgaaggcaaagacccacaagaagctgcacgcgattgggttgattcacataaagaccaagtagcagaatggaaaaaataa

SEQ ID NO: 6407 - DNA, 1947 bp, Enterococcus faecalis
  CDS (1)...(1947)
atgattttattacaagcaaatcaagttgcccggcattttggctcggaaacattgtttgaaaacatacatttagaaattgcaacaaaaagtcggattgccttagttggtcgtaatggtgctggaaaatcgacttttttaaaaatcattgcaggcattgatgctcccgatagcggaaccattgccaaaaataaaactgctacgttaggttatttagctcaaaataccggcttagaatcagataaaaccgtttgggaagaaatgacaaaagcctttgctgacatcctagaaatggaacagcgtatgcgagaattagaaactaaaattagtgaaatggatccaaccacttccgtttatgaaggaattttaaaagagtacgatcaattgcaacatacgttttctgaaaaaaatggctacggctatgaaaatgaaattcgctcagtccttcacggctttggctttgatgaatccttttacacgaaagatattcaaaccttatctggtggtcaaaaaacccggcttgcattagcgagaatgcttttacaaaaaccagatattttaattctggacgagcctacaaaccacttagatatcgagacgctttcttggctggaatcttatttgccaagctatgccggcgccctattgattgtttcccacgatcgttattttttagataaggtagttaatgaagtttatgaactgagtcgcaaaaaaatgactcactacaaaggaaactattccaaatacttagagttaaaagcagaacaattagccagtgaatggaaagcgtatgaaaagcaacaagaagaaatcaataagttagaagattttgttgccaaaaatctggttcgtgcatctacaacgaaacgtgcacaaagtcgccgaaaagtattagaaaaaatggaccgtttagaccgacctcaaggagatgaaaaatcggcgcattttcttttcgatagtgaaaaagtctcgggaaatgttgttttacaagtcgaagatgccgccattggttacgaccaagaacatattttatccgaacctattcatttggatattcgtcgcaaagaagccattgccttagtcggaccgaacggaattggtaaatctactctcttgaaatcaattattgatcgcattcctttcattaaaggaagtaaaacttttggcaccaatgtttctgtaggttactatgaccaagagcaagccaatttacatggcaataaaacggtcttagcggaattatgggatgaacacccaaccacacctgaaaaagagattcgaagtattttaggcggctttctcttcagtggagacgatgttgaaaaaacgattcctttattaagcggtggcgaaaaagcacgtgtggcattagcaaaattagcgatggatcgtgacaatttcttgattctcgatgagccaaccaaccacttggatatcgataataaagaagttttagaaaatgcgctgattgattatgaaggaaccatcctcttcgtttcccatgaccgttactttatcaatcgaattgcaacaaaagttgttgagctttccgaaaaaggcagcaaactttatttaggcgactatgattattatttagaaaagaaacaagaggaagaagaaatagctgccctcttagctaatgaagaagcggcgaaaaaacccgaaccagttacagccaaaaataccttttatcaaaacaaggagcaacaaaaattactccgtactttgcaaagaaaaataacacaagtcgaagaaaatcttgctcagttagatacgacaattgcacaattagaagcacaaatgagtcaaccagacattctagaaaatcatgttgaattgctggctctaaaccaacaattagatgacgctcgtcagcaacaagatgaactacttgagcaatgggaaaatttcagtttagaattagaagaaatggaaaataacaattaa

SEQ ID NO: 6408 - DNA, 1206 bp, Enterococcus faecalis
  CDS (1)...(1206)
atgtacacatttaaaatcggtattccggcagaagtacacgatacatttgttaaaaatcacccattatgtaatttactacagtcatcttcatgggcaaaagtcaaggataactggggttctgaaattgttggggtttatgaaaaggatacattagtcgcatcaagtttagttttaatcaaaccattaccagccggttttacgatgttatatacaccaagaggtccagtaatggactatacaaatgaacgtttggtcagctactttatggctgaattgaaaaaatttggcaagaaaaaacgagctttatttataaaaatggatccagcggttcactatcaagattttcatttgggagaagaacatcaaccgcatgctgaagcgacagctattattgagaccttgaaagaagcaggggccaaatatcaaggactgacaatggatatgggggccaccatccagccccgcttccaagcgaatatttatcgtgaagattttagtgaggaacaattgtcaaaaagcaccaagaaaatgattaaaacagctgaaaaaaaaggggtcgttgtgcagcaagggcatgttgactttgttgatgaatttgaaaaagtcattcaatcaaccatggaacgccaacatatttctttacggaatagtgattactttaagaagctgttgaacatttacccagaagactcctttattatgctggcgcaagtcaatttaaaggaacgcttagatagcacgcgacaacgctatgacaaaaatcaaaaagacttgagtaatttgaaagaaaatcaagtgaaaaagcgccataatttagaagaattagatgcttccttgactcgggaactaaaagaattagaagaaaatatcgcagaagctggtgaaatcgtcacggttgctggcgctttggctgtgacatttggtccaacaagtgaaatcctttatgctggcttagatgatcgttataaacgctacatgccaacatatgtgacttggcgagatgccattcaagaatgttttaaccgtggctgcgaaagctgtaatatgggcggcttagaaggtagtttaaatgatggcttaattaagtttaaagcgaacttcaacccaacgattaatgaatttattggggaattcgatttaccggttaataaattattatttaaagccagtgaatatgcctataaattacgaaaacaaaaaaaataa

SEQ ID NO: 6409 - DNA, 285 bp, Enterococcus faecalis
  CDS (1)...(285)
gtgttaaaaccattaggcgatcgcgtcgtaattagagtcgcgaaagaagaagaaaaaactgttggaggaattgttcttgcatccgttgcaaaagaaaaaccacaaacaggtgaagttatcgcagtaggtgaaggtcgtgtgcttgaaaatggcacaaaagttccgatggaagtaaaaattggtgacacagtaatgtttgaaaaatattcaggaacagaagtgaaatacgaaggcgtagaatacttaattgtatcagccaaagacattattgccactgttgaataa

SEQ ID NO: 6410 - DNA, 1485 bp, Enterococcus faecalis
  CDS (1)...(1485)
atggactatacatatgcagatgatagtttgacattgcatacagatatgtatcaaatcaatatgatgcaaacatactgggaattagggagagcagatttacatgctgtttttgaatgttactttagagagatgccctttaatcatggctacgcaatttttgcaggtttagaacgtttagtcaattatctcgaaaatttaacgttcacagaatctgatattgcatatctccgagaagttgaagaatatccagaagatttcttgacgtatttagcaaattttgaatttaaatgtactgtacgctctgctttagaaggggatttggtttttaataacgaaccgttaattcaaattgaaggtcctttggcacaatgtcaattggtagaaactgccttgctaaatatggtgaatttccaaacattaattgcgacaaaagcggctcgaattaaatccgtgattggcgatgatcctttattggaatttggaacacgccgagcacaagaattagatgctgccatttggggcacaagagccgcctatattggtggggcggacgcgacaagtaatgttcgtgctggtaaaatttttggtattccggttagtgggacccatgcccattcattggttcagtcgtatggaaatgattatgaagcattcatggcgtatgccaaaacacatcgggattgcgttttccttgttgatacgtatgatactttgaaagcgggagtgccaagcgcaattcgagtagctcgagaaatgggtgataaaattaatttcctaggcgtgcggattgatagtggcgatatggcttatatttctaaacgagttcgtgaacaactggacgaagcaggctttactgaagcaaaaatttatgcatcgaacgatttagatgaaaatacgattttgaatctaaaaatgcaaaaatcaaaaattgatgtatggggcgtgggtaccaagctgattaccgcctatgatcaaccggctttaggagcggtgtttaaattagtttcaattgaaggtgaagatggtcaaatgaaagataccattaaactatctagcaatgctgaaaaagtgacaacaccaggaaaaaaacaagtctggcgcattacacgtaaatctgataaaaagtcagaaggggactatgtgacactttggaacgaagatcctcgccaagaagaagaaatttatatgttccatcccgttcatacctttattaataagtatgtccgtgattttgaagcacggccagtactccaagatattttcgttgaaggaaaacgtgtgtatgaattaccaactttagatgaaattaaacaatatgcaaaagaaaatttagattcactttgggaagaatacaagcgggacttgaatccgcagaaatatccagtggacctttcaacagattgttggaaccacaaaatgaatttattggaaaaagtgcgtaaagacgttaaacatttaacggaaacggtgaataaggaggcctag

SEQ ID NO: 6411 - DNA, 828 bp, Enterococcus faecalis
  CDS (1)...(828)
atgacaacacttcaagaaaaaatcattcaagagttaggtgttttaccgacaattgacccaaaagaagaagttcgtaaaagtattgattttctgaaagcttatttaactaaacatccttttttaaaaacctttgtcttgggaattagtggcggacaagattcaacattagctgggcgcttagcacaattagcgatgactgaaatgcgcgaagaaacaggagatatgtcgtatcaatttattgcgattcgccttccatacggtgagcaagcagatgaagctgatgcacaagccgcgctagcctttatccagccagatgtttctttacgagtggatattaaaccagcagtggatgcaatggttggttcgctagaaaacgctggcgttcaaattagcgattttaataaagggaacatgaaagcacgtcaacgtatgattacacaatatgcagtagctggcgaaaatgctggcgcagtaattggcacagaccacgcagccgaaaatgtcacagctttcttcaccaaatatggcgatggcggagcggatattttaccgttatttcgtttaaataagcgccaaggaaaagctttgctgaaagaacttggggcaccagaagccttgtatctaaaaataccaacagctgatctagaagatgacaaaccgttagttgcagatgaagttgccttaggtgtcacgtatgatgccattgatgactatttggaaggcaaaaaagtctcggaaacagatcaacaaacaattgaaaactggtataaaaaaggacaacacaaacggcatttacccattacaatttttgatgatttttggaaataa

SEQ ID NO: 6412 - DNA, 966 bp, Enterococcus faecalis
  CDS (1)...(966)
atggcaacgtattatgaagcaattaactggaacgccattgaagacgtcattgataaatccacttgggaaaaattaaccgaacaattttggttagatacacggattccgttatccaatgacttagatgattggcggactctttccgatttagaaaaaactactgtcggctacgttttcggcggtttaactttattagatactgttcaatcagaaagcggcatggatcaactgagaaatgatgtgcggacgccccatgaagaagccgtcttaaataacatccaattcatggaatctgtccatgccaaaagttattcttctatcttcagtacattaaatacaaaaaaagagattgatgatatttttgagtggacaaataccaacaaacatctgcaatataaagcagaacggattaacgaaatttataaaaacggcactccgttagagaaaaaaattgctagtgtatttttagaaacgtttttattctattctgggttttacactcctctttactatttaggaaacaataaactagcgaacgtcgctgaaattattaaattgattatccgtgatgaatcagtgcacggcacgtatattggctataaattccaattaggatttaatgaattaccagaagatgagcaagataaactaaaagactggatgtataatttactttacgaattgtacgaaaacgaagaacgttatacagaagaattatatgatgacttaggttggaccgaagaagtaaaaacctttttacgttacaacgccaacaaagctttaatgaacttaggtatggatcccttatttgcggatacagccaatgatgtgaacccgattgtaatgaatggtatttcgacaggaactagcaaccatgacttcttctcccaagtaggaaatggctatttactaggaacagttgaagccatgaaagatgatgactatctttacggtttagataaatag

SEQ ID NO: 6413 - DNA, 1980 bp, Enterococcus faecalis
  CDS (1)...(1980)
atgaaagaagattttattgaaactgaattcatcgaaaaatattcaatggactttattgaaaaattatatgctttcttagatgaacaacatttccaattcaagtctttcatggcggcttataaattttattctcaatacgctttaaagaacaacgccggaacagagtatttagaaacatatgaagatcgtgttgcctttaatgccttgtattttgcggatggcgatgaagagttggctttaacattggcggatgaaatgatccaccaacggtatcaaccagccacaccttctttcttaaacgctgggcgtaaacgtcgaggtgaattggtttcttgtttcttagttcaagtaacagatgatatgaacagcattgggcgttcaattaattctgcccttcaattatcacgaatcggcggtggcgtaggaattactctttcaaacttacgtgaagcgggcgcaccaatcaaaggttatgatggcgcagcaagtggtgttgtccctgttatgaaattatttgaagatagctttagctactctaaccaactaggtcaacgtcaaggtgctggtgtggtttatctaaacgtcttccatccagatattgaaatgttcttatctgctaaaaaagaaaacgctgatgaaaaaatccgtgtaaaaacgttgtctcttggtgttattgttccagataaattttacgaattaacgcgtaacaacgaagatatgtatttatttagtccttatagtgtggaacgtgaatatggtgtgccttattcctatgtagatatcacaaaagaatatgataacctagtggccaatccaaacatacgtaaacgtaaaattaaagcccgtgacttagaaaatgaaatttctaaattacaacaagaatctggctatccttatatcatcaatattgatacagctaacaaaaacaatccgattgatggcaagattatcatgagtaacttatgttctgaaattcttcaagttcaaacgccttctgttattaatgggaaacaagaatatgaagttttaggaacagatattagttgtaacttaggttcaactaacattgttaatttaatggaaagtcctgactttggaaaatctgtccgcgctatgacgcgtgcgttaacttttgtaacagatgcttctgaaattgatgtcgtgccaactatccaaaatggaaatcgtttaagccatacaatcggactaggcgcaatgggcttacacaccttcttcgctaaaaatcatatggaatacggctctgaagaatcattagactttacagacatttatttcatgttattaaattactggactttaatggaaagtaatcaaattgcgaaagaacgtaaccaagtcttccataattttgaaaaatcagattatgcttctggtgcttacttcgataaatatattgaaggcaactttacaccaaaatttgataaagtgaaagaaatcttcaaagacattcagattccaacggctgaagattgggctgcgttacgcgatgctgtgaaaaaagatggtctttatcatcaaaatcgtttagccgtagcgccaaatggttcaatttcatatattaatgatactagtgccagcattcatccaattactcgcatgattgaagaacgtcaagagaagaaaattggtaagatttactatccagcgccttatttagctaatgatacaatcccttactatacttctgcttacgacatggatatgcgcaaagtgattgatgtctacgcaacagcgcaacaacacgttgatcaaggaatgagtttaaccttgtttatgcgttcagaaatccctgaaggcttgtatgaatggaaagaaacaccaaaacaaacaacccgtgacttgaacattttacgtcattatgcgttcaacaaagggattaaatcaatttactatattcgtacatttacagatgatgctgaagaaattggcagcaatcaatgtgagtcttgcgtgatttaa

SEQ ID NO: 6414 - DNA, 2148 bp, Enterococcus faecalis
  CDS (1)...(2148)
atgcacatgaatgaagacattaaggtgatctttgatagtatctatcgcgacaaagcaacaaataatttaaccattacaggttgggcgttggatacaatcactaaagaaagcccaactttcacaattaataatgaaaaccaagtgtccgcttataacattcagcgcgttttacgtgaagatgttaatcaaatttatcaaacagagcctgcgattgaagctggctttgttgttacacttgaaggaattaaacaaaaaaaagtactcccttttcattttcaatcatcagcacatgttgtaacggtggattttcccttgaataaaaaatatccagtgattccagggacagaagataaagtgactcgtctttggataaaagccaaaaaaggatttaagtatatggctaaaaatggtatttctcataccattcaacgagcgaaaattgagaaactaagaaatcaagcttcgtatcttaactggttagctagaaatgaagtactagacatagaagcgatgacgcaagaaatcgcaacatttcattaccagcctaaaatttccattgcgatgccagtgtataatgttgaagaaaaatggcttcggttgtgcattgattctattttgaatcaagtctatactaactgggaattatgtatggccgatgacgcctcaacagatcctaatgtcaaaaagattttaacagagtaccagcaattggatgagcgaattcgggtcgtctttcgtgaacaaaatggtcatatttccgaagcaaccaactctgctttagcgattgctaccggagaatttgtcgccttactagacaacgatgatgaattagcgatcaatgctttttatgaagtggttaaagtgctgaatgaaaacccagaactggatttaatttatagtgatgaagataagattgacatggatggaaatcgttctgatccagcctttaaaccagattggtcacctgatttacttttaggaaccaattacatttcgcatttaggcgtgtatcgtcggagtattctagaagaaattggcggctttcgaaaaggttacgaaggttctcaagactacgatttagtcttaagatttactgaaaaaacgacaaaagaacgcatcacacatattccaaaagttctttactattggcggatgctgccaacctcaacagcagtggatcagggctccaaaggttatgcttttgaagcggggctaagagccgtgcaagatgcgctcgttcgtcgaggaattaatggtcatgcaacgcatggggcggcgaatggcttatacgatgtttattatgacattgaatctgaaaagttagtctcaattattattccaactaaaaatggctataaagacgtacaacgttgtgtttcatcgattattgaaaaaacaacctaccaaaattacgagattattatggctgataatggaagtacagatccaaaaatgcacgaattatatgcaaaatttgaacaacaattacctggccgctttttcgttgaatcaatcgatattccattcaatttctcaactattaacaatcgtgcagcgaaaaaagcgcacggagagtatttattatttttaaataatgataccgaagtgattacagagaattggttaaccttgatggtttcatttgctcagcaagaacggattggctgtgtaggtgcgaaattattgtatccaaataatacggtccaacacgcaggcgttattttaggattaggtggtgttgctggacatggtcattatggttatccccatggtgacttaggctattttggtcggttagctattaatgttaattattcagcagtaactgccgcatgcttacttatgaaaaaagcagattttgatgcagttggtggttttgaagaagcgtttactgtagctttcaatgatgttgatttatgcctgaaagtccaagctttaggacgtgacaacgtctggcttcatgaagcagagctttatcattttgaatctcaaactcgtggatatgatgataaaggcaaaaagaaaaaacgttttgaacaagaaaaagtgatgatggaagaaaaatggggacctttaattgaaaatgatccattttataatcctaatctgacaagggatattcccaacttttcattacgaattgactag

SEQ ID NO: 6415 - DNA, 1398 bp, Enterococcus faecalis
  CDS (1)...(1398)
atgacatcaaaaagtgaatggagtaatgcaagacgaattgtaattattttagcagacgttttgctctataatttatcaatcatcttagggtttatggtgaaatttggccgagaaattccttcatttaactttgtggcttatgaaaaatctgcaatttacatttcaatcttttttatctttttgaatttgttgttaggtgcgtatattttttataatcgcaaaattagtgacatcatttttgtcacggtgattggtcaaattttaatgactttaacgattatgattgtgacatttgccggacgttggtttacgttcccgcgttctgttttaggatattcctttataatcggaattattgttctaagtctttggcgaattcttgtttattatctttacttaaaggtcagcaatgagcgaaaagttgttttactaggtaaagaaaatcaagttatgcggtcaattcaaaactttatgtctgataaaaataacaagcataaagtaacgagcgttgttgtcagcaattactatgaaaacttaaaaaaaattatcgatgagatcgatattgtttatatttcaagtaatgttgatgagaacgaaaaagtaaaattgtatcaattaattgtcaaacacaagaaaaaaatctttttagatacaagttttgaaaatctaattatgttaaaaccaaacatgatgaactttgaagatgaaagtattatcgaagtctcaaattttgaaatccaaccagaagagaattttattaaacgtttattcgatattttagtctctgtttgcctatttgtgattacctcacccttaatgcttattgcagcgattttagtcaaagcaacctcaccgggaccagtgatttacaaacaaactcggattacattagatcaacgcgagttctcgattttaaaatttagaacgatgtcggcaacagcggaagcaaaatcaggtccagtcttatctacaagtaacgacagtcgcgtcactacagttggtaaatacttgcgcgctttacgtattgatgagttgccacaactaatcaatgttattcgcggggatatgtccattgtcggaccacgtcctgaacgaccattctttgttgatcaatttaatcaggaaaacccgaattactatttacgtcacaatgtacgtgcggggattactggctatgcccaagtttatgggaagtatgcttctgactacaatagtaaattgaactttgatttactgtacatcaagaattattcattgctattggatatgaaaatcctgcttcaaaccatcaaaattctctttgataaagtatcatcaagaggattggatgagtctgaagaacgtgaaacgattacttgttcttatttaaaagaacgaaatataaagttattgaaatga

SEQ ID NO: 6416 - DNA, 405 bp, Enterococcus faecalis
  CDS (1)...(405)
atgagacagataataacatatggtaccttcgatttgttacattatggacatattaatcttttaagaagagcgaaagacagaggagactatttaatcgttggactatctacagatgaatttaattgggatgaaaaaggaaagaaaacctatttttcttttgataagaggaaaaaattattagaagctatcagatatgtagatttagttattccggaaaatagctggcaacaaaagattcaagatattaaagaatttcatgtcgctgaatttgtgataggtgatgattggtcagggaaatttgactttatcgctaatgaaactaatgcggaggttatttatttaccaagaacacctgaaatatcaacaactcagataaaaaaagatttagaaaataaaacattttaa

SEQ ID NO: 6417 - DNA, 1356 bp, Enterococcus faecalis
  CDS (1)...(1356)
atggggatcagaccgatgacaagaaaagccaaaacggcagaagagattaaacatattgcagaagaagaaaacgtacgttttttacgactaatgtttaccgacattatgggaacaattaaaaatgttgaagttcctgtgagtcagctagataaagtattagataataaaatgatgtttgatgggtcatccatcgaaggattcgttcgtatcgaagaaagtgacatgtatttataccctgatctatctacatggatgatttttccgtgggaaagcgaccatggaaaagttgcgcgcttaatttgcgatatttacaatcctgatggtaccccttttgccggagatccccgcggtaatttaaaacgtgccttagcagatatgaaagaattaggttttacttcttttaacttaggaccagaaccagaatttttcctatttaaattagatgagaatggtgaaattaccactgatttgaatgataaaggtggctattttgattttgcgccaaccgatttaggtgaaaattgtcgccgtgatattgttttagagttagaaagtttaggctttgaagtggaagcttcgcatcatgaagtagcacctggtcaacatgaaattgactttaaatatgcggatgtagttgatgcttgtgacaatattcaaacgtttaagttagttgtgaaaactattgcacgcaaacatggtttgcatgcaacatttatgccaaaacctttgtttggaattaatggttctggtatgcactgcaatatgtcattatttaatgaagaaggtaatgttttttatgacgagtcaggagagatgggcttaagccaaactgcttatcatttcttaggtggtttattaaaacatgcccgtgcctatactgcggtatgtaacccaacagtgaactcttataaacgcttggtaccaggttatgaagcacctgtttatgtagcttggagcggcagaaatcgttcaccactcattcgagttcctgaatctcgtggtttatcgactcgtttagaattacgttctgtcgatccttcagcgaatccgtatttaacaatggcagtcttattacaagctggtttggatggtattcgtaatgaacttacgccaccgccagcagttgatcgtaatatttatgtgatgaatgaggaagaacgtcaacatgcacaaattgaagatttgccatcaaccttacacaatgccatcaaagaattacgtaaagatcaagtaatgattgatgcattaggtcgtcatatttttgccaattttgtagaagcgaaacgaatggaatgggcagccttccgtcaaaccgtttctgaatgggaaagagaacaatatttggagttgtactaa

SEQ ID NO: 6418 - DNA, 753 bp, Enterococcus faecalis
  CDS (1)...(753)
atgtttttacaaaataagaatgtcgtcgtaatgggtgttgccaacaaaaaaagtattgcttggggctgtgcaaaagcattaaaagatcaaggggccaatgttatttatacgtatcaaaacgaacgcatgaaaaagcaaatggttaaattagcagatgaaaatgatttgttggtggagtgcgatgttgcttctgatgcgtccattcaagcagcctttgaaacaattaaaaatgaagtgggcacgatcgatggactagtccatgcgattgcttttgccaaaaaagaagaattgtctggaaatgttagtgacatcactcgtgatggtttcctattagcacaagatattagtagctactctcttttagcagtcactcattatgcgaaacctttgttaaatcctggttcaggaattgtcacattgacgtatttaggttccgaacgtgcgattcctaactataatatgatggggattgctaaagcatctttagaaactgccgtcaaatatttagcttttgaattagctgcagataaaattcgtgtcaacggaatctccgcaggagcgattaaaacattggctgtgactggtgtaaaagactacgatcaattgattagtatttctaatgagcggacaccagataaaacaggtgtaaccattgaagaagtcggaaacacttgtgcctttttagtcagtgaactagctagtggtgtggtcggtgacatcatttatgtcgataaaggcgttcacttaacttaa

SEQ ID NO: 6419 - DNA, 1239 bp, Enterococcus faecalis
  CDS (1)...(1239)
atgaaaagagtggtcataaccggcatgggtgccgtaacaccattaggcaataccgtaaaagaattttggcataatctagtggatggcaaactaggaattggcaaaattactaaatttgattctgaagatactggggtagctttggctggcgaagtgaaagagtttgacccaagtgctgttttagaacgcaaagagcaaaaaagaatggacttattttctcaatatggcttggtcgctgctttagaagcgtgggaaatgagtggtttaacagaagcaacgattgacccgactcgtttaggtgtgattgtcggtagtgggattggcgggatgactaccttacaagaccaagtacgggtaatggataaaaaaggcgcaaaacgcgtaacaccatttttcgtgcccatggtaattgctaatatggcagcgggaaatatttcgattcgtctaggtgcaaaaggaccttctcaaactatcgtgactgcttgtgcttctgcgacgaatgcgattggtgaagcttttcgcacgattaaatatggtttagcggacatgatggtaactggggggacagaagccacagtatgtgaaattgggattgcaggctttgcagcattgaatgctttaaatacaacagaagatgcgactcgggcttcgattccttttgataaagaacgaaaaggttttgtgatgggtgaaggcgcaggaatgctggttttagaagaactcgagcatgcacagaaacgtggcgcaactatctacggcgaaattgttggctatggcagcaactgtgatgctagccacatgaccgctcctttaaaagacggtagtggcgcggcggctgcgatggaaatggcgattgcagaagcagggattacaccggaacaaattgggtatatcaatgctcatggtacgtcaaccccggcgaatgacgctgcggaaacaacggccatcaaacgtgtctttggtgagcgagcatcgcaaattccaatttcaagtacaaagagtatgactggacatttattgggcgcggctggcggtatcgaagcgattgcttgtgtacaaacattgcaagaaggaaaagctcatccgacagtaggctaccaagttgctgatccagattgtgatttagattatgtcacagaaggtgcacgtgacattacagcggactatacaattagtaattcgtttggctttggtggccataatggtgtaatttgcttgaagaaatgggaggaaaactag

SEQ ID NO: 6420 - DNA, 435 bp, Enterococcus faecalis
  CDS (1)...(435)
atgaaaaaagtaatgactgcaacagaaattatggaaatgattcctaatcgctatccgatttgttatattgattatgtggatgaaattattccaaatgaaaagattattgcaacaaaaaatgtaacaattaacgaagaatttttccaaggacatttccctggaaatccaacaatgccaggcgttttgattattgaagcattggcacaagtaggttcgattttaatcttaaaaatggatcaatttgaaggtgaaacagcctatattggcggtatcaacaaagccaaattccgtcaaaaagtggtccctggtgatgtcttgaaattacattttgaaatcgtcaaattacgtgactttgtcggcatcggcaaagcgactgcttacgtggaagataaaaaggtctgcgaatgtgaattgacgtttattgtgggacgataa

SEQ ID NO: 6421 - DNA, 1185 bp, Enterococcus faecalis
  CDS (1)...(1185)
gtgaccgttatttatcaaaaaatatttattcttaggaggaaaacttttatgaaattcaataccaaattaattcatggcggcattagtaaagatacaacaacaggtgcagtgagtgttcctatttatcaaacatcaacctttgaacaaaatggcgtgggccagccaaaagaatatgaatattctcgttcaggtaatcccacacgtcacgcgttagaaaccttaatcgctgagttagaaggtgggagccatggctttgcgtttagctcaggcttagctggtattcatgcaatcatttctatgtttggacccgaagatcatattttattaggtgacgatgtctatggggggagtttccgtttattggataaagtatttgtagcaaatgggttaagctacacgattgtaaacgccagcgacttatcaacaattgaagccgcaattcagccaaatacaaaagccttgtttttggaaacaccaagtaatccactgttaaaaattacagatattgaagcggcggctaagcttgctaaaaaacatcagttgttaactattgtcgataatacatttgcgacgccttattttcaacggccgttagcgttaggtgctgatattgtcgttcacagcgggacaaaatatttagggggccatagtgatgtagtctctggtttggtcgtaacgaatcatccagaaagcgcagaaaagattgcctttttacaaaatgcgattggtgctgttttaggaccacatgatagttggctggtccaacgtagtttaaaaacattaggcgtccggatggcagcacatgcccaaaatgctcaaaaaatcgcagaatttttagaagcgcatccagcggtagcaacggtgtattatccaggactagcgagtcatcctggtcacgaaattgcgcaaaaacagatgtcgggatttagtggcatgatttcttttgaattagccaaggatgagcaagtcgttcctttcgtagaagcgttggaaatttttactttagcggaaagtttaggtggcgtagaaagtttaattgaagtacctgccattatgactcacgcatctattcccaaagaaaatcgtgaagctgtgggaattaaagatggactcattcgtttatctgtaggaattgaagcagtcgaagatttattggctgatttagaaaagggattacaagcataa

SEQ ID NO: 6422 - DNA, 1431 bp, Enterococcus faecalis
  CDS (1)...(1431)
atgtcaattttgaaaaatgattttctttggggcggcgctgttgctgctcatcaattagaaggaggctgggaccaaggcggtaaaggggtgagcgtggcggatgtaatgactgccggtgcacatggcgtccctcgtaaaattaccgcaggcgttttaccggatgaacactatcctaaccatgaagcgattgatttttaccatcgctatcaagaagatattcaactattcaaagaacttggtttaaattgtttccgaacctctattgcttggacacgaatttttcctaacggagatgaagaaacgcccaatgaagaaggtctccgtttttatgatgcactttttgacgagtgtttgaaaaatggtattgagccagtcgtgacactgtctcactttgaaatgccttatcatttagtcacaaaatatggcggctttcgcaatcgccaggtcattgatttttttgtcaaatttgctgaagtctgtttcactcgttaccagaaaaaagtcaaatattggatgacctttaacgaaattaacaaccaagccaattatgaagaagattttgcaccttttactaactctggtattgcttaccaggaaggagaagaccgcgaagcaattatgtatcaggctgctcattatgaactagtcgctagcgcacgtgcagtgaaaattggccacgctatcaatcccgacttccaaattggctgtatgattgcgatggtgcctatttatccttattcttgtaatcctgagaatatgatgatgagtgttagcgcaatgcaaaaacgttattggtttaccgatgttcatgtccgcggtcattatccaagtgcaattcaatgctatttgaaacgaaaaaacatttcattagatgtcacaaaagaagatttaactgatttagctaatggctgtgttgattatattggctttagctattacatgtcgtttgctgtaaaaggtgcagaaaaggcccctacttttgactacaatgaagcaaaagacttggtgcgaaatccttatgtagcaacatctgattggggttggcaaatcgatcctatgggcttacgctatgcaatgaattggttcaatgatcggtatgaattaccactttttattgtcgaaaatggctttggtgctattgatgagttagaaccagacggaacgattaacgacacttaccgaatcgcttatttacgtgaacatattgagatgatgaaagaagccgttgcgtatgacggcattgatttgatgggctacacaccttggggattcatcgatttagtgagcgctagtacaggcgaaatgaagaaacggtatggcttcatttatgtagataaagacaacgatggtcacggaacgttggagcggcgaaagaaaaaatcgtttgcttggtatcaacaagtgattgctacgaatggggaagaattataa

SEQ ID NO: 6423 - DNA, 2496 bp, Enterococcus faecalis
  CDS (1)...(2496)
gtgaaaaaaatggaaagtaaaacgtttgatattgaagggatgagctgtgcttcctgtgcccaaacgattgaaaaggctacggcgaagttacctgggatggcaaaggcaagtgtcaatttagctacggaaaaattaagtgtcacgtatgatcagacggaagtcacagaagaagaaattaaggaagctgtgtcagatgctggctacaaggcgattagcccagcccagcaacgaacgtttgcgattgaaggaatgagttgtgcttcctgtgcccaaacgattgaaaaagctgtgaaccaattatctggtgttcaacaagcgattgttaatttagccacggaaaaactggtggttagttatgacgaccatcaagtaacgagtgctgaaattatcaaagcagttatggatgcaggttatcaagcgacagaagaagtcgctgcaggtgcaacagcggaccaagatcgtgaaaagaaacaaaaacatattgctgagatgtggcaacgtttttggatctcagcggtgtttacagtgccccttctttatattgcgatgggacatatggtaggcttaccattgccggattttttgaatccaatgacacatgcgacgacctttgcaatggttcaattgattttgacgttacccgtcctatatgtcggcagagaatttttcacagtcggttttaaagcattatttaaagggcatccgaatatgttttctttggtagctttaggaaccagtgctgcttttgtgtatagtttatatggcacagtcatgatattcttaggagatacaagttttacaatggctctttattatgaatcagcgggtgttattttaactttaattacattaggaaaatatttcgaagctgtttcaaaagggaaaacctcagatgcgataaaaaaattaatgggtttagcaccgaaaactgcccatattttacgtgatggcgcagaaattgaagtgccagttgatgctgttcagttggatgacattgtgattgttcgcccaggagataaaatccctgttgatggagtgattgtttcaggcagtagttctgtggatgaagccatgttaacgggcgaaagtttgcctgttgaaaagaaagtcggtgatgcagtaattggtgctagcatcaataaaaatggcagctttcaattcaaggcgacaaaagtgggaaaagagacggcccttgcccaaatcattcaattagtggaagatgcgcaaggctcaaaagcgccgattgcacaattagctgataaaatttcgggtgtttttgtcccaatcgttattggtttggctgttctttctggcttggcttggttctttttaggacaagagtcatggattttcgctttgacaattaccatttctgtgttagtgattgcttgtccttgtgcgctcggcttggcaacgccgactgcgattatggtggggacaggtaagggcgctgaaaatggcgttttaattaaaagtggggatgctttagaaaccactcacaaaattcaaacaatcgtgtttgataaaacaggaactattacagaaggcaaaccggtggttacggatattttagttgctgattcagcactttcagaagctgagttactaacattagcagcttctgcagaacaaggatcagaacaccccctaggtgaagcaattgtgggagcggctaaagaacgtcaattgtcattagcagaaggaagcgatttttcagcgattccaggtcacggcatccgtgtgacagtcaacgaacgagtcctacttttgggcaatataaaattaatgaaagaagaagcaatcgagctatcaacgtttgttcaacaagcggatcgtttggcagaagaagggaaaaccccaatgtttgtggcaaaagatggttcgtttgcgggtatcattgcggtagcagatactgtgaaggatagcagtcaaacagccattgcacgtttgcataaaatggggatcgaagccgtgatgattacgggagacaacaaacgtactgccgaggcgattgcaaaacaagtaggtatcgatcgtgtcttaagtgaagttttaccagaagataaagcgttagaagtgaaaaaactacaagcagaaggcaaaaaagttgcgatggtgggtgacggtattaatgatgcaccagcacttgcccaagcagatgtggggattgctattggttcaggcacagatgttgcaatggaatcggccgacattgtgctaatgcgtagtgatttaatggatgtgcctacagcagttgaattaagtaaagcgaccatcaaaaacatcaaagaaaatcttttctgggcatttgcctataatacattaggtattccagtggctatgggtgtgttacacttatttggtggacctttgttaagtccgatgattgcagcagcagctatgagttttagttcagtctctgtcttactaaacgccttacgcttaaaaggatttaaaccttcgacggtgaaaaaaactagtggaagtcaaaaataa

SEQ ID NO: 6424 - DNA, 390 bp, Enterococcus faecalis
  CDS (1)...(390)
atgcttttagaaatagatgaacaaagcgaacagcccatctatcagcaactcattgatcaaatcattgtaggcattgccaaaggtgaactggttcccagtgaaagtttgccttctatccgacaattggcggacgaaatcggggtcaatatgatgactgtttcaaaagcttataataagttaaagcaatcaggttatattgtgactgaccgtcgtaacggcaccaaaattgccgcaaagttacctgctaccgctgtttggcaacagcaattgcatgagcgtttagaacttctgttggctgaaagttttttacatcagcaatccgaagcagaaatccaagcacttattcagaaaatttatcaaaattttgattcgaaagggcgtgcattataa

SEQ ID NO: 6425 - DNA, 621 bp, Enterococcus faecalis
  CDS (1)...(621)
atgattcattacaatagtaacgagttatctgcaaaaacagcgtataaatttttatcaggaagtattattcctcggccaatcgcttgggttacaacacaagatacagctacaggtgtcgtcaacgctgctccctttagtttctttaatgcggcggcagctgaaattcctttagcaacgttatccattttacgaccagacaaagcgcctaaagatacggcacgaaacatcttggctactaaagaacttgtcatccatttcgttaacgaagacgttcttactcaaatgaatcagacttcggcacctttagcagcagagatcagtgaaattgacacatttggtattgaaaccattgccagccagactgttgctgttccagcaatcaaagccgcgccgattcggatggaagctcgcttacatcaatatgtacctattgctaaccatgaaggtcaaattattacggatttattcattgtagaaattaccgatttctattttgattcagccgtttttgatgaagaacatcagtacattttacctgaaaaactccaaccgattgctcgtttagcaggcaatgattatacaacattgggcgaaatccgtgaagttcgccgcccaacgtaa

SEQ ID NO: 6426 - DNA, 213 bp, Enterococcus faecalis
  CDS (1)...(213)
gtgaggaaatgggtggtgaatcgaatgaaggttaaagaaatcagagaattaaccactgccgaaatgctagataaagaaaaacaattaaaagaagaattgttcaacttaagattccaattagcaacaggtcaattagaaaacactgcacgtattaaagaagtacgtcaatcgattgcacgcatcaaaacagtattgcgtgaacaagctaactaa

SEQ ID NO: 6427 - DNA, 288 bp, Enterococcus faecalis
  CDS (1)...(288)
gtggaaggaggccaaacgcgtatgactgaagaaagaaatcaacgtaaagtttaccaaggtcgcgtggtatcagacaaaatggataaaacaatcacagttgtcgttgaaacaaagaaaaaccaccctatctatggcaaacgtatgaaatattctaaaaaatataaagcgcatgatgaaaacaacacagcgaaagttggagacatcgtaaaaatcatggaaactcgtccattatcagctacaaaacgtttccgtttactagaggtagtcgaagaagcagttattatctaa

SEQ ID NO: 6428 - DNA, 369 bp, Enterococcus faecalis
  CDS (1)...(369)
gtgatccaacaagaaagtcgtttaagagtcgctgacaattctggcgcacgtgaaattttaacgatcaaagtcctaggcggatctggtcgtaaaactgctaacatcggtgacgttattgttgctactgtcaaacaagcaacgccaggtggggttgttaaaaaaggtgaagtagttaaagccgttatcgttcgtacaaaatctggcgctcgtcgtgctgacggttcttacatcaaatttgatgaaaatgctgcggtaattatccgtgacgataaaagcccacgcggaacacgtatcttcggaccagttgcacgtgaattacgtgaaaacaacttcatgaagatcgtttctctagcaccagaagtattataa

SEQ ID NO: 6429 - DNA, 312 bp, Enterococcus faecalis
  CDS (1)...(312)
atgtttgttaaaaaaggcgataaagtaaaagttatcactggtaaagataaaaacaaagaaggcgttgtcttagcagcgtttcctaaacaagataaagttatcgttgaaggtgtcaacgtcgttaaaaaacaccaaaaaccaaaccaagcagccccacaaggtggaatccttgaagtggaagcgccaattcatgtttctaatgtaatggtgattgatccttcaaacggagaagctactaaagttgcgtttaaagaagtcgacggcaaaaaagtccgcgtttctaaaaaaacaggtgaagttttagataaataa

SEQ ID NO: 6430 - DNA, 540 bp, Enterococcus faecalis
  CDS (1)...(540)
atgaaccgcctgaaagaaaaatatattaaagaagtaacaccatcattggtggaaaaatttaattacagctcagttatgcaaacacctaaagttgataaaatcgttatcaacatgggtgtgggtgatgcagtatcaaatgctaaaaacttagacaaagctgttgaagaattagcattaatcactggtcaaaaaccacttatcacaaaagctaaaaaatctatcgctggattccgtttacgtgaaggaatgccaatcggtgcgaaagtaacgctacgcggcgaaagaatgtacgaatttttagataaattagtaacagtttctttacctcgtgtacgtgacttccacggtgtcagcaaaaaagctttcgatggtcgtggtaactatactttaggtattaaagaacaattaatcttcccagaagttgattatgatttagtagataaagtacgcggtatggacatcgtaattgttacaacagcgaacactgacgaagagtctcgcgaattgttggcacaattaggtatgccattccaaaaataa

SEQ ID NO: 6431 - DNA, 399 bp, Enterococcus faecalis
  CDS (1)...(399)
atggtcatgacagatccaattgcagattttctaactcgcattcgtaatgcgaacatggttaaacatgaaactttagaagtacctgcttcaaaaatcaaacgtgatatcgcagaaatcctgaaacgtgaaggatttatccgcgacgtagaatacatcgaagatgacaaacaaggcgtaatccgtgttttcctaaaatatggtaaaaacgaagagcgtgttatcacaaacttaaaacgtatttctaaaccaggtttacgtgcatacgtaaaagctgacgaagtaccaaaagtattaaacggtctaggaattgcaatcatctctacatcagagggtgtaattactgacaaagaagctagagcgaaaaatatcggcggcgaagtaatcgcctacgtatggtaa

SEQ ID NO: 6432 - DNA, 537 bp, Enterococcus faecalis
  CDS (1)...(537)
gtgagccgtattggtaataaagttgttgttcttcctgctggtgttgaaatcaagcaagacggaaacaacattacagttaaaggacctaaaggtgaattaacacgcgaattttcttctgatatcaaaatgaacatcgaaggaaacgaagtgacattcactcgtccaaacgattcaaaagaaatgaaaacaatccacggaacaactcgtgcaaacttcaacaacatggttgttggtgtttctgaaggtttccaaaaagcacttgaacttatcggggtcggataccgtgcccaagtacaaggcaacaaattaactttaaacgttggttattctcatcctgtcgaaatgacagcaccagaaggcgtaacatttgaagtacctgcgaacacacaagttatcgttaaaggcatcaacaaagaagttgttggtgaattagctgctaacatccgtggcgttcgtcctccagaaccttataaaggcaaagggattcgctatgttggtgaatttgtacgccgtaaagaaggtaaaactggtaaataa

SEQ ID NO: 6433 - DNA, 366 bp, Enterococcus faecalis
  CDS (1)...(366)
gtgaaaattgtgattacaaaaccagataaaaacaaaacacgtcaaaagagacatcgtcgtgtacgtaacaaaatctctggtactgctgagtgcccacgcttgaacattttccgttctaacaaaaacatctacgcgcaagtcattgatgacgtagcgggtgtgacgctagcaagtgcctctgccttggataaagaaatttcaggtggaacaaaaacagaaacagctgcagctgttggtaaactagttgctgaacgtgccgctgaaaaaggcatcaaaaaagtagtcttcgaccgtggtggatacctttaccatggccgcgtgcaagctttagctgaagctgctcgtgaaaatggactagaattttag

SEQ ID NO: 6434 - DNA, 501 bp, Enterococcus faecalis
  CDS (1)...(501)
atggtttatattgatccaaaacatttggaattagaagaccgcgttgtagcgatcaaccgtgtaacaaaagttgttaaaggtggacgtcgtttacgtttcgcagctttagttgttgtcggtgacaaaaacggacacgttggtttcggtactggtaaagcacaagaagtacctgaagctatccgtaaagcaatcgaagacgcgaagaaaaacttagttgaagtgcctatggttggttctactatcccgcacgaagtaattggcgtattcggtggcggccgtatccttatgaaacctgcagtagaaggttctggggtagctgctggtggaccagttcgtgccgtattggaattagctggtgtagcagatattacatctaaatcactaggttcaaacacacctattaacgttgttcgcgcaactgttgaaggtctaaaacaattaaaacgtgccgaagaagtggcagcacttcgcggtaaatctgtagaagaaattatcggttaa

SEQ ID NO: 6435 - DNA, 180 bp, Enterococcus faecalis
  CDS (1)...(180)
atggctgaattaaaaattactttaaaacgcagtgttatcggacgtcctcaaaaccaacgtgctacagttaaagcgttaggtttaggtaaagtgaatagtactgttacaaaacctgccaatgaagcaatcaaaggtatggttaacactatctcacatttagtggacgtagaagaagtttaa

SEQ ID NO: 6436 - DNA, 234 bp, Enterococcus faecalis
  CDS (1)...(234)
gtggaaccagcaaaaagacttgaagctaacgtatcaggtccgattccattaccaccagaacgctcactttacacagttattcgtgcgactcataaatccaaagattctcgcaaacaattcgaaatgcgtactcacaaacgtctaattgacattgtgaacccaacaccaaaaacagttgacgctctaatgaagcttgccttacggtcgggtgttaatattgaaatcaaactataa

SEQ ID NO: 6437 - DNA, 441 bp, Enterococcus faecalis
  CDS (1)...(441)
atgaaacttcatgaattaaaacctgctgagggctcacgccaagtacgtaaccgtgttggacgtggtacttcatctggtaatggtaaaacagctggccgtggacaaaaagggcaaaaagcccgttcaggcggtggtgttcgtttaggatttgaagggggtcaaactccattattccgtcgtttaccaaaacgtgggtttacaaacattaatcgtaaagattacgctgttgtgaacttagatactttaaaccgttttgaagatggaacagaagtaactcctgttgtcctaaaagaagcaggaatcgttaaaaacgaaaaagcgggaatcaaagttcttgcagatggtgagttaacgaaaaaattaactgtgaaagcagctaaattctcgaaatcagcacaagaagctatcgaagctgctggtggttcaatcgaggtgatctaa

SEQ ID NO: 6438 - DNA, 1194 bp, Enterococcus faecalis
  CDS (1)...(1194)
gtgcccggggtgaatgcaaagggattgtctgatttaagtagcttaccctttttgaatatgttgaatatggtgagtggtagtgccatgcaaaacttctctatcttctcgatgggggtttcgccatacattacagcctctattattattcaactattgcaaatggatattgtacctagatttgtagaatggtcaaaacaaggggaagttgggcgtaagaaattaaatcaagctacaagatatctaacgattgtcttgggtgtggctcagtcaatggggatcactgctggttttaatagcttaagtcaaactgggattgtaaacaatccaaccttaggtacctttgtgatgattgcagttattttaactgctgggacgatgtttgtgacttggatgggtgaacaaattacagaaaaaggaatcggaaatggtgtttcaatgattatctttgccgggattatttctcgtttgccaggagcagtcaaagaaatctatgaagattacttcgtcaatatcgagtcttctcgtatttggcaatctgttattttcattgcaatcttagttattgctattttggtgattgttacagtcgtaacgttcttccaacaagcagagcgtaagattccaatccaatatacaaaacgtgtttctggtgcaccaacaagtagttatttaccgttaaaagtaaatgctgctggggttattccagttatctttgccagctcgttaattgcaacaccaaatgccattttacaagctttctcatcaaaattcgctggtgaaaattggtatgacattatgacaaaaatcttcagttataacacagttccaggggcaatcatctatactgtcctaatcgttgcgtttacgttcttctatgcatttgttcaagtaaaccctgagaaattagcggaaaacttacaaaaacaaggaagctacattccaagcgtgcgaccaggtaaaggtacagaagaatatgtatctggcgtgttaatgagattaagtgttgtcggctcaattttcctaggacttgttgctttacttccaatcattgcgcaaatggtttggaacttacctcaatcaatcggtttaggtggaacaagtttactaatcgttatcggggttgcattagaaacaacgaaacaattagaaggattaatgatgaaacgtcaatatgtcggctttatcaataagtaa

SEQ ID NO: 6439 - DNA, 696 bp, Enterococcus faecalis
  CDS (1)...(696)
atggctagcttcataagccggtctttaaaattaggaggagaatatatgaacctcattttaatgggattacctggagcaggtaaaggcacccaagcagaaaaaatcattgatacgtatggcattccacatatttctactggagatatgttccgtgcagcaatgaaaaatgaaactgccttgggcctagaagcgaaatcttatatcgataaaggtgaactggttcctgacgaagtaacaaacggaattgttaaagaacgccttgctgaaccagacacagacaaaggattcctattagatggtttcccacgtacactggatcaagcaaaagcattagatacaatgcttaaagaattaaacaaaaaaattgatgctgtcattgacatccatgtagaagaagatgtattaatcgagcgtttagctggacgattcatctgtcgcacatgtggcgcaacgtatcataaattattcaacccgccaaaagttgaaggcacttgtgatcgctgtggcggacatgaattctaccaaagagaagatgataagcccgaaacggttaaaaatcgtttggcagtcaacattgaaagtagcgcaccaatcttagctttctataaagaacaaggcttgatgcatacaatcgatggcaatcgcgaaatcgatactgttttttctgatgtgaaaaaaatcattgacgaaaactaa

SEQ ID NO: 6440 - DNA, 255 bp, Enterococcus faecalis
  CDS (1)...(255)
gtgaaaacgcgaaacaagtacaaggaggtactgtgcgtggcaaaagaagatatgattgaagtcgaaggtacagtcgtcgaaactttgccgaatgcaatgtttaaagtcgaactagaaaatggacaccaagttcttgctactgtttcaggtaaaatccgtatgcactacatccgtatcttacctggtgacaaagtaacagttgaattatcaccgtatgatttaacgcgtggccgtattacttatcgctttaaataa

SEQ ID NO: 6441 - DNA, 117 bp, Enterococcus faecalis
  CDS (1)...(117)
atgaaagtaagaccatcagtaaaaccaatgtgtgaacattgtaaagtaattcgccgtaaaggacgtgttatggttatttgcccagcaaatccaaaacataaacaacgtcaaggataa

SEQ ID NO: 6442 - DNA, 366 bp, Enterococcus faecalis
  CDS (1)...(366)
atggctcgtattgcaggagtagacatccctcgtgacaaacgtgtagtagtttctcttacttacatttatggtattggtaacactacagctaaaaaagttttagcaaacgttggcgtatctgaagatgttcgtgtacgtgatttaacaaacgaacaaacagatgcgattcgtgcggaaattgataagttaaaagttgaaggggatcttcgtcgtgaagtgaacttaaacatcaaacgcttgatggaaatcggttcataccgtggaatccgtcaccgtcgtggattaccaactcgtggacaaaacacgaaaaataatgcacgtactcgtaaaggccctactaaaacagtagcaggcaagaaaaaataa

SEQ ID NO: 6443 - DNA, 390 bp, Enterococcus faecalis
  CDS (1)...(390)
atggcagcaaaaaaagttagtcgtaaacgccgtgtcaaaaagaatatagaatcaggtgtagcacatatccattctacattcaacaatacaatcgtaatgattactgatacacatggtaatgcattagcatggtcatcagcaggatcattaggctttaaaggaagcaaaaaatcaactccttttgccgctcaaatggctgcagaagccgcaactaaagtggcaatggaacatggacttaaaactgtagacgtaacagttaaaggacctggttctggacgtgaagcagcaattcgttcattacaagcaacaggtttagaagtgactgcaattcgtgacgtgactccagttcctcataatggatgccgccctccaaaacgccgtcgtgtttaa

SEQ ID NO: 6444 - DNA, 939 bp, Enterococcus faecalis
  CDS (1)...(939)
atgattgaatttgaaaaaccaagaatcgaaaaaattgatgaaaatagagattatggtaagttcgtcgttgaaccattagaacgcggttacggaactactttaggtaactctctacgtcgtattttattgtcttctttaccaggagctgcaattacgaatattcaaatcgatggtgttttacacgaattctcaaccattccaggtgtacgagaagacgtaacacaaattattttgaatattaaaggcttagcattgaaattatatgctgaagaagagaaaacccttgagatcgatattacaggacccgctaccgtgactgccggcgatattatcgtggacagtgatgttgagatcctaaataaagatttagttatctgtagtgttgctgaaggagctactttccatgctcgcttaacagtgaaacctggtcgtggctatgttcaagcagacgaaaacaaaaaagaagatatgccaatcggtgtacttccagttgattccatctacacacccgttcgtcgtgttaactaccaagtagaaaatacacgtgttggtcgtcgtgatgatttcgacaaattaacaatggaaatatggacagatggttcaatcattcctcaagaagcactaagtttagctgcgaaaatcatgactgagcatttagatatctttgtaaaccttactgacgaagcgaaaaacgctgaaatcatggtggaaaaagaagaaactcaaaaagagaaaatgctagaaatgacgattgaagaacttgatttatcagttcgttcatataactgtttaaaacgtgcaggcattaatactgtacaagaacttacaaacaaatctgaaccagaaatgatcaaagtacgtaatttaggtcgtaaatctcttgaagaagtaaaacttaaattgcatgatctaggattaggattacgtaaggacgattaa

SEQ ID NO: 6445 - DNA, 384 bp, Enterococcus faecalis
  CDS (1)...(384)
gtgagttaccgtaaattaggacgcacatcaagccaacgtaaagctatgctacgtgatattacaactgatttaatcatcaacgaacgcatcgtaactactgaagctcgtgcgaaagaagtacgttcaactgtagaaaaaatgattactttaggtaaacgtggagatcttcatgcacgtcgtcaagcagctactttcgttcgtaatgaagttgctagtgttcgtgaagaagatgagtctatcgttgttgaatcagctttacaaaagctatttaacgatttaggacctcgtttcgcggaacgccaaggtggttacactcgtatcttgaagacagaaccaagacgcggcgatgcagcaccaatggtagttatcgaatttgttaaataa

SEQ ID NO: 6446 - DNA, 234 bp, Enterococcus faecalis
  CDS (1)...(234)
atgtctcatggttctcgttatcaccgtcgtcctgggtcaatgggtccagtagcgcctaaccgtgtatttaaaaataaacgactagccggccgtatgggtggcgaccgcgtaacaattcaaaaccttgaagttgttaaagtggacgtagaaagaaatgttatcttaatcaaaggaaacattcctggagcgaaaaaatctttaatcacaatcaaatcagctgtgaaagctaaataa

SEQ ID NO: 6447 - DNA, 876 bp, Enterococcus faecalis
  CDS (1)...(876)
gtgttagaaagaataaatagattgagggagtacgcgatgcaaccaatcattgaactaaataatatccaatttaattatcaaccagaagatgcttctcccgctttaaaagatgtgtctttttccattcaacaaggcgaatgggtcgctattattggccataatggttctggtaaatcaacgttagccaaaacgatcaatgggctgttactgccagctgctgggactatcaaagttggcggcaaagaattaaatgaagcaaacgtctgggatatccggcgtatggtaggaatggtctttcagaatccagataaccaatttgtcggttcaacagtcgaagacgatgtggcttttggtttagaaaatcaaggtattccgcgtgatgaaatggtcgaacgtgttcacgatgcattagaacgggttcgtatgttagattttgccaagcgagaacctgctcggctatctggcggccaaaaacaacgagtagctatcgctggtgtggttgctttgcgaccagatattattattttagacgaagcgacaagtatgttagatccagaaggtcgtgcagaagtaattgctaccattcaaaagattaaagaagaaagcaatttaacagttatttctattacccacgatattgatgaagcggctaatgcgaatcgtattttagtgatgcgccaaggacaattgacaaacgagggaacaccagaaaagattttttctgcaggagaagcgcttgttgaaatgggcttggatttaccgtttcctgaaaaattaaaagtagctttgaaagagcgtggcgttgttgtgccaacgaattatttaacagaagaagggatggtggattggttatggacatccgttttaaacaagtag

SEQ ID NO: 6448 - DNA, 870 bp, Enterococcus faecalis
  CDS (1)...(870)
atggacatccgttttaaacaagtagattttacttaccaacccaatactccttttgagcaacgggcattattcgatattaatttaacgattcaagacggctcttatacagcgattgtcggacatactggcagtggcaaatcaacgctattgcaacatttaaatgctttggtgaaaccaactaaaggccaagtgacaattggagagcgtgtgattacgccagaaactgataataagaatttaaaaccaattcgtaaaaaagttgggatcgtttttcaatttccagaagcacaattgtttgaagaaacagtggagcgagacatcgctttcggaccgaaaaactttggtgtttcagacgaagaagcgaaaaaattagctaagaaaatgcttgatttagtcggcttagatgaaaaatacttacaacactctccgtttgagttatcaggtggtcaaatgcgccgtgtcgcaattgctggtgtgctagcgatggaaccagaagtcttagtattagacgaaccgactgctggtttggatcctaagggtcgtaaagaaatgatggagatgtttagtcgtctgcataaggaacataatatgaccatcgttttagtgacacatttgatggatgacgtggctaattacgcagatcatgtgattgttttagaaaaaggacaaatcgtccgagcgggagcaccacaagaagtgtttcaagagacacaatggctgaaagaaaaacaattaggcgtgccaactgcagccgaatttgctgaaaaattagtggcaaaaggcttttcttttgagcaattaccattaacggccgatcaattagccgatcagcttctgaaaaaaatgcaggaagcaggtgaggcaaaatga

SEQ ID NO: 6449 - DNA, 558 bp, Enterococcus faecalis
  CDS (1)...(558)
gtggctcttcaaaccttgtttacacaagggggggaagtgtactttcagtggggaattatttccattacccagtttggtgtgacgaatgggctatttattttctgtcgttttgttttaattattttcatgtcaacgttattaactttaacgacggcaccattagagttatcagatgcgattgaatatttgctacgtccacttcgtgtggtgaaatttccagttcatgaagtttcattgatgttatcaattgccttacgttttgtcccaacattaatggatgaaacggaaaagattatgaatgcccaacgtgcccgtggtgttgattttggcgaaggaaacttacttcaaaaaatgaaagctattgttccacttttgattccgcttttcgtaagtagttttaatcgtgcggaagacttagcgactgccatggaagcaagaggttatcaaggtggcgaaggacggacaaaataccgcattcttcattggcacctacgagatacaatagtaatgtttggctttgtcttgttaaccattggcttatttgtattaagaacttag

SEQ ID NO: 6450 - DNA, 1356 bp, Enterococcus faecalis
  CDS (1)...(1356)
atgcaaaaaaagttagtttggcgtgattatctatacgttggttcaatgttattcggtttgtttttcggtgctggaaatttaattttccctgtacatatgggacaagaagcgggggcttccgtctttttagcaaacttgggcttcttagccactggaattggcttaccttttcttggtgtcattgctatgggtgtttctaaaagttcaggtgtttttgacttagcttctcggattaatcgtcgttatgctcttatttttaccttactattatatttaacgattggtcctttctttgctttaccaaggttagcaactacttcttttgagattggtcttgcaccatttgttcctaaagacttgcaatggctggttcttgctggtttttccacattatttttcttagccgtttggctcttctctagaaagccaagtaaaatcttagattatgtgggtaaatttttaaatccgttatttttagcattgctaggaattttgattgttttagcctttgtaaaaccattaggtcatgtggccagtgccgctgttggtgaaaattatatttcaagtcctttctttaaaggatttacagaaggttataatacgttggatgctttagcttcattagcttttgggattgttgtcgtttccactttacgaaatatgggcgtcgaaaaaccaggagatatcgctaaaggaatgattaaatcaggtgctttcagtgttgtattgatggggattatctataccttacttgcttatatgggaacaatgagtatcggggcttttccaatcagtgaaaacggcgggattgccttagcccaaattgccaattactatttaggcctaccagggagtattttactggcttttatcgtagttcttgcttgtttaaaaaccggtatcggcttaagcacagccttttctgagacttttgaagaaatgtttccgaaagtttcctatcaaaaattcttggcaattgttgttattttaccagctatttttgcaaatgtcggcttaaccaacatcattcaatttgccgttccagtcttgatgttcctttatccattggcgattactttaatgcttttggtaatcatcagtcctattttcaaacatcgacgggaagtctatcaagcaacgacctatatcacattgattgctgctgttttagatgcattaaatagcgcgcctgcctttatcaaagatacggcgtttgtaacaacgcttttagaaaaagccggccaatacttaccattgttcactattggcatgggctgggtcgttccagcaacggttgcttttctaattagttgggtttgggtcatgatttctaaaaaagatccattctttgattaa

SEQ ID NO: 6451 - DNA, 576 bp, Enterococcus faecalis
  CDS (1)...(576)
atgtttgtgacaaaaatggcagtatattgtggcgccagtctggggaatgagccaatctatcagcaagctgcagtagcgttagccgcttggatgaaagaaaatcactatgatctagtttatggcggtggcaatgttggtctaatgggtacagtggctgatacgcttttggcagaaggtggagaggtaattggtgtcatgcccacttttttaatggaacgagagattgcacataatggcattacaaagatgcatacagtcagtgatatgcatgcgcgtaagaaaaagatgattgaattggcagatgtgtatttagctttacccggtggtcccggcacactcgaagaaattagcgaggtgatctcttggggccgagtcggtgaacatatgaatccttgtattttatacaacgtgaatggttactatgatttattagctgctttttttgataaaatggtagaaactagtttcttaacagaagcggatcgagctaaaattttcatttcagattccttagaagaaattggtgcatttattgattcttatgaaccgccaatgattcgtcaatacaaaaaataa

SEQ ID NO: 6452 - DNA, 624 bp, Enterococcus faecalis
  CDS (1)...(624)
atgccgaatgtagcattattcaaacaagatggaactcaaaacggtgaaatcactttaaatgaagaaatcttcggaatcgaacctaatgaaagtgttgtctatgatgcaatcatcatgcaacgtgcttcattaagacaaggaacacacgcagttaaaaaccgtagcgctgttcgtggcggtggccgcaaaccatggcgtcaaaaaggaactggtcgtgctcgtcaaggttcaatccgttcaccacaatggcgtggaggtggcgtagtctttggaccaacaccgcgttcatacagctacaaacttcctaaaaaagttcgtcgcttagcaatgaaatctgtattatcagacaaagttgctgaaaataacttggtagcagtagaaggtttaagcttcgatgcaccaaaaacaaaagaattcaaacaagttcttgctaacttgtctatcgatactaaagtattagttgttttagaaaatggtaacgactttgcagctttatcagctcgtaacttaccaaacgtttctgtagtaacttctgataacgttagtgtgttagatgttgtgtcagctaacaaagtcttggcaacacaaacagctcttactcaaattgaggaggtgcttgcataa

SEQ ID NO: 6453 - DNA, 1491 bp, Enterococcus faecalis
  CDS (1)...(1491)
atgagtaaaaaagaaataaataaagtagttgccagtagctatcaattgtatattaatggagagtggacaacaggtagtggtaacaaaatgattgctagttacaatcctagtaatggcgaaaaattagcagaatttgttgatgccacaaatgcagatgtggatcgagctgtagaagcagctcaagaagcgtttcagacatggaaagatgttgacgttgtaacaagaagcaatcttttgttgaaaattgctgatttgattgaagaaaatcaagaacatttggctatggtggagactttagataatggaaaaccgcttcgggaaacgcaatcgattgatgtccctgccagtgcagaccattttcggtattttgctagtgtgattcgtggagaagaagggtctgtcaaagaatttgataaggatacgttatccattgttgtgaaagaacccattggtgttgtgggtcaaattattccgtggaatttccccttattaatgggtgcttggaaattagcaccagcgttggcagcaggtaatacggttgtgattcatccgtcctcgagcacatcattaagtctgttggaattgtttaaaatttttgatcaagtcttgccgaaaggagtagtgaatttaatcaccggtcgtggttctgattcaggaaattatatgttggcacatccagggtttgataagctagcttttacaggctcaacagaggtggggtacactgtcgctaaagcggcggccgaccgcctaattccagccactttagaacttggcggaaaatcagccaacattatttttgaagatgccaattgggaacgtgcattagaaggcgtgcagttagggattttattcaatcaagggcaagtttgttgtgctgggtctcgtgtgttcgttcagtcaggtatttatgatcaatttgtagaagctttaaaggaaaaatttgaacaagtgaacgttggtttcccgtgggaaaaagatgttgaaatgggcgctcagatcaatgagcatcaattggaagaaattttaaaatatgtcgaaattggtgtgaaggaaggagctacgctgattactggtgggcaacgtttaacagaaaatgggctagacaagggggcgtttttagcacctacgttattagcgaacggcacgaatacaatgtgcgtggcccaagaagaaatctttggtcctgttgcaacagtgattaaatttgaaacggaagaagaagtcattcgtttagctaatgattctgaatatggtctaggtggtgcggtcttttctcaagatatcaatgtggcattacgggttgctcgtggtgtacggacaggtcggatgtgggtcaacacatacaatcaattgcctgcgggcgcgccatttggcggttataaaaaatcaggaattggtcgagaaacgcataaatcaatgctagatgcttatacgcaaatgaaaaatatttacattgtgacaaaagaagaagcagacggactgtattaa

SEQ ID NO: 6454 - DNA, 291 bp, Enterococcus faecalis
  CDS (1)...(291)
atggaattactagacgtaatcaaacgcccagtgatcactgaaaaatccatgttagctatggacgaaaagaaatatactttcgaagtggacactcgcgcaaacaaaactttagtaaaacaagctgttgaatcagcattcgatgttaaagtagcaaacgtaaacatcttaaacgtgcgtccaaaattcaaacgcatgggtaaatatgcaggttatacaaaaaaacgtcgcaaagcgatcgttacattaactgaagattcaaaagaaattcaattattcgaagctgctgaataa

SEQ ID NO: 6455 - DNA, 3570 bp, Enterococcus faecalis
  CDS (1)...(3570)
atggaaaatagcagaaaggagggcccttgtttgaatattatcgaacgaattagccaaacagaaattgctaaatcatggcgcagtcaactaatgacaacaggaacgcgccaactaattactgggttatcaggctctgctaaaacattactgatggcaggcgctttacaaaagacgcatcaaaaaattgttattgcggttccaaacctatactatgccaatcaattagtagatgattttttaaatattttaccttcagaacaagttcatctatttccagtagatgaagtgttatccgccgaaatggccttttcttcaccagaagcgcgcgcagatcgagtgagtgcgttaaatttcctgatgacagcgaatgcaggaatcgtggtcgtaccagtagctggactacgaaagtatttgccaacgaaagaaacgtggcaaaatgcgcaacttcattgggaaatcgggacagaagtagaacctgagatcctcgcgcaacgcttagtgttaatgggctatgaacgccaatcgatggtcggaaagcctggcgaatttagtattcgcggaagcattgttgatgtctatccgctaaatgccgaataccctgttcgggtggaactgtttgatgttgaaattgactcaatccgttatttcgaagcagatacccaacgttcattagaaaatcttgaagaagtaacgatttcaccaatgactgatttagtattctcaaaggcagatatgaatcatggcatgatgaggttacaagatgctctagaaaaacgtttagcgacagctaaagatcaaacagagaccgattttttagaagaatattttggtcagttgctgtcttcttgggaacaagggattcctacagaaaatgctcactattatacagattttctgtaccaacaaaagactacgctgttagattatttaccagaaaatagtttgctttttgtggatgattattctcgtatgatggaaacggagcgagaaatcgctagagaggaagcggaatggcaaaccctgaaaattgaagaaatgcgcgtgttttctgaacaaacttttggcgtagactttcatgatcaattgcgaaaaactgcacgaaatacgaccttcttttcactttttcaaaaagggatggggaatcttcgtttccaagaagtccataatttccaatatcgttcaatgcaacaattcttcggtcaaatgccgttgctaaaagcggaagtggaccgttggcaaaagcaaaaccaaacggttgttgtttttgttcctacgaaagaacggattcaaaaagtcgaagagctatttcaggactttgacatacctagcgtagtaagcaattgggatcagttgttagattggcatgtccaaattgtccaaggggcattacaaacagggtttgaattgcctaaaaacaagctcgtggcgattacggaaaaagaaatttttcatacaacgaccaaaaaacgggcacgtcgtcaaacaatctctaatgcggaacgtttgaaaagttatagcgacttaaaaacgggcgattatgtcgttcatgcgaatcacgggattggtaaatatattggtatggaaaccttagaagttgatggggtccatcaagattacatgactatcttgtaccaaaatgatgacaagttatttattccagtaacacaattgaacttgattcaaaagttcgttgcttccgagtctaaaacgccgaaaattaacaagctaggcggcagtgaatggacgaaaaccaaacgaaaagttgcttcgaaaattgaagatatcgcggatgatttaatcttactttatgcgacaagagaatcggaaaaaggctatgcttttccgccagatgatgcgtatcaaaaagaatttgaagaggcttttccgtattctgaaacagatgatcaattacgtagtgctgccgaaattaaacacgacatggaaaaatctcgaccaatggatcgtttgttagttggcgatgtagggtttggtaaaacagaagtggctttacgagcggctttcaaagctgttagcaacaataaacaggttgcctttttagtgccaacaactattttagcgcaacaacattacgaaacgattcaagagcggtttgagggctttcctgtagaaattggtttattaagtcgtttccgcacgaaaaaacagcaaaatgaaacaattgaaaaaattaaacatggccaagtagatattgtgattggtacccatcgtttattgtcgcaagatattaattttagtgatttaggcttgttgattattgatgaggaacaacggtttggagtgaaacataaagaacgactaaaacaattgcgttcacaagtggatgtcttgacgttaacagcaacgccaatcccaaggacccttcatatgtcgatgttaggtgtccgtgatttatccgtcatcgaaaccccaccagagaatcgttatccgatccaaacgtatgtcatggaaaataatcctggggcgattcgggaagcgattgagcgagaaatggcccgagatggtcaagtcttttatttatacaatcgagtagatacgattgaacgaaaagttgaagagttacaagcactagttccagatgcacgaattgcgtatgcacatggtcaaatgacagaagtacaactggagaatactttgtttgattttattgaaggacaatatgatatattagtcactacaacaattattgaaacaggagtagatattcctaatgctaataccttgtttgtagaaaatgcggactacatgggcttatctacgttgtatcaattacgtggtcgtgtggggcgtagcaatcgagtggcctatgcttattttatgtacgaacagcaaaaaatcctaaacgaagttagtgagaaacgtttagaagcaattaaagactttacggaattaggttctgggttcaaaattgcgatgcgtgacctttccattcgaggggccggaaaccttcttggtgcccaacaacatggcttcattgattcggttgggtttgatatgtactcacagatgttatctgaggcagttgctcgtaaacaagggaaaaatatccaagaccaaaaaacgtctgttgaaattgatttgggcattgatgcttatattccaggaacgtacattacagacgaacgacaaaaaattgaaatttataaacggattcgtcagttagaaaatatggatatgtacgaagaattagaagcggacttgttagaccgctttggagagtatcctgacgaagtggcgcatttattaaccactggccgtatcaagatggatggcgaccgtgccttgttagaaagtattcgtaaacgcgaccaaaaagtcaagtttgtgttaagtaaaattggcacaaaaacatactctgtggagcagttgtttgaagcgttatcggcaaccagcttaaaagcggatctagcagttgagaaagaacaaatgactatttccttgaagttgccgaaagattgtaaagaagctgtttggattcaagaaattgctgcttttacaaccgcattgcgacaagaaaaatacaaacattcgcaagaaacggattccctttaa

SEQ ID NO: 6456 - DNA, 333 bp, Enterococcus faecalis
  CDS (1)...(333)
  misc_feature (1)...(333): n = A,T,C or G
atggttaagtttaccgtatggcgcaaaaattttacggatgagacaaaanaaatccaagaggtgaatgtgatgcggttagataaatttttaaaagtttctcgcattattaaaagaagaacagttgccaaagaagtcgctgataaaggtcggattcaaatcaacggagtcttagccaaatcttctagtactgtgaagattggtgaccttgtcaaaattcaatttgggaacagaattttagaagtagaagtcctgcaactaaatgactctacgaaaaaagaagatgccacaaaaatgtatgaaataaaatcagaaacacgtgtctctgaagaataa

SEQ ID NO: 6457 - DNA, 2181 bp, Enterococcus faecalis
  CDS (1)...(2181)
atgatgagcataaggaggacaggcatgaacaaaaagaataatggcatgaaaaatggtttatactacgtcttagtagtacttgccatggtcatggttgtctatttcatttttggaaataacaaccaacaatcgccagacatcgattactcaaccttccaacaacaattggaagacggaaaagtcaaagacatgaccattcaaccaaccaatggggtttaccggattgaaggtcagtataaagaaaaacaagaagtgaaagacacaggtggtctgtcattgtggggctcaacgcaagcgtcgtcaaaaggcttcacaacaaccgttttacctagtgatacaaccttagctggcattcaagatgcggcacaaaataacaaggtgaagctagttgtcaaagaacaatcaacaagtggtgcttggttgtcactgttgtttagtttcttaccattagtgattattttcttcttcttctacatgatgatgagccaacaaggcggtggcggtggcggcggtggccgtgtgatgaacttcggtaaatcaaaagccaaagaagccgataaaaaagctaaccgtgtccgcttctcagatgtagctggtgcggaagaagaaaaacaagaattagttgaagtagtggaattcttaaaagatccacgtcgtttcgctgaattaggcgcacggattcctgcgggcgtactattagaaggacctccagggactggtaaaacgttacttgctaaagccgtagcaggtgaagcaggtgtgccattttactcaatctcaggttcagatttcgttgaaatgtttgtcggggtcggtgctagccgtgtccgggatttatttgaaacagcgaagaaaaacgcacctgcgattatctttatcgatgaaatcgatgcagttggtcgtcaacgtggtgctggtatgggtggcggacacgacgaacgtgaacaaacccttaaccaattattagttgagatggatggttttgatggcaatgaaggagttatcgtaattgctgcaacgaaccgttcagacgtgttagacccagcgttgttacgtccaggtcgttttgaccgccaaatcttggtaggacgtccagatgtcaaaggtcgtgaagcgattttacgtgttcatgcgaaaaacaaaccgttagctgatgacgttgatttgaaagttgttgcacaacaaacaccaggttttgctggtgctgatttagaaaatgtcttaaacgaagcagccttagttgccgctcgtcgtaacaagaaaaaaattgatgcttctgatgtggatgaagccgaagaccgcgtaattgctggtccagctaaaaaagatcgcgtgattaataaaaaagaacgcgaaatggtggcttaccatgaagcgggacacacaatcgttggtttagtcttaagccgtgcccgtgttgtccataaagtaacaattatccctcgtggtcgcgcaggcggttatatgattgctttaccaaaagaagatcaattcttaatgactaaagaagatatgtttgaacaaatcgttggcttacttggtggacgtacagcagaagaaattatctttggcgttcaatcaacaggggcttcaaatgactttgaacaagcaacagggattgcccgtagcatggtaacggaatatggaatgagtgacaaattaggacctgttcaatatgaaggaaaccatcaagtctttgtcggtcgtgattatggtcaaacaaaagcttactcagaacaagtggcgtttgaaatcgatcaggaagttcgccgtatactaatggatgctcatacgaaagcgcatgaaattatcgaagcgcaccgtgaacaacataaactaatcgctgaaaaactattagaatatgaaacattagatgcaaaagcaatcaaatcattatttgaaacaggtaaaatgcctgaaggtgctgacagcgactatcctagtgaaaaagaagcgcaaacattcgaagaagcaaaacgtgctttagaagaaaaagaagcgcaaaaacaagttgaagaaaaacaagactttgaagaagcgaaaaaagaattacatgatgaagcagaagaagtcaaagtagaaagcgaacaaacagaaaaagaagtccaatctgaagagaaaaaagattcagattccaattctgaatatgatcgcaataactacgaagatcgttataaataa

SEQ ID NO: 6458 - DNA, 831 bp, Enterococcus faecalis
  CDS (1)...(831)
gtggcgattaaaaagtacaaacctaccacaaatggccgtcgtaacatgacaagttctgatttcgctgaaatcacaacttcaacaccagaaaaatcattgttacagccattaaaaaacaatgccggtcgtaacaacaacggtcgcattacggttcgtcaccaaggtggcggtcacaaacgtcaataccgtgtgattgacttcaaacgtaataaagataacgtcgcagcggttgttaaaacgatcgagtacgatccaaaccgttctgctaacatcgcgttagttcattacgaagacggggttaaggcatacatcttagcaccaaaaggattagaagtaggcatgcgcctagtatctggtccagaagcagatattaaagtaggtaacgcattaccattggaaaacattccagttggtacagttatccacaacattgaaatgaaacctggtaaaggtggacaattaatccgttcagctggaacaagcgcgcaagtacttggtaaagaaggcaaatacgtattaatccgcttaaactctggcgaagttcgtatgatcttagcaacttgccgtgcaacaatcggttcagttggtaacgaacaacacgaattaatcaacattggtaaagctggccgctctcgttggatgcgtaaacgcccaactgttcgtggtagcgtaatgaaccctaacgatcacccacacggtggtggtgaaggtaaaacaccaattggacgtaaagcgccagtatctccatggggtcaaccagcaattggatacaaaacacgtaataaaaaagctaaatcagacaaacttatcgttcgtcgtcgtactaaataa

SEQ ID NO: 6459 - DNA, 1497 bp, Enterococcus faecalis
  CDS (1)...(1497)
gtggcagaagaacaacaagcgcatttagaggatttaaatgatcaaatgctcgtgcgccgcgaaaaaatggaagctttacgtgaagaagggattgatcctttcggtaaacgtttcgatcgcactcataattcagcagaacttcatgaacaatatgataatcatacaaaagaagaacttagtgaaatgaatacagaagtcagcgttgctggacgtatgatgacaaaacgtggtaaaggaaaagctggtttcgcccatttgcaagaccgtgaaggccaaattcaaatttatgttcggaaggaccaagttggagacgaagcctatgaactatttaaacatgctgacttaggcgacttctttggtgtgactggtcaaataatgaaaaccaatacgggggaagttactgttaaagctcaaacaattacgttattaactaaagctttgcgtccgttgccagataaataccatggattaacgaatgtggaacaacgttatcgtcaacgctatttggatttaatcagtaacaaagaaagttttgatcgtttcatgaaacgcagtcaaattattagcgaaatccgtcgttatctagatggcaatggctatgtcgaagtagaaacgcttgtcttgcataacgaagcaggaggagctgctgctcgtccatttatcacacaccataatgcattagatatggacttatacttacgcattgccctagagttacatttaaaacgtttaattgtcggtggcatggaaaaagtatatgaaattggtcgtgtcttccgtaatgaaggaatcgataccactcataacccagaatttacaatgctagaagcttataccgcttatactgattatcaagatgtgatggatttaacagagggaattattcgtaatgctgcggaaaaagtcttaggaactactgatatcacgtacgatggtcaagcggttgacttaggaagtcctttcaaacgtctacacatggtagatgcggtcaaagaacaaacgggcgtagatttttggcaagagatgacgatagaagaagcctgtgcgttggctaaagaacataatgttgaaattacagatgccatgacagtcggtcatatcattaatgaatttttcgaaacatttgtagaagatacgttgcaacaaccaacatttatttatggtcacccagtcgctgtttcaccattagcgaagaaaaatccagaagatggtcgtttcactgaccgctttgaactgtttattatcggaaaagagtttgctaatgcatttacagaattaaatgatccaattgaccaacgtgaacgttttgaagaacaagaaaaagaacgggaacaaggaaatgatgaagcacacggagtagatgaagatttcatcgaagccttagaatatggcttaccaccaaccggaggattaggtattgggattgatcgactagttatgttattaactgatgcacaatcaattcgtgatgtcttgctattcccaacaatgagataa

SEQ ID NO: 6460 - DNA, 279 bp, Enterococcus faecalis
  CDS (1)...(279)
atgggtcgtagtttaaaaaaaggacctttcgtcgatgatcatttgatgaaaaaggtcgaagcacaacaaggtgccgaaaagaaaaaagtaattaaaacttggtctcgccgctctacaatttttccatcattcgtaggtttcacaatcgctgtatatgatggacggaaacatgtccctgtttacattcaagaagacatggtaggacataaattaggtgaatttgcaccaactagaacttatcgtggccacgttgctgacgataaaaaaactaaacgctaa

SEQ ID NO: 6461 - DNA, 354 bp, Enterococcus faecalis
  CDS (1)...(354)
atgcaaatgtcagaacaaattacatcagctaaagcaactgcaaaaacagttcgcacttcacctcgtaaagcacgtttagtaatcgatcttatcagagggaaaagcgttgcggatgcaatttcaatcttgaaattcacaccgaacaagtctgctggaatcattgaaaaagttttaatgtcagcagttgctaacgcagaaaacaactttgacttagacgttgaaagcttagtcgtatctgaagcatttgttaacgaaggaccaacaatgaaacgtttccgtcctcgtgcaaaaggttcagcttcaccaatcaacaaacgtactagtcacatcacagtagttgtaacagagaaataa

SEQ ID NO: 6462 - DNA, 657 bp, Enterococcus faecalis
  CDS (1)...(657)
gtgggtcaaaaagtacatccaattggaatgcgtgtaggcatcatccgcgactgggatgcgaaatggtatgctgaaaaagagtatgctgaattcttacacgaagatttaagaatccgtaaatttatcgcaacaaaacttgctgatgctgctgtatctacaattgaaatcgaacgcgctgcaaaccgtgttaacatttcaattcacacagctaaaccaggtatggttatcggtaaaggcggatctgaagtcgaaaacctaagaaaagaattaaacaaattaactggcaaacgagttcacatcaacatcgttgaaatcaaaaaaccagatttagatgcaaaattagtaggcgaaggaattgcacgtcaattagaaaaccgtgttgctttccgtcgtgctcaaaaacaagccatccaacgcgcaatgcgtgctggcgctaaaggaatcaaaactcaagtatcaggtcgtctaaacggtgcggatatcgctcgttcagaaggatactctgaaggaactgtaccacttcacacattacgtgcggacattgattacgcatgggaagaagcggacactacttacggaaaactaggagttaaagtgtggatctatcgtggagaaattcttccaacgaaaaaaaacactgagaaaggagggaaataa

SEQ ID NO: 6463 - DNA, 435 bp, Enterococcus faecalis
  CDS (1)...(435)
atgttagtacctaaacgtgtaaaacaccgtcgtgaattccgcggaaaaatgcgcggtgaagctaaaggtggaaaagaagtagcatttggtgaatggggtttacaagcaactgaatctcactggattactaaccgtcaaatcgaagcagcccgtattgcaatgactcgttacatgaaacgtggcgggaaagtatggattaaaattttccctcacaagtcttacacaagtaaagctatcggcgtacgtatgggtaaaggtaaaggggcaccagaaggctgggtatcaccagttaaacgtggtaaaatcatgtttgaaatcgcaggcgttcctgaagaagtagctcgtgaagctcttcgtcttgcatctcacaaattgccggtaaaaactaagatcgtaaaacgtgaggaaatgggtggtgaatcgaatgaaggttaa

SEQ ID NO: 6464 - DNA, 474 bp, Enterococcus faecalis
  CDS (1)...(474)
gtgggcattgtaacattaagtgatcgttgctttcaaggacttgctgtcgatcaatcgggtcccttgattcgtgaacagttacctgtgctctaccaggtaacgaaacaaaccattttaccagatgaagaaaatcaattagtagagctattgcaagagtggtctaagacctgtgatttgattttaacaacaggcggcacaggattgagtgaacgggatcggaccccagaagcaaccttacgtgtagcagaacgagtcgttcctggaatcagtgagggcttgcgtcaacttagcttggaaaaaacaccatttgctatgttaagtcgaggcgtttctgttcaaagaggacgcacgctcattgttaatttgcctggtagcccgaaaagtgtaacagaacatttgcattttttgttgcctgttttgccccacgctttggatttaatcacaaataaaaaaatcatacatgatgaggaataa

SEQ ID NO: 6465 - DNA, 2367 bp, Enterococcus faecalis
  CDS (1)...(2367)
atgaatcagcgtattctatcaacattagggtttgataaagtaaaacaacagttgttgcaatttattgtgacagctcaggggacaaacgaagtttcggaattattaccgattgctgatgaaaataaaattcaagcatggctaaatgaaacacaggatggtttaaaagttcaacgattacgtggtggaatccccattcctaaattagaaaatatccaaccacacatgaaacggattgaaattggtgcggatttaaatggtgtagaattagcacaagtaggtcgtgtcttatcgactacttcagaactgactcgtttttttgatgagttaagtgaaaatgaagtggattttgaacgtttatatatgtggcgagagcaactagaagttttgcctgaattaaatcgccaactcaaacaagccattgatgatgatggctacgtcacagatgaagcttcgccagccttaaaggcaattcggcaaaatattcgacgtagtgagcagaccattcgagaagaactagatagtattattcgtgggaaaaacgcacgttaccttagtgatgcccttgttactatgcgaaatgaacgctacgtgattccagtcaaacaagaatataaaaatatttttggtggcgtggttcacgaccaaagtgcttcaggacaaaccttatttattgaacctaaacaaattttagaaatgaataatcgcttgcgacaacaacaaattgccgaaagaaatgagattactcgcatcttggcagaactgtcggccgagttggtcccttatcgccgtgaaattacgcataatgcctatgtcatcggtaaacttgattttattaatgctaaggcacgactaggaaaagaactaaaagcagttgttccagaaattagtcaagcaaatcatgtagtttttaaacaagcccggcacccgctattggatccagaaaaagctgtagccaatgacattgtgattggagaagaatatcaagcaattgtgattacagggcctaataccggcgggaaaaccattactctgaaaacgttaggtcttttacaattaatgggtcaagctggattacctattccagttgaagaagagagtaaaatggggatttttacagaagtatttgcggatatcggggatgaacaatcgattgaacaaagtttaagtactttctcttcacatatgacgaatatcgtgtctgtcttaaagaaagtcgatcatcaaagtttagtactatttgatgaattaggtgctgggacagatccgcaagaaggggccgctttagcgattgccattttagattcattgggtgctaaaggagcctatgtgatggcaacaacccattatcctgaattaaaagtgtatggctataatcgagctggaacaatcaatgccagtatggaatttgatgtagataccttgagtccaacctatcgtttattaattggcgtgcctggccgaagtaatgcttttgaaatttcgaaacgtcttggattagacaacagtattattgaagctgcaaaacaaataatggacggtgaaagtcaagatttaaacgaaatgattgaagacctggaaaaccgtcgcaaaatggccgaaactgaatatttagaagctcgccactatgtcgatgaatcggcggctttgcataaagaactgaaagaagcctatcaagtgttttttgaagaacgagaaaaagaattacaaaaagcgcggaaagaagcgaataaaattattgcagaagcggaagaaaatgcggaaactattatttctgatattcgcaaaatgcaattggaaagtggccaacaaggtggtgtcaaagaacatcagttaattgatgcgaaaacacaactttctcaattacaccacgaagaaaccaagcttgctaaaaacaaagtgctgaagaaggcgaaagaacagaaaaaattaaaagctggcgatgaagtaattgtcaatacttacggccaacgagggaccttattaaaagacaacggcaaaggacaatggcaagtccaattgggcattttaaaaatgaacgtatctgaagaggatatgacgcctgtcgctccacaaaaagaagcaaaaccaagagttacaacggttcgttctgcagaaagcagtcatgttggcacacaactagacttacgtggcaaacgctacgaagaagcattggcagaagttgaccaatacattgatgctgcgattctagcgggctatccacaagtaaccattgttcacggcaaaggaacaggtgcattaagaaccggaataacggaatttttaaaaaatcaccgcagtgtgaaaagctatgaatttgcgccacaaaaccaaggtggtaatggtgcgactgtcgtgaaattccaataa

SEQ ID NO: 6466 - DNA, 900 bp, Enterococcus faecalis
  CDS (1)...(900)
gtgttagaggtaaaagagttagtcaaaacctttggggattttaaagcagttgatcatgtatcctttacgataccggacgggaaaattttaggattaattggccaaaatggtgccgggaaaacaactacgtttcgcttgattttaaattttttaacacaagatagcgggtcggttttatggaatggtcaaccattaaatgaaaaagagtacaatattattggttatttaccagaagaacggggtttatatcctaaaattacgattgaagaccaactaatttatttcgcttcgttgcggggaaaaactaaaaaagaaattgaacctaaaattgacttttggatggaaaaatttcaagttaaaggcaaaaaaacagataaagttaaatctttatcaaaaggaaatcaacaaaaagttcaattgattgcgacacttattcatgaaccgaagttaattattttagacgaaccatttagtggcttggatccagttaatgcagaattattaaaagacggcattattgaattgaaaaatcaaggttcttgtgtcattttttccagtcataatatggacaatgtggaaaaaatctgtgaccatttagtcatgttaaaaaatggacgcatggttttagatggtcaggttcatgaaattcgacaacaatttggtcgaacaaaattattcttagaatcaccgttatctgttgaggaagttgctgctacagcaggtgtgaaagaagcacacttgcgacaagatggcgtcttagaagcgacattagaaaacgctgaagtgggcaaagtgttgtttgataaagcaacagccaacggctacattccaatgtttaatcaacaaccaccaacattggaagaaattttcaaaatgaaagtaggtgggcaagatgagtaa

SEQ ID NO: 6467 - DNA, 1320 bp, Enterococcus faecalis
  CDS (1)...(1320)
atggtacactacctattgaattggaggagaactatgaagaaatttgatgtaattattgtcggtgctgggacgagtggtatgatggccacgattgcggccgcagaagctggtgctcaagtattattgattgaaaaaaatcgccgtgttgggaaaaaattattaatgactggtggcggtcgctgtaatgtaaccaataatcggcccgcagaagaaatcatttcatttattcctgggaatggaaaatttttgtacagcgcattttcacaatttgataactatgatatcatgaacttttttgaatccaatggtattcacttaaaagaagaagatcacggacgcatgttccctgttacagataaatcgaagtcaattgttgatgcgctatttaaccgcattaacgaattaggagtcactgtttttacaaaaacacaggtcacaaaattactacgaaaagacgatcaaataattggcgttgaaaccgaactggaaaaaatttatgcgccgtgtgttgtattaacaactggcggccgcacttatccttccacaggagcaactggtgatggctataaactagccaaaaaaatggggcataccatcagcccactctaccctaccgaatcacctattatttctgaagaaccttttatccttgataaaacgttgcaaggtctctctttacaagatgttaatttaactgttttgaaccaaaaaggaaaacctttagttaatcatcaaatggatatgctgtttacacattttggcatttcaggacctgccgcgctccgctgttctagttttattaatcaagaattaactcgcaacggtaatcaacctgtcacggtagccttggatgtgtttccgacaaaatcttttgaagaagtgctgaaaaatgttgattacatgattgaggaacagccaaataaagtggcaaaaaatgcctttcattctttaataccagaacgtctgcttactttttatctagagaaactagcaattgaagaagtgcctgccaaacaactgacagaaaagcaacgtctttcctttgtggaactactgaaagactttcagttcactgttacgaaaacattgcctttggaaaaatcttttgtcacaggcggtgggatttccctcaaagaagtgacccctaaaacaatggagagcaaattagtcaatggtttattttttgctggtgaacttttagatattaatggctatactggaggctacaatgttacagctgcatttgtcactggacatgttgctggctcccatgccgcagaaattgcagaatacacctatttaccaattgaagaagtctaa

SEQ ID NO: 6468 - DNA, 1350 bp, Enterococcus faecalis
  CDS (1)...(1350)
atgtcacacattcaattagattattccaaattagcaccatttgttgctgaccatgaattggaatacatgcaaacacaagtcactgcagtggacaaagcattacgtgaaggtacaggagctggtaatgattttactggctggattgatttaccagaaaactatgacaaagaagaattcgcgcgcattaaaaaagcagcagcaaaaattcaatctgactctgaggtattagtagtcattggtatcggtggttcatatttaggtgcccgtgcagcaattgaatttttgacacattcatttaataatctattatcaaaagaagaacggaaagcgccacaaatcttctttgctggaaatagcatcagctcaacttatttagctgatttaatcaatgtgattggtgatcgtgatttttctgtcaacgttatttcaaaatctggaactacgacagaaccagcgattgctttccgcgtctttaaagagttattaattaataaatatggcaaagaagaagccaataaacgtatttatgcgacaactgaccgtgctaaaggagcagtaaaagttgaagccgatgcggaaggttgggaaacatttgtgattcctgatgatgtgggcggccgtttcactgttttaacgccagtaggtcttttaccaatcgctgttagcggtgcggatattgatcgtttaatggaaggtgcaaatgatgcccgtaaagaatacggcgcaacgagcgacttaaaagaaaaccaagcctatcaatatgctgcgttacgtaacattttatatcgtaaaggtaaaacaactgaaatgttaattaactatgagcctggtatgcactatttctctgaatggtggaaacaattatacggtgaatcagaaggaaaagatggcaaaggtattttcccagcagccgcagacttttcaactgacttacattccatgggtcaatatgttcaagaaggtatgcgtaacttatttgaaacagtggttaaaattgaaaatccacgccatagcatttcaattccagaacaaaatgaagatctagatggcctaggctatttacaaggaaaagaaattgacttcgtcaatacaaaagcgttcgaaggtacgttgcttgctcacacagatggtggtgtgccaaacatgatcgttaaagtgccaacaatggatgcttattcattaggttatgttatgtacttcttcgaaattgcggtgggcatctcaggttacttaaatggggttaatccatttgaccaaccaggtgttgaagcttacaaacgcaacatgttcgctttattaggtaaaccaggttttgaagaattagcaaaagatttaaatgcacgcctataa

SEQ ID NO: 6469 - DNA, 1299 bp, Enterococcus faecalis
  CDS (1)...(1299)
atgcttaagagaaaccaaccaatgttattagagagaatgggaaaaatgcaatctgcgaccgatgttgctgaatattgtaaatacgatggatttgatggtttaaaaagagcaatttcactatcggatgaagaaattttaaacgaactggatgttgctcacttaagaggtcgcggtggagcagcctatcctttaggaaaaaaatggcgccatctttatcatgcaaaaggaaccacaaagtacattgtttgtaatgctgatgaaggcgaaccagggacctttaaggataaagtacttttatctgaagatccattgagtgtgattgaaggaatgattattgctggctatttattttcagcaaaagcaggttatatttatatgcgaggagaatatcgcagaatccaaaaaacatttcaagaagcactcgataatgcacgacaagctggctttttaggggaaaacattttaggaattgaaggattcaattatgatattacgattatttctggtgctggcgcctatatttgtggggaaaattcagcacttttaaattcaattgaaggaaaaacggggcagccgcgtgtcaaaccaccacacttagcagatgttggtttatatttgcaaccaacattagtaaataatgttgaatcatttgcaagtgttcctataattttacgagaaggtggacaagcctttttagagatgggtactgccgatggtggcggcacaaagctaatttgtttgtctggacatattaaaaatcggggcttatacgaggtcaaccttggaacaccattagaagaaataatttatggcgagcaatacggcggaggctctgcaactggtcgagcattaaaatttattcatttcggtggacaatccggtccaattggtgctgttgcaacgttaagggattgtttgtattcctacgaagatttatgggcccatgacttatctgtcggctctggcgcaattgtagtaatggatgattcagtcaatgttgtggactatttagtacacgtggcggccttttttgctcatgagtcctgtggtaaatgcaccccttgtcgattgggaacaactaggattttggaattattgagtaaattcaatcggaacgaggcaacagctagtgatttgccacgattggaaaagatgctcacacatgtcacgcgattatcagcttgtggtttgggccaatccgtcgcaaatccaatgaagagtgcattggctttgtttccagaagaatttgaaacgactgctgaaacagaaatctatgccaccagcaaaggaggttggtaa

SEQ ID NO: 6470 - DNA, 2721 bp, Enterococcus faecalis
  CDS (1)...(2721)
atgaaaacaaagttgcatacgcaaacagttacgttgtctattgataaccaagaagtaactgtgcctaaagggactactattctcgaagcagcgaaagggctaggtgttgaaattccaacgctctgtcatttaaaggaattagcacctgatggttcttgtcggatgtgcgtggttgaggtggaaggcggccgacgtggtggcttaacaactgcttgtacggcacattgtcaagaggacatggttgtggcaacacattctgaaaaagttgctgattccagacgttttattcttgatttattattgagtaatcataaattagaatgtttttcttgtggaaaaaacggggattgtcaattacaacagtatgcgctagattatgggattgatgccactagctttaccgaggggaaaagaatgccttgccaccaagaagataccagtaatccatttttctcttatgatccagaaaagtgtatcatgtgtcgtcgttgtgcccgtgtctgtcaattgcggcagggaagagatgtactcagtattgctaatcgtggctttgaaacaaaaatgatgccgagttatggacaggcgtttgatcaatctatctgtgaatcatgtggcaattgtgtctcttcctgtcctacaggtgcgttaacagcaaaagatatgaaagagtaccgcaaatgggaaacccagaaaattcctacaacttgtccgcattgtgggacaggctgtcagatgaatttactcgttaaaaacaatcgtttggtgggtgttgaacccctagatggaccagctaataaaaatttactttgtgtgaaaggaaaatttgcttcatataaatttgttgggtcaggagatcgcttaacggagccattaattaaacggaatgggatttttgaacctgcttcttgggaagaagccttaacgcttgtttcgtcaaaatttaacgaaattaaagcagaaaacggtccagatgctcttgctggtttttcgtgctctagagcgacaaatgaagataattatgtctttcaaaaaatggtgcgtgctgcttttggtaccaataatgttgataactgtgcccgtgtttgtcattcggcttcggtccatggtttagcccaaaccttaggctctggtgcgatgactaatcctattgctgatatcactgaagatgtcgacatgattttattagtaggttccaatccagaagaagctcatccagttattggtgcgcaaattcgccaagccatccaaagaggaacgcaagttgttgttgttgatccgcggaaaattaacttagtgaaggatagtgcgctgcatttacaagttcaggcgggaacgaatgtcgcatttgctaatggcatgatgcatgtgattttgaaagaaggtttagcagatcgccactttattgaagaacggacagaaggattttcagatttagaaaaaatggtggctgattatacgccggaaaaagtcgcagaaatttgtcatattcatccagaagatttaattcaagcagcacgcatgtatgcaaaagcagagaaagcaccaatcatttattgtttaggcgtaacggaacattcgacaggaactgagggtgttatgagtatgtctaatttggcaatgttggttggtaaagttggaaaaccaggctgtggtgtcaatcctttgcgaggtcaaaataatgttcaaggtgcttgcgatatgggctgtatgccttatgatttcccaggctatcaaaaagtcaataatccagaagtgatcgacaaatttgaaaaagcttggcatgtgccgttgaatcgaaacacaggtttaacttctactaaagtcttgccagcagcaacggcaggaaatgtcaaaggcctttatatttttggagaagatccaattgttacggatccagacacaggacatgttcgtcaagctttagaaagtttagactttttagttgttcaagaattatttatgaccgaaacggctgcttatgcagatgtcgttttaccaggcatcagttatgcagaaaaagacgggacatttacaaatacagaacggcgcgtgcaaagagtccgtaaagctgttgaaccaagaggacaagcgcgagaagactatgaaattttttgtgaagtcatgacacgaatgggctatccttgtgcgtatgaatctgcaaaagaaattatgaaagaaatttcagctgtgacgccttcgtttggtggaattaattatgaacgattagagaaggagagcttacaatggccttgtcgtagcttgacagatccaggtacgccgattatgcatgtgggcagttttgctcgtgggaaaggtttatttaaagcaattccgtataagcaagcccaagaattaccagatgaagagtacccgtatttaatgtcgacaggccgaatgctttaccattacaatacccgagcaatgacaggacgaacggaagggattaaccaaatagcgaatcactcttatattgagataaatgcagtcgatgcacaagctctgggaatccaagaaggtgacaaagttgaagttcattctcgacgtggcaaaatcgaaacctatgcggctgtcggaaatcgagtatttccgcaagaagtctttatgacattccactttccagatgggaatgttaacgaaatcaccaatgctgtatttgatgatatcgccacaattcctgaatataaagtttgtgccgttgcgattaaaccagtgaataaataa

SEQ ID NO: 6471 - DNA, 1203 bp, Enterococcus faecalis
  CDS (1)...(1203)
atgatcgagttggaagaagcacgagagaaaatgacccaacatatgaagagtcaatgtgaaacagaagaagtggcgctgcttgattccttgggacggattagcggagaaaccatttttgcagagacagcgattcctcattttcctcgtgccggaatggatgggtatgccgttcgtgcagtagaaacacgaggtgcgactgctgaaagcccaagttgtttaaaagtcgtcggttctttagtggcaggggattccatgttttattgtaatcagacgaataactgtgcgattaaaataacaacaggtgcttttattccaaccgattttgatgctgtagtgccacaagaatggacggattttgggcaagaccatgttaaaatttttcgctctgtcactgcgggccaaaactatgcggaaattggagaagatattgcttttcagcaaaaaattttagcaaaacatcaacagattaatagtcgcatgattggtttgttggcaatgcaagggattgataaagttgttgttttgaagcgcatgaaggtggggattttagcgaccggtagtgagttagtttctttggaagaaccgctgtcaattgggaaaatttataatagtaatctctacatgttagcagcttttgtcaaagcaagtggcaatgaagtaatccacctagaccattgttcagatgaccctgaagaattggcgaagaggctgattgagatttcaccaaaacttgatgtattaattacttgtggtggtgtttcggtaggtgaaaaggacaatttacctttagcaattaaacgtatcggaggaacagagttgtttcattttgtaaatatgaaacctggaaccccagttatgggaagtcaatttcaagaaacactcattttaagcgtttcaggcaatccgtttgcggcaatggttaatttacatcttttttactggacattattagctactttttttaattgtgtcgagttaaatctcaaggaacgaacagtaattttagcgcatgaattaacccctagtagactacgtcgattttaccgagcgaaagaaatagatggcacagtaaatttagtgacaaaaagtcatctttcatccaatttatcaaatactttagaaacaaattgcctgctagaacaaccagctggtgtactactcaaaaaaggcgcgcttgtaaaagtctattattggcaaacttga

SEQ ID NO: 6472 - DNA, 1281 bp, Enterococcus faecalis
  CDS (1)...(1281)
gtgctaatttatttaacaaaaaaagattgtgagttgtttgatatggatcagtttagtatattaactgaacaagaatttactacctttgcaatgacacatcctgcaggtaactttttagaaacacccgaaatgaaacatttattggaacgacgtggctggcattgtgaatacgttggcgtcaaacgagaaggtcaactaattgctgcgtgtatcctaagcaagaaaaaagtcaaaattggttatgctttcgacattgacggcggaattttgatggattatacagataaaaaatgtgtagaagcctttttcacaggcttaaaaaaatatgtgaaaaaaaatgatggcctttatttaacctttactccaaataaacaaatttgtttacgtgattttaatggcggtgaagttgaaaaggtcaatcaagaaacatttgactatttcacatcaattggttttgaacaccaagggtttgatgtgcacaattttgatggcgcgccacgttggctgtttgtcaaagatatggctggattaacagaagaagatctttggaaatcttatggaaaagatgctaaatatgacatcaagaaaacatgggaatatggagtaacaacccgagaacttcgttacgaagagttacctctctttaagaaattaacggaagaaacaagtgcacgacgtaattttgaagataaggatttagcttattaccaagctgtttatgaagagtttggcgaacgagcgaaatttatggtggcggaactaaactttgctacttatttagaaaatcttcatgagaaattacgcaaattacaagagacgctcaacgaagtcaatgaagcgttaattgccaatcctaaaagccgtaaaaaaaataaccagaaacgtgaatttgaagatgaagttcgtaccgtgcgcaaacggattgacgaagctaaagaaatgaaaacatcagatgaacctgaaattttagcaggcgccttattcattgttcatccacaagaagttgtttacttgtttagtggtacgtatgaaaaatataaacaatactatgcaccgtatttaattcaacataaaatgttaacttacacagtagaaaataacattcccaaatataatttttatggcgttgacggtgtctttgatggaagtgatggggttcttaaattcaaacaatcctttggtggtcatgtcgaagaattaatgggcaatttccaatggaaagccaaaccaatgaaatatgccttatatcacgcattaaaaacaattaaagaaaaagtctaa

SEQ ID NO: 6473 - DNA, 681 bp, Enterococcus faecalis
  CDS (1)...(681)
atgtatcaattatttgagaaatattttccgaatgttgtccaattaaaacaagagtttcttcaaagtacatgggaaacattatacatggttttttggacagcattgattgctggtgtgttaggagtcttgttgggtgtcgtgcttgtcagtactggccccagtggtgttttgaaaaatccacccctgtatagtgtcttagaaaaaattattaatgtttgccgctctattcctttcattattatgctcgcactgattcaaccattaacacgaattttggcaggaacgacaattggtacaaccgcagcgttagtcccattagttattggcgtaattccgttcttcgcgcgccaaattgaaaatgcgttattagaagtggatcctggcgttattgaagcggcagaagcaatggggacgagtcccttagggattatttttcgggtttatttaattgaagggttaccaagtattattcgtgtttcagcagtgacaattattaatttgattggattaacagccatggcaggagcgattggagccggtggtctgggcaacttagcgattactcgaggatacaatcggtttcaaaccgatgtgacatttatggccacgttaattattttaattatggtatttatcagtcaagccattagtaatcaattaatcaaaaaaacatcacattag

SEQ ID NO: 6474 - DNA, 1125 bp, Enterococcus faecalis
  CDS (1)...(1125)
atggcagataacagcaaaaggcgtgtcgtggtaggcatgagtggcggtgtcgattcatctgtcacagcgttgcttttaaaagagcaaggctatgatgtaattgggatctttatgaaaaattgggacgatacagacgaaaatggtgtctgtaccgcaactgaggactataaagatgtcgcaaaagtagcggatcaaattgggattccgtattattcggtcaattttgaaaaagaatattgggaccgtgtgtttgaatattttttagcagaatatcggttaggacggacaccaaatccagatgtcatgtgtaataaagaaattaaatttaaagcattcctagattatgctatgcaactaggcgctgactatgttgcaactggccattatgcacaagtagaaacggatgaaaatggcgtagtgcatatgttacgtggaattgacaataataaagaccaaacctattttttaagccaattatcacaagcccaattggcaaaaacaatgtttccgttgggtggcatggaaaagtcagaagttcgtgcaattgctgaacgtgctggattagccacagccaagaaaaaagactcaacgggcgtttgttttattggtgaaaagaatttcaaagaatttttgagtaattatttaccagctaaaaaaggcaacatggtgacagaagatggcgaaatcaaaggacaacatgatggtcttatgtattatactatcggtcaacgccaaggcttaggaattggtggcggcggtaaaacacaagaaccatggtttgtgattgggaaagatttaactaccaatacattatatgtaggacaaggatttcaccatgaaaaactatatgcaacacatttagaagctagtgaggttcattttactgttgatacaccaatgccaaaagagtttgactgtacggctaaattccgttatcgtcaagcagatatcccagtgcatgtttccttatctgaagatggcacaaaagcaaccgttacgtttaaggaaccagcccgcgcagtcactccaggtcaagctgttgttttttatgatggaatggaatgcttagggggcggcttaattgatcgcgcctaccaagatgaaaaagaactacaatacgtctaa

SEQ ID NO: 6475 - DNA, 2301 bp, Enterococcus faecalis
  CDS (1)...(2301)
atgcggttacttttgaaaataaagctgagtttaccacaatatccaatcattttggcaaaacaaaattctgcaaacggaaagttatttgaaacgcatgagtttaaagaaaaacctcagggaattttctttaaactctttttctattctcggaatttagagaaaatcgagctaatatttggtataatacgaaaagatagcactcaaaaaggagcgaaactagtggttgcaaaacaattaattattgctgaaaaacctagcgtagcaaaagatttaagccgcgttttaggagcaaatcaaaaaaataagaattattatgaaggacccaacgtgattgtcacatgggctttaggccatctcttaggactaaaaatgccagaagatttaaacaaagaatggcaaacgtggcaaatggaaactttaccgatgattcctaagaatttagggattaaaccgttaccgaaaacgggacatcaattaaaagcgattaaacaattagccaatcgtaaagatgtttctgaagccgtgattgccaccgatgctggtcgtgaaggtgaattagtggcccgctggattttagaatatgtccgttttaacaaaccagtcaaacgcttatggatctcatctcaaacagacaaagccattaaagacgggtttaagaaaattcgcccagcgaaagactacgataatttgtattactctgccttggcgcgcgcaaaagctgactggttagtgggtctaaacgtcacacgggccttgacagtgaaatatcaagataacttatccgcaggtcgtgttcaaacaccaactttagcaatggtgcgccaacaagaaaaaacgattgaacaatttaagcctcaaacttattttactatctcgttaactgttgaatcagaaaaagcaaagatgacccaaaaaaatccatacgctttaaaagaacggcaggaagcagaacaattagtcaaagaactctcaaaacaaaagggcttagttaccgatatccaagaaaaagttaaaacagaaaatgcgccgttaccatatgatttaaccgaaatccagcgtgaagccaaccagcgattccaattttctgcaaagaaaacgttgtctcttgtacaaagtttatacgaaacccataaaattgtttcctatcctcgaactgacagcaaatatctaacaacggatacgaaaggaacgatgaaagaacgacttcaagccattgctgatttttcaccagaagtgaaaggctaccttaaaaatggggccgttgttaaacaacaaaaagttttccaaaatgcaaaagtcacggatcaccatgggttgattccaactgaacaacgtcctcgttatgaaaagctaagtaatgatgaacaaaaaatctatcaaatgattgttcaacgattcttaggtttgtttgctgagccaaatcaaaccaaacaaacaaaagttacagtcgcttttggaaaagaaacatttgtctttcatcaaaataaagtagttgttgctggctggaaaacaacagccgaacagccgctatccactgtccaatggcaaaaaggcatgaccgttgcgccaaactttaccattaacaaagaattaacgtcgccgccaaaaccattaaccgaaggaacgttgttaggaaaaatggagaaacacagtttaggcacaccggcaacgcgagctgaaatcattgaaaaactgattaaatcagaattgatggaacgaaccaatagcggtttaagtgtctctgccaaaggaaagcaactattagacttggtgaatccatcacttgtgacacctgaactaacggcaaaatgggaaaagtcgctcgaagcaatcgcttcgggtcaacaaaagagtcaacttttcttaaaggatattgaagaggatacgaaaaaattagtccgtgaaattaaacaaagcgagaaaaaatatcaagatttttccattacgcaaaaaaaatgtccagattgtggctcaaacttacgggaaaaaaatacgaaagatgggaagatttacgtttgtacaaaccaagaatgttcttatcgtcggcgaaaagatcctaaagtatccaatcaccgttgcccacaatgccataaaaaaatggtcatcatagaaggaaaaaatggtcgttctttcaaatgtaaattctgttcgattactgaaaaaattcccgataaaaaagaacgaaaacaaaaaatgactaaacatgaagaacgtcgtttgatgaaaaaatattcacaaccagacgaaccagaagaaagtgctttagcgcaggccttaaaagccgctatgaatcaagagtag

SEQ ID NO: 6476 - DNA, 981 bp, Enterococcus faecalis
  CDS (1)...(981)
atgaacacattttggaagtcgtttcctgacgttgaacgttctttaacggaaacatgtgaattaattgaacaaacgttgcatacacgcaacgaagacattgaagaagccttagtaactttggctcgttctggcggcaaattattacgccccgcttttttctttctttttgctcaactgggtgatgaagaaaaacaagagaaacaacaattattaaaaatagctgcatctttggaaatcctacatatggctacgttgattcacgatgacattattgacgattctccattgcgccgaggcgctgtgactattcaatcacaatatggtaaagacgtggctgtttacacaggtgatttactattcactgaattctttactttgattgcagatgccatgaatggctctgaatttatgaaaatcaatgcacaaggaatgaaacggttattacttggtgaactcgatcaaatgagtcatcgatttgaccgccgcatgtcgattcctgcttatttaagaagtgtcaacggcaaaacagccgaacttttttcactaagctgtcttgaaggggcctatttcggtcatagttcaaaagaagttcaacgtttagctaaacgaattggccgtcatattggcattgcttttcaagtctatgacgatattttagattatactgccgacacggaaaccttgaaaaagcccgctttagaagacttgtcacaaggtgtttatacgttaccccttctcttcgcttatcaagcagcacctgacgtattcagcccttatttggataaaggacgcgccattaccttagaagaggcagctgaagttgcggcgctagtcaatgactatcatggcgttacagaagcacaagcttttgctaaaaaagtaaccaacaaagcaatcactgatattcaacaattgcctgatggcacagcaaaagaaaccttgctttccttaactgagctcttattacatcgttcattttaa

SEQ ID NO: 6477 - DNA, 1212 bp, Enterococcus faecalis
  CDS (1)...(1212)
atgaataagaaacatgttgttattttaggtgctggttacgcaggcttaaaaacattacgcgaattacaaaaaggcgccaaagacgtcgaaattactttagtggatcgtaacaactatcactacgaagcaacggatttgcatgaagttgctgctggaacacaaccagctgaaaaaatcacatacaatattatggatgttgtcgatgaaaaaatgaccacctttatccaaggaacagttaaaacaattgatgctgcaacacaaacagttgctttagaagatggccaaacaatcaattatgattacttagttgtttctcttgggtttgaatcagaatcatttggtatccctggtgtgcaagaacatgctctacaaatggtagatgtgaaaacggctttaaacgtgtatgaacatatccaagaacaaatgcgtcaatacaaagcaactcaaaacgaagaattcttaaaaattgttgtctgcggagcaggctttacagggattgaattattaggttctcttgttgaaaacaaaccaaaatttgctgaaatcgcaggtgtctcagcagatcaaatccaaatttattgtgtcgaagcagttactcgcctattgccgatgtttaacgaaaaacttgcgaactatggtgtgcaattattaaaagattcagctattcatttattattaggtaaaccgattaaagaaatcaaaccaggcacagttgtttatcaagataacgaagcaggcgacttggcagaactttctgctaaaacaattatttggacaacgggtgttagtggaagccacgttgtaggcgattctggatttgaagctcgtcgtggtcgtgtcatggttcaaccagatttaacagatgcgaaccatagcaacgtctatattattggtgactgctcagcagttatggatacagaaactaatcgaccttacccaacgacagcacaaatcgccttgaaaatgggggcgcatgctgctaaaaatattcaagcacaattgaaaggggaagcaactaaacctttcagctttaaatcacaaggttctgtttgttctgtcggaaatacacgtgctttaggaattgttggtaaaacagacattaaagggtacccagcttcattcatgaaaaaaattatcatgaacaaagcgctctttgaaacaggtggtaccaaagaaatgatggctaaaggtcgtttcgacttataccattaa

SEQ ID NO: 6478 - DNA, 2310 bp, Enterococcus faecalis
  CDS (1)...(2310)
atggcacaaaaaagatcaacaaataagaaaaaaagtacgacaaagaaaaagaccaaaaaacaacagcaacaacaagaacgtttaaattatatgtttcttggcctgatttttattttattcggtgtctttggactctttcgcttagggtttttaggcacgttattagcgaattgtttacgcttagttgtaggtaatacctttccatttgcagcgattttactaatcctgtatggcttattagtcatgatttatggaaaagattttccgttaaaaagagggcgccctatttttggggctgttctgatttatattagtgttttgttatttttccatgcctttatgtttcgaaatgttagtggcagtcaaccagatattttaggtaacacttgggaatttttgcaaagcgatttaaaagccaaccaggtgacgcaaaacgtagggggcggtatgattggcgcgctgctttatcaaggaacgtactttttggtggcacaatttgggagctatttaattgccaccttgctactgttagcgggtattttcttgatgagtatgtgggattttcagcaaattgttgatcatttccaaagtattcaagatcgcctaagtcatgtttcggcaaaatcacaggcgcgacaagaagaaaaagaggcgaagcgagcagcgaagaaagaagctaaggctgcagaacgccaagcaaaaattgaagccgctgcccaacaaaaattacaagagcgggaacgtatggaacaagcggcagccgatcgcttaacaaaaacaccagttgaaacccaccaaccaatggtggaagaaccggccgcaccaacgcctgttcaaattgattcgtttcaacagcaaaatcaggcgatgcctgtaccaccaattgcagcaacaaaaccgcaacgagagcaggaagaagaggcggcagatgaagctggtgttctcgaatttgaaatttctgaagaagcggaagatcgtgattatcaactaccaccaactgatttgttagatacaattcaagcaacggatcaaagtggtgaatatgaaaaaatcgaaaaaaacattggcgtcttagaacaaaccttcaagagttttggcgttgatgctaaagtggtcaaagctagtttaggaccatctgtcacaaaatttgaagttcaacccgctgttggggtaaaagttagcaaaattgttaacttgacggatgacattgctttagcacttgcggccaaagacgttcgtatggaggccccaatacctggcaaatcactaatcgggattgaagttcctaatagtgcaattagtacagtatcctttagagatattgttgaggcacaaccaagtcatccagataaactattagaagtacctttaggtcgagatatttcagggatggttcaaactgcggatctatcaaaaatgccgcatttattaattgcgggatcgacagggagtgggaaatcggttgctatcaatggcatcatcacaggtattttgatgcaagcgaaacctcatgaagtaaaattaatgatgattgacccgaaaatggtggaattgaatgtgtataacgggattcctcatttattaacgccagtggttactaatccgagaaaagcagcacaagccctacaaaaagtagttcaagaaatggaatttcgttatgaaaaatttgcagcaacaggcgtccgaaatattactggttacaatcaactaattcaacagaaaaatgcggaagatggcgaaaatcgtccgattctgccatttattgttgtcattgttgatgagttagctgatttaatgatggtggcaagtaatgaagtagaagatgcgattatccgcttagcccaaatggcacgggcagcaggtattcatatgattttagcgacacaacggccaagtgtggatgtcattacaggaatcatcaaagcaaatgtcccttctcgaatggcttttgcagtctcaagtgggacagactcgcgtaccattattgataccaacggggcggagaaactattaggtcgaggcgatatgctcttcttaccaatgggagaaaataaaccaattcgtatccaaggggcctttatctctgatcaagaagtcgaacgagtggttgcgtttgtaacggaccaacaagaagctgaatatcaagaaagcatgatgccaacagatgaaccgaccacttcaggcggtggcgaactcctcaagatgagttgtttgaagaagcgaaaaacttggtggttgaaatgcaaacagctagtatttcattgctacaaagacgttttagaattggctataatcgtgcggctcgcttag

SEQ ID NO: 6479 - DNA, 192 bp, Enterococcus faecalis
  CDS (1)...(192)
gtggttgaaatgcaaacagctagtatttcattgctacaaagacgttttagaattggctataatcgtgcggctcgcttagtagatgaattggaagcacacggagttattggaccatcagaaggtagcaaaccaagaaaagtctttctacaagcggaatcagaagaggcagcacctgaaacaccagaacaataa

SEQ ID NO: 6480 - DNA, 774 bp, Enterococcus faecalis
  CDS (1)...(774)
gtgagaagaataggagtggaaaatatgttagaagtacaaaatttaaaaaaagtttacggaaacgaaattaaatatgaagccttaaaagggattaatttaactgtccaagatggtgaatttattggtattatgggaccttctggaagtgggaaaagtacacttttaaatttattggcaacaatcgatagtccaacagacggtgaaatacttttaaatggaaaaaatccaaacaatttgaatcaagaacaaattgctaaattccgtcgtacagaattaggatttgtttttcaaagctttaatttaatgccaacattaactgttgaagaaaatattattttgccattgacgcttgatggagaaaaagtctctgtaatgaaacgacaattagcagaattaagtgagcgtttaggtatcaatcatctgttgaaaaaacgaattgcagaaatttctggtggacaagcacaacgggtcgccgttgctcgggcaatgattcatcatccacaattattattggctgatgaaccaacaggaaacttagatacgaaatcatctaaggatgtgatgggcttgttacaacaattaaacgaagaagaagcggcgactattttaatggtgacccatgatccgctagccgcaagttattgcaagcgcattgtctttattaaagatggtgaattaattgatgaaattatccaaaacggcaaccaaaaagagttctacgatataatcatggtgaaactggctgagattgaaggtgtcgataatgaattttaa

SEQ ID NO: 6481 - DNA, 972 bp, Enterococcus faecalis
  CDS (1)...(972)
atggaacaagcaatccagttattgcaacagtcattggatacttcttttttagatgcgtatattgaaaatggtgaaaatattttagatgattttcaagtacgagtacttgacggagtacctaatccagagacagtgaaacaattagaaacgctgtatcatacgattaaaaaaattgatttagctcctgaagatgtgcgacgcttgtcccaattacttttgttaaaaggaacgagaaaagagcagcttcaagcaaatcatcaattgacgccagacggtattggctttttgtttgtttatttagtagaacaattaacaaataaatcagagccattaaaaattttagatcctgcttcaggaatgggaaatttactgttaacggttctgctgaaccttgaaacagctggttacaaagtttctggttatggtgtggatatcgatgaaacacttttggcagtatcttctgtgaacaatgcttggtcacaagccaatattcagttgttccatcaagacggattgcaagatttgttattggatccagttgatttagcattaagtgacttgccgattggctactatccaaatgatgagcgagcaaagggatttgctgctgctgctgaggaaggccatagttatgcgcatcatttattaatggagcaagccatgaaatacgtgaagccagcagggtttggcttattcttaatcccgaccaatattttagagactgagcaaagtgaattctttaaaaattggttgacaaaaaacgtctatttacaaggaatgatacagttacctgatgaattgtttaagtcagaacaatcacgtaaaagtatcttgcttgttcaaaacaaaggtgcagatgctgagcaagtgaaggaagttttgttagcaaaacttgcctctttgaaagatatcaataaagtaacggagttctttaaacaatttgaagcttggaaagcttcaaatttaaaataa

SEQ ID NO: 6482 - DNA, 1809 bp, Enterococcus faecalis
  CDS (1)...(1809)
atgtgtggaattgtcggaatgattgggaaagaaaatgtcacggaaagtttgattcaaggattaacaaaattggaatatagaggttatgattctgctgggatttgtgtgaatgatcaaagccaacagccccatgtggttaaggcagttgggggcattgccgatttagcagcaaaattaacgccagaaatcgatggaacagttggtattggtcatactcgttgggccactcatggcgaaccaactgtcgccaatgcacatccccatgtttcaagcgatcaacgctttgcattagtgcataatggtgtcattgaaaactttgaagaattaaaagaacaatttttaagtggtgctcacttaattggtgatacagatactgaaatcgtcgttcaattaattgctcattttgctgaaaatggtttttcaacaaaagatgcttttaaagcggctttagccgaaattaaaggttcatacgcttttgcattaatggataaaatggaccccaatactatctatgtagcgaaaaataaaagcccgttacttatcggtctaggcgaaggctttaatgttatttgtagtgatgcgatggcgatgattaaagaaaccaatcaatttgttgagattgttgatggtgaaattgtaactgttacagcggacaaagtaggaatcgaaacgccagaaggacaagtaatcaaccgagaaccttttgaagcgcaattagatttaaatgacattgaaaaaggaacatatccgttttatatgctcaaagaaattgatgaacaacctgcagtgatgcgcaaaattgttcaagcgtatactcaaggtgaaaaagtgactttagatgaggcgttacttgaaaaaattaatcaatgtgaccgaatttacattattgcttgtgggacaagttataatgcaggttgggtcggaaaatctttaattgaaacgattgccagtattcctgtggaagttcatttatcaagcgaatttggctacaacatgcctattttatctgaaaaaccgttcttcattttcttaagtcaaagtggtgaaacggcagatagtcgccaagtactggtacaggttaatgaattagggcatccatcacttacattaacaaatgttgctggctcaacattatcacgtgaagcggacgataccttgttattacacgcaggaccagaaattgctgtcgcttccaccaaagcttatactgctcaaatcgctgtcttagctattttagcaaaagcaattggtgaagaacgccaaacattagcagccgtctcatttgatgtggctcacgaattgagcgtggtagcagctgtcatggaaaccttgattgatgaaaaacaacaaatgaaagccttggtggaagattatctgacgtatactcgaaatgccttctatatcgggcgaggagtcgactattatgtgtcgatggaagcggccttgaagttgaaagaaatttcctacattcaagcagaaggctttgcggcaggtgaattgaagcatggaacgattgccttaattgaagaaggaacacctgtgattgggattgtgacagatgccaaagtcgctgcccatacaagaggcaatttaaaggaagtcgaaagtcgtggagcaagaaatattgtgattgctttggaatccttggcaaaaccacaggaccaactgattattccagatgttcatccgttactttctgccttagttagcattgttccaggtcaattattagcgtactatgcaaccttacaaagaggctacgatgttgataaaccaaggaacttagccaaaagtgtaactgttgagtaa

SEQ ID NO: 6483 - DNA, 1761 bp, Enterococcus faecalis
  CDS (1)...(1761)
atggcttatcaagcactttatcgggtctggcgttcacaacgtttcgatgacgtagtaggacaaaaagcaattactcagacactgaaaaatgcgatagtgcaaaagaaaacatctcatgcctatttatttactggccctcgtggtacaggtaaaaccagtgccgcaaaaattttcgctaaagcgattaactgtaaacatagtcaagatggtgaaccttgtaatgtttgtgaaacctgtgtagccattacggaaggtcgtttaaatgatgtcattgaaattgatgcggcgagtaataatggcgtggaagaaatccgtgatattcgtgataaagcaaagtatgcaccgacacaagccgagtacaaagtttatattattgatgaagttcatatgctatcaacaggcgcgttcaatgcacttttaaaaaccttggaagaaccgccacaaaatgttatttttatcttagcaacgactgaaccacacaagattccgttaacgattatctcacggacgcaacgctttgattttaagcgaattagtacgcaagatatcgtcgatcatatggcccatatcatgcaggaaatggctctcgattatgaggaacaagccctttatgtgattgggcgtgctgcggaaggtgggatgcgagatgccttgagtatcttggatcaaacgatttcatttagtgatgaaaaagtaacactggaagatgcaatgcaagtgacaggcagcctaacctatgaaatgatggatcattatattcagtgttgtgtcgccggtgatgttgaacgagcattagaaggtttggaaagtattttaggcgaaggcaaagaagcgcgccgtttcttagaagatttgttattatattgtcgagatttactgatgtatcagcaagcaccgaagttattagcagaaaaagcaggaactttgacagaagcatttaaggaactagctacacaaacacctgctgaaaaaatctaccaactaatccaaattttaagtgacacacaaaatgagatccgctttaccaacaatgcgaatatctatctggaagtagccactgtcaaattggctaaaacggtgcaacccaataaacacaacacgccagaaacagctaatcaagatggtagtgcagagggaaatccagaattagcagatttacaaaatcaaatcgggcaactgaagaaagaactggctgaattaaagaaacacggtgtagctgccaaagaagcagatgcgccacgtcaacaagcacgaccacaagcgccaaaaagttcgttccgtgtacccacagaacgcgtatatcaagtcctaaacgaagcgactagaacacatttaatgaatgtgaaaaatgtctgggaagacttactgcaaacattatctgtgactcaacgagcgatgctcaaagctagtgaacctgtcgcagcgagtcctaagggcatcgtggtggcatttgactatgagattgtttgtgctcgtgcaacagacgatgaagagatgcagttagctttcaataataatttaagccgtttgatggactatacaccagagatggtctgcattactagagaaagctggccaaaactaagacaaagttttattaaccaaaatcagggcagtttgaatcattctgaacctgaaaatgaaatggctcgtctagcggacgaaccgcctgtaacaaatgaacattcacaagaaaatccagtagtagatgaagcaatcgctatgtttggtgaagagcttgtcgaagtactagatgattaa

SEQ ID NO: 6484 - DNA, 315 bp, Enterococcus faecalis
  CDS (1)...(315)
atgatgcgaggaatgggcaacatgcaaggcatgatgaaacaagtacaaaaaatgcaaaaagaaatggccaaagcgcaagaagcgctaaatgaaaaagaatttatcggtgaggcaaccaatcaacttgtgacagcgacctttactggtgatcgcacaatgaaagatttgaccattaaagaagacgtggttgatcctgaagacgttgatatgttacaagatttagtcattatggctgtcaacgatgcgttagtaaaaattgaaaaagaaactgaagcaactttaggtaaatacaccaaaggaatgccgggattctaa

SEQ ID NO: 6485 - DNA, 729 bp, Enterococcus faecalis
  CDS (1)...(729)
atggcgaatgcattactttatattgatgctaagcccattatggcagatgatccccgggaatttccgcagttgtttcagcaaaccagtgccttggttttgaatttaggccatttatcacaagaacgagagcaaagcttgttagcagctagtgattatgctcggcaagtgactaaaccgaccgtggtcgatttagtcggttatggcgccagtgatattcgcaatgaagtcggggaaaagctggtgcacaatcagccaaccgttgtgaaagggaatctttcagaaatgcggactttttgccagttggtgagtcatggtcgaggagtagacggcagccctttggatcaaagtgaagaagcaattgaggaactgattcaagctttacgtcaacaaacgcaaaagtttccccagacggtatttttagcaacagggattcaagatgttttggttagccaagagcaagtgattgtcttacaaaatggcgtgcctgagttggattgtttcactggcacgggcgatttagtcggcgcattagttgccgctttattaggtgaaggcaacgcgccaatgactgcggcagtagccgcagtgagctattttaatctttgcggagaaaaagccaagactaagagccaagggctggccgattttcgccaaaatacgttaaatcagttatctcttttaatgaaggagaaggattggtttgaggcggtgaaaggacgagtgctatga

SEQ ID NO: 6486 - DNA, 636 bp, Enterococcus faecalis
  CDS (1)...(636)
atgagagagcaattgaaagtttatttggtgacaggacggtatgattttagtgatactgaatttttaaaacgaattgaaactgcttgtcgcagtggagtgacattggtccaactgcgtgaaaaggaagtgtcaacacggcgcttttacgaattagcagtgaaagttaaagcggtaacagatgcgtatcagattccgttgattattaatgatcgtgtcgatatttgcttggcagtggatgcggcaggtgtgcatataggggatgatgaattaccggttgctcttgtgcgaaaactggttgggtccacaaaaatcgtaggtgtttcagccaaaacggtggcacgaggagttgaagcggaaaacgagggcgccgattatttaggcgtgggcgcaattttccccacaacgactaaggacagtccgttaacttctttgcagacactttctgaaattgccgcagcagtcacgattcctgttgtagcgattggtggaatcaaagaagaaaatatagaacaacttatgggaacgggagtggctggtgtttcactggtcagtgaaattatgctggctgaacagataaccgagaaagttcaagggttgatgcgtgtaacggagcgaatgttggaggtgagaaaatga

SEQ ID NO: 6487 - DNA, 945 bp, Enterococcus faecalis
  CDS (1)...(945)
atgctggggattatgcttcttttcattagtgggaatttaattgctgcgtttgcaccaacgtttattattttattggtagggcggatactttctgcattggcgcatggcattttcatgtctgtttcgactgtcattgccgcagatgttgtgccgccatcacgtcgtgccagcgccattgctattatgtttacgggcttaacggttgcaacagtgactggtgtacctttagggacgtttattgggcaacaaacagcttggcatatgtcctttctttttatagccagtattggcttggtgggactgattgctagttattttttagttcccaaaaatttaccgataccagggaaggttgacttaaaaggaatcacgcggatttttacgaacaaacccctcgttttctcttttctaattactgcttttggttatggtggaacgtttgctgcatatacgtacttgtcaccgttattggaaaatttaggcttttcagacaacgcggtagtgattattttagttgtttatggcgtaatggtcgcaattggcaatacagtaggtggtcactgggcaaataaaaaacctttagattcgttagtaaaaatgtttagcttattaattctgtccttagtctttttattcattactgttttaatggataacagtcttctaggcttattagcaagtttgatgttgggtctatttgcctttatgaatgtacctggtttacaactatatgttgtagaattagcggaaaagtatgttccagaagatatcactttggcctcagcttttaatattgcagcctttaatattgggattaccgttggctcaatgacaggtgggatggtcacagatcatttatcagtaacatatacaccgatttttggtggttttatcgtgctaattgctgtcttgttcgtactttatattcggaagcaagaagcataa

SEQ ID NO: 6488 - DNA, 663 bp, Enterococcus faecalis
  CDS (1)...(663)
atgacatttacagaacaagccaaagaacaagcgcaagcttcttggcaaggaagttttcagcatccttttatcacagagttacatgaaggaaccttgagtccaacgatttttcgctactatttaattcaagatcattactatttaaaacattttagtcagctttatcgcttgattgcggcacaaacgcaacaacctcgattgaaaaaattactcttaacaaatgcggaaagtctcgcgttgggcgaattagctattcgtgaaactttttttgaagaactagcgattacagaagaagaagttgcagcgacaccgattgcaccaaccgcttatcactatgtttctcatatgtatcgccaacttattgaaggaacgcctaagacggccgcagcaagtatgttgccttgttcttggctctatcaagaaattggtgcacagttagtcaaacaacactcaccagagccactgtaccaacgttggattgaaacctatgctggggaggaagcgtaccaacacgtccaagaggaacgccaactgttagaccaattatatgaagaaagttcaccacaagaacaagcagctatgatcaccgcttttgttatcagcagtgagatggaatacgctttttgggaaatggcctatacacacgaaacctggattggttaa

SEQ ID NO: 6489 - DNA, 639 bp, Enterococcus faecalis
  CDS (1)...(639)
gtgcagggtatttttatcacatttgaaggtccagatggtgctggtaaaaccagtgttttgaaggaagtttctgaaagattagctaaagagtcaaaacgaaaaattgtcactacaagagaaccaggcggcataccgattgccgaaaagattcgaacagttattttagatccaagaaatgacagaatggatgagcgaacagaagctttactttacgcagctgctcgtcgtcaacatttagtggaaaaaatcttgccagctttggaagcgggtcatttagtcctatgtgatcgttttgttgacagctcattagcctaccaaggcgctgggcgtagaattgggattgcccccattgcttcaattaatgcgtttgcgacagaaggtgtctcaccagattttacaatttatttagacgttgactcagatactggcttacggcggattcaagaaaatcgaacacagcaaattgatcgcttagattcagaaggattagaatttcatcaacgtgttcgtcatgaatatttgaaattagcagaagaaaatccacaacgtatcaaaaagattgatgcacggatgagtttagaacttgtcgtagaagcaacgtatcaggcgattattgaacgttatccagaaaacttttaa

SEQ ID NO: 6490 - DNA, 951 bp, Enterococcus faecalis
  CDS (1)...(951)
atgaatgaagcacaacagctacagcaaatgcaacctttgctgtacaagcaactccaaaaaagttttgagcatggtcgtcttgcccatgcttatctttttgaaggagatacaggaactggaaaacaagaatttggcttatggatggcgaaacatgtcttttgtacgaatttagtaaatcaacagccttgtaacgaatgccataattgtgtgcggattaatgaaaatgaacatccagatgttttaagaattgcgccagatgggcaaaccatcaaagtgaaccaaatccgtgaattaaaagcggagttttctaaaagtggggtcgagactgctaaaaaagttttcttaattcaagaagcagataaaatgagtaccggcgcagctaatagtctcttaaaatttttagaagaaccagaaggacaaattttagctattttagaaaccacttcgctttctcgaattttaccaacgattcaatcacgatgccaaaccttacattttcaaccattagtcaaaaaaacattaattgatcgcttaatcaaacaggggattggtgaaaagactgcaacccttttagctgagctgacaaatagttttgagaaagcagttgaaatctctcaagatgaatggtttaatgaagctaaggaaatcattttgcaatggtttaattatctaaaaagtaatgatttacaggcatttatctacgttcagaagaaaatggtcaaagtatttaaggaaaaagaacaacaagcgcttagctttgacttgctcatggtttattaccgtcaattattggaagaaagtgttgcgacacagcaagccaaaaaagtaacggaagagcaggcggaacggttggcgctaattttgaaagcacgccaaaaatggactgccaatgttagttggcaaaatgtttgtgaacaattagttatccaaatgattcaccctaaatcataa

SEQ ID NO: 6491 - DNA, 873 bp, Enterococcus faecalis
  CDS (1)...(873)
atgcaaaaacagaaaagttttgataagcaaacaacaaaaggaaaattgtatcttgtcccaacaccgatcggcaatttagaagatatgagtattcgttgtttaaacatattgaaagaagcaacggtgattgctagtgaggacacaagaaacacacaaaaattgctaaatcattttgagattacaacaccacaaattagtttacacgaacataattacaaagagcgaattcctcaactgattacacgattgctgagtggtgaaacgattgcccaagttagcgatgcaggtatgccttcaattagtgatcctggtcatgaattggttacagcatgtcttgaagaagaactggcagtgattgccttgccaggacctacggcaggaatgaccgccttgattgcctcgggtcttttaccacagccatttacgttttatggttttttaccaagaaagaaaaaagaacagaaagacgtgttatcagcattaaaagaagaacggccgacacagattttttatgagtccccctatcggattgctaaaacggtcgcaacgtttgctgaagtctatggtcaagaacgccccgctgtgatttgtcgagaattaacgaaacttcatgaagagtatttgcgtggtaccttaggagaactaacagaatatttagcagaaaatacgctaaaaggcgagtgttgtttattagttagcggatttactggtgagaaagagacaatagcagcaatgccagctatttccctcaaagaacatgtacaagttttaatggaggaagagggacggagttccaaagaggcgatcaaagaagtggccaaattgagaaatgtaaaaaaacaagaagtatataaagaatatcattccatttaa

SEQ ID NO: 6492 - DNA, 1521 bp, Enterococcus faecalis
  CDS (1)...(1521)
atggaaaaagtaattaatatgattcaaacgattgatgaatgggcacgtaaagaaccccaacggcctgtttatttaaccgaagaaaaagtctctacgtatggagagttaaaagaaaagtcagacaatctagccgcttatttagctgagctgaaaacggacaagtcagcgattgtcgtatatggagaattagattttgaaatgattgtgagttttttaggcgcatcgaaagctggttttagctatatccccattgatgcacatacaccaaaagaacgcattgaactaattctaaacgtagccaaaccaaccgcagtgattgctgtgcatgaatggcctgagttagccactgaagtgccagtaattacggcggaagaattaacagaaatgatgatacatgcaccccggcatgcgcctgcgttaatacctgtcacaggagcaagtaattactatatcattttcacttcagggacaactggcgtaccaaagggtgtgcaaatcagccatgataatttagttagctttacgaattggttgttgcaagattttggtttagaagaaggggcccgctttttagcacaggcaccttattcgtttgatttatcggtgatgtctatttatcccgcattggcgttaggcggctcattaactccgttacccaatgaaatcattaacgattttaaacaattatttacgcgtttgccacaattaacaatcgacgtctgggtttcaacaccgtcctttattgaattgtgtctaatggaaccaagcttcgatggtgaacatctaccagcactgcgcacgtttttattctgtggagaagaattaccaaaaccaacggctgagaaattagccgctcgtttcccaactgcgcatatttataatacgtatgggccgacagaagcgactgtagcgattagtgccattgaaatcactcaagaagttttaaaaagtgttcaacgtttaccaatcgggtatgtgaaagaggatacgcaaatttatattatggaaggcatgtcaaaattacctgcaggtgaaattggtgaaatcgtcattgctggaccaagtgtttccaaaggctatctaaataatcctgcgaaaacagctgaagcttttttccaattagatggcgtaccagcttatcgcacaggcgatgctggaaagttagtcgataacctattgcagtatgagggacgcttagattttcaaattaaattgcatggctaccgcattgagttagaagaagtggatcatcacttaacgaatgtttcctacgtgaaacaagcagtcgttgtgccgaaatatcaaggaaataaagtccaacaattaattgcctatgtcgttccgcaagcacatgaattttcaagtgattttcaattaactaaggcaattaaacaagaattagccacgttgacaatggactatatgattccgcaaaaatttgtatatgttgaacaattacctttgacaagtaatggtaaaattgatcggaaagggttgatgaatgaggtgaatgccacatga

SEQ ID NO: 6493 - DNA, 1083 bp, Enterococcus faecalis
  CDS (1)...(1083)
atggatgcaaaagaagaaaaaatgttaattgatttaacaagtgctaaagggattgctgggaatgaagacgaagtacgttcgttatttaaaaagtatgcagcaccgtatgcggataaatttttatatgatggtcttggcagtattattgcaaaaaatgttggtgataaagaaggaccaaaagtctacatttctgggcatatggatgaagtcggtttcatggttacccaaatcacagaaaaaggctttttaaaatttcaaaccgttggcggttggtgggggcaagtgatgttggcccaacaagttcagattaaaaccacgactggtaaggtttaccatggtgtcattgggtctaaaccaccgcatgtgttaacagtggaagttcgtaacaaaccctatgagattgcagatatgtttattgatattggtgcaagtagcgatcaacaagttgcagaatgggggattcatccaggggatatggtgacaccatatattgactatcgtcgcatgaatgatacaaaatttttattggcaaaagcgtgggataaccgaattggtacggccgtttcattaaaagttttagaaaatttagcgacagaagggcaccccaatattttatttgcaggcagtgatgtgcaagaagaagtcgggctacgcggtgcgcaaacaagtacgcatcttgtgaatccagacatagcgtttgctttagacacaggaacagctggtgacacaccaggaatgacacctaaagaagccgactctgttttaggtgaaggaccacaaattttgatttatgatgcatcgatgattccgcataaaaaattacgtgattttgttattcaagtggcggaagaaaataacattcccttccaatatacagtgattacagggggaggtacggatgctggtcgcatgcatttaacgcgcaacgggattccatcattagccatcacggtgcctgttagatatctgcattcacatacctcagttattcatgaagatgattatttcaacacagtcaaattagtcacagaagtggtgaaacgtctagataaagaaacagtcgctaaattgactagttattag

SEQ ID NO: 6494 - DNA, 564 bp, Enterococcus faecalis
  CDS (1)...(564)
atgaatttaattaatcaaaaactttttgactttgaatgtgatgcctatcacgatggtgaatttacacgagtatcaacagaagatattttaggaaaatggagtattttcttcttttatccagctgatttttctttcgtgtgtcctacggaattaggggatatgcaagagcattatgcgcatttacaggaattaaattgtgaggtttactctgtttcagaagatagtcattatgtgcataaagcatgggctgacgctacagaaacgattggaaaaattaaatatccaatgttagccgatcccaacggtcaacttgctcgtttctttggcgttttagatgaagcttctggaatggcttaccgtgcttcatttattgtgagtccagaaggtgagatcaaatcttatgaaatcaacgatatgggtattggtcgtaatgctgaagaacttgttcgtaaattagaagcttctcaatttgtagcagaacatggtgataaagtttgtccagccaattggcaaccaggagaagaaacaattgcgccaagcttagatttagttggcaaaatttaa

SEQ ID NO: 6495 - DNA, 1254 bp, Enterococcus faecalis
  CDS (1)...(1254)
atggagaatagtaaaaaaaatcaagcagtgcaagtgagcaatagttactggattaaagtcgtagccattttcttcgtaggctggattttaatgtacgcaacacgaactatttttaatccagtgatgggggtcattggagaacaatttggtctaagtaacacacaacttggtttagccaatagtatcttctttctaacctatgctgttgcacagattccttttgggatgattggcgataaaattgggcggaaattagtcattgctgttgggtttatcgttcttgctatttctacttattttagtggattagcgacaacctttgttatgtttttagtcattcgtgcaattgctggtattggtcaaggagcttactatggcccgcaatatgcgctatcgacagaagcgattccagcaagtaaacggaccatcggtaatgccatcatcaatagtgggatggccttcggtacatcaggtgggtacctactttcaagtaagttggttttagaaaatggtgaacattggagcaaaccattctttatcatggcgattccaacgtttatcgtaggaattcttttctatacaattttgaaagaaaaagtgattcgtcctggtgaagaagctgcacgagcagctgctgaagaaggaccacaagaaaagatctcattaaaagaaattttctcaaatcgtaatttattagccgcatttattttatgtttcacaagtatttatgcaaactttgtcattattacttggttgccacaatttttaattgctgaacgtggctttacaggagcgagcgttggtttcatttcatcacttgtaccatgggcctctattccaggagccttaatcttcgctcgtttgaatgataaaacaggtgcgacgaaaaaattagtctttacattagtacctttagcaatcctatctgtctttgcgattgcttttgtaacaaatcggacattgttaatttctgttttaattctttatgggttaacagggaaattagcgttagatccaattatggtgacttttgttaccaaacatgcaccaaaagcggccttaggaacaacgttaagtgcctataattttatcgggatgtcagggtcaatcctagcaccgtatgtcacaggatatttagcagatacagcaggctcaatgcaagttggcttctatctttcttgtgtactattagttattggtttactagcttttgctttcttagctaaagatgagagtaaaccgaaattaggttaa

SEQ ID NO: 6496 - DNA, 2295 bp, Enterococcus faecalis; identical to SEQ ID NO: 3894
  CDS (1)...(2295)

SEQ ID NO: 6497 - DNA, 438 bp, Enterococcus faecalis
  CDS (1)...(438)
atggaaaatcttacgaatatttcaattgaattaaatcaacagtttaatacaaaagaagaagctattcgcttttgcggcgaaaaactagtcgaggcaggctgtgttgagcccgcttatattgaagcaatgattgaaagagaccaattgctatctgtttatatggggaattttattgccattcctcatggaacagaagaagccaaaaaattagtgaaaaaatcaggaatctgtgtagtgcaagtcccagagggcgttaattttggcaccgaagaagatgaaaaaattgctaccgtattatttgggattgccggagtcggtgaagaacatttgcaattagtccaacaaattgcactttattgtagtgatatggataacgtggtgcaacttgccgacgcattaagtaaagaagaaataacagaaaatttagccattgcttaa

SEQ ID NO: 6498 - DNA, 1155 bp, Enterococcus faecalis
  CDS (1)...(1155)
atgaacgcagtacattttggagcaggaaatattggacgcggctttatcggcgaaattttagctaaaaacgggtttcatattacgtttgtggatgttaatgaaaccatcattcaagcgttaaaagaacgtaaaagttatacaattgaattggccgatgcctcacatcaacaaattaacgttgaaaatgtgaccgggttaaataacatgacagaaccagaaaaagtagtagaagcaattgcggaagccgatttagtcacgacggcaattggtcctaatattttaccaagaattgctgaattaattgctcaaggaattgatgcacgtgccgaagcaaattgtcaaaagccgctggatattatcgcttgtgaaaatatgattggtggttcaacctttttagcagaagaagtggccaaatatttgaaaaacccagcttatgctgaacaatggattggttttcctgatgcggcggttgatcggattgttccattacaaaaacatgaagatccactttttgttcaagttgagcctttttgtgaatgggtcattgatgataccaaccgaaaagccaaagagattcagttagaaggcgttcattacgttgctgatttagagccgtatattgaacgaaaattatttagtgtaaacactggccatgctacagttgcctatacaggggcgttgttaggctatcaaaccattgacgaagcgatgcaggacgccttagtagtagcacaactcaaatcagttttgcaggaaaccggtaaacttttagtggccaaatggaattttgatgaacaagaacatgcagcctatattgaaaaaattattcaacgtttccaaaataaatatatttcagatgctattacacgtgtagcacggacaccaatcagaaaattaggtgcgcaagaacggtttattcgaccaatccgtgaattacaggaacgcaatctagtgtcgccgcatttattagcaatgattggtattgtttttaattatcatgatccagaagatgaacaaagccgtcaattacaggaaatgcttgaccaagaaagcgttgatacagtgatcgctgaagtaacgggcattgaagatccagaaacggttaaaaatattaaacaaaacgtagaacgctatgcgcgaccacaagtagcataa

SEQ ID NO: 6499 - DNA, 1347 bp, Enterococcus faecalis
  CDS (1)...(1347)
atgatgaataagcaacgaccattgaccgctaacgaagaagaaagttatttggccttagatcaactgttaaaaaagtcaccgaaattactagatacgcctttaagtaaagaattaaaggaaacgattcaaacaattgaggcaaaaggattaagtgtgattcttcgaaagaatgcacggtttccttattattcggataatttagtagaaaaatctttgtctgtacatattccaaactacgaaatgaataatattatgccaactggcacactggataatgcagggcgtctatatcattatgtcaaatccgattttcattatttagatggttctaacgggagctttattgtcttgaaacgcgaaagcagcctttttgaattcttcacacgctggattatctggatgattttgttaattatccttgtagcaattgcggcagcttggctcattaataagcgcttaaccaaaaccactatcgagccattagaagcattagaaaaagcgactaaaacattgggtaaggatgcccaaaaagaaaatccatttacaccaactagccaccaaaccgtctcaacagaagtcaaacagctccaacttagttttgaacaaatgtggcaagatttagaagaagccaatgcggaacgcgaaaaatatgaagctaatcggaaagaattaattgcaaatatttctcatgacttaaaaacaccaattacttctattattggttacgttgaaggtttgatggatggcgttgccaatactgaagaaaaaaaacagcgctatttaacggtcattcatgaaaaaagtttaggcctcaatgatttaattgaagaattatttttgtattccaaattagacctagaccgtgctgtctttacaatggaaaagaccaatttcactcgttttattgcacatattcttgaagaataccgtttggaacaagaactcgtgatcacttctgtacttcccaccgaagctttatacgttcaaatggatcccacgcagatgaatcgcgtgattaccaatctaattcaaaatagcattaaatttgcggatcccactaaagaacaactagcctttacgatttctttaacgcataatcaaacagacttagttttaaccattacagataacggcattggtatcgataaaaaagaattaccttatttattcgaacgcttctatcgtgtagacaaatctcgaaccccaacagttaaaggaagcggcttgggattaagtattgtcaaacaaattattgactatcatcagggaacaatcactgtcacaagtaaaaaaggagacggcaccaacgtgataattacgttgccgttgttggaggatgaaaaatga

SEQ ID NO: 6500 - DNA, 789 bp, Enterococcus faecalis
  CDS (1)...(789)
atggaatttaaaatgaatgattttcaattagatggaaaagtagcgttaattacaggtgctgtttatgggattggctttgagattgcgaaatccctagctgaagcaggagcaacaattgtttttaataacttatctcctgaatcagttgaacaaggcttggaaaattatcgggccgcagggattgaagcacgtggttatgtgtgtgatgtcactgatgaagagcaagttcaagcgatggtcgctcagattaaagaagaagtcggctctattgatattttagtcaataatgcgggaattattaaacgaattccaatggtggatatgtcagcagaagagttccgtcaagtgattgatgttgacttgaatgcgccatttattatggcaaaagcggttattccagatatgattgaaaagggtcatggcaaaattatcaatatctgttcaatgatgagtgaactaggtcgtgaaacagttagtgcgtacgcggcagcaaaaggcggactaaaaatgttaacgaaaaatattgcttctgaatatggacaatataatattcaatgtaatgggattggacctggctacattgaaacgccacagacggcgccattaagagaaccagggcatccatttaacgaattcatcttgggacgaacacctgctaatcgttggggcacaccagcagacttagctggcccagcagttttcttagcatctaacgcttctgactttgttaacggacatatcttatatgtcgatggtggaattttagcttatattggaaaacaaccataa

SEQ ID NO: 6501 - DNA, 981 bp, Enterococcus faecalis
  CDS (1)...(981)
atgaagatgagcaagaatttttgggcaacattgccaaagcccttttttgttttagcaccaatggaagatgtcactgatgtggtctttcgtcatgtcgtgaaagaagctggggcaccagatgtgttttttacagagtttactaattcagatagttattgtcatcctgaagggaaagacagtgtgcgcgggcgcctcgtttttacagaagatgaacagccgatggtggcacatatatggggggataaaccggaatttttccgtgaaatgagtatcggcgtagcggagatgggctttcaagggttagacataaatatgggctgtcctgtgcccaacgtggctgagcgtggaaaaggcagcgggttaattttgcgcccagaagtcgcggctgaattgattgacgccgccaaagcaggtggcttacctgttagtgtcaaaacacgcattgggtttactgaaatggcggaaatggaggcatggatcacgcatttattagagcaagacattgcgaatctatccattcatttgcgaacacgaaaagagatgagcaaagtggatgctcattgggaggtcattccgcaaattatggctattcgggaccgtgtcgcaccgcaaacgacaattacgattaatggggatattcccgatcgtcaaaagggcctagaattagcagaacaatatggtgtagatggcatcatgattggccgggggatttttaaaaatccttatgcctttgaaaaagaacccaaaacgcatacgccacaagaattgctgggcttgctacgtttacaattggatttgcaagacaaatatgcagaattggtgcctcgttccatcgttgggctgcatcgcttcttcaaaatttatgtcaaaggctttccaggtgccagtgatttaagagcacaattaatgaatacaaaatcaacggatgaagtgcgccagttgttagcgacgtttgaagcagaacatggtgtgcttgactaa

SEQ ID NO: 6502 - DNA, 270 bp, Enterococcus faecalis
  CDS (1)...(270)
atggctaaaaaatcaaaaattgctaaagcaaaaaaacaacaagcaatgattgcaaaatatgcgcctattcgccaagccttaaaagaagctggcgattatgaaggtcttagcaaattgccaaaagatgctcatccaagtcgcttaaaactccgcgatcaaacagatgggcgcccacgtggctacatgcgtaaatttggcatgtctcggattcgtttccgtgaattggctcaccaaggcttgattcctggcgtcaaaaaagcaagctggtaa

SEQ ID NO: 6503 - DNA, 1770 bp, Enterococcus faecalis
  CDS (1)...(1770)
gtggtcgaattatttattttaatgatggaacgggtaggcttaattattttactggcctttcttttagtgaatgtgccttattttaagcgtgttttattaagtcgtgaaaaaatgtcttcaaaagttcaattgattttgatttttggtttatttgctattatttctaattttacaggtatcgaaatcgctaagaatcagattgttcccaataatttactaacctatttaagcagcaatgcttccattgcgaatacgcgtacgttagtaattggcgtttctggattagtgggtggtccgattgtcggcagtgcggttggtttaattgctggctttcatcgggttattcaaggcggggggcatagtttcttttatgtgcctgcttctttaattgttggcttaattgccggttttttagggagccgcatggcaaagcaaaccgtttttccgtctgccggcttttctgccattgtcggagcgtgcatggaaatgattcagatgatttttattttctttttcagcggtgatctatcggatggggccacgttggttcgttttattgcgctgccgatgattttgttaaatagcgtaggaacgttcatttttatgtcgattctaacgacgacattgaaacaagaagagcaggccaaagcggttcagacgcacgatgttttggaattagcagcggaaacactgccatattttcgagaaggcctcaataaaaattccagcaaaaaagttgcggagattattaagcattatacaaaagtcagtgcgattagcatgacaaacagtcatcaaattttagctcatgttggcgcaggaagcgatcatcatattccagagctagaagtcattacagagctttctcgggaagtgttacggacgggccgaatgaccatcgcacatgccaaagaagaagtcggttgttcggaccctaattgtccgttgcaagcggcgattgtgattccattattttcccatcagcaaattgttggcaccttaaaaatgtactttacggatccagcgcagttaacgcatgtcgaggaacagttagcagaaggtcttgggacaattttttcttcacaaattgaattaggtgaagcggaagtacaatcaaaattacttaaagaagctgaaattaaatccttgcaagcgcaagtgaacccgcatttcttctttaatgccatcaatactatttccgcattaatgcggaaagacagtgaaaaagcgcggaaactattgctccaattaagcaaatactttcgaggcaacttgcagggagccgtgcaaactacgatcccagtttcacaagaactagaacaagtaaaagcctatttgtcattagaacaagcacggtttccgaatcgttatcaagtaacatttgacgtagaagaagcggttgcttcagaaaaagtaccgccgtatgcgattcaggtgttagtggaaaataccatcaagcatgcatttggcagccgtaaagagaacaatcaagttcgggtagtggtcaaagcaaaacaacacaaattacatgtggatgtgtatgacaatgggcaagggattcctgaagaacgccgcttgctattaggaaagacgacagtgacttcggaaaaaggcaccggcacggcactggaaaacttgtcccgcagaatggcgaacctttatggatcagaaggttgttttttaattgaaaatttagagacaggcgggagccatgttcatttagaaatcccgatggaacaggaggaattagatgcacgtattaatcgttga

SEQ ID NO: 6504 - DNA, 729 bp, Enterococcus faecalis
  CDS (1)...(729)
atgcacgtattaatcgttgatgatgagcccttagcacgagaagaattgagctatcttgtttcccaacatccgcaagtgacgagcgttgcagaagcggattctgtggcggaggcaatggaagagatgatggatcaaaagccagatctgttatttttagatattcatttgactgatgaaagcgggtttgatttagcggaaaaattaacccatcttaaaaaagcgccctacttggtctttgcaaccgcctatgatcaatatgcgttaaaggcctttcaagtgaatgcaaaagattatattttgaaaccttttgaagaagaaaaaataacacaagtcattgaaaaagcatcgaaagaaatggctcaagctgtcccagaaaacactgccgaaaaaggaccaaaatctgaagcaatacctattcaaggggaagaccgcatttatcttgtggcgccagaagatatttacctcgtttctgtcgaagaacggcaactgagcatttttgtagatcaacaggtctataagatgacagggaccctcaacagtatcgaacagaaattacctgccacgctctttattaaaacgcaccgaagtttcatcttgaatcgaacaaaaattcaagaaatccagccgtggtttaataacacgttgcaagtaattttaaccaacggctcaaaagtacctgttagccgttcatacgtcaaagaatttaaagaaaaacttggcttaagttaa

SEQ ID NO: 6505 - DNA, 546 bp, Enterococcus faecalis
  CDS (1)...(546)
gtgattgaaggtaaaatattaaatggtattgtttgccccacaatgagccccggaaactcaagtgtatgtcaaacatcgaaaacaaaattggaggaaagaaacgtgcgtacaacatatatggccaaagctggcgaagtagaacgtaaatggtacgtagtagatgcaacagatgttcctttaggacgtctatcagcagttgttgcttctgtactacgtggtaaaaataaaccaacattcacaccacatgtggatactggagatttcgtaatcgtaattaacgctgataaagtaaaattaacaggtaaaaaagctacagacaaaatttactaccgtcactcaatgtatcctggaggattaaaatcagtgacagctggtgaattacgcgacaaaaactctcgccgtcttatcgaaacttctgtaaaaggtatgctacctaaaaacactttaggacgtaaacaatttactaaattgaacgtatacggtggagctgagcatccacatgctgcacaacaaccagaagtattagatatcacgaacttaatttaa

SEQ ID NO: 6506 - DNA, 66 bp, Enterococcus faecalis
  CDS (1)...(66)
atggttgaacgtaaaaaaccaggtcttaaaaaagcccgtaaagcttcacagttctcaaaacgttaa

SEQ ID NO: 6507 - DNA, 2118 bp, Enterococcus faecalis
  CDS (1)...(2118)
atgagtgaaaaaaaacaagtctatcgggttgaaggattgagctgtacgaattgtgcggcaaaattcgaaaaaaatgtttctcaaataccaaaagttaccgatgcaaaagtaaatttcggtgccggaaaaatctctatcgaaggcgaagcgactattgcggaaattgaagctgcaggagcttttgagaatcttaaagttcagtccgaacatgatacagaacctcgcattgaaacaaaagagccttttgtgaaaagaaactggaacctattggtttcactgtttttaattattttggcattaggatctcaagtagttaacggtgaagatgcgctattaacagaaggattatttatactagcgattattatcggcggatttagtttgtttaaagaaggattttcagacctattaaaattgaatttctcaatggaatctcttatgacaattgcaatcattggtgctgcaattattggcgagtggactgagggctcaatcgttgttatcttatttgcaattagcgaagctttagaacggttttcaatggataaagcaagacaatcaatacgttccctaatggatattgctccgaaagaagcattaattagaagaaataatgttgaacaaatgattaatgtttcaaaaatcgaagtaggcgatattatgatcattaagcctggacaaaaaattgctatggatggtcaagtcattaaaggccattcctcagtaaatcaggctgcgattaccggtgaatctgtccctattgaaaaaaatattaatgatgatatctttgcaggaacgattaatgaagaaggtgcacttgaagtcaaagttacaaagcatgtgaacgacacgacaattgccaaaattattcacctagttgaagaagcacaaggtgaacgagcacctgctcaagcatttgtcgataaatttgcgaaatattatacacccaccattatggtgattgccgcattaatcgtcatcgttcccccattattttttaacggagattggaatacttggttgtatcaagggctctctttattagttgttggctgtccttgttctttagtaatctcaacacctgtgtctatcgtttcagcaattggaaactctgctaaaaatggtgttttggtaaaaggcggtatttatcttgaagaaattggtggcctcaaggcgattgcctttgacaaaacaggaacattgactaaaggaacaccaacggtaacagatttcactacagttgattcaaaagacgaagagaaatatttctcaattattacagcattagaatcatattctcaacatcctctcgcgtcagcaatcttaaaagaagctgataatagagcgatttcttataaatcagtagttgttgacgagtttacttcaattactggaaaaggaatacaaggaaacattgaggggattacctatcttgtagggagtccaaagctttttgaatctatcttaacagataactcaaagattattgaaaattaccaaagacttcagcaacaaggaaaaacagcaatgctcttaggaacagataaacaaattttagcagtcattgcagtagctgatgagttaagagaatcaagtaaagcagtcattgaaaaattacatgatttaggaatcgagcatacgataatgctgactggtgataatgctacaactgctcagtcaatcggaaaacaaacaggtgtaactgaaataaaaggcgatttgatgcctcaagataaattagattatattaaatcacttaaggaaacctatggaaaagtcgccatggttggtgatggtattaatgacgcaccagcattagctgcctcaacagtcggtatcgcaatgggtggcgctggaacagatacagctttagaaacagctgatgtagctttaatgggtgatgacttacagaaacttccctttatagttaaattaagtcgacaaacattgagaatcattaagcaaaatattaccttctcattgggaatcaaactattagcattattacttgtagttccaggctggttaacgttatggattgctatcttagctgatatgggagcaactatattagttaccttgaacggcttacgactgatgaaagttaaatctaaatag

SEQ ID NO: 6508 - DNA, 1563 bp, Enterococcus faecalis
  CDS (1)...(1563)
gtgactaacgttgccgatttgacatctgtcgaaaaaattattgttttagactttggtagtcagtttaaccaattgattactcgtcgtattcgtgaatttggcgtattctctgagttattaagccaccgaactacggcagaagaaattcgcaaaatcgcgcctaaaggaatcatcttctcaggtggaccaaacagcgtgtatgacaaagatgcttttagcattgatccagaaatttatgagttaggaattcccattcttggcatctgctacggtatgcaattaatgactcataacttaggcggaaaagtagaacctgccgcaaaccgtgaatacggaaaagcagaattagaaatccttggtgatgcgacattattccaaggaacacctgcgaaacaaaccgtttggatgagccacggtgatttagtaacagaaatcgctcctggattcgaaaaagttgggacaagcaatgattgtccaatcgcttctatcgaagatgccaaccgcaaattctacggcgtacaatttcacccagaagttcgtcattcagaatatggtaacgacttattacgtcactttgcttttgatgtgtgtggctgtactggtgactggagcatggaaaacttcatcgatatggaagtcgctaaaatccgtgaacaagtaggcgataaaaaagtcttacttggtttatcaggtggcgttgactcaagtgttgtcggcgtgcttttacaaaaagccattggcgaccaattgacttgtatcttcgttgaccatggattattacgtaaaggtgaagcagaacaagtaatggaaagtttaggcggtaaatttggcttaaacattattaaagtagatgcgaaagaacgcttcttaagtaaattagcaggcgtttctgaccctgaacaaaaacgtaaaatcatcggtaacgaatttgtgtatgtttttgatgacgaagcaactaaacttgctggggaagaaggcgtttcattcctagcacaaggaactctttacacagacgtcatcgaatctggtacagaaactgcgcaaacaattaaatcacatcacaacgttggtggtcttcctgaagacatgcaatttgaattaattgaacctttaaatacattattcaaagacgaagttcgtgccttaggaactgaacttggcatgcctgatgcaatcgtttggcgccaaccattcccaggaccaggattaggtattcgtgtgcttggtgaaattacagaagataaattacaaatcgttcgtgattcagatgctatcctacgtgaagaaatcgcagcagctggcttagatcgtgacatttggcagtactttactgtcttacctggcatccgctcagtaggtgttatgggcgatggccgtacctacgattacacagtcggtatccgtgctgtgacttctatagacggcatgaccgctgactttgcccgtatcccttgggatgttttacaaaaaatctctgtgcgcatcgtgaacgaagttgcacatgtaaaccgtatcgtgtacgatattacttcaaaaccacctgcaactgtggagtgggaataa

SEQ ID NO: 6509 - DNA, 609 bp, Enterococcus faecalis
  CDS (1)...(609)
atggcgaatcattattatacagaaaatccagaattagcacatgatttagaaagctggtcttttccattacgtggtcggacctttcagtttacgaccgatagcggggtcttctcaagaggaacagtggattatggttctcgtgtgttgattgatgcctttgaatgggaaaatttaccagcaggccgtttgttagatgttggttgtggctatggaccaattgggttgtccttagcagcggcgactggtcgactggtggaaatggtgtatgtcaaccaacgggcagttgggctagctcaaatgaacgcccaacgcaaccaaattactactgtggatatccattcttccaatgtgtatgaaaccttaaacgaaacgacctacgcggcgattgttagcaatccgcccattcgtgcaggcaaaaaagttgtccatggcattttaacaggggcttttccgttgttgaaagttggtggcacactaacggtggttattcaaaagaaacaaggtgcacctagtgcagagaagaaaatggctgaagtatttggcaatgttgaaattgtgacaaaagacaaaggctattatattttacgaagtgttaaagaagcagagtaa

SEQ ID NO: 6510 - DNA, 1302 bp, Enterococcus faecalis
  CDS (1)...(1302)
atgagaatggtagacattattgaaaagaaacgtgacgggcatcaactaacaagcgaagaaattcaatttattatcaacggatacacagatggttcaattccagattatcaggtaagtgcctttttaatggctgttttttaccaagatatgacagacgaagaaattacacaaatgacgttagcaatggtccattcaggcgaaattgtggatctttcttctatagaaggaatcaaagtcgacaagcattctacaggtggcgtaggcgacactacgacgcttattttagcgccattagttgctagtgtcggggtcaatgtagcaaaaatgtctggtcgtggcttaggctacacgggcggtacgttggataaattagaagcgattcctggttttaaagttgaattgacagaagaacgttttattcaattggtgaacgatacaaaagtggcagtgattggtcagtcaggtgatctagcaccagcagacaaaaaactttatgcgttacgtgatgtgaccgccactgttgactcaattccattaattgcaagttccattatgagtaaaaaaattgccgcaggggcagatgcgattgtcttagacgtgactactggtgaaggggcctttatgaaagacctagcaagtgctcgtcgattagcggaaacaatggttcgcattggaaaactggcaaatcgccaaacgatggcagtaatttcagacatgtcacaacctttaggggaggccatcggaaacagtttagaaatcgttgaagcaatcgagaccttgcaaggaaatggaccagaagatttagtggagatgtgctatgtcttaggaagtcagatggtcgttttagctaaaaaagccgagacgttagacgaagcacgggctttattggaagaagcattaacaagcggtcgagcgctcgcgaaatttaaagaaatgattgaaaatcaaggcggcgacagttccgttgttgaccagccagaaaaattattaaccgcaacttatcaatttgatttacctgccaaagaaacaggcgtggtacaaaaaattgttgccaatgaaattggcgttgccgcaatgttgctgggcgctggtcgggctacgaaagaagatacgattgattttgcagttggcttgaaacttcacaaaaaagtaggaagcccagttgaaaaaggcgaatcattattaaccatttatgccaatcgtgaagacgtgacagaagtcgaacaattgctttataaaaacattgaaattggaccaactggcgaagagcctattttgattcacgatatcattacggaataa

SEQ ID NO: 6511 - DNA, 1542 bp, Enterococcus faecalis
  CDS (1)...(1542)
atgcgtaaaatcaccaaagaatttgggacgttcaaagccaacgaccaaattgatttacaagtaaaacctggtgaaatccacgcactgctaggtgaaaatggtgcaggcaagtcgaccttgatgaatatcttatcagggctattggaaccgacctcaggtgagatttatatgaatggcgaaaaagtcaacattacaagtcctactgcagccaatcgtttaggaatcggaatggtccatcagcattttatgttagttgaagcctttactgtgactgaaaatattatcttaggtagtgaacctacccatggcggtattttagaccggaaaaaagcgaaaaaagagattgaagaagtgtctaagcaatacgggttggatgtaaatcccaatgcctatattcgcgatatttctgtgggtatgcaacaacgggttgaaattttaaagaccttatatcgtggtgcgaacgttttaatttttgacgaaccaaccgcagtattaacgccacaagaaattgatgaattaatgattattttgaaagaactaaccgatgaaggcaaatcgatcattttaattacacataagttagatgaaattaaaaaagtggcggaccgttgtacggtcattcgccgggggcaaagtattggcaccgtcaatgtgaaagacgtttcttcgcaacagttagccgatatgatggtgggccgttctgtttctttcaaaacagagaaaaaaccagcgcaaccgaaagaaataattttatcaattaaagatttagtagtgaaagaaagccgcggcttagatgcagtgaaaaatcttagcttagatgtccgagcaggggaagttgttgggattgcggggattgatggcaatggacaaacagaattaatccaagccttagcaggattaaccaaagtcgaaaacgggtccattcatttgaatgaaaaagagattactaatcgcaaacctcgggaaattacggaaatgggtgtcgcccacgttcctgaagaccgacataaatatggcttggtattagagatgacattggctgaaaatattggcctacaaacgtattaccaaaaaccatacagttcaacaggtattttaaactatcgaatgattaacaaacatgcccgtgaattaattgaagaatatgatgtacggactcctaatgaattagtaccagctcgggcgctttcaggtgggaatcagcaaaaagcgattattgcccgagaagttgaccgcgatccagatttgttgattgtttctcaaccaacacgcggtttagatgtcggagctattgaatacattcatcgtcgactaattgaacaaagagataaaaataaagctgttttattagtaagttttgaattagacgaaattttaaacgtttctgatcgtatcgctgttattcatgcgggggaaatcgtcggaattgttgatccgaaagaaacgacagaaaatgaattgggcttgttaatggctggctactcattggaagaagcccgtgctgagttatcaaaagtagaggcaggtgaaactgttgaataa

SEQ ID NO: 6512 - DNA, 1143 bp, Enterococcus faecalis
  CDS (1)...(1143)
gtgaaactgttgaataatcgttctgaaaaaataagaaatattttagtccctgtgttatctgttattatgggtttcctcttaggggcaattattatggttatctttggctatgacccagtggctgggtatcaagcgatgtttgaaacagctttccaaggaaagaaaagtattggtgagatttttgtcaccgcagcaccgttgatttttaccgctttaggattctcggtggcaaattcggctggattctttaatatcgggctttctggacaagccttatgtggttgggtggctagtatttgggtcgctttatccatgcctgatgcaccccggatgattgcgttgccggtggcgattattgttggcgcagttgcaggagctttagcagcagccattccaggtttcttgcgtgcctattttgggacgagtgaagttattgttacgattatgttgaattatattttattatacacaggaaatcatattgctaataatgtcatgaaaccaagtattatggcgaataaagggatcaccaaaatgattggtgcgaatgcatcattacgctcaccgtttttaacaagtatcagtgatggctctcgtttgaacattggcattttcttggccttcattttccttattcttgtgtggttcttgatgaaaaaaacaacgcttggttttgaaattcggtcggtggggttaaacccatttgcttctgaatatgctggaatgagcagcaagcgaacgattattttatccatgatgatttcaggaacgctagctggcttaggtggtgcggtccaaggattgggaactttccaaaacttctttattcaaaacacatcgttgagcattgggttcgatggtatggccgtgtctctattaggagcaggtagctcaatcgggattttactttccgcattactgttcggaatgttaaaacttggtggacaaggaatgccgttgatagctggtgtaccaaccgaattagttgatgttgttattgcagcaattattttctttgtgggaattagttatttaattcgtttcttgttagcaaaagcgtctggtagtaaaaaagaagtagcgattgtagaaacaattgaagcggcgccagacaaaaacaatcaagaggggggagacatctaa

SEQ ID NO: 6513 - DNA, 807 bp, Enterococcus faecalis
  CDS (1)...(807)
atggttatgaattatttagaggcagaggacttaactacaggatatggtcgtcaagtgattagtgaagcgctgaactgttcatttgaagcgggaactattacaagtattattggaccaaatggttgtggcaaatcgaccttgttaaaaacacttgcgcgtattttgccagctgagaaaggcaaggtgttcattaagaaccaagaacttcaacatttttcttcaaaagaagtggcgcaagaactagcgatcttatcacaaacgccagaaaatacaatcgatttatctgtttttgacctcgtctctttcgggcgatatccttatcaatcgggctggaaaagcgtcaccgcagaagatcaagagtacatacaatgggcattagaattaacaggcttaactgagttagctagagagtctgtggcaattttatcaggtggacaacggcaacgggtttggattgctatggcgctagtgcaggatacagatattttaattttagatgaaccgaccacctatttggatccagcgcatcagctagaaattttaaatgtgttaaaacgaattaatcaagaacatcagaaaaccatcgtgatgacgattcatgatattaatttagcttctcgtttttctgatcgcgtgattgcgatgaaagagggaaagattatcaatgagggaacaccgcaagaagtgattactgttactggcttagcagatgttttcgctattcaagcagaaattagttatcatagtcagacacagcggccactagtactttcttatgagttgatggaaatggagctggatggatga

SEQ ID NO: 6514 - DNA, 822 bp, Enterococcus faecalis
  CDS (1)...(822)
gtgcttgcggtcctagcgggcgcagctttaggcttaagcggcgctattcttcaagggattactcggaatccgttagcagatactgggattttaggcattaatgcgggtgcgggtttggcagtgattttgtttattagttttgttgagacgacaagtatcacaacgtttgcacttccgctcgtggccttagttggcggcttgctagcggctgttgggattttggtaatcgcgtatcatcatcgtttaggattgacgccagttcgaatggtcttagcgggtgtcattttgagtacgggtatttcagcactcaccttattaattacatcaaaaattgacactgaaaagtaccgttttgttacaatgtggcaagcaggcagtatctggggcagtaattggttctttgtgggcgctttgttgccttggctagtcattgggttcttttttgcgatgaagcgtcatcgtctgttggatattttacaattgggggacgaaacagctatttctgtaggtattgctgtgaaaaaagaacgaatcgtttcgttgctgttagcggtgatgttggcggcatcagcgatttccgttacagggggaattaattttttaggtttacttgcgccacatattgctcgcaaatgtggttttacgcaacaaaaacaggtattgccattggcggcgttgtttgggagtttactattattggttagtgatacgattggtcggctattgcctggcaatggagaaatgcctgcagggattattgttgcgatcatcggtgcgccttattttctttatttgttaatcaaaacaagcgattcgttataa

SEQ ID NO: 6515 - DNA, 423 bp, Enterococcus faecalis
  CDS (1)...(423)
gtggctaaaaaagtagaaaaaatcgttaaattacaaattcctgcggggaaagcaacaccagctccaccagtaggtccagcgttaggtcaagcaggtatcaacatcatgggattcactaaagaattcaatgctcgtacagctgaccaagcaggcttaattattccagtagtaatctctgtatatgaagatcgttcatttacattcattactaaaacaccacctgctgcagtcttattgaaaaaagctgcaaaaatcgaaaaaggttcaggtgaaccaaacaaaactaaagttgcaacagtttcaagcgatcaagtgaaagaaatcgctgaacttaaaatggcagacctaaacgccgctgacgttgaagcagcaatgcgcatggttgcaggaactgcacgaagcatgggtatcatcgtagaataa

SEQ ID NO: 6516 - DNA, 690 bp, Enterococcus faecalis
  CDS (1)...(690)
atggctaaaaagagcaaaaaaatgcaagaagcattgaaaaaagttgatgctacaaaagcttactcagttgaagaagcagtagctttagcaaaagatacaaacatcgcgaaatttgacgcaacagttgaagttgcttacaaattgaacgttgaccctaaaaaagcagaccaacaaatccgtggagcagttgtgcttccaaacggaactggtaaaacacaaactgttttagtattcgctaaaggcgaaaaagctaaagaagctgaagctgctggtgcagatttcgtaggcgacgacgacatggttgcaaaaatccaaggtggatggttcgactttgacgtagttgttgcgactcctgacatgatggctacagttggtaaattaggccgtgtcttaggaccaaaaggtttaatgccaaaccctaaaactggtactgtaacaatggacgttacaaaagctgttgaagaagttaaagctggtaaagtaacttaccgcgttgacaaagctggtaacatccacgtaccaatcggtaaagtttcatttgataacgaaaaattggttgaaaacttcaacacaattaacgacgtattattgaaagctaaaccatcaactgctaaaggtcaatacatcaaaaacatttcagtaacaacaacatttggacctggaatccacgttgaccaagcttctttctaa

SEQ ID NO: 6517 - DNA, 501 bp, Enterococcus faecalis
  CDS (1)...(501)
atgagtgaagcagcaatcgctaaaaaagaaaccctagttcaagcagccgctgagaaatttgaatcagcagcatcagttgtaatcgtggactaccgtggtttaacagttgaagaagtcactaacttacgtaaacaattacgtgatgcaggcgtagaaatgaaagtcatcaaaaactcaatcctttctcgtgcagctaaaaaagttggtttagacggcttagacgaagtctttacaggcccaactgctgtcgcattcagcaacgacgatgtagtagcaccagctaaaattatcgacgaatttgctaaagatgcaaaagcattagaaatcaaaggtggcgtcatcgaaggaaaagtttcttcagtggaacaaattactgcgttggcaaaactaccaaaccgcgaaggtttactatctatgctattatctgtattacaagcgccagtccgcaacgtggcttacgctgtcaaagcagtggcagagaaaaacgaagaagttgcttaa

SEQ ID NO: 6518 - DNA, 369 bp, Enterococcus faecalis
  CDS (1)...(369)
atggcattaaacattgaaaacatcgttgctgagttagaaacagcaactatcttagaactaagcgaattagttaaagctatcgaagaaaaatttgacgtatcagcagcagctcctgtagcagtagctggaccagcagcaggtggagcagcagaagaacaaactgaattcactgttgaattaacagcagctggcgatcaaaaagttaaagttatcaaagcagttcgtgaagcaactggcttaggcttgaaagaagctaaagctgtagttgatggcgctcctgcaccagttaaagaagctgtttctaaagaagaagcagaagctttaaaagctgctttagaagaagttggcgcttcagtaacagtaaaataa

SEQ ID NO: 6519 - DNA, 627 bp, Enterococcus faecalis
  CDS (1)...(627)
atgttttttacatttatgcgtggcgtggttcgcgtcattttatttgtgattaatggaaatgcacattatgaaaataaagaaaaattaccaaaagaccaaaactatgtcttagttgcgccgcatcgaacatggtgggaaccgctgtatttagctgttgctggcagtcctaagaagtttagttttatggcaaaaaaagagttgtttaaaaatcctgttttacgtttcattttaaaacatgcgaatgcgtttccggtggatcgtgagaagcccggtcccagcgcgattaaaacacctgtcaaaattttaaaaaattctgatttaagtttgattatgttccctagtggcacgcgtcattcctcagaattaaaaggtggggtagccttgattgctaaaatggggcgagtacctatcgtgccatctgtttatcaaggtccgttaactttaaaagagttgtttaaacgtaaaaaagtaacggttcgttttggggagccaatcgatattagcgatattaaaaaaatggataaagacggtttagctgaagtggaacgtcggatgcaagaagcatttgatcagttagataaagaaattgatccaacttttaaatatgaatcaacagaaaaagaataa

SEQ ID NO: 6520 - DNA, 3138 bp, Enterococcus faecalis
  CDS (1)...(3138)
atgaaaccattatctttaacattgaaaaacttcggaccgtatattaatgaaatcattgattttacgaagtttgaagattcttcactttttctaattagtggaaaaacagggtctgggaaaacaacgatttttgatggaatgagctatgctttgtttggtgaaagttctgggaaattacgtttaggcaaagaaatgcgttccacatttgctgacccctcagaagccactgaagttactttgctttttaaacataacgagtatctctatgaactgaaccgccttcccgaacaagaactttttaaaaaacgtggcacaggagtccgtaaacaaagtgccaaaatttctttaattgtcaaagatgctcaagggaaagaactacgatcctattctaaaagacgcgaagtggacgaactcattcaagaattattgcatttaaatgccaatcaatttgctcaaattgtattgttaccacaaggagagtttcggacttttttaattgctaaaagtgatgaaaaagaaaaggttttgcgtaatttattcggaacagaattgtatcagttgttcagcgaaaatttaaaagaacgcttaaaaattgccaatcaagagattcaagaaacccagcaaaaaattgaactgaaaacagaacagttgcattggtcagaagaacctgaaccgacaatgacactttttgaaaaacttcaattattagaaagccaacaacaagaggctcagcaacaactattagttgaaagagaacaaattgcaaccttaaaacaagccaaacaagcaaaagagcaagttcgttatgctattgaagaacgacaaaacttgcaacagcaaaaagaagaattactggaaaagaaagcaaaacaagttgaacaggaaaccgtcattgagcggttaaaggaacagattcagcaattaaaatggagccaaaaacagcaatctttagctgaaaaagtctttgaaaaacgaagcgaaaaacaacaaaaagagcaagaaacaaagtccaaacaacaagctcttatggaaacgcaacaagcattgacagattggcaagcaatcatgagtgagttggaagaacaacaaccattgattgctgaaaaacaagaacgtcttcaaacgattcaacgtcaattaccacaataccaagaatatgaacagttagcccaacaacaaatagcagaacaagccaattatcaagccattcaaaaagagtatgaatcttgccaacaggaaaaaataacattagcggataaagtggcgacagccaaacaatttattgaacaagaaggaacacttgaaaaagcaaattttgaatgttctagtgtagcagatcattggcaaaattttgtagaacgttggcaaaaaaatcaaaaagcttggcaaaaaattagtcaaaaccaagtggaattgcacgagttgacacaacggtttgctgttgaacagcaacaaaaaagcgccgaagaagcgaagttgcagacaaagaaaagtcaatgggcctctttacaaatccaacgattaagcttgttacttgaagagggagaaccttgcccagtttgtggctctttagaacatccaaagcaacaaacacatcaagaagtttccttagaagagattgatcaagcggaacgggaattaacggaagttgaaaaaacggttcaacgatttactgaaacgctctctgcattaggggcggaaaagcaacagaaagaaagccaattacaagaacaggaagctgcgtatactgaggaacaagaacaattagcagcgcagtttgctgacttgcagttgccgttaacaggactaactttttcacaagtaacacctgcagaaattgcggaagttgagtcgcaattagctaaagaaaaacaacaaatagcacaaaaactaacggaaatttcagtcgaaaaggaccgtctggcggaactagaagaacaagtagctgaaaattctcaacgctttgaagtgctccgacaacaagtagaaacaatgcaacaaagtctggaaagaatcactatccagcagcaaatgattgctagccaattattggatgcaaccgtcacatacgaagaaatgaccaaacaacaagctttgcttcaagaagaactctctgcatttgaacgtcaaaaagaaaacgtgacgacacaaggagaaaccttgaagaaagaagaaatgatccttgaaagtacgttgactcatttggagaaagaacaacaaacacttcaacaaacagtcgcacaacttgagagtcagttaaacgcagttttaacggaacaaggagtgacagaggaccaattgacggagtggttgaaagaggtaccgacactagaaagtcagcaagaacaaattgctttatttgaacaagagcaaacccaactgactatccaactcgctgaaattgagaaaaaattatctagtgatacgttcccagaattatctttaatcaccacagaaattgaacaaataacacaacaaattgaagaacaagaaaaaaaatactatcaactgcatgaaaaaatgctgaataaccaacagttggttcaagaaattaatgcgcaaagaacaacaattgaagacaagtttgaggaagttgctgcactacaacagttggcagatacggtgaatggcaataatcctaaaaaaattagttttgaacggtatatgttacaaacgtatttagaaagagtgctgacagtcgctaatcagcgtttagaccgcctgaccaatagtcgttatcaatttgaattgaatcacgaagcaggcagttatcggaatcaaacggggctagaaatcaatatttatgatgacaattcagggacggtgcgcagtgctcacacgttatcaggcggggaaagttttatagcagcgttagctttggcactttctttagcagaagtgattcaagaacaagccggcggagtcttaattgatgcgttgtttattgatgaaggctttggttccttagatgaagaagcattggaaatggcaatggaggcgttagaaacgattgaaaatgaaggccgcatgattgggattattagtcatattggcgaattaaaagcacgaattccacaacaattacaaataaaaagcaatgggaatggtcaaagtaccgttcactatcagctagcttag

SEQ ID NO: 6521 - DNA, 903 bp, Enterococcus faecalis
  CDS (1)...(903)
  misc_feature (1)...(903): n = A,T,C or G
gtgaacactaaagctatgttagaaacattaaacgaaattactttattagtagatgaaccattaaaaaacgtaacctttaccaaaacaaagnggccagctgatgtgttggccttacccaaaacaaaaaaagaagtcgaagagattgtggcgtattgccgagaacaaggactttcatggttagtattaggcaatgctagcaacttgattgttcgtgatggcggtattcgcgatgtcgtgattatgctaacagaaatgaaagaaatcaaagtagccggtaccaccatgattgtggatgctggtgccaagctgattgatacaacctacgaagccttagcagctgatttaactggttttgaatttgcttgtggcattccgggaagtgtcggtggtgctgtttatatgaatgctggagcatacggcggggaaattaaagatgttttccaatctgcagaagtgctgttggcagatggaactatccaaacaatgacgaaagaagacctgaatttccgttatcgtcatagtgaaattcaagaattacattgtattgtcttgcaagcaacgtttgctttagaaaaaggaaaccatgcagaaattaaagcccaaatggatgaattaacggaacttcgtgaactgaagcaaccgctagagtatccctcttgtggcagtgtctttaaacgccctgttggtcattttacaggaaaattaatccaagacgctggcttacaaggcttaaaatggggcggtgctcaaatttccgaaaagcatgcgggatttattgttaacatcgatcatgcaaccgcaacagattatgtggaattaattgcacatatccaagaagtgattaaagaaaaatttgatgttgaattacaaacggaagttcgaattattggtgaagaagtctaa

SEQ ID NO: 6522 - DNA, 1716 bp, Enterococcus faecalis
  CDS (1)...(1716)
atgttaaagcgtttttttgggtattatcgaccttatcgtcgattatttattttggattttgggtgtgccgtttttgcggggctgttagagttggcttttccagtagcagtcaaccaagtaattgataagattatgccaaaaggagattttcgcctcattgcattagctagtgcgggcttatttgcattttatataatcaatacgtttttacaatttattgtggtttattttggtcatatgttaggcgtgaatattgaaacagatatgcgtgaagaattatatcaacatcttcaaacacaaccgtttgagtattatgataatcaaaaaacagggaaattaatgagccgtttgaccactgatctttttgaaatttcggaagtggcgcatcatggtccagaagacgtctttattacgattatgacgttagcaggttcttttttattaatgttaaccattcacgtgaaattagccatcgctacgtttattttattgccatttatcacgattgcgctaggctattttaataaaaaaatgacaaaagcgaatacggatatttacgataatttaggtgaatttaatgctgggattgaagcgtcagtaagtgggatacgtgtcacgcaatcttttgcaaatgaaccatttgaacgaaaacagtttaattatttaaatcaaatgtatcgaaaatcgaaattatatttttataaggtgatgggtgtcagttccgcctataattacttattaattcgtctgataaatttattttcattaatttttggtgcgtactatacaattaaaggagaaattacagaaggtcagtttgtaggatttattttattagccaatatttttattcggccgattgaaaaagtcaacaatatgattgaaagctatcccaaaggatttgctggctttaaacgttttacggaagaaatggacaaacaaccgtccatcaaagatttgccaggagctgttgctgtttcacatttagaaggaacgattgcctataaagatgtttcatttgcttatgaagatggcacaaaagttttagaccatatcaatttaaaaattcaacctggtgaaaccgttgctttcgttggccaaagtggttcaggaaaaacgaccttgtgcaatctgttgcctcgtttttatgaagttagtagtggtgaaattacgattgacggtagaaatatccagcaaatgaccttggcttcattacgtaagcaaattggaattgttcaacaagatgtgtttttattccctggaacattacgagaaaatattgcttatgggaatttaaatgctacagaaatagacattcaacaagcggtgaaattagcacatttagaacatgtaattcagctaatgccagatggcttagacacaattattggcgaacgtggcgtgaaattatcgggcggtcaaaagcagcgagtggcaattgcgcgaatgttcttgaagaacccgccgattttaattctagatgaagcgacttctgcattagatacagaaacagagcaagtgattcaagagtcattaaactcgttagctgacgggcgaacaacattaattattgcccacagactggcaacgattaaacatgctgatcgaataatcgtagtgagtgaccaaggaattttagaagatggaacacatgaaactttgtacgcgcaaagaggccactatcgtcgcttatacgatgctcaatttagaacataa

SEQ ID NO: 6523 - DNA, 705 bp, Enterococcus faecalis
  CDS (1)...(705)
atgaaattcaaggaaattgagggatctaccatggaacgagagtgggagctgtttttagcgccatatgaacaggcggtcagcgaattaaaagtaaaactacgaggtattcgtaaacaatttcgggagcaagataaacacataccaattgaattcgttacaggacgtgtgaaaccagtagatagtattttgacaaagacggcaattcggcatattcctttaaatcggattgaagaagaaatgcaagacattgctggtttgcggattatgtgccaatttgtggaagacatttaccaggtagtcgcacttttaagaaatcgtaaagacttaaaaattgtggaagaacgtgactacattgaaaataaaaaagaaagtggctatcgttcgtaccatgtggtggtggaatatcctgtgcaattagtcaccggggaaaagattattttggccgaaatccaaattcggacactttccatgaatttttgggcaacgattgaacattctttgaattataaatatcaaggtgtctttcctgaagaaatgaaagaacgccttcagcgagcggcagaggcagcctatttattagatgaagagatgtcatctatccgtgaagaaattcaagaagcacaacattacttctctcatggccgtggattgctagaaaacgaatactataagcaaattaaaaacgaaacaccagaaaatcagtaa

SEQ ID NO: 6524 - DNA, 798 bp, Enterococcus faecalis
  CDS (1)...(798)
atgaaagtggcgattgttcataactcggaagaaaaatcgaaacaagtcacaaaacaactgacaacactattagagcaaaaccaaattcaaatagacaatcgtcaacctgaacttgtgatttcagtcggcggagatggtacgcttctttccgcttttcatcgatttaatcatctgttaaacgaagtaagtttcttaggtgtacataccggacacttgggtttctatacagattggcgtgattatgaattaaaagaactagttgagagtttgtgtattcatcgtgaaaaaagtacgagttatccattattagatgtgcggattcggtttagagatgggaaaccagataaacattttttagcattaaatgaatcaacaattaaacgaggaaaccggacgatggtgggcgatgtgtttattaaagacgaactgtttgaacgatttcgtggtgatgggttgtcgatttcgaccccaaccggctctactgcgtataataaaagtattggtggagctgttttgcatcctagcattaatgcgtttcagttaaccgaaatcgcctccttaaacaatcgtgtctttcgaacattggggtcaccgattgtaatcgcacatacggagtggctggagattaaattacaggaaagtgatgattattttgtcacggtggaccaattagatatttatcaagaaaatatcgcttccgtctgctatcgaattgcagacgaacggattcattttgcctcttatcggcacatgcatttttggcatcgagtgaaagatgcctttattggtgaggattaa

SEQ ID NO: 6525 - DNA, 894 bp, Enterococcus faecalis
  CDS (1)...(894)
atggaatttcaatggacatacgacaaagaaacaacacaacaagtgaaatattttttaaaggaacaaggcgtttcaaaagggttattagctaaggtgaaatttcagggtggtaaaattcaagtgaatgggaccgttcaaaatgccatctatcctttacaaactggcgatgtcgttaaaatgacgattccagatgaagcggaacatgagacattattaacagatgatgaaccgattgaaattgtgtttgaagatgatcattttttagtagttaataagcccgctggcattgcctcgatacctgctcagtatcatccttcaggaacgatggcgaatcgtgttaagggctattacaagcgtcaaaattacgtgaatcaagttattcatgtcgtgactcgtttagatcgagatacttctgggctgatgttatttgcgaaacacggctttgctcatgctttaattgatcaagaattacgagaaaaaaaggtgacaaaaatttattatgcccttgttggtggagcgattgagcagttaaacgagcatcaattgattgaaaagccaattgggcgcgacttgtcctctttattaaaacgccaagttatcgaaacaggtcaatttgctagtacagaatattggctcgcaaaaagaggagcccaagcagcagctgtgcgcattcagctccatacaggacgaacacaccaaattcgggtacattttgaagcaattggctgttcattgttaggggatgagatgtatcatggagagatggatcaaggaattgagcggcaagcgttgcattgcatggaactaatttttactcatccttttaccaaagaaacggttcatctgatttccccactagcggaggatatgaaaagtgtagatgatacgttataa

SEQ ID NO: 6526 - DNA, 2610 bp, Enterococcus faecalis
  CDS (1)...(2610)
gtggtaacactttttggtgaggacgaagaaaaagcctttattgttggaactgtacaagcaatcttttttgaaaatcccagtaatttttataaagtcgttcttgtaaatgtgaccgatacaaatacagattatttagaaaaagaaattgtagtaactggaagttttggccaagttcaagaagaggaaccctatcgtttctttggtcattttgtggaccatcctcgttatggcagacagtttcaggtggatagttatcagcaagaaagaccgacttcggctagtggggtggttaactatttatcaagtgacaaatttcctggcattggtaaacgaactgctgaaaaaattgttgaagtattaggggaaagtgcgattgaccgaattattgatgacccgagtgttttggaagaagttactgttttaaatgaaaaaaaacgacaagtaatcgtcgaaacaattcgcttgaatcacgggatggagcaagtgattgtgggactaaatcgatacggcttcggtagtcagttagctttttcaatttatcaaacctatcaagaagaaaccctttctgtgattcaagaaaatccttatcagttagttgaagatattgagggagtcggatttaaacgagcggacaatattgctgaacaaatcggcattcaggcggattctgctgttcgaattcgagcggcgattttacatgaagtgtttgagcactccattcgctcaggcaatacgtatgctcaagcagatgttttgttagaagaagcgattcggaccttggaagcaagtcgcccagtggaaatctcacctgatcaagtggctaatgaaatcattacgttagtcgaacatggaaaaatccaacaagaagagactaaactttttgagaacagtctctatttttctgaatggggcattggtacttcgattcagcgtttactttctcgtaaaaaagaaattcattatgaggaagaagaagtccaaaaaaatatccgaatgattgagaaacgtttaaatattcagtatggcgactcgcaacaagcagcgattgaagaagcgattaaatcgccgttatttattttaactggagggcccggaacagggaaaacaactgttattaatgggattgtctcgttgtttgcggaactaaatggtctttcattagatctcaaagactatacgcaggagatgtttccaatcttgctagcggcgccaactgggcgagcagcgaaacgtatgaacgaaacgacaggtttacctgcaagtaccatccatcgtttgttaggcttgacaggtcgtgaaaaaaatccgagtttaaccgccaaagaattagaaggtggtttgctaattgtagatgaaatgtcaatggtggatacttggttagccaatacgttattaaaagctattccgacaaacatgcaagtgatttttgttggtgataaggatcagctaccgtctgtcggtccaggtcaagtcttacatgacttattgcaaattaacgaaattcccaaatgtgagctaaacgaaatttatcgtcaaggagacggttcaagtattattcctcttgcccatgaaattaaagaaggaaagttgcctgctgattttcaaaaaaatcaaaaggatcgctcgttctttgcaagtgatattggtcatattgaagaatacattcgacaaatcgtcacaaaggcaaaagcaaaagggtttacgccacaagatatccaagttttagcgccaatgtatcgtggcgcagctggcattgatgccttgaataagatgatgcaagaaatcttcaatccaaatgaggggaagaaaaaagaagtcaagtggaatgacaccgtctatcggatcggggacaaagttttgcaactagtcaatacgccagaattaaatgtgttcaatggagatatgggagaaatcgtcggaattactttagccaaagactcagaggacaaagtggacgagttggttttacagtttgataataatgaagtaacgtataaaagaaatgaatggaataaaattacgctatcgtattgttgttcgattcataaagcgcaaggtagtgaattccgcatggtgttactgccaatggttcatcagtatagccgaatgctgcaacgaaatttgttgtatacagcagtgacacgtagtaaagaattattaattctattaggtgaggtttctgcttttgaaacatgtgtcaaaaacgaatcggctagtcgcatgacgatgctaaaagaacgaatcgtgaacgcagaacaaatgaccttaacgactagaactcagttagaagcctatgaagaaggtttaacggcagaccatccatttactgaaaaggaaacaaaagctgtctcttatgaaactgaacagcaatcaacgaaagccaatcagatcaaagacacagacgagcaattagttgacacaacggtacaagaagtttcactatttgctgatgaaggggaagagtcaaccccagaaacagcaaataaagcgacaaaagttgtcgaagaaccattaccaaaagaaccacgactaacagttgaaattattcaaacaaatgctgttgatccaatgattggaatgaaggatacgacgccttatcaatttatgtga

SEQ ID NO: 6527 - DNA, 546 bp, Enterococcus faecalis
  CDS (1)...(546)
atggaaacttttgaaagaaattggtacgtattgcacacctattcaggctatgaaaataaagtaaaagcaaacattgaatcacgtgcacaaagcatggggatgggcgattatatttttcgtgtcgttgtaccagaagaaacagaaaaagaagtcaaaaatggtaaagaaaaagaaatcgttcataaaactttccctggttatgtgttagtggaaatgattatgaccgatgattcttggtatattgttcgtaacacgccaggcgtaactggttttgtaggctcacatggtgccggtagtaaacccgctcctttattacaagaagaaattaaccacattttacgttcaattggcatgagcacccgtcaatcagacttagaagtagcgctaggcgatacagtgaaaattatcgaaggtgccttttctggtcttgaaggtgttgtgacagaaatcgatgaagaaaaacaaaaattaaaagtaaacatcgatatgtttggtcgtgaaacaagtacagaattagactttgaacaagtcgataacattgattaa

SEQ ID NO: 6528 - DNA, 798 bp, Enterococcus faecalis
  CDS (1)...(798)
gtgacaatgattgatttaaaaaagaattaccaaattatggggattgtcaacacgacccccgactctttttctgatggcggtagctacacaacggtcgacgtggcctatcaacatgcgcttcatctactagaagcgggggccgatattttagacattggcggccaatccacacgtcctggctacgaagaagtttctccacaagttgaggcagaccgagtattaccgttaattaaaaaaatacgtgagacttctctagcgccgatttctgtggatacctactatcccgaagtagcagaagccgcgatccaagctggtgccacaatgattaatgacatcaaaggattagacactccggggatggcagaagtcctcgcacaatatcctgaagtccaagttgtgattatgcattccagaaaacaccaatccctttctttaaaagaagagttgcaccaattttatacagaaaaaattgaacaatgccaaaaatatgggctttccttagaaaaaatttgtttcgatccagggattggctttcataaaactgtcgcagaaaaccttcaactgttaaaagatcctaacgcctttcgctaccaagattatccgttactatacggcgtttctcgcaaacgaaccattggcgctttaacgaacgaaccagaaccagccaaccgtgattttggctcagccgctgcttccttgtatgcagcacaacaaggcgtagaaattttacgtgttcataatgtccaaggcttaaaacaaacatttgatgtctggcgagcattgtcggagaaggagtaa

SEQ ID NO: 6529 - DNA, 3624 bp, Enterococcus faecalis
  CDS (1)...(3624)
gtgaagagcttggctggacacgtagtaaaatacggaaagcatcgcgaacgtagaagtttcgcacgtatcagtgaagtattggaattaccaaatttaattgaaatccaaacagactcttatcaatggtttttagatgagggacttcgtgaaatgtttgaagacattttaccaattgatgatttccaaggaaacttatccttagaatttgttgactatgaattaaaagaaccaaagtacacagtagaagaagcccgcgcacatgatgccaactattctgcgccattacatgtaacattacgtttaaccaaccgtgaaacaggtgaaattaaatcccaagaagtcttcttcggcgatttcccattaatgacagaaatgggtaccttcatcatcaacggggcagaacgtgttatcgtttcccaattagttcgttctccaggtgtttacttccatggaaaagtggacaaaaacggcaaagaaggttttggctcaacagtcattcctaaccgtggtgcatggttagaaatggaaacagatgcgaaagacatttcttatgttcggattgaccgcacacgtaaaattcctttaactgtgttagttcgtgctttaggtttcggttcagatgataccatcttcgaaattttcggcgacagcgaaagcttacgcaacacaattgaaaaagatttacacaaaaacgcaagtgattctcgtacagaagaaggcttgaaagacatttatgaacgtcttcgcccaggcgaaccaaaaacagcagatagctcacgtagcttgttaactgcacgtttctttgatccaaaacgttatgatttggcaaacgttggtcgctacaaagttaacaaaaaattagacttaaaaacacgtctcttaaacttaaccttagctgaaacgctagttgatccagaaactggtgaaatcattgtcgaaaaaggcacggttttaacacaccaaatcatggaaacattaggcgaatacattgacaacggcttaaacagcgtaacttactatccaagtgaagatgcggtagtaactgaaccaatgacaatccaagtgattcaagttctttcaccaaaagatcctgaacgtatcgtaaatgtgattggtaacggctatccagacgacagcgtaaaaacagttcgtccagcagatatcgttgcttcaatgagctacttcttcaacttaatggaagatatcggcaatgtcgatgacatcgaccacttaggtaatcgtcgtatccgttcagtaggcgaattattacaaaaccaattccgtattggtttagcccgtatggaacgtgtggttcgtgaaagaatgtctattcaagacacagaaacattgacaccacaacaattaatcaacatccgtccagtggtagcaagtatcaaagaattctttggttcttcacagttatcacagttcatggaccaaacaaacccattaggtgagttaacccataaacgtcgtctatcagccttagggcctggtggtttgactcgtgaccgtgccggttatgaagttcgtgacgttcactactctcactatggtcgtatgtgtccaattgaaacgcctgagggaccaaatatcgggttgatcaatagtttatctagttatgcgaaagtgaataaatttggtttcatcgaaacgccttatcgccgtgttgatcgtgcgacaggccgtgttactgatcaagtagattacttaacagcagacatcgaagaccattatatcgtagcgcaagcgaactcacttttaaatgaagatggcacatttgccaatgatgttgttatggcgcgtctacaaagtgaaaacttagaagttgccgtagacaaagttgactacatggacgtttcaccaaaacaagtagtcgcagtcgcaacagcatgtattcctttcttagaaaacgatgactccaaccgtgccttgatgggtgccaacatgcagcgtcaagcggtgccgttaattcaaccacgctctccgtgggtaggtacaggtatggaatataaatcagcccatgactcaggtgctgctttactatgtaaacatgacggtgtcgtagaattcgtcgatgcaaaagaaattcgcgttcgtcgcgacaatggcgcattagacaaatatatggttacaaaattccgtcgttctaactcaggaacaagctacaaccaacgcccaattgttcacttaggtgaaaaagttgaaaaaggcgatactttagcggatggaccttctatggaagaaggcgaaatggctttagggcaaaacgtcttggttgccttcatgacatgggaaggttacaactacgaggatgccattatcatgagccgtcgtttagttaaagacgatgtctacacttctgtgcatattgaagaatatgaatcagaagcacgtgatacaaaattaggacctgaagaaattacccgtgaaattccaaacgttggggaagacgcattgaaagacttagacgaaatggggattatccgcattggtgctgaagttcaagatggcgacttactagttgggaaagtcacacctaaaggggttacagaattatctgcagaagaacgtttattacacgcaatcttcggggagaaagcccgcgaagttcgtgatacgtctctccgtgtacctcacggtggcggcggtatcgttcatgatgtgaaaatctttactcgtgaagctggcgatgaattatcaccaggtgtcaacatgttagttcgtgtctatatcgttcaaaaacgtaaaattcacgaaggagataaaatggcgggacgtcacggaaataaaggggttgtttcccgtattatgccggaagaagatatgccattcttacctgacggaacacctgttgatatcatgttgaacccattaggggtaccttctcgtatgaatatcggacaagtacttgaattacacttaggtatggctgctcgccaattaggtattcacgtcgcaacacctgttttcgatggggcaaccgatgaagacgtttgggaaactgttcgtgaagctggtatggctagcgatgctaaaacagttctttacgatggacgtacaggtgaaccatttgataaccgtatttccgttggtgtcatgtatatgattaaattagcccacatggttgatgacaaattgcatgctcgttcaatcggaccttactctcttgttacgcaacaaccgttgggtggtaaagctcaattcggtggacaacgtttcggggaaatggaagtttgggcactggaagcttacggtgctgcttacacattacaagaaatcttaacttacaaatctgatgacgttgtcggacgtgtgaaaacatacgaagccatcgttaaaggtgaaccaattccaaaaccaggtgtgcctgaatcattccgagtattagtgaaagaattacaatcacttggtttagacatgcgtgtcttggacattgaggaagctgagattgagttacgcgatatggacgatgacgatgatgatttaatcaccgttgacgcactaaccaaatttgcggaacaacaatcagcgaaacagctggaaaaagaagcagaatcagtcgtgaaagaagaagcacaagacgttgttcaagaaattgaaacagccgaagacagagactaa

SEQ ID NO: 6530 - DNA, 3627 bp, Enterococcus faecalis
  CDS (1)...(3627)
atgcaaatagggcttgcttcaccagaaaagatcagaagctggtcttatggggaagttaaaaaacccgaaacaattaactaccgtacattaaaacccgaacgtgaagggttattctgtgaacgcatttttggtccaaccaaagactgggaatgtgcttgtggtaaatataaacgtatccgttataaaggtattgtctgtgaccgttgtggcgttgaagtcactcgttcaaaagtacgtcgtgaacgtatgggacatattgaattagccgcaccagtttcacatatctggtactttaaaggaattccatctcggatgggtcttgttttagacatgagccctcgtgcattggaagaagtcatttattttgcttcatacgttgtcatcgaaccaggtgacacaacattagagaaaaaacaattgttaacggaacgcgaatatcgtgaaaaacgtgaacaatatggccaagccttcaaagctgctatgggtgccgaagccgtgaaacaattattagataacgtcgatttagatggcgaagttgcgcaattaaaagaagaattaaaaacagcttctggtcaaaaacggacacgtgccatccgtcgtttagacatcttagaagccttccgtgcttctggtaaccaaccaagctggatggtaatggatgttatcccagttattccaccagatttacgtccgatggttcaattggaaggtggtcgttttgcaacaagtgacttaaacgacttataccgccgtgttatcaaccgtaacaaccgtctaaaacgtttattagacttaaatgcgccaagcatcattgttcaaaacgaaaaacggatgttacaagaagcggtcgatgctttaatcgataatggtcgtcgtggccgtccagttactggaccaggtaaccgtccattgaaatctctttctcacatgttgaaagggaaacaaggtcgtttccgtcaaaacttactaggtaaacgtgttgactattctggtcgttccgtaatcgtcgttggtccgttcttaaaaatgtaccaatgtggtttaccaaaagaaatggcgattgaattattcaaaccatttgtaatgcgtgaattagtacaacgtgaaattgcgacaaacattaaaaatgcgaaacgtaaaatcgaacgtggcgaagatgaagtttgggatatcttagaagaagttatccaagaacacccagttttacttaaccgggcacctacgttgcatagattagggatccaagctttcgaacctgttcttgttgaaggtcgtgcgatccgtcttcacccattagtttgtgaagcctacaatgccgatttcgatggagaccaaatggcggttcacgtgcctctaaatgaagaagcacaagcagaagctcgtatgttaatgcttgctgcccaaaatatcttgaacccgaaagatggtaaaccagttgttacaccatctcaagatatggtcttaggtaactactacctaacaatggaagaagaaggccgtgaaggggaaggcatgatcttccgcgacatgaacgaagctgttttagcatggcaaaatggctacgtgcatttacactcacggattggggttcaaacaacacttttaggtgacaaaccatttactgattggcaaaaagaacgaatcttaatcaccacagttggtaagatcatctttaacgaaatcatgcctgttgagttcccttacttgaacgaaccaacagactataacttaactgttcaaacaccagataaatacttcgtagaagctggtacagacattcctgcacacattaaagagcaagaattagttttaccattcaagaagaaaaatcttggaaatatcattgctgaagtcttcaagagattccacattacggaaacctctaaaatgcttgaccgcatgaaagacttaggttacaaacactcaacgtatgctgggatgacggtagggattgccgatatcatggttcttcatgaaaaacaagcaatcattgatgctgcccacaaacaagttgaaacaattactaaacaattccgtcgtggtttaattactgatgacgaacgttatgaacgtgtaatcggcgtttggaacggtgccaaagacgaaatccaacaaaaactgatcgaaagtatggaagctcgtaacccaatcttcatgatgtctgactctggagcccgtggtaacatctccaactttacacagttagctggtatgcgtggtttgatggccgctccgaatggacgaatcatggaattaccaatcatctcaaacttccgtgaaggactttctgtcttagaaatgtttatctcaactcacggggctcgtaaagggatgaccgatacggccttgaagacagccgattcaggttacttaacacgtcgtttagttgacgttgcccaagacgtaatcattcgtgaagacgactgtggcactgaccgtggtcttgaaatcgaagccattcgtgaaggtaacgaaattatcgaaccattagacgaacgtctattaggtcgttatacacgtaaatcagttgttcatccagaaactggtgcaatcatcattggtgcggatcaattaatcactgaagatcttgcaagagaaatcgtggacgctggtattgaaaaagtaaccatccgttctgtctttacatgtaacacaaaacatggtgtatgtaagcactgttacggacgtaacttggcaactggttctgacgttgaagtcggagaagcagttggtacaatcgccgctcaatctatcggggaacctggtacacagttaaccatgcgtacgttccataccggtggggttgccggtgacgatatcactcaaggtttacctcgtatccaagaaatctttgaagcacgtaatccgaaaggacaagcagtgattacagaagtaaccggtgaagttatcgatatttctgaagatcctgccacacgtcaaaaagaagtaaccatcaaaggaaaaacagatacacgtacctatactgtcccttacactgcacgtatgaaagttgctgaaggcgacatcatccaccgtggtgcaccgttgacagaaggttcaattgatccaaaacaattattacaagttcgtgatgttttatctgttgaaaactacctattacgtgaagtacaacgtgtttaccgtatgcaaggggtagaaatcggcgacaaacatatcgaagtaatggttcgtcaaatgttacgtaaaatccgcgtaatggatccaggtgacactgaaatccttccaggaacattaatggacatcgcagaatttaaagaccgtaactacgacacattagttgctggtggcgtccctgctactagtcgtccagtcttacttggtattaccaaagcgtcattggaaacaaacagcttcttatctgctgcatccttccaagaaacaacacgcgtgttaacagatgctgctatccgtggcaaaaaagatccattacttggattgaaagaaaatgttatcattggtaaaatcatcccagctggtactggtatggctcgttaccgtaacatggaaccaaaagaagttggcgtagctagcgaaaacgtttatagtatttcagacattgaagcacaaatggctgctgaagatgcgatgaaaaacatcaataaataa

SEQ ID NO: 6531 - DNA, 2496 bp, Enterococcus faecalis
  CDS (1)...(2496)
atggatgaactatttacagaaagtgcgaaagccgtactggcgattgcccaagaagaagcgaagtattttcgtcaccaatccgtcggttctgagcatttattattagcactcgttttagaaccgaatgggattgccggaaaaacattacgacaattgaatactgacacagaagacatccgtgaagaaattgagcatttaagtggctatggcaccatgcaaagtccaatggggaataacaacttatacttgccttattcaccaagagccaaacaaatctttgcctatgctggagatgaagcgaaacgcttaggggctcaaaagattggtaccgagcatttattattaggcttgttaagagacgaagaaattttagcgtctagaattttagtgaatttgggattaagcttatccaaaatgcgtcaattattattgaaaaaaatgggcgtttccgaacccaatggcgcacaacgtcgtcggaatggtcaaagtaaaaatgcgccacaagggacgccaacattggattctttagcaagagatttaaccaagttagcacgagaacaaagcttggatccagtagttggtcgcggtaccgaagtccgtcgtttgatccaaattttgagtcgccgtaccaaaaacaatcctgtcttagtcggtgaaccaggtgttgggaaaacagcgatagcagaagggttagcccagaaaattgtcaaccgggaagtccctgaagatatgcaaggcaaacgtttaatgatgctagacatgggtgccttggttgctggaaccaaatatcgaggtgagttcgaagatcgcttgaaaaaagttgtcgatgaaatctatcaagatggacaagtcattttatttatcgacgaattgcataccttgatcggtgctggcggtgcagaaggggcgattgatgcttcaaatattttaaaacctgctttagcacgtggcgagttgcaaacaattggtgcgacaactctggatgaataccaaaaatatattgaaaaagatgccgctttggaacgtcgttttgcccgtattcaagtagcagaaccaaccccagaagaagcagaagaaattctaaaaggcttgcgttcccgctatgaaaaacatcatggcgtagaaattacagatgaagctctacatgcagcggttcaattatcgattcgctatttaaatgaccgccaattaccagataaagcaattgatttaatggacgaatctgcagcaaaagttcgtttagataaggcagatcaaccttcagaaattaatgaattgcgtaccgaaatttctcaattaattacggaaaaagaagaggccattcaaaatcaatcatttgaaagtgctgctcggattcgtcaaaaagaaaaacaagtgatggaaaaactagaagaattgattgcagtgaaagaaaaaagtctgtctggttacagtacgcaagtaacagaagaagacgtggctggagtcgtttcacaatggacaggcgttcctttgcagcagctagagaagaaagaaagcgaacgattgatggaattagaaaccattttacatcaacgggtcgttggccaaaacgaagcagttgaagctgtttcacgcgctatccgtcgtgcgcgtagtggcttgaaagacccagcaagaccgattggttccttcatgttcttaggaccaactggggttgggaaaacagaacttgccaaagccttagccgaagcgatgtttggcagcgaagaagccttgattcgcgtggacatgtctgagtttatggaaaaatacagtactagccgtttaatcggttctcctccaggttatgtcggctacgaagaaggcggccaactaactgaaaaaattcgtcaacgtccttattccgttattttgctagatgaagtagaaaaagcccatccagatgtctttaatattttattacaagtcttagatgatggccatttaacggatgccaaaggacgaaaagtcgattttcgtaacacgattttaatcatgacctccaacttaggagcaacagcgattcgtgaagaaaaacatgtcggcttcaatgtgaaagacatttctaaaaatcatgaattaatgcaaaaacgaatcatggaagaattgaaaaaagccttccgtccagaattcttaaaccgaattgatgaaacggttgtcttccattccttgaaacaagaggaaattcatgaaatcgtaaaaattatgagtcaatctgtcgtgaaacggatggccgaacaagaggttaaagtgaaaatcacaccagctgcaattgaagttattggtaaagtcgggtttgatccagaatatggcgcacgtccaattcgtcgggccttgcaaaaagaagtggaagatcgtttaagtgaagcccttctttccggtcaaattcagttaggggataaagtaaccttaggtgctagcaaaggcaaaattacgttaaatgtgcgggcaccaaaagcaccaaaaacagaagcgaaagaattacaaactgtatag

SEQ ID NO: 6532 - DNA, 1248 bp, Enterococcus faecalis
  CDS (1)...(1248)
atgaaagtaatgacagaacgaacattgaagcgtcccgaggtgttggctccagccgggacgctagaaaaactaaaggtcgcaattcgttacggtgccgatgccgtttatatcggagggaatgcctacggtctgcgtagccgcgcaggaaatttcacgccagaagaaatggcggaaggcgtagcctttgcccgcgaacataatgcgaaagtttatgtcgctgccaatatggtcactcatgaaggaaaccaggaaggggcaggagcgtttttcagagaattgcgagacatcggaatttcagctgtgattgtttccgatccagctttaatcgaaatttgtgcgacagaagcaccaggtttacctatccatttatcgacacaagcttcagcaactaactatgaaacattagaattttggaaaaatgaaggcttagaacgtgtggttttagcgcgcgaagtttcaatggaggaagttgcagcgattcgtaaaaatacggacattgaaattgaagcctttattcatggagcaatgtgtatttcatattcaggacgttgtactttatccaaccatatgtcgatgcgggatgccaatcgtggcggttgctctcaatcttgtcgttggaaatacgagttatttgatatgccttttgggacagaacgtcggagcaaaaccagcgaaggggaagttgaagaagagttttcaatgagcgccgtagatatgtctatgattgaacatattccagaattaattgaaaatggtgtcgatagttttaaaattgaaggccgcatgaaatccattcactatgtttcgacagtcgctaatgtgtataaaaaagccgtcgattcttacatggaagatcctgaaaactatgtctgccaacaagagtggattgatgaattatggaaagtagcacaacgtgaattagcaactggtttttattacaatacaccaagtgaaaatgaacaattattcggcgaacgtcgtaaaattccacaatataaatttgttggcgaagtgattgcgtacaacgaaaagacgcaagtcgcgacaattcgtcaacggaaccttttcagtgtcggcgatgaaattgaattttatggtcctgggtttacccatttccaccaaaccgttaaagagatgtataatgaagacggtgaagcgatcgatcgggcacctaatcccatgatgttattaacaatggaagtgacgcaacctgttgcagtcggcgatatgattcgtaagaaaaaataa

SEQ ID NO: 6533 - DNA, 882 bp, Enterococcus faecalis
  CDS (1)...(882)
atgacgaattttagtcaacagcatttaccgttggttgaaaaagtcatggtcgattttatcgcagaatatactgaaaatgagcgtttgaaagaagcaatgctctactcaatacacgcaggtggcaaacgattacgcccgctattagtgctaacaacagtggccgcttttcaaaaagagatggaaacgcaagactatcaagtggctgcctctttagagatgattcatacgtattcattaattcatgatgatttaccagcaatggatgatgatgatttacgtcgtggcaaaccaaccaatcacaaagtgtttggtgaagcgactgccattttagctggggacggcttattaacaggcgcatttcagttactttctttgagccaattaggcttaagtgaaaaagttttactgatgcaacaactggcaaaggcagcggggaatcaaggcatggttgccggccaaatgggtgatattgaaggagaaaaagtcagcttgactttagaagagttagcggctgttcatgaaaagaaaaccggagcgctaattgaattcgccttaattgctgggggcgtattagccaatcaaacagaagaagtcattggtttactgacacagtttgcgcatcactatggcttggcttttcaaattcgtgatgacttattagatgccacaagtacagaagcagatttaggtaaaaaagtaggccgagatgaagcgttgaataaaagtacgtatccagctcttctagggattgctggcgcgaaagatgcgctaacacatcaattagcagaaggcagcgctgttttagaaaaaatcaaagcaaatgttcccaacttttcagaagaacatttagcaaacttgttaactcagttacaattgagatag

SEQ ID NO: 6534 - DNA, 969 bp, Enterococcus faecalis
  CDS (1)...(969)
atgaggcaaatgatgactgaagaatttcgccattacaccgttcttttaaaagaaacagtggatggattacaagtgaagccggatggcgtatacgtagattgcacactcggtggtgccggacatagtgaatacttactgacacaattgaatgagcacggtcatttatatgcctttgatcaagaccaaaaagcgttggcacatgctaagactcgtttgcagaaatatgtagacaaaggtcaagtgaccttcatcaaatcaaattttagaaatattaaagaagaattggcagaacacggggtgttccatgttgatgggattctatacgatctaggtgtttcttcaccacaattagatgaagcggaacgtggttttagctatcatcaagacgcgcccttagatatgcgcatggatcaagacgcacccttgacggctcgcgaagtggtgaatacgtatagctatagtgagttagtaaaaattttctttcgttatggggaagagaaattttcgaaacagattgctcgagaaattgaacgtgttcgcgaaaagcaaccaattgaaacaacaggtgaactcgttgagattattaagacggcgattccagctccagcaagacgcaaaggtggacatcctgcaaaacgaattttccaagcaattcgcattgccgttaatgatgaattaggggcagttgaagagtcgctagaacaagcaattgatttgctagcgaaaaatggcagaatcagtgtgattacgttccattcgttagaagatcgtatcgttaaaacaatgtttaaagaatacagtacggtacaagatttgccaccaggcattccagtggtaccagaagaatttcaaccagaattaaaagtaattactagaaaaccaattttaccaagtgacagtgagttatctgagaataatcgttcacgaagtgcgaagttacgcattgccgaaaaaataaaatctagatag

SEQ ID NO: 6535 - DNA, 408 bp, Enterococcus faecalis
  CDS (1)...(408)
atggctgaattgaagaaagtaaatgatttccattatgaagcaccagaaatggatcagccaactgtggcaacagagcaagacagaaaaatgcaagaggaaacactacctgtccccactctattacccaaaaagaaactaaaaaatgtctctttgctagaaaaattaatcggtgttgtattagtttgtgcaacgattggtattgcaattgcgacaattcaagtaagaacgacaattgtccaaaccatgaacgatattacagaaacacaagcagtcattaaagaaaaggaagataacgctttgaaattggaacaagaaagaagcgaactttctaaatcagatcgaatcaaagatgtcgctaaaaaacaaggactagaaaataacggcgacaatgttaggactgttaaataa

SEQ ID NO: 6536 - DNA, 288 bp, Enterococcus faecalis
  CDS (1)...(288)
atgttattgactatgaatttcaattatgttgcccataaaaaaggtggcggttctacatcaaacggccgtgactctgaatctaaacgattaggcgctaaaagtgctgatggccaaacagttacaggtggttcaattttataccgtcaacgcggaactaaaatttatccaggtgtgaacgttggaatcggtggcgacgatacgttatttgcaaaagttgacggtgtggtacgtttcgaacgtaaaggccgcgacaaaaatcaagtatcagtttatccagtagctaactaa

SEQ ID NO: 6537 - DNA, 2229 bp, Enterococcus faecalis
  CDS (1)...(2229)
atgagtaaaagacataaatttaaacaattcatgaaaaagaaaaacttaaatccgatgaacaatcgtaaaaaagtaggcatcattttattcgctacgagtattggattgttctttttatttgcctttagaacgacatacattgtggcaacaggcaaagtagccggtgtatcactaaaggaaaaaacagcttctttatatgaaggaagccaagtggtaaaagctaagcgaggatcaattttagatcgatatggtaatccaatcgcagaagatgctacttcttattcgttatatgtcgtattatcaaaaaaatatacgggacaaaataatgaaaagctatatgcggagaaaaaagacttcgatgatattgctgaaattttagcgaaatataccaaactagacaaaaaaacagcattgaaatacttgaataatgggatccatgaagatgggtcaacacaatatcaagtggaatttggtacgggtggtcaaaacatcaccttggaaacacgccaaaaaattgaagcagatttgaaaaagaaaaaaatttcaggtgtttatttcaatgaacatccagccagattatatcccaatggtcagtttgcttctcactttattggctatacaaaagcagccaatccagatgatgataaagaaggcttagtaggcgcaatgggactagaacagacctataatgatattttaagtggaaccgatggccgtgtgtattttgaaaaagatatttatggcaatgccttaccaggaactgtggcggaagagaaaaaagcagtggatggtcaagatatttacacgacgctagatagtcgcttgcaaaataccttagaagatttaatgacgcaagttaatgaaaaatatgaaccagtttctatgactgccatgttaatggaagcaaaaacaggcgaaattgttgccatgtctcaacggccaacatttaatcctgaaacgaaacaagggttagacgataatggcacgtggcagaacctattagttgaaagtccttatgaaccaggctcaacaatcaaattatttacaacagctgcttctatggaacaaggacagtttaatcctaatgaattattcaatcgtgttggtggaattcaggttggggatgtaactgtgaatgaccatgactacactcggttgaacggcaaagaatatttgaattatcgtcaagccatttcttggtctagtaatattggtatggtaaaactagaacaaaaaatgggtgatgaaaaatggatggagtatttgaaaaaatttggttttggtacgagcacgcattcaggtttaagtggtgaatctgctggtaaattgccaggaacaaactttgtagatagagcaatgtcggcatttggtcaagcaattacggttactaatttccaaatgatgaaaggtttctcagctattgcaaatgacggttcaatgttgcaacctcattacatcagcaaaattgttgacaaaaatacaggaaaagaaacgattacggaaccacaaatcgtaggaaccccaatcaaagcgcaaacagctcaacagattcgtacgtacatgattgatactgttgaagacccgacttacgggattgcgtatgatatttataaagtgccaggctatcatgttgctgccaaaacaggaactgcccagatttcagatggtaaagggtacgttgatggagcaagtcaagtcttgtcttctgtagtggaaatggtcccagcggataatcctgaatatgttttgtatattacgcttagacaagcaaaaacaggttcgccttcagaagcaatggcggcaattgcaaacccattaatgaaattagcgttagacattaaagagacagatccggaaacaacgaaagtagcttctgataaagtcacagttgctgattataaaaacatgacaccagcggaagcgttggccaatgccaaagtgaacggggtggatcctgtgattatcggtgatggtgaaaaaatcaagaaacaatcaacgccggctggtcaaacattaatgcctaatcagaaattgattttgatcacaaatggaacgaactatatgcctgatttaaccggctggtcgaagagcgatgttaccaagtttggcgatctattaggtttgactgtcgagtttaaaggtgaaggctatgtgacgaaacaaagtatcgctgctgaaactgaaattacggagaaaaaattaaccgtgactttagaaggcacagaataa

SEQ ID NO: 6538 - DNA, 966 bp, Enterococcus faecalis
  CDS (1)...(966)
atggagtggacacagatttttattcccatagtggtgagttttgccattacagtgagcgtaatgccactattcattggctattttcaaatgaaaaaacaagggcaggttactcgtgaagatggcccgacttggcatagcgtgaaaacaggtacccctacaatggggggagtcgttttccttgtagccagcttgattacttcattagcaatggggttgtttttccaccaatttacgccgtctctactaattattctatttattttagtattatacggtttgctaggttatttagatgatttcattaaagtctttaaaaaacggaacatgggcttgaattctcgtcaaaaattaattggtcaaatttttggtgggttggttttctactttgtttatcgaagtgaaggcttttcagacaccttagatttgtttggagtagcagaagttccgttaggtattttttatggcgtgtttattattttttggttagtcggtttttctaatgccgtgaatttgacagatgggattgatggtttagttgctggtttaggaacaatttcatttggtacttatgcaattattgcctggaaacaacaacaatttgatgttgtgattatctgcctaagtgtgattggtgggctgattggctttttcccttataatagaaaaccagcaaaaattttcatgggtgatgttggttcattagcattaggtggattgttagcagcaatttcaattattttgcatcaagaatggacgctacttttaattggacttgtctacgtttgtgaaacagcaagtgttattttacaagttgcttcatttaaattatttggtcgacggatttttaaaatgtcaccaattcatcaccattttgaaatgtgtggttggtctgaatggaaaattgattttgtcttttggtctgtcggtttaatctgttcaggaatcacattatggattcttttctaa

SEQ ID NO: 6539 - DNA, 1371 bp, Enterococcus faecalis
  CDS (1)...(1371)
atgaaaaaaataacaacctatcaaaacaaaaaagtgttggttttaggactagctaaaagtggtgtcagcgcagcgaaactcttacatgagttaggtgcgctcgttaccgttaatgacgcaaaacaatttgatcaaaaccctgacgcccaagatttattaaccttgggtattcgtgttgttacaggggggcatccaattgaattgttggatgaagaatttgaactaatcgttaaaaatcctggtattccttatacaaatccacttgtggcagaagcactaactcggaaaattcctatcataactgaggtggaattagcaggtcaaattgccgaatgtccaattgtcggcattacgggcaccaatggcaaaacaaccacgaccacgatgattggtttactgctaaacgctgacagaacggctggtgaggcacgtttggcgggaaatattggttttccagcgagtacggtggctcaagaagcaacggccaaggatgatcttgtgatggaactttctagttttcagttaatgggaattgagacgtttcacccacaaattgcagtaattacaaatatttttgaagcacacttggattatcatggttcgcggaaagaatatgttgctgcaaaatgggccattcaaaaaaacatgaccgtagaggacaccttgattttaaattggaatcaagtagagcttcaaacgttagccaaaaccacagctgccaacgtattgcctttttcaacgaaagaagcagtagaaggggcttatcttttagatgggaaattatattttaatgaagaatatattatgcccgccgatgagctagggattcctggtagtcacaatattgaaaatgcactcgcagcgatttgtgtagctaaattaaaaaatgtatcgaatgttcagattagacaaactttgaaaaacttttcgggcgttccccatcgaacgcaatttgttggcgaagttcagcaaagacgtttttataacgattcaaaagcaaccaatattttagctacagagatggcgttaagtgggtttgacaaccaaaagctacttttacttgcgggtggcttggaccgcggtaactcatttgatgaattggttcctgctctgctgggactcaaagcaattgttttatttggagaaaccaaagaaaaattggcggaagctgctaaaaaagcgaacattgaaacaattttatttgctgaaaatgttcaaacggcggttaccattgcctttgattattcggaaaaagatgatactattttactatcacctgcttgcgcaagttgggaccaatacccgaattttgaagtacgcggggaagcctttatgcaagctgttcaacaattaaaagaaagtgaaatgtga

SEQ ID NO: 6540 - DNA, 1107 bp, Enterococcus faecalis
  CDS (1)...(1107)
gtgaaatgtgagaaaatgaagatactagtaactggtggtggcacaggtgggcatatctatcctgcgttatccttcgtcgaacacgtcaaaaaagaagcacctgcaacagaattcttgtatgtgggaacagaaaatggtctagaaagtcaaattgtgccaaaggcgaaaattccatttaaaacgattaaaattcaaggattcaagcgttcgctaagtcctcaaaattttaaaacaatttatttatttttaacaagcattaataaagcaaaaaaaattattcgtgaatttcaaccagatgtggtcattggtacaggcggttatgtttctggtgcagtagtttatgcggcccaccaattgaaaataccgacaattattcatgaacaaaatagtatccccggaatgacaaataaatttttaagtcgttatgtggataaaattgcgatttgtttttcagatgtcgctagttttttcccgaaagaaaaaacaattttaacagggaacccgcggggacaagaagtcgtaacggtggaaaagtcagctattttatcagagtttggcttggatccagcaaagaaaacggtggttttatttggcggaagtcgtggcgccttgaaaatcaatcaagcgtttgaacaggcctttcctttgtttgaagagagagagtatcaagttttatacgcttcaggagaaagatattatcaggaacttcaagaaagtctaaagctttctgaaaagaaattgacaaacataagtgtgcaaccgtatattgataaaatggttgaagtgatggctaataccgatttaatggtgggacgtgcaggagcaacctcaattgcggagttcaccgcattaggattaccagcaattttaattccgagtccttacgtcacgaatgatcatcaaacgaaaaacgcgcaaagcttagtaaaagttggtgctgttgaaatgattccagatgcagaattgaccggcgctcgtttagttgcggcaatagatgatattttattaaacaatgaaaaaagacaacagatggcaacggcgtccaaaggggaaggcatcccagatgcaagtgatcgtttgtatcaagttgtgaaaacgttagtctga

SEQ ID NO: 6541 - DNA, 1125 bp, Enterococcus faecalis
  CDS (1)...(1125)
gtgtggaagattagtaacgagaacgatatattcaaaaaaagaaaaccattacctccaaaaaaatcggaagagtctcaacctgaactgacaccttggcaaaaacaaaaccaagaatatttgaagaagcaagcggaagaagctgcttcaaaaggtgaaaacgaacaagcagaagtcaccatcactttacaagaacaaagtcaagaagagcctcaacaacatcttccacaagaaacagtggaagaagaggagcattttgcagatcgtttaccgaacgttaagaaaacacggaacaagcgcttatataggcgtttagcctttattttaacttgtttagggacagccattttagtggcattgtattttgtttcgcctcttagtcgattgagtgaagtaacagtttcaggtaacaaaagtgtggagagccaagcgattattcagcagtcaaaacttgaaacgggcagtggcttatgggagcagtattcaaatagaaattatttttctgcaaatattcagaaaaagtttccaattataaaaaaggcgaacattaagttaaatggtattaattcatttaaaattgatattcaagagtatcaaattgtcgctcttgctgcgactaaaggcggctatcatccgattttagagaatggtaaaactttggcggaaaccaccaaggctgctgaaagtggcaaaccaatttttgagaatttcaaagaggataaattaatccctgaattaatggtctcttacaacaaattacctcaagaaattaaacaaggaatttcagaaattaaatatgcaccatcaaaaaccaataaagacttgattaatgtctatatgaatgatggaaatcgagtgattgttaatatttctgatttaagtgaaaaaatggcttattattcacaagtagccgagcaaatggacaaacctggaatcgttgatatggaagtcggcattttttcttatccgtatgaaaaagaaagtgaagaaacgggcagtgaagtttccgaagattcagcggttgaaaatcaagaagttgtggacccaaatgcaggcgtagcaacggatgaagcgaataacggtacgccgacaaatggagaaaatcaagaagtgcaacaagcagaataa

SEQ ID NO: 6542 - DNA, 1233 bp, Enterococcus faecalis
  CDS (1)...(1233)
atggaattttcattagacaataacattaacaacggtgcagtcattaaagttatcggtgtaggtggcggcggcggaaacgctgtaaaccgtatgatcgaagaaaacgttaaaggcgtggaatttatcacagccaatacagacgttcaagcattaaaacattcaaaagcagaaacagtgattcaattaggccctaaatacactcgtggtttaggtgccggttcacaacctgaagttggccaaaaagctgcagaagaaagtgaacaagtgatttcagaatcattacaaggcgcggatatgattttcattactgctggtatgggtggcggaactggtacaggtgctgcgccagtagttgcaaaaatcgctaaagaattaggcgctttaacagttggtgtagtaactcgtccatttagttttgaaggtccaaaacgtggtcgttttgccgctgaaggaattgccttattaaaagaaaacgttgatacactattaattatctcaaacaaccgcttattagaagtcgttgacaagaaaacgccaatgcttgaagcatttagagaagctgataatgtattacgtcaaggtgttcaagggatttcagatttaatcactgcaccaggttacgtaaacttagactttgctgacgtgaaaacagtgatggaaaaccaaggaacagctttaatgggaattggtgtagcgagcggcgaagaacgcgtaattgaagcaacgaaaaaagctatttcttcaccattgttagaaacatcaatcgatggtgcggaacaagtcttattaaacattactggtggcttagacatgaccttgtttgaagcacaagatgcttcagatatcgttacaaatgctgcttcaggtgatgtgaacatcatcctaggtacatcaatcaatgaagatttaggcgacgaaattcgtgtaacagtaatcgctacaggtattgatgaatcaaaaaaggatagaaaaccgcaccgtcaaacaagacaagcggttcaaccaatgcaacaaacaactcaatctgtggaaatggatcaaccaaaatcacaagaagaagcaagtgcttttggcgattgggatattcgcagagaacaaaatacacgtccaaaagttgatgaatcttcattagaacaagtagacaaaaaagaatttgacacattccaccgtgaagaaccaaatcacaatgatgacgaattaagtacgccaccatttttccgcagaaaacgataa

SEQ ID NO: 6543 - DNA, 678 bp, Enterococcus faecalis
  CDS (1)...(678)
atgatagctgaaaacttaacaaatattaataatcaacttcagctagcatgcaaaagctcacagcgctctgttgctgatgtgacaatgattggcgtcactaaatcagtaggaattgaggaagcagcagagcttgttcagcttggtgtccagaatttagctgaaaaccgagtagataagttactagaaaagaaagctggattggaaaaatttaatgatattcagtggcatttaattggtaatttacaacgtaggaaggtaaaattaattattaatgagatagattattttcatgcattagatagtctgagtctagccaaagaaattcaaaaaagagcaacgaaagttattcgttgttttgttgaagtgaatataactggggaagaaagcaagcacggctttcgtaaagaagacgtcttacctttcattcaagaacttgctgatttggacaaaattcaaatcgtcggtctaatgactatggcaccttttggggcaagtgaagaagtattacatgcaacatttagagaattaaaagagctgcaaatgaccgtaaatgagaaacatttatcttttgctccttgtacagaacttagcatgggaatgagtaacgatttcccaatcgcagttgaagaaggtgcaacttttatacgaatcggaacagcgttattcagagatgcgtaa

SEQ ID NO: 6544 - DNA, 705 bp, Enterococcus faecalis
  CDS (1)...(705)
gtgcaacttttatacgaatcggaacagcgttattcagagatgcgtaaaggagaggaatttatgtcaatttttaacaaggatgcgttatcgagcttttttggcttatctggcgaagaagatgattattatgataactacgaagaatatgaagagcgcaaagcagttaatgaaccaccgcgtcgtgcagctcggcctaaaccacaacgccctgttcaacaacaggaaagttacagtcagccagcttatacacaacaaagtgagcctgtagttgaaaagccttctgcacgctatcgttctgctgaagcgcatcaagaaagagacacacaacaagctgcttacacagagaaaaaagtggtttctatgcgtagttctaatcaatcagcgactacgaatacaagacgagcacaagaaagcaccgccaatgcaaaaacacataaaattactattattgaaccacgtgtgtattcagaagcaatgagcattgcgaaacatttatttgctgaagaagctgtgctagttaattttacattagtagaagaagaccaagcacgacgcatcgttgatttcttaactggtactgtgtatgctttagacggagatattcagcgcgttggcaatgaaatcttcttatgcacaccagcgaatatggaaattgatagtgcgacagcacaatctttagccaacaaacaattctttgatttctaa

SEQ ID NO: 6545 - DNA, 702 bp, Enterococcus faecalis
  CDS (1)...(702)
atggcattaactccattagatattcaaaacaaagacttctcaacaaaaatgagaggctataaccaagacgatgtagatgactttttagatcaagtcacacgtgattatgaagatgcattacaaaaaaatcgtgaacttgagaaatcattaaaacacgcagaagaaaaattacaatacttcaatgaattgaaagatgcattgaaccaatcaattattgttgcacaagataccgctgataaagtgaaatcaagtgccaacaaagaatcagaaatgattatcacttcggcagataaccaagccaaagaaaccttggtagaagctgaacgtaaatcaaatgcaatgattgcagatgctgaagcgaaatcaacacaaatcttagcagaagcaattgaacgtgctcgccaattagctggggaaacagaagacttgaagaagaaaacacgtgtcttccatcaacgcttaagcttaatgcttgaaactcaattagagcaagtgaagagtgaagagtgggaagagattttaaagcctttttctagttatgtcggagacaaacatacagcagttaaggaaattcttgatgaacaagaccttgacaacgaaaatgaaactgttgtaaactctgaagagaacacagatgctgtagtagaaaaaaagcctgtaattgaagtcactgaagaaacaattgaagaagaatcaaaatag

SEQ ID NO: 6546 - DNA, 2802 bp, Enterococcus faecalis
  CDS (1)...(2802)
atgaaagcgaggcaaatgcatatgaaaatgaaagaaacattgcaattaggaaaaacagcttttccaatgcgtgggaacttgccaaaccgtgaagcagaatggcaaaaagactgggaagaaaaaggcttatatgaacaacgtcaaaaattaaacgaaggaaaaccaacctttgttttacatgatggccctccgtatgcaaacggaaatattcatttaggacattctttgaataaaatcagtaaagatattattattcgttcaaaatcaatgtctggtttccgttctccttatgtgcctggttgggatactcatggtttaccaattgagcaagtgttaaccaataaaggggttaaacgtaaagaaatgactgtcgctgagtatcgcgaaaaatgtaaagagtatgccttatcacaagtcgataaacaacgtaacgattttaaacgtttaggtgtgtcaggcgattgggaacatccatatattacgttagatccagagtatgaagcagcagaaattcgtgtttttggtaagatggcagaaaaaggctatatttataaaggtttaaaaccaatttattggtctccttcaagtgaatcttctttagcagaagcagaaattgaatacaaagatgtaaaatcaccttctatttacgtagcttttaatgtggccgatggtaaaggtcttttagataacgagacagccttcgtcatctggacgacaaccccttggacattaccagccaacttaggtatttcagttaatcctgattttacgtatgttgaagtgaaggcagacggtcgtaaatttgtaattgctaaagatttattaacaacagttaaagaagcgattggttgggaagaagtagaagtcttgcgagaattttctggtgaaaaattagatcgtatgacagctcaacatccattctatgatcgaacatcacttgttatgctaggcgaccacgtgacgctagatgccgggactggcttagttcataccgcaccaggacatggtgaagatgactatatcgttagccgtaaatatgatttacctgttatttctcctgttgacagccgtggggtctttacagatgaagcacctggttttgaaggaattttctatgacaaagcgaatccaatgattactgagttattagaagaaaaaggcgcgttattaaaattagatttctttacgcatagttatccacatgattggcgtaccaaaaaaccagttatctaccgtgcaacgccacaatggtttgcttcaatctctaaattccgtcaagatattttagatgaagttgagaaagttgactggctaattccttggggaaaaacacgtttatataatatgattcgtgaccgtggtgattgggtaatctctcgccaaagagcgtggggtgtaccattaccgatcttctatgctgaaaacggggaagccatcattacgccagaaacaattgaacatgtagcgaatttatttgcagaacatggatcaaatatctggtttatgcgtgaagcaaaagagttactaccagcaggctttacacatccaggttcaccaaatggcgagtttaccaaagaaacagatatcatggacgtttggtttgactcgggttcttcacatgaaggggttttacgagaaagagaagagttaactttcccagcagatatgtatttagaaggttctgaccaatatcgtggttggtttaactcaagtattacaacaagtgtcgctatcaatggagtagcgccttataaatcaattatttctcaagggatggttctcgatggcgaaggccgtaagatgagtaaatcgttaggcaatactatcttacctgaaaaagttatcaatcaaatgggggcagatatcttacgcttgtgggtaagtagtgttgacgcggaagccgatgtgcgtgtctcaatggatatcttaaaccaagtatctgaagtgtaccggaaaatccgtaatactatgcgtttcttgttagcgaatacgagtgatttcaatccagctgagcatactgtagcttatgctgatttacgttctgtagataaatacatgacggttcgtttaaatcaagtcattcaagaaatccgtgaaaatggttatgaaaaatataatttcatgcatatttatcggacagttatgaacttcttaactgtggatctatcttctttctatttagactttgcgaaagatgtcgtttatattgaagctgaaaacgattatcaacgtcgttgtatgcagactgttttctatcaaacattggtttcattaacaaaactattgacaccaattattccacatacagcggaagaaatttggagtttcttacaagaagaagaagagtatgtgcaattagctgaattcccaggttacgaaacgtttactaatgaagaagaattgatggatacatgggcagcctttatggatttccgtgacaatgtcttaaaagcgttggaagaagctcgtcattctaaattaatcggtaaatcgttagaagccaaagtgaccgtttatccaaatgaacaaattcgtcaattaatgacagctgttgatgcagatattgctcaattactaattgtttccgactttgaagtatcaaaagaagtagcacctagtgaagctgttcaatttgaagacatggctattttagttgaaaaagcagaaggcgaaacgtgtgaccgttgtcgttccgttcgtcaagatgtcggctcagatgaaaaattaccaacactttgtggccgttgtgcacacattgttgaagaaaattatccagaagcggttgctgaaggattcgaataa

SEQ ID NO: 6547 - DNA, 1524 bp, Enterococcus faecalis
  CDS (1)...(1524)
atgaatgaaaaagtagcattatttactattttcggggggacaggtgatcttgccaaacgtaaattgtatccttccctgttccgcttatataaaaaaggattattagctgagcgttttgcggtgattggtaccgcacgtcgggaatggacagacgaatactatcgtgaaatcgtccgtgaaaccattcaagacttaaatcccacggccaaagaggcaactgaattttctagtcatttctattaccaatcacataatgtgaatgatacggaacattataataccttaaaagaattatctgatcgcctaaatgaacaataccacttagaaggcaatcacgtttactatttagctatggcccctcaattctttggaaccattgttaatcacttgaaatcacaacatattatttcggaagaaggctttgatcgtctaattatcgaaaagccatttggttctgattatgaatctgcctacgaattaaatgaagaaattcgtgctgcatttcctgaacaagatattttccgaattgaccattacttaggcaaagaaatgatccaaaatatttcagccattcgttttgccaataatatttttgaatcacaatggaacaatcgttacattgataatgtccaaatcaccttcgctgaaagcttaggtgtcgaggatcgtggcggctattatgaccacagtggcgcactaaaagatatggttcaaaatcatattttacaagtcgttgcattgctttctatggagcctcctgttgccttttctgaaaaagaaattcggactgaaaaagtaaaagctttacgtgccatccgcctttattctgaagaagaagcccttcaaaatttcgtgcgtggacaatacggcgaaggtcagctagctgatcaaacatttgcagcctatcgtgatgaaccgaatgtggcagaaacttcatccactgaaacttttgttgctggtaaatttttaattgataatttccgttggtctggcgtccctttctatgttcgcacaggtaaacgattaactgaaaaaggcacacgtattaacatcgtctttaaacaagtacctattaatgtcttcaaagatgatacgtgtgaagaatgcgataaaaccgatttaccaccgaatgttttaactatctatatccaaccaactgaaggattttcattaaccttaaatggaaaagaaatcggtcaagggttcaatacaactccagtgaaacttgatttccgtcaaagtgctgaaatgactgaaaatagtccagaagcatatgaaaaacttctattagactgcctaaatggcgatagtacaaacttctctcattgggacgaagttgcccaatcttggcgcattgttgacattattcgacatgcttgggataaaacagacgtttctttccctaattatgccgctggcacaatgggcccgcaagctgccttcgacttattagaaaaagatggctttacttgggaatggcaaccagataactggtaccgtgaccgcggtcaacttgatcaataa

SEQ ID NO: 6548 - DNA, 1065 bp, Enterococcus faecalis
  CDS (1)...(1065)
atgatggcaagagtcgaaaagctacgggaattaatgaaagaaaataatttacaaggatttttagtgacaagtccgtataatttacgttatttaaccaattttactgggacaacaggattggcaatgattgcattagataaagctttttttataacggattttcgttatacggaacaagctgcggaacaagcaactggttttactatcgttaaaaacacaggacatatttttgacgaagtagcagatttagctgaacgtttgcaattagataatttagcttttgaagaaacgcaagttagtttcgctgattatagcttattggaagaaattttaccatgtgaattagttcctgtaatgggtttgattgaagaattaagagaagtgaaagatgaagaagaagtagcgattattgaaaaagcgtgtgccatcgcggatcaaggatttgcctttgtcttagagatgattaaacctggaatgacagagattgaagtggctaatcaattagatttcttcatgcggtcaaaaggagccagtggtgtttcttttgagacaattgtggccagcggtctacgttcggcgatgccacatggtgttgctagccataaagtcatcgaaaaaggtgagttaatcactttagatttcggttgttattatgaaggctatgtttctgatatgacacggacatttgccattggtagtattcagccaaaactaaaagaaatttatgacattgttttagaagcacaattaaaagtgttagcagaagctaaacctgggttgacgggcattcaattagatgcgattgcacgggatcatattgcttcctatggctatggcgatgcgtttggccacagcactggtcatggcattgggttagaaattcatgaaggaccaaatgtttcattccgagcagataaacagtttgtaccagggaatgtgattacggacgaacctggaatttatttgccaggaattggtggcgtgcgtattgaggacgatctatcgattactgctgaaggtaatcgtgtattgacacacgcgccaaaagaattaatcattttataa

SEQ ID NO: 6549 - DNA, 321 bp, Enterococcus faecalis
  CDS (1)...(321)
atggacggacaacagaacttagaagcaatcatgggtttaatcatgtatggcggaaatgctaaaagcgatgcaatggaagcgattgccgcagcaaaatcggggggttttgaattagcagacaaaaaaattgcagatgcagaagaatcacttgtacatgcacatcattcgcaaacaggaatgttaacagaagaagcaaaaggcaataacatgcaagtaacattgttaacagtgcacagtcaagatcatttaatgactgcgattgcatttacagatttagcaaaagaaattatcgatctttatcgccgtattgataacgagtaa

SEQ ID NO: 6550 - DNA, 1395 bp, Enterococcus faecalis
  CDS (1)...(1395)
atgaaatatcaatttccagaaaatttttggtggggttctgcagccagcggtcctcaaacagaaggcgtttttgaaggtgatggtaaaggtcaaaatatttgggatttttggtatcaagaagcgccagaaaaattttttcaacaagtcggtccagataagacctcacaattttataaaaaataccaagaagatattcagttaatgaaagaaacgggacataactcttttcgaacatccattcaatggagccgtttaattccagatcctacaacaggaaaagtcaatcaaacagcagttgatttttataatcaagtcattgatgatttattagaacacgggattgagccctttatgaacttgtatcattttgatatgccgatggtacttcaagaaaaaggcggttgggaaagccgtgaagtggttgatttgtatgttgactttgccaaaacctgttttgaattgtttggcgatcgcgtgaaaaaatggtttacgcacaatgaaccaattgtaccagttgaaggtggttatctctatggctggcattatcctgataaagtgaatctaaaagaagggattcaagtactctatcatgaagctttagctagtgccaaagcgattgccgtctatcactctatgaacttatcaggtgaaattggcattattttaaacttaacgccgacttatcctcgtgatgagcacaacgaagccgatgtaaatgcggctaaatttgtcgatggtttctttaatcgttcgtttttagacccggctgttaaaggtcattttccagaagatatggttgcttgggcgaaagcaaatgacttattgccagaaacaacgccagaagatttagcaataattgctgaaaatactgtggacttattaggagtaaactactatcaaccacgtcgtgccaaagcaaaagaaacacctgttgaaacacgaccagaaggcttacttccagaagatttttatgatgtctacgatatgcctggcaaaaaaatgaatccttaccgtggctgggaaatctacgaaaaaggtatttatgatacattaatgaatttaaaagaaaattatggcaacattcgctgctacatttcagaaaatggcatgggcgtagaaggagaagaacgctttgtcaatgaacaaggagtcattgaagatgattatcggattgaattcgtgcaagatcacttgaaatgggtgcaccaagcgattcaagaaggtagtaatgttcaaggatatcatatgtggacgtgtatggataactggtcttggctcaatgcctataaaaatcgttatggcttcatcgctgtggatttagatgatgatgcgaaacggaccattaagaaaagcggtcgttggttcaaagaaatgacagcaaataacggcttttag

SEQ ID NO: 6551 - DNA, 3330 bp, Enterococcus faecalis
  CDS (1)...(3330)
atgtcatttccacaattacataccgttacttcctactcgcttttatctagtacggttaggattcgttcctatgtaaaacaagcgaaagcgttaggttatcaaacattagcgattaccgatatcaatgtcttgcatggggcggttgaattttatgaagcatgccaagaagcgggaattcaaccaattatcggtttaagattagaatataccccagcagaaaaagaagggcattccgagttgcttttatttgctaaaaatttaaaaggatatcagcaattaatgcaactatctagcagcaaaatgacgacagagggtcccttttacttagcggaacatcaatccttattaagtgatttatttgccgtgactttgtcagctaaaggagaagtcgcccaaacattttttgaagatgaacaacaagcggttcacgctttccaacaacttgcttcatattttgatccccagtcgttatttgttgaacattctttttcaatgaatcaacaacgcaatccagcgctcttttctttttaccaaagagaacaattacctggcgtggctttgcaagaggtacgtcatttaacaagggaagaaggctttgccgttactgttcttgagagcatcaaagaaaataatcaattgaatattacaagccaaacaccggaaatagaaggtctgaattacttgcgcgaagcagagacgacgatggaacaaatgcttcaaatagctggttcagaagtggtccagaatacgattcagctagctgaaaattgccgagttgacattcctttacatcaaaaattattaccgcattttcctgtgcctgataatcaaacggctggttcttatttacgctcattgtgtttagaaaaattaccagaaagagtgcctcatctaaatgaagtttaccaaaaacgattagaaaaagagttaaccatcattcacaatatgggctttgatgattactttttaatcgtttgggatgtgatggacttctgtcataacaatcaaattgttacaggcgctggccgaggttcagctgcaggctctttagtgtcctatgtgttatcaattacagatgtagatccaatcaaatatgatttgctttttgaacgttttttgaatccagaacgctacacgatgcccgatattgatttagatattcctgataatcggcgggaggaagttttagcttatgtcagtcaaaaatatggtcattatcatatggcgcaaattgccacgtttggtacgatggctgcgaaaatggttttacgggacgttgcacgtgttttcgggttgtcccagagtgaagcgaatcgttggtcggcagctgtccccaacaagctgaaaattacgttagaagaagcataccaagagtcaaaacggatgcaagaattggtcaatttttcaccaaataatcaattgctctataaaacagctgttcagctagaaggattgcctcgccatgtttctacgcacgcagcaggtgtggtaattagtgatgaaaatcttttgaatttggttccgttacaaccaggatcgaatgaaattttattgacccaatttactatgaatgatgttgaaaaaattggtcttctgaaaatggatttcttgggcttaagaaatttatccatcattgatgataccctcacagctgttaaacgcgtctataatcgaaccattcgtttaaatcagattccattagatgacgaaacaacgctggctttatttagaaaaggggaaacaagtggcgttttccagtttgaatctgctggaattcggaatgtattaagaaaattagggccaactagcattgaagatattgctgctgtcaatgccctgtatcgtcctggtccgatgcaaaatattgatgttttcatccgccggaaaaaaggcttggaacaaattagttatccagagcctagtctcgcccccattttggaaaatacgtacggaattattgtttaccaagagcagattatgcaagttgctgcgaaaatggcaggcttctctttagggcaagctgacattttacgtcgggccattagtaaaaagaaaaaagatgtgctagatgaagaacgaaatcattttgttaatggtgcgctacaacaaggctatcctcaagagacagctaaccaagtgtacgattatatagagcgctttgctaattatggctttaaccgctcgcatgcatttgcctattcctttattggttttcaaatggcttacttgaaggttcattatccgagtgctttttatgtcgcattgttgcattctgttcgtcataatccaacaaaaattaaagaatatattggcgaagctagaaaaaacaagcagacgattttgcagccgtcaattaaccaaagtcactacagcttttacctaaatcagcaacagcaaattttatttggttttagttctttaaaaggaatccgccgagacttcattcaaaatattttaaatgaacgccgagaaaatggaccgtacaaaacgttcgatgagtttcttttgcgaattgaccgtaagtggttgaaagttgaaaatatcgaaccattgattgccatcggtgcatttgacgaaattgcgcctaatcgccgtcaattagcggtaggtttagagagtaatatccaaagtattcttctcagcggtggtagtatggatttgttagaaacattgaagccaaaggaagaagaaattgccgattatccgctagaagagcgactagaacaagaagaacaatatttaggggtctatttatcaggacatccgacagaagagttcaaaaaaacacgcttagccaagcaaacgcaacttgttcatgaacttgttgaaaatcagcccacgaaattattgatttatgtcaaaaacattcggacgattcggaccaaaaagggagaacaaatggcctttgttgatggggatgatacaacaggaagtatttcactaacgttgttcccaaccgtttttcgccagttaagacagagtgtcgagaaagggcaagtttattatgtggaaggaaaagtggaacgcagtacgtacaatcaagaattgcaaatattggttcaacgaatagaaaaagcgcaacaagtagaaacatcaattagtgacgaaacgtgttttatcagaattacaaaagatgtcgaacaaacggacgtttttcagaaaatgaaagaggtactcagtcgtcatgctggacacattccagtgattgtctattttgaaaaaacaggaaagaaaatagtattaaatgaagaaaattgggtcgctcatacaagcgctagtcagcaacaattagcttacgttttaggtgagcaaaacgtcattttcaaatga

SEQ ID NO: 6552 - DNA, 963 bp, Enterococcus faecalis
  CDS (1)...(963)
atgaaacgcattggtattttaaccagcgggggagatgcccctggaatgaacgctgcaattcgtgcagtcgtacgcaaaagtatttttgatggaatcgaagtttacggtattaactatggatttgccggtttagtcgcaggcgacatccgtcgtttagatgttgctgacgttggcgataagattcaacgtggtggaacattcttgtactctgctcgttatcctgaatttgctactgaagaagggcaattaaaaggaatcgaacaattgaaaaaattcggtattgaaggcttagttgttattggtggagacggttcttatcatggcgcaatggctttgacaaaacgtggtttccccgctgttggaattcctggaacgattgataatgatattcctggaacagatttcacaatcggttttgatacagcgattaacactgttttggaatcaattgaccgaattcgtgatacagcgacttctcatgttcgtacattcgttatcgaagtaatgggacgtaacgctggtgatatcgcattgtggtcaggcgtggcaggcggagcagatgaaatcattattcctgaacatgattttgatatgaaaaacgttgccaaacgtattcaagaaggccgcgaccgcgggaaaaaacattgcttaatcattttagcagaaggcgtaatgggcggaaatgaatttgctgataaactttctgaatacggtgatttccatacgcgtgtatcaattttaggacacgtggttcgtgggggctcgccaagtgctcgtgaccgtgtattagcaagtaaatttgggtcatatgctgttgaacttctaaaagaaggcaaaggcggtttatgtatcggtatgttagataaccaagtagttgcagctgatattattgacacgttagaaaacaataaacacaaaccagatttatctctttatgagttaaatcatgaaatttctttttaa

SEQ ID NO: 6553 - DNA, 1551 bp, Enterococcus faecalis
  CDS (1)...(1551)
atgaaaaaaacgaaaatcgtatgtacgattggaccagctagtgaatccgttgatatgctagtaaacttaattaatgcaggtatgaatgtttgccgtttgaacttttcacatggtgactacgaagagcatggtgctcgtattaaaaacattcgtgaagctgtaaaaattacagggaaacgcgtagcgatcttactagatacaaaaggtcctgaaatccgcacaaatgacatggaaaatggcgcaatcacaatgaaaattggtgattcagtacgtatttctatgacagaagttttaggaacaaatgaaaaattctcaatcacttatccagaattaatcaatgatgtaaacgtaggttcacacattcttttagatgatggtttaatcgatttagaagtaactgatatcgaccgtgatgcaaacgaaatcgtaacagttgttaaaaacgaaggcgtcttgaaaaacaaaaaaggcgttaacgtaccaggcgtttctgtaaacttaccagggatcactgaaaaagatgctaacgatatccgtttcggaattggtcaaggaattgactttatcgcagctagcttcgttcgtcgtgcttctgacgttttagaaatcactaaaattttagaagaagaaaacgcaacacacatccaaatcattcctaaaatcgaaaaccaagaaggtatcgataatatcgatgaaatcttaaaagtttctgatggtttaatggttgctcgtggtgacatgggtgttgaaattccaacagaagatgttccagttgtccaaaaagctttaattaaaaaatgtaatgctttaggtaaaccagttatcactgcaacacaaatgttagattcaatgcaacgtaacccacgtccaacacgtgcggaagcaaatgacgtagcaaacgcaatctacgatggaacagatgcagtaatgttatcaggcgaaactgcagcaggggattacccattagaagctgttcaaacaatggctcgtattgcagttcgtacagaagaaacattagttaaccaagattcattcgcattgaaattatatagcaaaacagatatgactgaagcaatcggacaatctgttggtcatacagcacgtaacttgggtatccaaacaatcgttgcggcaacagaatcaggccatacagcacgtatgatctctaaataccgtccaaaagcacatatcgttgcaattacgttctcagaacaaaaagcacgtagcttatcattatcatggggtgtttacgcaacagttgctgacaaaccatcaagcacagatgaaatgtttaatttagcttcaaaagtatcacaagaagaaggttatgcttcagaaggtgatttaatcattatcactgctggtgttccagttggcgaaaaaggcacaacaaacttaatgaaaattcaaatgatcggttctaaattagttcaaggtcaaggtgtcggcgaagaagcaattattgcaaaagccgttgtggctggaactgctgaagaagcagttgctaaagcgactgaaggagctattttagttacaaaaacaacagattaa

SEQ ID NO: 6554 - DNA, 1347 bp, Enterococcus faecalis
  CDS (1)...(1347)
atgacgcaacagtatttaacagtaacagccttaacgaagtatttaaaacgtaaatttgatgcagacccttacttaggacgtgtctatttaacaggtgaaatttcgaactttcgcttccgagcgaacgcgcatcagtacttcagtttaaaagatgaccatgcgaagatttctgcaattatgtttaaatcagcctttcaaaaattgaagtttcaaccaaaagaaggcatgaaagtcatggtggtggggcggatttcgctttatgaaaacagcggctcctatcaaatttatattgaacatatggaaccagatggtgtaggtgcactttatcaagcattggcagaattaagagaaaaactaggaaaagaaggactttttgaagggcctaaacaacagttgcctcgttatcccaaacgaatcgctgtggttacaagtcctagtggtgctgttattcgggatatcattacgacagttaaaagacggtatccgattgcacaactggtcctttttccaaccttggtccaaggcgagcaggcggcggatgacattgtgcggaacattcagcgagccgatgcgcaaggcgattttgatacgatgatcatcggccgtggcggtggttcaatcgaggatttatggccatttaatgaagaaaaagtggctcgagccattcatgctgccaccacaccgattatttcatcggttggtcacgaaacagatgtgacaattgccgatatggtagcagatgttcgcgcagcaacgccaacggcagcagcggaactagcggtaccagttttaaatgaagaactattaagaattagtgaacggcgtagtcgtttagaacaaagctttttatatctcttacaacaacgaacagaacgtttccaacgactacaaaactcttatgtgtttaagcaacctgagcgactttatgaaggtcaaacgattaaattagatcgaatgacgcaacgtcttttccaagcaatgacaacaattcatcaccaaaaacaacgtcaagcccaaggaattatcgctcaattgcaacaacagacaccaaagggacaattaagagaaagtcagcaacaattggcatttttacaacgaaacttgcaaacacaaatgacacaattgttcctaaacaaacaaaagcaattcacgtctgctgttcaacaattagacttactcagcccactcaaaattatgggtcgaggatatagttatactacaaaagaggaccgtgtcgttaaaactgttaccgagttacagccagcagatcaattaacgattcattatgctgacggtacagttcaagcaaacgtcgaaacaataacagcgaaaaaagaggagttttaa

SEQ ID NO: 6555 - DNA, 693 bp, Enterococcus faecalis
  CDS (1)...(693)
atggacggttataaaaaagaagccaatcaattaatgttccaaaaagatcaaagctttttacaaaagtatggaaagttctaccttaacggtgcgggctataccattttcctagctttcattggtgttttgtttggtgccattttaggggcattacttgccttaatgaagttagccaattccaaaattttacgtggcattgccattgcttatattgaatatgttcgtggcactcctttgcttgttcaaatttttattgtctatttcgggacaggcgttcttggtttagacttatcaaaagtagcagctggttgtattgctctttctttaaacagtggtgcatatgtagcagaaattattcgtgctggtattcaggcagttaataaaggacaattggaagctgctcgttctttgggaatgaatcaaaaccaagcaatgcgatacatcattttcccacaagctattaaaaatattttaccagcgttaggcaatgaatttgttacagtaattaaagaatcttccgttgtttcagtcattggtgtttcagaactaattttccaagctggcaacgttcaaggagcaagttttaaacccttcttaccttacttaattgtatcgttgatttatttcgtcctaacctttactatctcgcgtctattaggtgttgctgaaaggagaatgagtactagtgattaa

SEQ ID NO: 6556 - DNA, 1146 bp, Enterococcus faecalis
  CDS (1)...(1146)
atgacggaaccagccattcgttatcgtttaatcaaaaaagataaacacacaggtgcgcgtttaggtgaattaattactcctcacggcacatttccaacaccaatgtttatgccggtaggtacacttgcgacagttaaaacaatgtcaccagaagaattaaaagaaatgggtgccggtgttattttaagtaatacttaccatttatggttacgcccaggtgaagatttagtcgaagaagcaggcggtttacacaaatttatgaactgggatcaacctattttaactgattcaggtggcttccaagtcttctcattaagtgatatgcggaaaatcgaagaagaaggtgtgcattttagaaatcatttaaatggttcaaaaatgttcctttctccagaaaaagcgatcaatattcaaaataaattaggatcagatattatgatgagctttgatgaatgtccaccatttgatgaaagctatgagtatgtcaaacgctcgattgaacggacttctcgttgggccgagcgcggcttaaaagcccatgcgaatcctgatagacagggattattcggtattgttcaaggtgcgggatttgaagatttacgtcgtcaaagtgccaaagatttagtgagtatggattttcctggctattcgattggtggcttatctgttggtgagtctaaggaagaaatgaaccgagtcttagactttacgacaccgttaattcctgaaaataaaccacgttacttaatgggtgtgggtgcccctgattcattaattgatggagtgattcgtgggattgacatgtttgattgtgtgctaccaacacgtattgcgcgcaatggtacttgtatgacttcacaaggtcgcttggttgttaaaaatgcccaatatgcaagagattttcgtccgcttgatgaaaaatgtgattgttatgtttgtcgtaattatacgcgggcctatattcgtcatttgattaaatgtgatgaaacattcggaatccgtttaacatcgtatcataatttatacttcttgttagacttaatgaaaaatgtccgtcaagcaattatggacgacatttatttagaattccgacaagcgttttttgaagaatatggctttaataaagcgaatgcaaaaagtttctaa

SEQ ID NO: 6557 - DNA, 2604 bp, Enterococcus faecalis
  CDS (1)...(2604)
atgaacatggttaaaacagtaaaaaaagaaaagacagaaacagttgatgtttcatcaatgattgatgaattagcaacaaaagcgaatgtcgctttaaaagcaatggaagattttacacaagaacaagtagatcacattgtccatcaaatggcgatggcggcgttagaccaacatatgcctttagcaaaaatggctgtcgaagaaactggccgtggaatctatgaagataaagcaatcaaaaatatgtatgcatctgaatacatttggaataatattaaacatgataaaacagtgggtgtaattaacaaagacgaacaaaccggcttaatggaaattgctgagccagttggcgtggtatgtggggtcacaccaacaacgaacccaacgtcaacaactatttttaaatcactaattgccttaaaaacaagaaatccaattgtttttgctttccatcctagcgcacaaaaatgttcggcagaagcggcacgtattgtacgggatgcggcgattgcagcaggtgcaccagaaaattgtattcaatggattgaacaaccatcgattgatgcaacatctgctttgatgaatcatccagggattgccattgttttagcaactggtggcgcaggcatggtaaaatctgcgtactcaacaggtaaaccagcactaggcgttggtcctgggaacgtaccagcttatattgaaaaaacggctaaagtaaaacgtgcggttaatgatttaattgtttcaaaatcatttgataatggaatgatttgtgcttctgagcaagcggtcattgtggataaagaaatttatgcttctgtcaaagctgagtttgaagcacataacgtttacttcgtgaaaccgaatgaattacaaaaactagaagatgcagtgatgaatgaaggcaaatacgcagtaaatccagcgattgtcggtaactctgcagaaaaaattgctgaattagcaggaattagcgtaccaaaaggcacaaaaattttagtcgctgaattagaaggtgcaggtccagaatatccattatcaagagaaaaattatcgccagttttagcaatgatgaaatcaaacaatgcagagcatgcttttgaactatgtgaagcgatgttaaacttaggtggtttaggacatacagcagtaattcatacagaagatgaagagttacaagttgcttttggtttacgtatgaaagcttgtcgtattttagtgaatactccatcagcagaaggcggtatcggtaacatttataacgaaatgattccatctttaacacttggttgtggttcatacgggaaaaactctgtttctaaaaacgtatcagccattaacttaattaatattaaaacggtagcgaaacggagaaataatatgcaatggtttaaattacctccaaaaattttctttgaaaaaaattctttacaatatctacaaaaaatggaaaatgttgaacgtgtcatgttagtttgtgacccaggtatggttcaatttggctatgcagatatcgtacgtaaagagctacaaaaacgtaaaaatgatgtgaaaatcgaagtattttctgatgttgaaccaaacccatcaacaaatactgtttatgcaggtaccaaaatgatggttgatttccaaccagatacagtgattgccttgggtggcggttctgcaatggacgcggcgaaaggcatgtggatgttctatgaacacccagatacagagttctttggtgcaaaacaaaaattcttagatatccgcaaacggacatataaaattgccaaaccagaaaaaacacaatttgtttgtataccaactacttcaggaactggttcagaagttacaccatttgccgttattactgatagtgaaacacacgtgaaatatccgttagcagactatgcgttaacaccagatgtagcgattgttgatccacagttcgtaatgtctgtgccagcttcagtcactgcagacacaggtatggatgttttaacacatgctattgaatcttatgtttccgtgatggcttcagattacacacgtggtttaagtttacaagcaatcaagttagttttcgatcatttagaaaattcagtgaaacgtccagatatggaatctcgcgaaaaaatgcataatgcatcaaccatggcagggatggcatttgccaatgcattcttaggtatttgtcactctattgctcataaaattggtggggaatatggcattccacatggtcgtacaaatgcgattttattaccacatattattcgttacaatgcgaaagatccatcaaaacacgcaatgttccctaaatatgattacttccgcgccgatactgattatgcagacattgcaaaattcttaggcttaaaaggaaatactaccgcagaattagtagaagctttagcaacagcagtagcagacttaggtaaatcagtcggaattgacatgaacttgaaagcccaaggtgtctcacaagaaacattagacacaacggttgatcgtatggcagaacttgcatatgaagaccaatgtacaactgcaaatccgaaagaaccattaattagtgaactaaaacaaattatcttagatgcttatgtaggataa

SEQ ID NO: 6558 - DNA, 1071 bp, Enterococcus faecalis
  CDS (1)...(1071)
atggtcaaaaggagtgtaaggagaagcatgaatcgaaaagatgaacatctatcattagctaaagcgttccacaaagaaaaaagtaatgactttgatcgtgtgcgttttgttcaccaatcgtttgctgaatccgctgttaacgaagtagatatttccacttcgtttctttcttttcagcttccccaacctttttatgtcaatgcaatgacaggtggtagtcagcgtgcaaaagaaattaatcagcaattaggcattattgccaaagaaactggccttttagttgcgacaggatctgtctcggcagcgttaaaagatgctagtttagcggatacgtatcaaattatgcgaaaagaaaacccagatggactcatttttgccaatattggtgcaggcttgggtgtggaagaagcaaagcgagcgcttgatttatttcaagcgaatgccttacaaatccatgtaaatgtgccccaagaattggtcatgcctgaaggagatcgtgatttcactaattggctaaccaagattgaagctatcgtacaggccgtagaagtgcctgtcattgtcaaagaggttggctttggcatgagccaagaaaccttagaaaaactcacctctatcggcgttcaagcagtggatgtgagcggccaaggcggaacgagttttacacaaattgaaaatgcccggcggaaaaaacgagaactttctttcttagatgattgggggcaatcaacggtcatctctcttctggaatcacaaaattggcaaaagaagctaactattcttggctctggcggtgtgcgtaactctcttgatattgtcaaaggactcgctttaggtgccaaaagcatgggagttgctgggactatcttagcttcccttatgagtaaaaatggtttagaaaataccttagcccttgtacagcaatggcaagaagaagtgaaaatgctttatactcttttaggaaaaaagacgacagaagaattgacgagtaccgcacttatcctcgatccagttttagttaattggtgtcataaccgtggtatcgacagcactgttttcgcaaaacgttaa

SEQ ID NO: 6559 - DNA, 1107 bp, Enterococcus faecalis
  CDS (1)...(1107)
atgattgaagttactacgccaggaaagttatttattgcaggagaatatgccgttgttgaacctggccaccctgccattatcgttgctgtggatcaattcgtaactgtaactgtcgaagaaacaacagatgaaggcagtattcaatctgcacaatacagctctttacctattcgttggacacgccgaaatggtgagctcgtattagatattcgcgaaaatccttttcattatgttctagcggcgattcatctaactgaaaaatatgcgcaagagcaaaacaaagaattgtcattttatcatttaaaagtgacgagtgaattagatagttcaaatggacgaaaatatggtcttggttcaagcggtgcagtaaccgttggaactgtcaaagccttgaatattttttatgacttaggtttggaaaatgaggaaattttcaaattatcagcattagctcacttagccgttcaaggaaatggttcttgcggagatatcgccgccagctgttacgggggctggattgccttttcaaccttcgatcatgattgggtcaatcaaaaagtaaccactgaaacattaactgatttgttagcaatggactggcctgaattaatgatttttccgttaaaagtaccgaaacaactacgtttactaattggttggacaggtagtcctgcgtccacttcagacttagttgatcgagttcatcaatcaaaagaagaaaaacaagcggcttatgagcagttcttaatgaaaagtcggctttgtgtcgaaacaatgattaatggctttaacacaggaaaaatttctgttattcaaaaacaaattactaaaaatcgccaattgctcgccgaattatcttcactgactggtgtggtaatcgaaacagaagccttgaaaaatctttgtgatttggctgaatcttatacaggagctgcgaaatcttctggcgctggcgggggcgattgtgggattgtaattttccgccaaaaatctgggattttaccattaatgactgcttgggaaaaagacggaattaccccactgccacttcacgtctatacctatggtcaaaaggagtgtaaggagaagcatgaatcgaaaagatga

SEQ ID NO: 6560 - DNA, 1026 bp, Enterococcus faecalis
  CDS (1)...(1026)
atggattcaatcattagaggtgaaaaagtaatgctttcaggaaaagcacgagcgcatacaaatattgctctgattaaatattggggaaaagccaatgaagaatacattttaccaatgaatagtagtttatcattaacattagatgccttttacacagaaacaactgtgacatttgatgcccattattcagaagatgtatttattttaaatggtatcttgcaaaacgaaaaacaaacaaaaaaagtcaaagaatttttgaaccttgttcgtcaacaagccgattgtacttggtttgcaaaagtggaaagtcaaaattttgtgcctactgcagctggtttggcttcttcagcgagtggtctagctgctttagcaggggcctgtaacgtagccttaggattaaatctttcagcaaaagacttatcacgtttagcgcgacgtggttcaggttctgcttgtcgtagtatttttggtggttttgctcaatggaacaaaggccactctgatgaaacgtcgtttgctgaaaatattccagctaataattgggaaaacgaattggccatgctctttatcttaattaatgatggcgaaaaagatgtttccagccgtgatggaatgaaacgaacagtagaaacttctagcttttatcaaggttggttggacaatgtggaaaaagatttatcccaagttcatgaagcaattaaaacaaaagacttccctcgtttaggagaaatcattgaagccaatgggttaaggatgcatggaaccaccttaggcgctgtccctccatttacttactggtccccaggcagcttacaagcgatggctttagttcgccaagcacgggccaaaggaattccttgctactttacaatggatgcaggtccgaatgtcaaggttttagtcgaaaagaaaaacttagaagcattaaaaacatttttaagtgaacatttttcaaaagagcagttagtcccagcttttgctggtcccggaattgaattgtttgaaacgaaaggaatggataaataa

SEQ ID NO: 6561 - DNA, 957 bp, Enterococcus faecalis
  CDS (1)...(957)
atggcagaagagaaaaaagtcctattagaagtcactggtttgaaacagtatttcaatgttggtcgtaaagacgaagtaaaagccattgatgacattagttttcatatttttgaaggcgaaacctttggattagttggcgaatcaggaagtggaaaatcaacaactggtcgcagtgtcattcgtttatatgatccaactgctggtgaaattcttttcgatggaaaagacattagcaaaattaaatcaaaagcggacatgcaagcattccgtcgcgatgttcaaatgatcttccaagatccatatgcttcattgaatccaagaatgaaagtcaatgatattattgctgaaggaatcgatgtcaatggattagctaaaacaccaaaagagcgggaagaaaaagtcaatgaacttttaaaaacggtgggattaaatccaagtcacagtacgcgttatcctcatgagttttctggtgggcaacgtcaacggatcgggattgctcgtgctttagcggttaatccacgtttcattatctgtgatgagccaatttcggctttggatgtgtcgattcaagcccaagtagtaaacttattacaagatttacaaaaagaacaaggcttaacttacttgtttatcgcacatgacttatcgatggtaaaacatatcagtgaccgaattggcgtaatgcacagtgggaaattattggaaatgggcacaagtgatgatgtctataatttcggcgttcatccttatacagaaagtttactttctgcgattccattaccagatccagactatgaacgcacacgtaaacggatcgtttaccagcctgcagcggcagatgggaaagatcgtgagctccgtgaaattctcaatggacactatgtttattgtgctgaagacgaagttgcaatgtaccgtgtaaaaattgaagagaagaaaagaaaagctggtttataa

SEQ ID NO: 6562 - DNA, 522 bp, Enterococcus faecalis
  CDS (1)...(522)
atgaccatagcaaaggatatgatggttaacgacggcattcgtgcacgcgagttacgtttgatcggacaagatggtgaacaattaggtgtaaaaaccaaagcagaagcattacaaatcgctgaatctgcaaacttggatttagtacttgtagcgccaggagcgaaaccaccagttgcgcgaattatggattatggaaaattccgtttcgaacaacaaaagaaagagcgtgaagctcgcaagaaacaaaaagtgatcaacgtcaaagaagttcgtttaagtccaacaattgacgtaaatgacttcaatacaaaacttcgtaatgcgcgtaagttcttagaaaaaggagacaaagtgaaagcttctatccgtttcaaaggccgtgccattacccataaagagattggtcagaaagttcttgatcgcttagctgaagaaactgcggacatcgccacagtggaacaaaaagcgaaaatggacggacgcagcatgtttctaacgctggcaccgaaaaacgacaagtaa

SEQ ID NO: 6563 - DNA, 201 bp, Enterococcus faecalis
  CDS (1)...(201)
atgccaaaacaaaaaacacaccggggattagcaaaacgtgtaaaacgtactggtggaagcggcttaaaacgtggccgtgcctttacatctcaccgtttccacggtaaaactaaaaaacaacgccgtcaattgcgtaaagcaagcatggttgcaaaaggcgattacaaacgtatccgccaacaattagcaagaatgaaataa

SEQ ID NO: 6564 - DNA, 354 bp, Enterococcus faecalis
  CDS (1)...(354)
gtgttaaaggtggaacagataacccgtaaacgtcgtaaaaaagtccttaagttagcgaaaggctactacggatcaaaacatactttatttaaatcagcaaaagaacaagtaatgaactcttattactatgcattcagagaccgtcgtcaaaagaaacgtgacttccgtaaattatggattgcacgtatcaacgcggcagctcgtatgaatggcttaagctattctaaattaatgcacggtttgaaattggcagagattgatatcaaccgcaaaatgttagctaacttagccgttaacgatgcagcagcatttacagcgttatctgaacaagcaaaagacgctttaagcaaataa

SEQ ID NO: 6565 - DNA, 1392 bp, Enterococcus faecalis
  CDS (1)...(1392)
atgtctattttcagaaaaaaagaaatcactgtgcctgtcaatgacagtggtgggatgaaaaaaaatcttaagacgatggacttaatttttctaggaattggggctgtagtaggaacagggatttttgttgtgacaggtgtcgcagcggaacgctatgcaggtccagggctcgtcttatcatttctggtagcagcagccgcgattattttatctggtttatgctatgcagaatttgcatcacgtattccggtcattggtgggccgtatgcctacatgtatgtggtctttggagaaattgtggcttggatgactggttggatgattatttgtgagtttttcttggcggtttcatccgttgcttcaggttggtcaggctatgtccatggctttttggatagcttaggtttttctttgccgcaagcgttaagtggcgcttataatccaacaaatggtacatatattgatttgattgccatgttggtcgttgtagccgtaactttttgggtatctttagaagcgaaaacagcgttacgtttaaataacttaatggttttcgtgaagtttgggattattttattatttgttctcgtgggaatcttttatgtgaaaccaacgaactggcaaccatttattccttatggtttttcaggcgttttcagtggtgctgctttagttttctttgcctttctagggtttgatgcggtcagcatggccgcggaggaagtgaagaatccgaaaaaagatattccaaaagggattattggttccattattatttcaacattgttatatattgttgttacgttagttttaactgggattgttccatttacggatttaggggtcaaggatccggtggcttttgcgatgcgcttcattaatcatggcgcaatcgcgacaatcatttcagttggtgctattttaaccttattaacagtgacgattgcgatgatgtacagtttagcccgtgtgatttatgcgattagtaaagatggattattgccgcagtttatgagcaaaatcgatgagaagcggcacacacctaagaatgcaacctatgtagctggatttttagcaatggtttttgctgggattgttccaatggagatgttggctgaacttacaaatatcgtgacactcttttatctgatgtttctcgctttaggaattatcaaattacggacaatgaaaggagaaccgcaagcaggtgaatttaaagtaccacttgtgccggttctaccattaatttcaatcgtggtttgcgcggctttgatgttccaattgtctttagctacttggcaagtatttggcatagccgtagtgattggtttggctatttatttcttttatggacgacaccatagtatcgttcgtttcgagacaaaagaataa

SEQ ID NO: 6566 - DNA, 2034 bp, Enterococcus faecalis
  CDS (1)...(2034)
atgactaaaggaggttttttctgtatgtcacagaaagaaacattttatattaccaccccaatttattacccaagtgggaagttacatattgggaattcatatacaacaatcgcctgcgatgcaatggcccgttacaagcgtttaatgggttttgatgtattttatttaacaggtgtggatgaacatggccaaaaaattgaaaaaaaagctgctgagttgaatgtgacaccaaaagagtacgttgataaaatggcagcagatgttcaaaaattatggaaaacattagatatcagctatgataaatttattcggacaacggatgattatcacatggcagccgtgcaacaaatttttgaccgtttagtagaacaaggagatatctaccttggagaatatgaaggttggtattcagtttctgatgaagaatttttcactgaaacacaattagctgaagtatatcgtgacgatgaaggcaatgtcattggtgggaaagcaccaagtggtcacgaagtcgaattagttaaagaagaatcctatttcttccgcatgagtaaatatgcggatcgcttggtacaatattacgaagaacatccagaatttattcaaccagaatctcgtaaaaatgagatgctaaataacttcatcaaaccaggattggaagatttagccgtttcaagaacgactttctcttggggaattccattaaaaaatgatccaaaacatgtggtttacgtatggattgatgcgttatcaaactatattacagcactaggttatggttcagaagatgattcattattccaaaaatattggcctgcgaacgtgcaaatggttgggaaagaaatcgtgcgtttccatacgatttattggccaattatgttaatggccttggatttaccattaccgaaaaaagtctttggacatggttggttattgatgaaagacggaaaaatgtctaaatctaaaggaaatgttgtttaccctgaaatgttagtagaacgctacggtctagatgcgttacgttactatttattacgagcaattccatttggtagtgatggcgtctttacaccagaagatttcgtttctcgcttaaattatgatttagctaatgacttaggaaacttgttgaatcgaacaattgcgatgattaataaatattgtgatggcaaagtaccagcctatgcttcaaaagttaccccatttgatagtgaactatcgacaactgcggcgaatgttattggaaaatatcatgaagcaatggaaaaaatggaatttaacacggccattgcagaaatctggacgctagtttctcgtgccaataaatatattgatgaaacagcgccttgggtattagctaaagaagaagagaaacgcaacgaattagaaagtgtcatgatccatttagcggaaagcttacgaattgtggcaatcttattgcaaccagtcatgacagaaacaccagggaaaattttcgaacaattaggcttagatccagaaacaatgaacatggaaaatattcattttggtgagttcccaacagacgtaacagtaacaagtaaaggaacacctattttcccacgtttagaaattgaaacagaagtaacgtatattcaaaagaaaatgtcccaaagcgaaagtgctacagaagaggatattaaatggaatccagaagaaacaacgttggtttcaacgaaagaaaaacaaattaagtacgatgatttcgataaagtggaattaaaagttgccgaagttattgactgtaaaaaagtcaaaggagcagataaattattgcaattccgtttagatgctggagatgaaaaccatcgtcaaattctttcaggtattgctgaattttatccagatccagctgcgctaattggcaaaaaagtagtcattgtggctaacttaaaaccaagaaaaatgcgtggtcaaattagccaaggaatgattctttcagctgaatcaccagaagggaaacttcaaattgttgaagcaccaaaagaaatgccaaatggtgcaggaattgcataa

SEQ ID NO: 6567 - DNA, 771 bp, Enterococcus faecalis
  CDS (1)...(771)
atgatttttgatacacatacacatttgaatgcagaacaatttaatgatgatattccagaaacgattgcacatgcccaagaattgggtgttacagagatggccgtggtcggttttgatgaaccaacgattgaaaaatctcttttacttagtcaggaatatgccaatatttatagtatcattggttggcatccaacagaagcgggtagctatacgccagaggttgaacgacgattacaagaacaattaacgttgccaaaaattgtcgcattaggtgaaatcggtcttgattattactggatggaggatcctaaagaggtgcaagaaaaagtctttcgccgtcaaattgcgattgctcgggaaatgaatttaccgtttagtgtgcatacgagagaggcattagaagatacctatcgaattttaaaagatgaaaaaatttcagatattggtggaatcatgcatagtttcagtggtgatgccgagtggatgaagaaatttttagatttaggtctgcatatttcttttagtggcgtcgtaacgtttaaaaaggcgttggatgttcaagaagcggcgatggcggtaccactcgaacgaatgttggtggaaacagatgcaccctatttagctcccgttccttatcgtggtaaacggaatgaaccaggctatacacgatacgtagtggaaaaaattgctgaattacgacaactaacctttgaagaagtggcagaacaaacgagagtcaacgctcatcgcttgtttcggatagataaatga

SEQ ID NO: 6568 - DNA, 585 bp, Enterococcus faecalis
  CDS (1)...(585)
atgaaggaaaaaatgaaagttgcagaaatcattgtcgttgaaggaaaagacgacacacgccgcattcaagaggtagttgcagcggatacgattgaaacgattggttctgctatcaatgatgaaattttgacacaaattgaacacgcacaagaaacgagaggcgtaattatttttacagatccagactattcgggcgaaaaaattcgtaaaacaataatggaagttgtccctgatgcaaagcatgcttttttatcaagaaaagtcgcagtgcctaaaaaaaatggcggtagcctaggggttgaacatgctagtgatgaagcaattattgaagccttaaaaaaagtcgtaacacctgttcaagctgatgaagactatcaagaaattcctagacaaacactagttgaatatggtttaatagcgggagcaaatgcaaaaaaataccgtgaattattaggagatgacctaagaattggctatacaaatagcaaacagttagtcaaacggttaagcatgtttcggattacagaagcagaattgaaagaaagcatgacacgtattttaaaagaacttgcaaacgaagaataa

SEQ ID NO: 6569 - DNA, 888 bp, Enterococcus faecalis
  CDS (1)...(888)
gtgacggactataaagaaattgccacaccatccagaaccaaagaaatactaaaaaagcatggattttcatttaaaaagagtttaggtcaaaattttttgacagagcctaatattttaagaaaaattgtagaaacagcgggaatcaatcagcagacaaatgttgtcgaagtcgggcctggaattggtgcattaacagagcaattagcgatgaacgcggcacaagttgtggcttttgagattgatgatcgcttgattcctgtcttagcagataccttaagtcgctatgataatgtaacagtggtgcatcaggatgttttaaaagctgatttggtcgagacaaccaaccaagtttttcaagagaagtatccgattaaagtggtggctaacctaccttactatattactacgccaattatgatgcattttttagaatcttctttagatgtagctgaaatggttgtgatgatgcaaaaagaggtcgctgatcgaattgctgctaaaccaggaacgaaagcttatggctcattatcaattgctgttcaatattttatggaagcaagtgtcgcctttattgtgccaaaaacggtttttgtgccgcagcccaatgttgactcggcgattattaaattgacgcgccgtgctacaccagcagtgacagtgaccaatgaaaaagaatttttcaaattaaccaaagccagtttccaattaagacgtaaaacattgtggaataacttaacgcatttttatgggaaagatgaacaaacggtggcttggctaaaagagagcctagctgaagcagaaattgatccttctagacgtggtgaaacattgtctttagaagaattcgctcgtttaagtaatgctttagaaaaaaataaaccagtataa

SEQ ID NO: 6570 - DNA, 933 bp, Enterococcus faecalis
  CDS (1)...(933)
atggatgaggaggatattaaaatgaaacaactgcaatttggtacaagtgacgaaacagtttcttcggttatcttaggatgtatgcgcttaaatggtgctgaaaatcctcaacaggtaattgaaactgcttatgatcatggcattacattttttgatcacgccgacatttatggtggcggcgactgcgaaaccatttttggtaaggctttaaaagaaagtaccattcgtcgtgaagatatttttatacaaacgaaatgtgggattcgtcaaggcttttttgacttttcaaaagcacatattttagaagcggtcgaagggagtttacagcgtttaggtgtagattcagtcgatgcattattgttgcatcgtccagatactttagtggaaccagaagaagtagctgaagcttttcatttattagaaaaacaaggaaaagttcgctattttggtgtaagtaaccaaacgccaggacaaattgaacttttaaaaacagctgttaaacaaccgttattagccaatcaattacaatttggcatcaagcatactggcatggtggatcaaggcttacaaacaaatatggaaatatcaggaagcattgattatgatcatggtattttagattattcacggttgaaacaaatgactattcaagcatggtcaccgtaccaatatggttattttgaaggtgtctttattggaaatgaaaaattccctgagttaaatcaaaaattaagcgaattggctgaaaaatatcaaacaacgccaactggtttagccagcagctggattctgcgccaccctgctaatatgcaagtcatcgcaggaagtatgaatcttggtagaattgaagaaattgctaaagcagcagacattgtgattagtcgcgaagattggtacgatatttatcgtgcagcgggaaatgttttgccgtaa

SEQ ID NO: 6571 - DNA, 2649 bp, Enterococcus faecalis
  CDS (1)...(2649)
atgaccaaaaaaaaattattactcgttgatggaaacagtgtagcctttcgtgcattttttgcgctacataactcattagaacgattcaaaaataagaacggcttgcatacaaatgctatttatgcgtttaacaatatgtttgaaaatgtaatgcaaaaagaaatgcctactcatgttttagtcgcttttgatgcagggaaaaccacattcagaacagaattttattcagaatataaagccggacgttcaaaaacacctggggaatttaaagaacaaatgccgtatattcgtgaacttttagaaggtttaggcgtaaaatattatgaactacctaactatgaagcagatgatattattggtacattagccaacaaagttgataaagatgaatttgatgttgtcgtgttatcaggggaccgagatttgacacaattagcgacggacactgtcaaagtagatatcactgttaaaggagttagcgatattgaatcatatacgcctgagcatattgctgaaaaatatgatgggttaacgcctaagcaaattattgatatgaaagggttggctggcgacacgtcggataacattccaggtgtaacgaaaatcggtgagaaaaccgcgattaagctgttaaaacaatatggctcagttgaaggggtttatgagaatatcgatgaaatgaaaaaaagcaaaatgaaagaaaacttgattaatgataaagagcaagcctttctttctaaacgtttagcgacaattgaagtcaatgcaccagtcgaagtcaatgtggaagacttggcatatgaagggaaaaacttagaaaaattggttcctttttataaagaaatggattttaaacaatttttagctaagttggacattacagaagaacctgttgaaatggaagatattttatttgaagtagtcgaagatcagttaaccaatgaaatgtttacagacgatatggctctttatgttgagatgatggaagataactatcatacgtcaccgattgtcggccttgcttggggcaacaacaagaagatgtataccacgaataatttagctgtttttgaaagtcagccatttatcgactggttgatggatgagacacgtaaaaaaaatgtctatgatgcaaaacggacgtacgttgcactaaatcgctatgtaggaaaaatgacagggattgcctttgatgttttattggctgcttatttacttgataccaatgacaataacgctgatattgaaggtgtagcacaacattacggatatgatgcgattcaatctgatgaagccatttatggaaaaggggccaaaaaaggcttgccagaggacgaagaagttttctttggtcatttagcacgtaagattaaagctattcaatttttaacaagcaaattagatagcgaattaacagaaaaaaatcaagctgatttattctataaaatggaattaccactttctcgtattttaggcgatatggaaataactggtatccgtgttgatgccacgcgcttaaaagaaatgcaagtagaattttcagaacgcttgaaagaaatcgaagaaaaaatctatgcagaagctggcgaagaatttaatttgaattcacctaaacaattaggcgttattttatttgaaaaaatgggcttacctgtgatcaaaaagacgaaaactggctattcaacagcggtagatgttttagaacaactaaaagaacaagcaccaattgtggccgatattttaacttatcgtcaaattgccaaaattcaatcgacctatgttgaaggacttttaaaagtaattcagccagataataaaattcatactcggtatgtacaaacactaacacaaacaggacgattaagctcagtagatcctaatttacaaaacattcctatccgtttagaagaaggccgaaaaattagagaagcgttcgtaccaagagaggataattggttgattttctcttctgattactctcaaattgagttacgtgtgctcgcgcatatttctaatgatgagcatttaaaagaagcgtttgtggaaggacaagatatccatgccagcactgcaatgcgagttttcggtgttgaaaaagcagaagatgtcacacctaacatgcgtcgtcaagctaaagcggtgaattttggaattgtctatggtatcagtgattacggcttgtcccaaaacttaggcattactagaaagcaagcgcaacaatatattgacacctattttgaaaaatatccaggcgtgaaacagtacatggaagagattgtccgcgatgccaaagacaaaggctatgtggaaacattgtatcatcgccgtcgttatttaagtgatattaattcaagaaactttaatctacgttcgttcgctgaacgtacagcgattaatacaccgattcagggaagtgccgcagatattttaaaaattgcgatgattgaaatggcgcgtcgtttaaaagaagaaaaattacaagcgacaatgttattacaagtgcacgacgaattagtttttgaagtaccagaatcagaattagaacaattaaatcaactcgtcaaagaagtgatggagcacgcagtttccttacatgtgccacttatcaccgatagcagttggggaaaaacgtggtatgaagcaaaataa

SEQ ID NO: 6572 - DNA, 1026 bp, Enterococcus faecalis
  CDS (1)...(1026)
gtgtatgatggattttgtaaatataaaactggagggtttatcgtggaattattcgatagcttaaaatttaaagtcgtacgccgtaatatcaaaattgttttccctgaagcaacagatcctagaatcttaggtgctgctgcccgcttaaaatctgatgaattagtagaaccaatcttaattggtgatccaacagatatcgcaaatgctgctatggctcgtggaatcaacacatcaaactttattattatcaacccaaatgattatgaaaaatgggatgaaatggtcgaagcatttgttgaacgccgtaatggaaaagctactaaagaagatgctgaaaaaatcttaaaagatgtcaactatttcggtactatgttaacttacatgggtattgctgatggtatggttagtggtgctatccactcaacaggtgatacagttcgtcctgcgttacaaatcattaaaacaaaaccaggcgtaagccgtacaagtggtgccttcttaatgattcgtggtcgtgaccaagaaagatatttattctcagactgcgcgattaacgtgaacccaactgcacaagaattagctgaaattgctgttgatagtgccaaaacagctgaattatttgacattgaaccaaaagtttcattgttaagtttttcaacaaaaggttctgcaaaagcaccagaagtaacaaaagttgctgaagctacaaaaattgcgcaagaattagcacctgaatatgcgattgatggtgaattacaatttgatgcttcttatgtatcttctgttgcacaattaaaagcgcccaactcaaaagttgctggagaagcaacagtctttgtattcccagatttacaatcaggaaatattggctacaaaattgctcaacgtttaggtaactttgaagcaattggcccaatcttacaaggattgaacaaaccagtttctgatttatcacgtggtgcaaacgaagaagatgtttataaattatcaatcattacagctgctcaaacattaatgaacgactaa

SEQ ID NO: 6573 - DNA, 1020 bp, Enterococcus faecalis
  CDS (1)...(1020)
gtggcaaaaatggcaattacagtaaaagatgtcgctaagaaagcgggggttgcaacctcaaccgtttcgcgtgtcattaacgatcatccaagtatttctgaatcgacaaaaaagaaagtgcgaaaagtcatggatgacttaggctatgtgccaaatatgacggcacggaatttgggtaaacgaatttcaagtgccattggcgtaattttacctcctttagattcgaaagaacggttagggaatccattttatttagaaattatggaagccatcaacgaggaagcccgtctttatgatatgactactgctattgcaactgccaaaagttttgatgtactattggaaaacgttaaaagaatgcatcttcaaaagcaagtggacggttttattcttgtgtattcagatagtaaggaccccgtcattgattacttatatgaaaacaacattccctttactttaattggtcaaccttatcaacatgaaacggaaatagtttacgtggataatgataatcaattattagggaaacaagcgacggaatttttaattgaaaacggccataaaaatattttatttgtgaccaatacaacgcatgaaagtttgtactttgaacgttactttggttatcaaaaagcaatgatgatgcaaggattaactgttttaccaagcgttgcgttagaaaaacctgaagattacatggctttcgatgatattcttcatcaaaataatgccacggcgttggtggtgattgatgatatctttgctttgcggacgatgcaacttgcgcaaatctatggttatcaagttcctgaaacgttatccattattagttttaacaactcaatcttttcaacattgacacatccttatctaacaagtattgacatcgacacgtcagaattaggtcgaatggcgatgaaaaaattatatgaattaatccacgaagaattgacgaatggtgtccgtctcgttattcctcacaaattaattaagcgtgaaacagttattcctattcattaa

SEQ ID NO: 6574 - DNA, 321 bp, Enterococcus faecalis
  CDS (1)...(321)
gtgctgtatagcatgtacgcaattatcaaaactggtggtaaacaagtgaaagttgaagtaggtcaagcaatctacgttgaaaaattaaacgttgaggctggcgagaaagttgtttttgacgaagttatcttagtaggtggcgaatctacaaaagttggtgcgccaactgttgcaggcgcaactgttgaaggaactgttgaaaaacacggcaaacaaaagaaagtcgtgactttccaatacaaacctaaaaaacactctcaccgtaaacaaggtcaccgtcaaccgtatacaaaagttatgatcgaagcaatcaacgcttaa

SEQ ID NO: 6575 - DNA, 123 bp, Enterococcus faecalis
  CDS (1)...(123)
atgttaacaactgtcaatcaggaacaaaaaaatattgcccaaattctattagaaaatcttttattaggtttacaatcaatagagaacgaaaatactgaatttattcaaataacaacaatcact

SEQ ID NO: 6576 - DNA, 1686 bp, Enterococcus faecalis
  CDS (1)...(1686)
atgaaagtaaacataaaaaataacgaaactggcgtttttgcaatcggtggtttaggcgaaattggaaaaaacacatatggggtacaattccaagatgaaattatcattattgatgctgggatcaaattcccagaagatgatttacttgggattgactacgtgattccagattatagctacatcgttcaaaatttgcataaagtcaaagcactcgttattacccacggtcatgaagaccatattggtggcgttccttatcttttacgtcaagcgaatatcccaatctatgcgggaccactagccttggctttaattaccaacaaactagatgaacatggtttattgcgagaagcggaattacacgaaattaatgaagatacggtgattcgttttagaaaaacagcgattagttttttccggacgactcacagtattcctgatgccttgggcgttgtggttaaaacgccttctggtaacattgtcgcaacaggtgactttaagtttgactttacacccgttggtgagccagccaacttacacagaatggcgaaattaggtgaagaaggcgtcctttgtcttctttcagacagtaccaatgctgaaatacccacctttacaaaatccgaaaaaacaattgggacctctattttaaaaatctttgaaaaaattgatggtcggattatctttgccagttttgcttcaaacattttccgtttacaacaagctgctgatgcagccgtgaaaacaggtcgcaaaattgctgtttttggtcgtagcatggaaaatgccattgtcaatggcgaacgcttaggctacatcaaagtgccaaaaggaacgtttgtcgatgcggcggaactgaatcaattgccagcaaatgaaacaatgattttatgtactggctctcaaggagaacctatggccgcgcttagtcggattgctaacggtacacatcgccaaattagtattcaaccaggcgatacggttgttttctcaagttcaccaattcctgggaatacgacaagcgttaaccgtttaatcaacttattatctgaagccggtgcagaagttatccacggaaaaatcaataatatccatacttctggtcacggtggacaagaagagcaaaaattaatgcttcgtttgatgaagcctaaatatttcatgcctgttcatggtgaatttagaatgttaaaaatccatgcttcgctcgctcaagatacaggggttcctgaagaaaattgctttatcatgggcaacggcgatgtcttagctttaacggctgatagcgcacgtcctgctggtcacttcaacgctaacgacgtgtacgttgatggaaatggtgtcggtgatatcgggaatgttgttttacgggatcgtcgtatcttatctgaagaaggtttagttttagcggtagcaacggttgatattaaaaataaagaaattatggctggtccagacattctttcccgtggttttgtctacatgcgtgagtctggtgatatgattcatgaaggccaacgtcttttattcaatgctctacgtgaagcaatgaaagataaaaactgtaccgaagcaaaattaggcgaagccatgacgaccgctttacagcctttcttgtttgaacaaacagaacgtcatccaatgattctgccaatgattatgactgccacagttagtgatcaataa

SEQ ID NO: 6577 - DNA, 1152 bp, Enterococcus faecalis
  CDS (1)...(1152)
atgatgaagaaaattaaagtaatgacggtttttggaacacggccagaagcaatcaaaatggcccctttaatcaaagttttagaagagcaaagtcaaggatttgactctgtagtagtcgtaacagcgcaacatcgccaaatgttggatcaagtgttagaagattttcaaattacaccgaatcatgatttaaatatcatgaaagatgggcaaaccttaacagatattacaagtcgtgttttgaatttattaactgaggttcttgtgacagaacagccggatattgtcttggttcatggcgatacaaccacgtcatttgcggctgcattggctgctttttatcaacagattccagtgggacatgtggaagcaggattgcggacctggcaaaaatattctccgtttccggaagaaatgaatcgtcaactggtagacgtgttaactgatatttattttgccccaaccactcaaagtaaggacaatttaatcaaagaaaatcatccagaagaacatatttatgtgactggcaatacagcaattgacgcgatggcgtacaccgttgatgcccactatcaaaatgatttattggaaaaaatccctacagaccaacgcatcgtgctaattacaatgcatcgtcgtgaaaatttaggcctgccaatggcaaatgtgtttaaagctgttcgtcgacttgtaatggaacatccagaaattgaagtcattttccctatgcacaaaaatcccaaagtccgtgaaatagtagcggaacacttaggtgaattagctcgtgtgcatttaattgaaccattggatgtcaaagattttcaaaattttgcagcgaaaagtgctttaattttaactgattctggcggtgtgcaagaagaagctccttccttaggtgtgccagttttagttttacgagatacaacggaacgtccagaaggcgtagcggcaggaacattgaaattggttggtacagacgaacaagtagtctatcaagaggcgaaaacattattgactgattctgatgcttaccacgcgatggcgcatgcacaaaatccgtatggggatggtcaagctagccgccgaatcgttgaagccattgcctatgaaatgcagaaatcagataaaaaaccagatacgtttacagcaaaataa

SEQ ID NO: 6578 - DNA, 2643 bp, Enterococcus faecalis
  CDS (1)...(2643)
atgtcagaagaaaaaaacttaccaacgaaatatcaaccgacagaaatcgaagctggccgttatcaaaaatggctagatcaagatttatttaaaccaagtggcgacaaaaaagcgaagccctattcaattgttattccaccacctaatgtaacagggaagctacacttagggcatgcttgggatacaacattacaagatatgattatccgccaaaaaagaatgcaaggctttgatacgttatggctgccaggaatggaccatgctggaattgccacgcaagcaaaagtagaagagaaactagcacaacaaggaatttcacgttacgacttaggtcgtgaaaaatttgttgatcaagtgtgggaatggaaagaagaatatgcttctcacattcgtgaacagtgggcaaaaatgggtctttctttagattacagccgtgaacgttttactttagatgaagggctatctgaggccgttcgtaaagtgtttgtctctctttacgagaaagatttgatttaccgtggtgaatatatcattaactgggatccaaaagcgaaaacagcattgtctgatattgaagtaatccataaagatattgaaggagctttttaccacatgagctacccattatcagatggttctggtgttgttgaaattgcgacaacgcgtcctgaaacaatgttgggagatacggcgattgcggtccatccagaagatgaacggtatcaggaacttattggtaagacagttgtcttgccattagtagataaagaaattccaattattgcagatgactatgtagatatggaatttggaacaggggttgtaaaaatcacacctgcccatgatccaaatgactttgaagtcggtaatcgtcatgacttacctcgagtaaatgttatgaacgaagacggcacgatgaatgaactggctggaaaatacgaaggaatggatcgttttgctgcacgtaaagcgattgtctctgacttgaaagaactaggtcgcttaattaagatcgaaacaatgaatcacagcgtgggccattcagaacgaacaggcgttgtcgtggaaccacgtttatcgacccaatggtttgtaaaaatgggaccattagctgaaaaagcaatgaaaaatcaagaaacagaagacgctgttgaattttatccaccacgcttcaatcaaacatttttacgttggatggaaaatgtacatgactgggttatttcgcgacaattatggtggggccaccaaattcctgcttggtatcacaaagaaacgggcgagatgtatgttgggatggaagcgccagccgacagtgaaaattgggttcaagatagtgacgtcttagatacatggtttagttctgctttatggccattttcaacgatgggttggccagatgaagcaagcgaagattatcaacgttacttcccaacaagcacattagttactggctatgacatcatcttcttctgggtaagtcgtatgattttccaaagcttagagtttacaggtgaacgtcccttccaaaatgtcttaattcacggcttaattcgtgatgagcaaggacgcaaaatgagtaaatcattggggaatgggattgatccaatggatgtcatcgaaaaatatggcgcagatgcgttacgttggttcttatcaaatggttcagctccaggtcaagatgttcgttttagttatgaaaaaatggatgcttcttggaactttatcaataagatctggaatgcaagtcgcttcgttatcatgaatgtagaaggtatgactgctgcagatattgactttagtggtgaaaagactgtcgctgatcgttggattttaacgcgcttaaacgaaacagtcgcccgtgtgacagaattatttgatcgttttgaatttggtgaagcaggtcgccaattatacaacttcatctgggatgatttctgtgattggtatattgaaatgagtaaagaaattctttacggagacaatgaagcagctaaacaaacaacgcggagcatcttggtgtacacattggatcaaatcttacgcttattgcatccaattatgccgtttgtaacagaagaaatttgggaaaaaattccgcatcaaggtgagtcattggttgtggcagagtacccagttgttcatgaagaatttaacgatgaagcagcagctcgaggaatggaagttctgaaagaagttattcgttcggttcggaatattcgagcagaagtgaatacaccactttctaaaccaattactttgttaattaaaacaaacgatacagaagtagaagaatttttaacagctaatactagctacttggaacgcttctgtaacccagaggaattagtcatcagtcgtgaaatagaagcgccagaattagccatgtccgctgtattaacaggcgcagaactattcctaccattagctgggttgattaatatcgaggaagaaattgctcgcttagaaaaagaattagacaaatggacaaaagaagtcaaacgtgtgcaaggcaaactttcaaatgaacgttttgtgtcaaatgcaccagatgaggtcgtggaagcagaacgtgcaaaagaaaaggactaccttgaaaaacaagaggctgtcaaagaacggattgcccaattacgttcaatctaa

SEQ ID NO: 6579 - DNA, 1104 bp, Enterococcus faecalis
  CDS (1)...(1104)
atgaccgatcggatttcaagacgcatgatttcattatatgcgtcccttagcacctttattgttatcttaattacattgttttcatattttcattcgattaaacaaaaccggtggttattagagcttcttcagagaaaagtcttttatttaccactaattgtgcacattgttctcatatccttactaataggcttattgacctttttactgatttcattggttcaaaaagggcaatatggacggattgaagaaaaacttcggttattggccaacggtaattatgaaagtccagtcttaaacaaaccaacgaccagtgaaaatcaagaccattatctaaccgaagtcgaacaagatatttggtcgattaaaaataaattattagagatgtctaaagaattgcaattattaaacagtcgaccgcaattaatggatgggcaaacaaaagaagaaattttagagaacgagcggcatcgtttggcgcgggagttgcatgattcagtcagtcaacaactttttgcagccatgatgatgttgtctgcattaaatgaacaagcacaacgaacagaaaccccggaaccatatcgtaaacaactagccatggtggcagaaatcattaatgcctcccaatcggaaatgcgcgcgctactattgcacttgcgtcctatcagtctagaaggaaaaagtttgcgtaaaggtattgaacaattactgaaagaactacaaacaaaaattaaaattgaattgatttgggatgttgaagatgttcatttaaatagcagcattgaggatcatcttttccgaattgtgcaggagttactttcaaataccttaagacatgccaaagcaaaggaattagaggtatacttacaccaagtcgataaaaacgtgttattgcgtattgttgatgatggtgtcggctttgatatgaaggaacaaagtaataaagccggtagttatggcttaaataatattcgagaacgtgttgtcggcatgggcggtacagttaaaattattagttttaaagggcagggaaccagcgttgaaattaaagttcctgtcataaaggaggaaactgcaagtgatcaaagtaatgttagtggatga

SEQ ID NO: 6580 - DNA, 921 bp, Enterococcus faecalis
  CDS (1)...(921)
atgaaacgaaaaagtacgtactatacagcatgtacggcacggtatatgatgatatcagaaaacgttaaaggagcgaatcaaatgattacatcactagcagatacagtaacattaaacaacggcactaaaattccaggaatgggtctcggggtattccaaataccagatgaagagacagcaaaagtggtcgaagaagggattatcaatgattatcgtttaatcgatacagcgcaaatctatggcaatgaatctggcacaggagcgggaattaaagcaggcttagcggcaactggtttgaaccgtgaggacttatttgttacttcgaaagtttggaacgcacatatttcctatgatgaaacaattcaagctttcaatgatagtttggaacgtttaggtttagattatttagatttgtatttaattcattggccaggaaataattcttacaaagaatcatggcaagctttagaaactttatacgccgaaggaaaagtgaaagcaattggtgtcagcaacttccaagttcatcatttagaagatttactttcttatgcaaaagttgttccggtaattaaccaagtggaactacatccaaaattggatcaaaaagaagtgcgtgatttctgtgaaaaacatgatatcaaagtccaagcttggtcaccattgatgcaaggccaattattatctaatgaaaccattttggcgattgctgagaaccataataaatcagcagcccaagtgattttacgttgggatattcaacaagatatcttattagccgtgaaatctgtccacaaagaacggatgattagcaatgcagcggtctttgattttgaactaagtgcagaagaaatggcacaaatcaaccaattgaatgaatcgttacgtgtgggaccagatccagacacgtttgatttctaa

SEQ ID NO: 6581 - DNA, 1272 bp, Enterococcus faecalis
  CDS (1)...(1272)
atggagggtgataacatgaatatcattgacgagctagcatggcgtgatgcaatcaatcaacaaacaaacgaagaaggactaagagaacttacagaaaatacgagcatttcgctatattgcggtgtcgatccaactggagatagcatgcatattggacatttaattccttttatgatgatgaaacgattccaattagcaggtcatcacccatacattttaattggtggcggaactggaacaattggtgacccaagtggacgaacaactgaacgtgttttacaaacgatggaagctgtgcaacataatgtggacagtctttcaaaccaaatgaaaaaattatttggtaaagatgctgaggtaacaatggtgaacaactacgattggttatcagaactatctttattagattttttaagagattacgggaaaaactttaatgtcaacacgatgttggcaaaagacattgtcgctagtcgtttagaaagtggcatttcctttacagaattcacataccaaattcttcaatcaattgacttttacacattgcataaaaaacataatattcaattgcaaattggtggcgctgatcaatggggcaatatcactgcaggattagatttgattcgtaaaaaagaaggaccagaagccaaagtattcgggttaaccattcctttaatgctaaaagcagatggtacaaaatttgggaaaacagcgggtggcgctatctggttagatcctaagaaaacctcaccatttgaattctaccaattctggttaaaccaagatgatcgtgatgtcatcaaatacttgaaattctttactttcttagataaagaagaaatcgatgcgttagctgaaaaagttgaaaaagaaccaggtaaacgtgaagcacaaagacgcttagctgaagaagtgacacgatttgttcacgatgatgcagcattagaagaagcgcaaaaaatttcagaagctcttttctcaggcaatattaaagacttaacgattgaggaaatcgagcaagggttagaacatgtgccaactgttgaaattaccaaagatgctaaaaacatcgtagattggttagttgacacagaaatcgaaccatcaaaacgtcaagctcgcgaagatgtgagcggaggagctataagtattaacggtgaccgagttaccgatttagattttgcagtcgatccaacacaacatttcgatgggaaattcgttgttgtacggaaagggaagaaaaattactttttagcaaaagtaatggattag

SEQ ID NO: 6582 - DNA, 1521 bp, Enterococcus faecalis
  CDS (1)...(1521)
gtgacgatttcattattcgcaattcgcgattgcttagaaaaagaagatttattaaaagaatttatttcaccagaaggctggcacttgactctttccgacacgttaggtcaacgagaagtaacggctctttcttacgattcgagagacgtaacagcagaaacactctttttttgtaaaggattaaactttaaagaaatctatttagaaaatgctgtaaaagacggcctagaaatctatgtttctgaggtgccttatgaggttccagcacaactaggaattatcgtgactgacattaaaaaagcaatggctgtgttaagcatggctttttatgattatccacaaaataaattaaaactgattggctttactggaaccaaaggtaaaacaacagcggcttatttcaccaaatatattttagatgttgctacacaacaaaaaacagccttgctttctaccatgaattcgacattagatggcaaaacattctttaaatctgcattgactacacccgaatctttggacttgtatcgaatgatggcaaccgctgttgctaacgggatgactcattttattatggaagtttcttcccaagcctacaaaactaatcgtgtctacaagttattttttgatgtcggcatttttttaaacattacccccgaccatatcagtccaattgaacatccaacctttgacgattacttttattgcaaacgtcaattgattacacattctaaagtcattgtgttgaatcacgaagctgattattttccattacttaaagaaaccgcacaacagcaaaaagtccctgccattgtctatggcagtcagccagctccagaagttgactattcattcgctgtttcttcagaggattccttacgttttatcgttgaaagtcctgcagatgcgttaggattggccggctcttatcaccttcgtttaggtggtgattttaacaaaggtaatgcgttaagtgcggcgattgctagtgtccttgtgggagcttcaaaagaagagtgtcaacaagggatcgcagcaaccaccgtccctggccggatggaatctttaacgaataccaacggtgcaaccgtctatgttgattacgctcataactatgacagtttgaagaatcttttaacctttgtccgtgaagaacatcctgacggccgcttaattgttcttgttggtagcacgggagacaaagcgatttctcgccgcaaagactttggtacggttctttctgaattggctgatgttgcagtcctaacaaccgatgacccagccagtgaagatccagcaaaaatttgccaagaaattcaagcccatattaccaaagaaatgcctgtttacaccgttttagatcgtggcgaagcaattgctcacgcattatctttaagcacaacggctgatgatgcgattgtcttagctggtaaaggcgccgacctttatcaaaaagtaaacggcgtagatgaaccttacgcaggagactttgcccttgcgaaaatgattattgacaaataa

SEQ ID NO: 6583 - DNA, 1650 bp, Enterococcus faecalis
  CDS (1)...(1650)
atgatcaatcaaccaaattcagttgatcaaccaatcctgacgaaccaagaaaaaatggtcaaaggctcagcttggatgacagctagtaatattatctcccgcatgttaggggcgatttacatcatcccctggtacgcttggatgggcgagcacggaaacgaagcgaacagtttgttttcaatggggtatacgatttatgccttattcctaatgatctctaccgccggaattccaggtgcgattgccaagcagacctcgcattataattcattgaacgaatataaaattagtcgacagcttttttatcgtgccttacaactaatgggtggcttaggtgtggtttttgctattgtgatgtatttggcatctccggcattagcagctttgtctggcggaggacctgaattagttccaacgatgcgttcattaagtttagccgttttagttttcccaagcatgagtgtcattcgcggttatttccaaggaaatcaagaaatgatgccctttgctttatcacaaattgttgaacaagtagcacgagttttttacatgttattaactgcttttattatcatgaaagtctttgaaggtaattacgttacagcggtgacccaagccacttttgcggcatttattgggatgctcgcaagttttgcggttttaggttattacatgtacaaacaaaaaccattatttgattatttagaagaacacagcgccaatgaacatgaaattgctccaaaagagttattgattgaaacttttaaagaggcgattccttttatcgtagttggctcaggggtaactgtctttaaacttgtcgatcagtttactttctcaaactttatgcgtttgtttacggattattcagatacccaattacgagagcttttcggtatttttaatgccaatccggacaaattaaccatgattgtcgtggctttagcgacttcgatttcggctactggattaccgttaattacagaagcggtcaccttaaaaaatcatcgtgagttagcgcgtttgattagtaataatttacaactttttgtgtttgtaatgttgccagcaacgttcggtatgattgttttagcgcaaccactatacactgttttttacatgccagatgctttaggcacttctttattagtgcaagcttgttacgctagtttattcttgggcttgtatatgttagtgtcaaatatgttgatggggatgtatgaaaatcgtgacgcaatgcgttatttaggaattggtttagctgtgaaattaatcgtgcaattccccgcaatccgtttatttgaagtttacggtccgttattagcaacgatgattggctttacggtttcttgcgtattgattctaagaagaattcgtcaagtgacacgttttaattacaaattaaccttacggcgaacattgttaatgttctgtattacagtcatcatgatgattatcgctttgattttccgtcagttcttgtatctatttttagatccaactagacgtttccaagctttcattatcgttgtaattgtggctgctgcaggaggcgctttttatggctattcggtcttgaagattcgcttagctgatcgtttattagggaaaaatgccgcaaaattacgtgcaaaattcaatattaaataa

SEQ ID NO: 6584 - DNA, 774 bp, Enterococcus faecalis
  CDS (1)...(774)
atgtcccaagctatttttttaaaggaaagaggaatgacgatgcgtttagataaatttttagccgatgttggtatcggtagtcgtaaagaaatcaaacaattgttaaagaaaaaagtcgttacggtgaatggtgacgtcgtaaaagaagccaaaacacaagtaaacgaagaaacagatcaaattgccttgatgggagaaattcttacgtatcagaaattcttttattacatgttgcataaaccacaaggtgtcatttctgcgacggaagatcagcgagatgaaacggtaattgacttgttaactgatcaggattaccgtgccgacttgttcccagttggtcgcttggataaagataccgaaggcttgcttctattaacaaatgatggccagttagcgcatcaattattatcacccaaaaagcatgtggataaagaatatttagctgaagttgagggacttgtgacagtggaagattgtcaactgtttgcgcaaggatttgccttgaaagatggagaaatggttaaaccaagtcgtttagtcattgagacgatcaatgaggaagaagggacttccgtagtccgtttagtgattcaagagggaaaattccatcaagtcaaacggatgttagccactgtaggcaaacctgtgacgtatttaaaacgattacgaatgggcgaactatggttggatgaaacgttagaactaggggaatatcggcccttaacagaagccgaattgcaacaactacaacctaaacaatcatacctcaattaa

SEQ ID NO: 6585 - DNA, 1416 bp, Enterococcus faecalis
  CDS (1)...(1416)
atgacaattgattggacaaaagaagtcgaagcacgtaaagacgacttattagaagatttacaaaacttattacggatcaacagtgaacgtgatgatgcacaagcaacacctgaagcgccctttggacctgggccagttgctggcttaaaacacatgttagcgtatggtgaacgtgatggctttacggtgaaaaatgtcgacaattacgctggacacattgaatatggtgaaggcgacgaaacgttagggatttttggtcatatggacgttgttcctgcgggtgatggttgggaaacagatccttatgaaccagtcattaaagatggcaaaatttatgcacgtggtgcaagcgatgataaaggcccaagtatggctgcttattacgcaatgaaaattatcaaagaattaggcttacccgtgtctaaaaaaatccgtttcgtagtaggaagtgacgaagaaagcggctggggcgatatggattactatttccaacatgaagaagcgccagactttggtttctcaccagatgctgagttcccaattatcaatggggaaaaaggaaatgtgacgattcgtttaactttccgaggcggtaacggtgctgattataaattagaaagcttcaaatctggtttacgtgaaaacatggttccgggaacagcagatgctgttgtaacggctgcttcagcagacgaagcggcttcactagctgctagctttgaaacattcatcaaacaagaagcaaaaatttcaggtaacgcagaactttcagataaaacagtgactttccatgtagttggtaaaggtgctcacggtgctagcccacaatctggaattaacgcagcgactttcttggcaactttcttaaatgattacagctttgcagaaggcgcatacagctttattaataccattgctgaatttatccatgaagatttttatggcgaaaaattaggtgtggcttttgaagacgaaaaaatgggtaaattgacaatgaacgctgggattgttaactttgatccagaaaatcctgaaaatagcttagtaacattaaacttccgctatccaaaaggaacttcagcagaagaattacaagcaaaagttcaagcaacagtcggtgaaacggtcactgcaacacaaggagatcgcaaccaagaaccgcattatgtaccagttgatgatccattggtggcaacgttactacaagtttacgaagaccatacaggcgaaaaaggccaagaacaaatcattggtggcggtacttatggccgcttattaaaacgtggtgttgcctatggcgcaatgttccctggctacacagacacaatgcaccaagccaacgaatttatggaattagatgacttattccgagcagctgctatttatgcagatgcgatttatcgtttagcgaagtaa

SEQ ID NO: 6586 - DNA, 1173 bp, Enterococcus faecalis
  CDS (1)...(1173)
atgagtcgtgtagatcgttataaacatattcatgaaaaatcgagaccagcagagcataaaaagacctttaatccccgaaaatcaatgggtgaacatagagaagaagaaccagaagaactagctgaaagccttcaagagccagtttacgaagacagctatactgaggacagtcgcagaagtgaaaggcgacatcaaacagattcaggtggtggcaacggttctgaccaaccaccccgcggaaaaaaagacaagaaaccaaaaaagaaacgtaaaaaatcaaaaacaaaacgctttttcaaatggctagtgatcctattgattctgttatttgcctatagtacagtcatgtttttaaaaggaaaatctgcagcagaacatgatgactcgttgcctcaagaaaaagtagaaacatttaatggtgtcaaaagtagcaatggggctaagaatattttaattcttggcagcgatacacgtggggaagatgctggacgagccgacacaataatggttctccaactaaatggaccatcaaaaaaaccgaaattaatttcatttatgcgtgatacattcgtggacattcctggtgtcgggccgaataaaattaatgccgcatacgcttatggcggtgctgaattggttcgtgaaacgttaaaacaaaactttaatttagatacgaaatattatgctaaggtagatttccaatcatttgaaaaaattgttgactctatgtttccaaaaggtgtcaaaatcgatgcagaaaaatcactgaatttagatggcgttgatattgaaaaagggcaacaggtcatggatggacatgtcttacttcaatacgctcgctttaggatggatgaagaaggcgactttggtcgggttcgtcgccagcaacaagttatgtcagctgtaatgagccaaatgaaaaacccaatgactttattaagaaccccagaatcacttgggaaattagtcggctatatgtcgacagatgtgcctgttagtttcatgttaacgaatggaccatcattgttgattaaaggaaaagcaggggttgagtcattatcggttccggtaccagattcttggaattttggtgaatcctcttatgcaggcagtattttagaagtagatgaacaaaaaaatgctgacgccatcgaaaaattcctgaacgaataa

SEQ ID NO: 6587 - DNA, 1167 bp, Enterococcus faecalis
  CDS (1)...(1167)
atgcgctttattacagcaggcgaatcacatggacctgaattaactgctattattgaaggcttaccagccggcttgcctttaagtagcgaagagattaaccgagaattagcaagacgtcaaggcggttacggtcgtgggggacggatgaaaattgaaaaagaccaagtacgtattacttcgggcattcggcatggtaaaacacttggctcaccagtaacgttgattgtcgaaaacaaagactggaaaaattggacctccgtgatgtcagtagagccagttcctgaaaaacaaaagaaaatccgccgcgtcagcaaaccacgtccaggacatgctgatttagtcggtggcatgaaatatcaacatgatgatttacggaatgttttagaacggtcttcggcacgagaaacaacgatgcgtgtggcgattggtgcggttgctaaaaaactcttagctgaactggatatccaagtcgctgggcatgtcgcggtattaggcgggattgaagctacgattcctgaaaatttaacgattcgtgaaattcaagaacgatctgaacaatctgccgttcgcgtattagatccttccgtagaagaaaaaatgaaagaactaattgaccaaaccaagaaaaatggcgatacaattggtggggtagtagaagtacttgtgggtggcgttccagctggcttaggtagctatgttcaatgggatcgtaaactagatgccaaaattgcgcaagctgttgtaagcatcaatgcttttaaaggtgctgagtttggcattggatttgaaatggcgcaacgccctggtagtcaagtgatggacgagattgtttgggacgaaagtactggttataccagaacttccaacaatttaggcggttttgaaggaggaatgaccaacggaatgccaatcatcgttcgtggtgtcatgaaacctattccaaccctttataaaccattacaaagcgtgaatattgatacaaaagagccttataaggccagcgttgagcgctctgatagcacggcggtaccggccgctagcgttgtttgtgaagccgttgttgcaacggaagtagcgaaggctatgctcgaaaaatttgatagtgactcatttgaacaaatgaaagaagcagtgcaacgttatcgtctatatactcaaaacttttaa

SEQ ID NO: 6588 - DNA, 867 bp, Enterococcus faecalis
  CDS (1)...(867)
atgaaagaaataactggagccactcgtttagctgggttattcgcgaaacctagccaacacagtatttcaccgttgattcataatacagcatttcaaaatttaggagttgatgctcggtatctggcgtttgacgttggacaagagacattgccacaagcaattgaagcgattcgaacgtttcacatgttaggggccaacttatcaatgcccaataaagtggcggctgtaagttatatggatgaactaagtcctaccgcccaactggttggcgcgattaatacgattgtcaacaaagatggaaaactttacggagacagcacggatggtactggttttatgtggagtttgaaagagaaaaaggttgacgtttttcagaataaaatgaccatcttaggaacaggtggtgcagccttatcaatcattgcccaagctgctttagatggcgtgaaagaaatcgctgtttacaacaggaaaagcgcggggtttaacgacagtcaaaaaaaactggcaaatttcactgaacgaaccaactgtgtaattcatttaaacgatttagcggatactgaaaaactagcaaaagatgttgctgaaagcgtcttgttagttaatgcaacgagtgtgggtatgcatccacatgcgcatagtagtcctatagaaaattatgcaatgattcagccgaagttattcgtgtatgatgctatttataatcccagagaaacacagttattaaaagaagcccgtttacgtggcgcagaaacaagcaacggcttggacatgctactttatcaaggagctgctgcttttgaacaatggacaggacaaaaaatgcctgtatcagtcgtgaaacgtaaaattgaaaatagataa

SEQ ID NO: 6589 - DNA, 1221 bp, Enterococcus faecalis
  CDS (1)...(1221)
atgaaattgacaactattccaaacgaatttaaagaagccgctcccgttattcgcgaaatcaatgcacagggctttgaagcgtattttgtcgggggcagcgtccgtgatgctttattaaataaaccaatccatgatgtcgatattgcgacaagtgcctatccagaagaaattaagcaaatttttaaacgaaccgttgatgtgggtatcgaacatggtacagtccttgtattgatggaagaccaacagtatgaagtaacaacctttcgtaccgagtcaacttatcaagactttcgtcgaccagatgaagtcacttttgttcgctccttgaaagaagacttaaaacggcgagattttacgattaatgccttggcacttgacagcacaggcgaaatcattgatttatttgatggtatcgaagatttaactaatcaaaccattcgtgcagtcggcaatccccatgagcggtttcatgaagatgctctgcgaatgatgcggggcttacgctttgctagccaattagattttaaaattgaagaaaaaaccttagccgctatcgctgaatttcatcctttattggaaaaaatttcagtagaacgcattacgattgaatttgtaaaaatgcttttaggggttaatcgacaaggtggcttagctccgtttattgaaacagaatgctatcaatactgtcccaaattacgagaacaaggggctggactttttcgtttaatggacttgcctgctcgtcaaattgaaacagaagcagaagcgtggacgttacttatccaatcattgaatttaccagaagcagaaattcgctccttcttaaaggcttggaaactttcaaatcaattaattcaaaacgtttcacaattagtacgcggtttgcgttttcgcttgagtaacgactggcagccaatgatgctttatgaattaggcgaagaatcagcagtacttgttgaaaggcttttatattattaccaacaagagagtcaagtacaagtaacaaaagagttagttaaggcattacccatccatcaaagacatgaattggccataacaggaaaagaccttttagccgtcttagaagaaacaccaggcaaatggttaggggaactgattgctgaaatcgagcaacacgttgttaaaggtaacttagagaataaacaagaagttctgctttcgtttgccaaaaaacaacgttcaaaaggagagaaagcataa

SEQ ID NO: 6590 - DNA, 792 bp, Enterococcus faecalis
  CDS (1)...(792)
atgggaaaacacatgattaaaataattgtcgctgggtttaaaggacggatgggcagtactgctacacaaatggtcttagaaaccgcagactttgaattagtaggtgtgtatgatcctcatgaagcacaagaaactgtttctttcaatgatgaaacagcaattcccgtttttcagcgcttagaagaagtcctagctgtcaaaccagatgtttggattgattttacggttcctgaagccgcctatccaaatacacgttttgcgttggaacatggtatggcgccagttgttgggacgacaggctttacggaggaacaaatcaacgaattgacaaacctatctcgagaaaaagccatcggcggcttgattgcgccaaattttgcaattggggcagttttaatgatgcaatttgcccaaaaagcggcacagtattttccggatgtggaaatcattgaattacatcatgataacaaattggatgcaccgagcggaacggctataaaaactgcagaaatgattcaagaagttcggccagcaaaaaaacaagggaatccgcaagaggtagaatcaataccaggggcacgcggggctgatttcgagggtctgcgaatccatagtgtccgcttacctggtttagtggcacaccaacaagtccaatttggcagtgtaggtgaagggctcactattcggcatgattcttatgatcggcgttcattcatgacaggagtggcgttagcttgtcggcaagtggtacagagaacagaactactttacggattggaacagatgctatga

SEQ ID NO: 6591 - DNA, 276 bp, Enterococcus faecalis
  CDS (1)...(276)
atggcaaataaagcagaattaatcgaaaacgttgcatcttcaactggtttaactaaaaaagatgctactgcagcagtagacgctgtcttttcaacaattcaagaaactcttgctaaaggtgaaaaagttcaattaatcggttttggtaactttgaagttcgcgaacgcgcagctcgtaaaggacgtaacccacaaactggacaagaaattcgtatcgctgcaagcaaagtacctgcattcaaaccaggtaaagcattgaaagatgcagtgaaataa

SEQ ID NO: 6592 - DNA, 678 bp, Enterococcus faecalis
  CDS (1)...(678)
gcagtcgatacgtattttgaatctgaagaaggtcaaaagttcttaatgattgatacgtctggtatgcgtaaacgtgggaaagtatacgtatcaactgaaacatatagcgtcatgcgcgcaatgcggtcgattgaacgctcagacattgttttaatggtcttgaatgcagaagaaggtattcgtgagcaagacaagcgtgtgtcgggctacgcccatgaagcaggtcgcggtattattatcgtggtcaacaaatgggatacagtcaaaaaagatacaaatacaatgcgtgattttgaagctgaaattcgtgatgaattccaatatttagattatgcacccattatttttgtgtctgcattaaccaaacaacgtttaaacaaactgcctgaactaattgaaacagtaagtatgaatcaaaacttacggattccttcagcgttgttaaatgacgttgtaatggatgctgtagcaattaatccgacaccaaccgataaaggaaaacgtttgaagattttttatgcaacacaagtggcagtcaaaccacctacatttgttatttttgtcaacgaagaagaactaatgcacttttcttatgcccggtttttagaaaatcaaatcagaaaagcatttacgtttgagggcacgccgattaaaatcattccgcgacgccgaaaatag

SEQ ID NO: 6593 - DNA, 1419 bp, Enterococcus faecalis
  CDS (1)...(1419)
gtgatcaaaatggcggaacaaacagatttactgattttaggtggcggaacaggaggctatgtagcagcaattcgagccgcacaaaaagggctaaacgtcacaattgttgaaaaatacaaattaggtggcacttgtttgcacaaaggctgtatccctacaaaagctttattaagaagcgcagaggtttttgataccttaaaacaagcggcttcttttgggattgaaacagaggcagcgtccattgatttttctaaaatacaacaacggaaagaaggaattattgagcagttgcacaaaggtgttgaaggcttatgcaaaaaaaataaaatcaaaattttagcaggcgaaggtgcaattttaggtccctctattttttcaccagtctctggcgcagtggcagttacgtttaatgatccaacacgggaagaagaaattatcgttcctaaaaatgtcattattgcgacaggttctagtcctaaaacgttacctaatttgccgctggatgaagaatttatcttatcttctgatgggatgcttgaattagaagagctaccagaatcaattgcaattattggtggtggcgttattggtgtcgagtgggcttctttattaaatagtttaggtgtcaacgtaactatcattgaatttttggatcggttacttataaatgaaagtgcaacaatttctaaagaattaaagaaacgtttagagcaacgaggaattaacattttattaggtagcaaagtccaagaagcgaaagttaccggacagaaggttcaagtagaagttgcaggacaagaaagcctcactgttgacaaagtcatggtagcaattgggcgtcaacccaatatcaataagttagggttacagaatacctcagtgaaatatactgacaaaggcattgaagtaaatgaattttatcaaaccacagaaggacatatttatgcgattggcgattgtatcgatacacttcaactagcgcatgtggctatgaaagaaggagagctagccgttcagcatcttttagacgagacagttgaacctttaaattatacaaacgtgcctcgaggtgtttatacaaatcctgaaatagcaagtgtcggctatactagagaaactttaccagcagataaagaagtagtgattggtacctttaattttaatggtaatggtaaatcacttgtttatggagaaacagatggctttatagaagtaattcgtgacaagaagaccgatgatttattaggggtttctatgattgggccacatgtcacggatttaattgccgaagcaagtactgccatgtatttagatgccgcgcccattgaaattggtgaagcaatccatgcgcacccaacaatgacagaagtattgcaagaagcagccttagatacttatggcttagcgattcacaaatag

SEQ ID NO: 6594 - DNA, 993 bp, Enterococcus faecalis
  CDS (1)...(993)
atgaaaatgaaaacgcttaaaaaatcgggtttatcaaaagaagaattgattcaggcatatcgtcaagtactacgaggacgtcgtttagacgaacggttgtggcaattaacaaggattggtaagacctctttcaatatttctggtcaaggggcagaagttgcacaagtagcgatggcgatggcttttaatcctcaaaaagattattttttaccgtattatcgtgatatgaccgcgtgcttggtttggggcatgacctccaaagatattttaatgggttcttttggaaaagaagcggatccttcttcccatggtcgtcaaatgccgaatcattatggttcaaaagagcataatattgtttccttctcttcaacagtaagtacacaaatgccattagcaacaggtgttggttatgcagcgcaacttcaaaaagctgattttgttgcattgaccaccactggggaaggctctgccaatcaaggagaagtccaagaagctatgaactttgcaggcgtaaaaaaattaccagtcatttttgttgttgaaaataatgaatatgcgatttctgtcccaattgaagaacagtatgccaataaacgaatggccgatcgcgcgaaagcttatggctttgaaggtgtgaccgttgatggtagtgattttgctgaagtctatctagcatttaaagaagcagtaaaagcggctcgcgggaaaaaaggaccaaaattgattgaattaatggtttctcgcttgacttctcattccgctgacgatgatcaatctgtttatcgttcaaaagaagaaattgaagaaatgaaaaagaacgatgcagtgaagctttttgaaaaacaattattagaagagggctatttaacagacgaagacattgccaaaattgatgaagaaattcgtgcagaaatcaatcaagcaacggatgaagcagaagcaatgccagatcctgtaccgacatcaattttagaagaagtgtatgcaaaataa

SEQ ID NO: 6595 - DNA, 987 bp, Enterococcus faecalis
  CDS (1)...(987)
atggctgagatgacttatttagaagcaattaacttaggaatttctgaagaaatggctcgtgatgaaaaagtagttatttttggggaagatgtcggcggggacaaaggcggcgtattcggtgtaacaaagggcttggctgctaaatacggtgacgagcgttgttttaatacaccgttaacagaaggtttaattggtggtttagctgtcggcttaggtttaatgggctatcgcgcaattggtgaatttcaatttgcggattacattttgcctgcaaccaatcaattgttatcagaggctcggacaatgcgctacagaacaaaaggcgattggactgcgccgatcgtttatcggaccccttatggcggcggtgttcgtggtgggctgtatcattctcagtctacagaaaaagttttttgtggacaaccaggattaagagttgtgaccccctctaatccttatgatgcaaaagggatgattaaagcagcgattcgttccgatgatccagtcattttttacgaacataagcgtttatatcgtttactaaaagatgaagtgcctgcagatgattatatcgtaccaattgacaaagccaatgtcgttagaacgggtagtgatttaaccgtgattagttacggcatgaccttgcaattagctttagctgcggcggaaaaactagccgctgaaggaattgatgccgaaatcgtcgatgttcgctcattatatcctttagatcgcgaaacattagtggctgcagctaagaaaacggggaaggttttactcgtaacagaagacaataaagaaggcagcgtgatgagtgaaattgcagcaatgatttcagaagatgctctttttgatttagatgcaccgattcaacgacttgcaggacctgattgtccaagcatgccttatgcattacctttagaaagagaatttttaatcaatgaagagcaagtattagcagcaatgaaagaattagcagaattttaa

SEQ ID NO: 6596 - DNA, 1299 bp, Enterococcus faecalis
  CDS (1)...(1299)
atggccacaaaagaaatcaaaatgcctcatctaggcgaaagtgtcacagaggcagccattgtccaatggttagttaaaccaggagattcagtgaaacgctatgatcccttaatggaagtcgtttctgataaagtcaccacggaagtcccatcagattttgatggtgtagtaaaagaatttctgatttctctagatacagatgtgcccatcggaacagcggtgatgacgttagagacagaagaaacaaccgaaaaaacagaagtagctactttagcaccagtgaaagaagcaagtgcggaacaagcgcaagaacatgaaacggttgcaacaacaagcactgcgacgtcccatcaaaaaaataatggtcgttattccccagcagtccttaaaattgcccaagaaaaaaagattgatttaacacaagttacagggacaggtcgtgatggtcgaattactagaaaagatgttacaaactttacaccaacacaggcaagaacacctgagaaaacagtgagtccaggaactagcccttcaatttcagaggagccagttgcttcgcaaaatgaaagcgccgcaacagctagtccaactgaaacaagcccagataaaattgtctctgcagatcctgtacgtaaagcaattgctaaaaaaatggtccaaagcgtcaacgaaatccctcacgcttggttaatggtggaagcggatgtgaccaacttagtccaacttagaaattcattaaaagatgaatttaaacaacaagaaggcctgtctctaagcttcttcccattttttgccaaagcagtcattcaagcgttaaagaaaaatccaaaaatcaatacatcttgggatgatggctcaattatttatcataaagatgttaatttatccatagctgtaacgacagacgagcatctttatgtgccagtgattcaacaagcggataactattcgattgcagggctagccaaagaaatcaatcgcttggcacaagaagtccgacaaggaacgctagcaagcaaagaaatgcaaggagggacctttactcttaataatactggaacactaggttccgtccaatcgatgggaattattaaccatccacaagctgcgatattacaagtagagtcaattaataaacgccttgtgccaaccgcagatggaggctttaaagtggcagatatggttaatttatgtctttctattgatcatcgaattttagatggacaacaagcaggtaagttcttgcgagatgttaaagataatttagcgaaatataatgcggatacggatgtatattaa

SEQ ID NO: 6597 - DNA, 879 bp, Enterococcus faecalis
  CDS (1)...(879)
gtgttaaagaagggatttgaacagattatgaccattcaatggtttcccggccatatggccaaagcaagaagagaagtttctgaaaaaatcaaatatgtcgatattgtatttgaactagttgatgcgcggttaccgctttcttcccgtaacccaatgatggaccaaattgtccaacaaaaaccacgattagtccttttaaataaaggggacttagcagataatgaccaaaataaaaaatggcaacattactttcaaaagaaagggtaccaaaccctagttatcaatgcccaacaaaataaaggaatcaataaaattgtgccagcagccaaggaagcgttaaaagaaaaattggctcgtgaacaggcgaaaggcttgaaaccgcgtgcgattcgcgcaatgtgtattgggattcccaacgttggtaagtcaactttaatgaatcgtttagtcggaaaaaaaattgcgcaaactgggaacaagccaggcgtgacaaaaggacaacaatggttacgctctggttcccaattggaattactggatacaccaggaattctctggccaaaatttgaagatgaggaaattgggaaaaaattagctttaactggcgctataaaagatcaattattgcatttagatgatttggcgatttatggattagaattttttgcacgtttttatccgcaacgtttgacggaacgatatggtttaacagaggaagagctatttttacctgccccagaacaattgatgttaattagccaaaaacgtggttttagagatgattataatcgagccagcgaaatgattattttagaaattcgcagtggaaaattaggtacgtatactttggaccgctgggaagaactaggagacgaataa

SEQ ID NO: 6598 - DNA, 2079 bp, Enterococcus faecalis
  CDS (1)...(2079)
atggcctataagtatctcgtgattgtagaatcacctgccaaagccaaaacaattgaaaaatatctaggaagaaactacaaggtggttgccagtgttggtcacattcgcgatttaccaaaaagtaaaatggggattgatattgaaaataattatgaacctcattatatttcgattcgcggaaaaggcgatgtcatcaaaagtttaaaagcggctgcaaaaaaagctgaaaaagtctatctcgcagccgatccggaccgagaaggtgaagcaattgcttggcatttagcttatcttcttggccttgatttaaaagataaaaaccgtgtggtattcaatgagatcactaaagaagcggtaaaagcggcatttaaagaacctagaaccatcaacgttgatttagttgatgcacaacaagcacggcgcattttagaccgtttagttggatactcgattagtcctattttatggcgtaaagtcaaaaaaggtttgagtgctggtcgtgtgcaatctgttgctttaaaaatgattattgatcgagaaaatgaaattcgagaatttaaacctgaagaatattggagcattgatgggaatttccaaaaaggtcgcaagaaattcaaagcaaatttctggggcgtagatggtaaaaagaaaaaattaccaaatgcagaagcggtgaaagaaatcacttctcgaattgacggtaaagattacgatgttacaaaagttgagaaaaaagaacggaaacgtaatcctgcattaccttttacaaccagtagtttacaacaagaagcggcacgtaaattaaatttccgtacccgtaaaaccatgatggttgcgcaacaattgtatgagggaattgctttagggaaacaaggcactgtggggctgattacctacatgcgtacagactcaaccagaattgccgattccgccaaagcagaagctgctgaattcattgaaaagacctacggagatgagttctcagcacatggcggccgcaaagcaaaaaatacgcaaggtgcacaagatgcccatgaagcggttcgtccgtcaagcgttttaagaacacctgatgaaatgaagaagtatttagataaagatcaattaaaattatatactcttatttggtcgcgctttgttgctagtcaaatgacaccagcgattttagataccatgaaggtcacgcttcaacaaaacggcgtaacgtttattgccaatggctccaaagtgaaatttaaagggtttatgcaagtatatgttgaaggacgcgatgatggtaaagaagacaaggaaaatattttacctgaattagtggaaagtgacgttgttaaatcggtcgatatcgaaccgaaacaacactttactcaaccaacggctcgttttagtgaagccacgttaatccggactttagaagaaaatggtgtgggccgaccatcaacgtatgcgccaacattagaaaccattcaacggcgttattacgtgaagctaaccaataaacggtttgaaccaacggaattaggtgaaattgtgaattctctagtttcagagtttttcccacaaattgtcgatacacattttacagcgacaatggaaacggacctagataaagtcggtgaaggccaagaaaaatgggttgaagttgtcgatcgcttctacaagcccttcgaaaaagaattaacaaatgccgaagaaaagattgaaaaaatccaaattaaagatgaaccagcaggttttgactgtgaactatgtggacatccaatggtgattaaactgggtcgctacggaaaattttatgcatgtagtaatttcccagattgtcggaatacaaaagcgatcgttaaagaaattggcgtgacgtgtcctgtgtgtcacgaaggacaagttatcgaacgcaaatcaaagaaaaatcgaattttctatggctgtagtcggtacccagagtgtgacttcacttcttgggacaaaccagtaggccgaccatgtccaaaatgtgggcaatatttagtagagaaaaaagttaaaggcggcaaacaagtcgtttgtatcaatggcgattatggagaaaacgtccaaaattaa

SEQ ID NO: 6599 - DNA, 1308 bp, Enterococcus faecalis
  CDS (1)...(1308)
atgccaaaaaaagtcacaattattggtgccggtttagccggaagtgaagcggcatggcaagtggccaatgctggcgtaccagttgatttatatgaaatgcgccctgtcaaaaagacaccagcgcatcaaacagaaaattttgcagagttagtttgttctaattcattacgtggaaatagtttaaccaatgcggtaggtgttttgaaagaagaaatgcgccgtttaaattcaatcattattggtagtgcagatcaaaccgctgtaccagctggcggcgccttagcagttgaccgtgattctttttctgaaacaatcactgaaaaaattaaaagtcatccattaattacaatcaaaaatgaagagatcaccgatattccggaagggattgtaattattgcaacgggtcccttaacctctgaaagcttatctcaaaaaattcaagaatttaatggttctgaaggcttttatttttacgatgcagcagcaccaattattgataaatcaacaattgacatggataaagtttatttaaaatctcgttataacaagggagaagcggcttacttaaactgtccgatgactgaagaagaattcaatgcgtttcatgaagcactagtcaatgcagaagtggttcctttacgcacgtttgaaaaagagaagtttttcgaaggctgtatgcccatcgaagtaatggcgcaacgtggcattaaaaccatgttgtttggcccaatgaaacctgtcggactagaagaccctaaaacaggtaaacgcccttatgctgtaattcaattacgtcaagacaatgctgcagcttctttatacaatattgttggtttccaaacgcatttaaaatggggcgaacaaaaacgagtattccgtatgattccgggattagaaaatgctgaatttgttcgctatggcgtcatgcatcgtaatagttttatgaattctccagagttgctaaaaccaacctaccaatcaaaaaaacgtgacgacctgttttttgctggacaaatgactggtgttgaaggatatgttgaaagcgcggcaagtggtttactcgcaggtattaacgcagctcgtcttgccaaaggggaagagccgattgaattccctcgcgaaacgactttaggaagtatggcttattatattacacatgcagaaggcaaacatttccaaccaatgaatgcaaactttgggcttttcccagagttacctgaacgaattcgtgacaaaaaagaacgctatgaagcaattgctaatcgggccttagatgtccaagctcaagttatccaatctttagactaa

SEQ ID NO: 6600 - DNA, 900 bp, Enterococcus faecalis
  CDS (1)...(900)
atggaagaaaagaattggcctgagttatttgctcgttatcttattgtcgaaagaggctattcagaaaaaacaaaaaaagcatatcaagaagatatacaacattttttttcgtttttaaagacttcaggtaatgacaattatttgactgtggaacatttggatgttcgggcttatttgagcgaattatacgatcaggaatatagccgcaattcgattagtcgaaaaattgccagtttgcgttctttttatcaattcttattaaaaaatgaagcaatccaagagaatcctttttcctatgttcatatgaaaaagaaacagttacggttgccccgttttttttatgaaaaagaaatggatgcattatttgagagcgcacaaggggagcaaccgcttgatttgagaaatcaagcgttgctagaagttctgtatgggactggtattcgggtcagtgaatgtgcgaacttaacggtggacgcagttgactttcaagcttctgttttattggttcacggaaaaggaaataaagaccgttatgtgccttttggttcatttgcacaagacgccttaaaggattacttagagaatggccgcgcgctattaatgacaaaatatcaaaaaaaacatccgtatgtctttgttaatcatcatggtgaacaaatcacgccaacagggattgaatatgtcttaaaccaactaattaaaaaaagttcattaaatgcggaaattcatccccacatgttacgccatacatttgcgacacacttattaaataatggcgccgatatgcggacagttcaagaattattaggacatgctaatttatcaacaactcagatatatgcgcatgtgacaaaagaaagtttacaaaaaaattatcgaacgtttcatcctcgtgcataa

SEQ ID NO: 6601 - DNA, 585 bp, Enterococcus faecalis
  CDS (1)...(585)
gtgcataatggaggtaaacgtctaggaggaacaataatggttgaatcacaatttcactctacaacaatttgtgcagtcgaaaaagatggaaaatttgcaatggctggtgacggccaagtaacaatgggcgaatctgtcgttatgaaaggtacggccaaaaaagtgcgccgtatttacaatgatgaagtcgttgtcggttttgcaggaagtgtggcagatgcctttacattagaagaaaagtttgaaggaaaattaaatgaatacaacggaaacttaacgagagctgcggttgagttagcccaagagtggcgtacacaacagtctatgcaaaaattagaagctatgctgattgtgatgaataaggaagaaatgctcttagtttcaggaactggggaagtcatcacaccagacgatggtattttagcaattggttcaggcggtaattttgctttgtccgctgcaagagccatgaaaaactttggtgataaagaaatgccagcgaaagagattgctaaaaatgccttaaatattgctgcagatatctgtgtatttacgaatcataatatcattgtagaagaattataa

SEQ ID NO: 6602 - DNA, 981 bp, Enterococcus faecalis
  CDS (1)...(981)
atgctcttgatcagtatgagcatgctctttttgggtattaaaattggaagtgttcagatttcgttaacggatttgcttcaaattttagtgaaaaagacggtttcagaagacgggattttagagggaatcatctggaatgttcggttaccgcgtgtcgtgatggcctatctcgtgggcgcaggcttagcagtaagtggcacggtgatgcaatcgctcttaggtaatcctttagcttcttcgtatactttgggcgtatcagcgggagcatccttaggcgctgcgttaatcatggtaactggagtaactgcttcgatcttaggggcgtttttattgcctttaactggttttatctttggcttagcaacggtctttttagttttgttatttacgcaaacaatggatagtcaaatgtctaatcaaacagttgttttagtggggatgattatgaccttgtttgtcggtgctattttgacgttgattacagcacttttccaagattatttgaaacaattagtcttttggcaaatgggtagtttttctggcagtaattggcaaaaaattgctatttattgtccaatcttgcttgtcagcagtttgtttctttggtttgatgccaacgcattggatgttcttggcttaggagaagaacatgcgatgttagcgggagtagaagtcaaaacagcaaaactacgcattattcttttggctagtttactagcaggaagtgcggtttcatttgtcggtgtgattggttttgttgatttaatagcaccacatattgtccgtcgctatttaggggcgactcatcggtggctgattcccggttcagcaatcttaggtgggaccatcatggtaataggggacacaattgcccgcacgattttatcaccaagagaaattcccatcggggccgtaacagccttgattggagcgccattcttcttgtatatttactttaaaaaaaggggcgttgctgcatga

SEQ ID NO: 6603 - DNA, 1365 bp, Enterococcus faecalis
  CDS (1)...(1365)
atgattttaaaaaccaaactatttggcaaagtctatcaatttacatccgttaaagaagtcttagccaaagccaatgaagaaaagtctggcgacaagttagctggcgtagctgctaattcagccgaagaacgcgtggcggcgaaagtcgttttatcagaattgtccttaaatgacttgtttaacaatcccgtcgttgattatgacgaagacgaagtgacacgcattattattgaccaagtcaatatgcgaatttttgaaagtattaaacattggacagttgcagaattacgcgaatttatcttatcttcggaaacaaccgattttgatatcaaacgaatttcccgtggactcacttcagaaatgattgctgctgtctgtaaattaatgtccaacatggatctaattgttggcgcaaaaaaaatcaatattgaaaaaaccgccaacacaacaattggccgtcccggaactttttcaaatcgtttacagccaaaccatccaaccgataatgtcgatggcattatggcatcagttatggaaggtctttcttatggcgccggtgatgccttaattggtttgaatcctgttgatgattctacagaaagtgttaaacggatcttaaacaaatttgaagagttccgcagtgaatgggaaattccaacacaaacttgcgtgcttgctcacgtaacgacacaaatggaagccatgcgtcaaggcgcgccaactggcttagtctttcaatccatcgctggttcagaaaaagggaacacagcatttggtttaaatgcagaaattttagctgaagcacaagatttagcgcttcacagtggtcaagcagctggtcctaatgtgatgtattttgaaacaggtcaaggctcagaactttcttctgaagcgaactttggcgcagaccaagtcacaatggaagcgcgttgttatggcttagccaaaaaatttgatccgtatattgtaaataccgttgtcggctttattggaccagaatatctttacgattcaaaacaagtcatccgcgctggtttagaagatcatttcatgggcaaattaacaggaatttcaatgggttgtgatgtctgctacaccaaccatatgaaagctgatcaaaatgatatggaaaacttagcaatgttattagcaacagctggttgtacgtatatcatggggattcctcatggcgatgatgtcatgttaaattatcaaacaactgggttccatgaaactgcgacgattcgtgaaacattaggcttacgtccaattaaagaatttgaagaatggatggaaaaaatgggcttaatggaaaacggaaaattaacaagtcgcgctggtgatgcatctgtatttattaaataa

SEQ ID NO: 6604 - DNA, 2085 bp, Enterococcus faecalis
  CDS (1)...(2085)
gtgacaattttggaaaaacgccaagaagttcaagaattaacccttgaagaagtaatgggcgatcgttttggaagatattccaaatacatcattcaagaacgggccctaccagatattcgagatgggctaaaaccagtacaacgccgcattctcttttcaatgaataaagatggcaatacctttgataaaggctttcgtaaatcagcaaaatctgtcggaaacattatggggaattatcatccccatggcgacagcagtatttatgaagcgatggtccgtctaagtcaagactggaaattacgggaagtactaattgaaatgcacggaaacaacggaagtatggatggcgacccgccagcggcgatgcgttatacagaagctcgtttatcacagttaagtggtgagttgttaaaagatatcgacaaaaataccgtcgatttcgtctggaattttgacgatacagaaaaagaacccactgttttaccagccaaatatcctaatttattggtaaacggctcaacggggatttcagcaggctatgcaacagaaattcctacgcataatttagcggaaattattgatggaaccgtgtatttaattgatcatcctaatgcaagtttagagaaattaatggaatacattccaggaccagattttccaacaggtgggatcctacaaggaaaagcagaaattaaaaaagcctacgaaaccggccgtggtaaagtaattttacgtgcgaagacaaagattgagcccttaaaaggcggcaaacaacaaattgtcatttctgaaattccttatgaagtcaataaagcaacgctagtgaagaagatggatgaaatccgtttaaataaaaaagtagacggcattgccgaagttcgtgacgaaagtgacagaactggcttgcaaattgttgttgaactaaaaaaagatgtcaatgcagaaggtattttaaattatctatttaaaaacactgaattgcaaatcaattacaactttaacatggtagccatcgacaacatgaccccgcaacaagtgggactaaaacggattttagaaagttacattacgcaccgcaaatcagttatcattaaccgttgtcaatttgagttggacaaagctcgcaaacgtgagcacattgttgctggtttaattaaagcattgtctatcttagataaagtgattgcaacaattcgtggcagtaaagataaaaaagatgcgaagaagaacttagtatccgactacgcgtttactgaagaacaagcagaagcaatcgttactttacagctataccgtttgaccaatacggatattactgatttacaagaagaagcgaaaactttagaacaacaaattgctgagttattgaacattttaaacaatgaaaaagaactattctcagtcatgaaaaaagaacttcgcgaagttaaaaagcaatatggaaatccgcgcttaactcaaattgaagaggaaatccaagaaatcaagattgaaacagccgtgttagttgcgcaggaagacgtggtcgtaaccgtgacgcacgaaggctatatcaagcggagtagtattcgttcttatacagcatcaaaaccagaagaaatcggcatgaaagaaggcgactttttactatatgctggcgaagtcaatacattagatcatcttttactagtaacaaataaaggaaatatgatctatcgccccgtccatgagttgccagatttacgctggaaagaaattggcgaacatatttctcaaaccattttaaatcttgctatcgatgaatcgattattgctgtatatccttataaagagttaagtccgacaaaaacctttgttttcattacaaaagctggcatgattaaacaaaccaaaatggctgattttgagccttggcgcacttataagagccgcccgacatcttgtatgaaattaaaatcagaccaagatgaaattaccaatgtttatttaacaaatgatcaagacttattggatgttttcctcgttagcaatcgcggttttggttacgctatccattatatgaagtaccagtcgtgggtagtaaagcggctggagttaaatcaatga

SEQ ID NO: 6605 - DNA, 420 bp, Enterococcus faecalis
  CDS (1)...(420)
gtgggtagtaaagcggctggagttaaatcaatgaacctcaaagaagacgattatgtcgttaatggtttactggttcattctgaaggggatacaccaattgtcatcgttacccaacgtggcggtgttaaacgcatgttagcccaagaattaacacaattaggacgagcaaaacgtggactaatggtcttgcgggaattgaagaaaaatccacatcgtgttgtctttatgtctgaaagtaccgatttagatttattagttactacgcaaaaaggcacacaagaagttattcagtcgaaaaactatccaatcagtgaacgaacatccaacggttcctttgtcatcgatgaacaaaaagatggccaagtaatggaagtccacgagatgcattctgcagtgattgaagaagaacaaacaaactaa

SEQ ID NO: 6606 - DNA, 969 bp, Enterococcus faecalis
  CDS (1)...(969)
atgaaacaaatgagaggaagttggtttatgaaagctgttgtgattaatcagtacggaagtaaagaggtacttgaagaagcagaagtaacactgccagaattatcggaacatcaagtgttggtaaaagaatacgcgacatcaattaatccgattgattggaaattgcgtgaaggatatttaaaacagatgtttgattggtcctttccgattattcttggttgggatgtcgctggtgtgattacagaggtggggagtcaagtaacggattggcaagttggcgataaagtttttgctcgtcctgaaactactcgttttggtacctatgcagaagtaacgattgtggatgatcatttattagcaaaaatccctgaaacaattagctttgaagaagcggctgccgttccgttggctggtttaaccgcttggcaagcattgtttgatcatggtcaccttaaagaaggagaaactgttttaattcatgctggtgcaggtggggtcggtacttatgcgattcaactagcaaaagaagcgggcgcacatgtcatcacgaccgctagcgcaaaaaatcatgccttactgaaaaaaattggtgcagatgaagtgattgattatcatacaacgaattttgcagaggtattaactgatgttgatttggtttttgatacaatgggtggtgaggttcaaaaaaatagttttgacgtcttaaaaccaaacacaggtcgtcttgtttcaattgtgggcattgaagataaacaattggcagccgaaaaaaatgtttctgctgaaagtatttggcttcaaccaaatggagaacaattacaaaaaattgctgatttgatggcagctggaaaagtgaaatcaattattggtgaagttttccctttttctagacaagggatttatgatgcacatgcactcagtgaaacgcaccatgcagttggtaaaatagttgttcaaatggcagaataa

SEQ ID NO: 6607 - DNA, 954 bp, Enterococcus faecalis
  CDS (1)...(954)
gtgaatcaaaaccaaggagtgtgtattatgtcaaaaattttagtttttggacaccaaaatcctgatacagatgctatcggagcagcaattagttttgcttacttacaaaaagaattaggaaaagagacagaagctgtcgctttaggaacaccaagtgaagaaacacaatatgccttagattacttcaatattgaagcaccacgtgttgtcactgaagcagctagcgaaacaaaccaagtcatgttagtggatcataacgaattccaacaaagcatttcagatatcgctgaagtaaacattttagcagtagtggatcatcaccggattgccaacttcgaaacagcagatccattgtattatcgtgcagaaccagtagggtgtaccagtacaatcatctataaaatgtttaaagaaaataacgtgacaattccagctcaaattgctggtatgatggtctcagcgattatttctgatacattattatttaaatcaccaacttgcacacaagaagacatcgatgcagcgcacgccctaggtgatattgctgaaattaatttagaaggctatggtcttgacttattaaaagcaggaacaaatttaagcgataaatcagctgaagttcttttagatttagatgctaagagcttcccaatgaacggcaaaacagttcgcgttgctcaagtaaataccgtcgatttagcagaagttttagatcgtcaagctgaattagaagcagctatggccgcagaaaatgcagccaataattatgacttgtttgtcttaattattacgaatatcctagacagtgattctgaattattagcgattggtgcggaacaagccaaaattgaagcagcgttcaatgtaacattagttaacaatcgtgcgttcttacccggcgttgtttctcgtaaaaaacaagtagtaccacaattaacagaagtctttaactaa

SEQ ID NO: 6608 - DNA, 603 bp, Enterococcus faecalis
  CDS (1)...(603)
atgcattcaatttttaaaaaaggacatcctgaagcacctgtctttgtgctacttcacggtacaggtggtgatgaaacatctctcctaccaattgcccaagaactaaataaacaagctactgtgctaagtattcgtggtgatgtttcagaaaatggaatgaatcgttattttaagcgcctagcggaaggtcattatgacttagaagatctagaaaaacgcggcgaggcgcttcataagtttattcaacaagccgctaacgagcatcaattttcattggataaaattatttttattggctattcaaatggggccaatatcgctattcaattattgcttactcaccccgacagctaccatcaagctgtcctctatcatcccatgtttcctgttgaattgaccaatcaaccagacttgaccgacacttctgttttattatctctaggagagcatgacccgattgtcccacttcctgagagtatgcgtgtgattcaactatttcagaatcatggagcaaccgtacaagaggtttggacacaaagtcatcaattaacttatcaagaaattaaggaaacacaaacttggttggcacatctgtcctcttaa

SEQ ID NO: 6609 - DNA, 444 bp, Enterococcus faecalis
  CDS (1)...(444)
atggacaacgtattggttaaaaatgcacttgctgaattaaaagaagccaatatccgaattactccgcaacgttatgctatcttggaatatttaatcgaaaatcatacacacccaacagctgatgaaatttatcgcgcactagaagatcattttccaaatatgagtgtagcaacggtttacaacaatctacgtttatttactgaaatcggtttcgttcaagaaatgagttatggcgatgcatctagtcgttttgattttagttcgaagaaacattatcacgtgatttgtcaaaaatgtggtaaaatcgttgattttcattatccagggttagaggacgttgaaatggccgctagtaaattaacaggcttcgaaattaatgaacatcgtttagaattatatggattatgtccagattgccaacaagcacaacaggagaatgtgtaa

SEQ ID NO: 6610 - DNA, 933 bp, Enterococcus faecalis
  CDS (1)...(933)
atgactaaaggttatgtaaaatcagtaacagagttaattggtcaaagcccagttgtgaaattaaaacggatggtaccagaaggagctgcagatgtttttgttaaactagagttctttaatcctggtggcagtgtgaaagatcgaattgctttaagcatgatccaacaagccgaagcagatggtcgcctaaaacctggacaaacgattattgagccgactagtggtaatacaggcattgggttagcaatggtaggtgctgcgttgggatatccagttaagattgtgatgccagatactatgagtattgaacgccgcaaattaatgcaagcatatggggctgatttattattaacccctggtgccgaaggaatgaaaggggcaattgcaaaagccacagcattagcagaagaacacggatacttcatgcctttgcaatttaataatccagctaatccaatgatacatgaacaaaaaacaggaaaagaaattgttgatgtctttggtaaacgtggcttagatgcgtttgtttctggtgttggcactggaggaaccgttacaggagttggccatgaattgaaacggatttttccagacattgaaattgttgcagtagaaccaacggagtcgcctgttttagaaggtggcgaaccaggtccacataaaatccaaggaataggcgctggttttgtcccagaagttttagacaccaccgtttatcaaaaagttgccgctgtttctagtgaagacgcattagaaactgctcgtttaatggggccaaaagaaggcatccttgtggggatctcagcaggggcagcaattaaagcggccattgatttggcagttgaattaggcgcaggcaaacgtgtcttagcgctggttccggataacggcgaacgttatctttcgacagctctttacgaatttccagaataa

SEQ ID NO: 6611 - DNA, 429 bp, Enterococcus faecalis
  CDS (1)...(429)
atgagccaacagcaagaagctttaaaagcctatatcggtttattaagaaccagccatcaactagagcaacttgccaagcaagatgttacttgttatgacttaaacattacagaattttcagtattagagctgttactccataaaggtcctcagaccatccaaaaaattaaggagaaaattttaattgctagcagtagcaccacttatgttattgaccaattacataaaaaaggctatgtaacgcgcacccccagtgaaaaagaccgacgcattacttacgtcgaattaacagaagctggaaaaacattaattgaagaaatttttccgatgcatgcaaagcgaattgcagaagcatttgaacaactctcttccgaagaattaacacttcttcaaaaaactttacgaaaaataacaaatgaaacgaaatga

SEQ ID NO: 6612 - DNA, 2004 bp, Enterococcus faecalis
  CDS (1)...(2004)
atgatttttttgtttgacaagacagatcaattgggcgttaatacaatccggacattaagtattgaagccgtacaaaaagcgaactcaggacatcctggtttaccaatgggtgctgccccaatggcgtatgcactttggacaaaacatttaaaggtgaacccaacaacttctagaaactgggttgatcgtgatcgttttgtactttcagcaggccacggctctgcaatgttgtacagcttattacatctatcaggatacaacgtaacaattgacgatttgaaaaatttccgtcaatgggatagtaaaacaccagggcatccagaagtgcaccacacagatggtgttgaagcaacaacgggacctctaggacaagggattgctatggctgttggtatggcaatggctgaagcgcatttagctgcaacttataatcgtgatagtttccctattatggatcattatacgtacgcaatttgtggtgacggcgatttaatggaaggtgtttctcaagaagcaagttcaatggctggtcatatgaaattaggtaaattaattgtcttgtacgattcaaatgacatctcattagatggaccaacttctaaagcctttactgaaaatgttggggctcgttatgaagcatacggatggcaacatattttagttaaagacggcaatgatttagatgaaatagaggctgcgattgaagcggctaaagctgaaacggataaaccaacactgattgaagttaaaacagtcatcggttacggagcaccaaaagaaggaacatcttccgttcacggcgcgccaattggtgaagagggcattacagcggctaaagctgtttatggttgggaataccctgactttactgtgccagaggaagtcgctgctcgttttaaagaaacgatgattgacgaaggccaaaaagctgaagaggcttggaatgagatgtttaagaactatgaacatgcgcatccagaattagccaaacaatttaaagaagcttttgccaaccaattacctgaaggttgggaacaagaattacctaaatatgaactaggaacaagtgccgcaagtcgtgtaacaagtaaagaaacgattcaagctatttcaaaagttgttccaagtttctggggcggttcagctgatttatctgcctcaaataatacaatggttgctgcagaaaaagatttcgaatctggtcaatacgaaggccgtaatatttggtttggtgttcgcgaatttgcaatggctgcagcaatgaacgggattcaattacacggtggtagccatgtttatggcgggacattcttcgtctttactgactacttgcgtccagcaatccgtttagccgctttacaaaaagttcctgtaacttacgtcttaacgcatgactctgttgcggtgggtgaagatgggccaacacacgaaccaattgagcaattagcaagtgttcgttgcattccaaatgttcatgtgattcgtccagcagacggcaatgaaactgttgctgcttggaaaattgctatgacttctacggaaacaccaactattttagttctaagtcgtcaaaacttacctgttttagaaggaacgttagaacacgcttctgattctgttcaaaaaggtgcttatgtattgtcaccacaaaaaggtgaacaaccatcagggattttaattgcgactggttctgaagtaaatctagcagtggaagcacaagctaaattagcggaagaaggcatcgatgtatctgtcgtgtcaatgccaagttttgatttatttgaaaaacaatctgctgaatataaagaaagtgtgttacctaaagctgtgacaaaacgtgtggcgattgaagctgcagcaagctttggttgggaacgctatgtaggaacagaaggcaaaacaatcacaattgatcacttcggcgcttctgcacctggcggtctagttcttgaaaaattcggctttactcctgaaaatgtggttaatacctataaatcactataa

SEQ ID NO: 6613 - DNA, 495 bp, Enterococcus faecalis
  CDS (1)...(495)
atgttagcagccatttgggcccaagatgaacaaggagtgattggtaaagaaggcaaattgccttggcatttacccaacgacttgaaatttttcaaggaaaaaacaattcataatacattggtcttaggacgtgcaactttcgaaggcatgggatgtcgtccgttaccaaatcgaacaacgattgttcttaccagtaatccggattaccaagctgaaggcgttttggttatgcattccgtagaggagattcttgcgtatgctgacaactatgaaggcgtgaccgttattggtggaggttctgtcgtttttaaagaactgattcccgcatgcgatgtcttatatcggacgatgattcatgaaacgtttgaaggcgacaccttctttccagaaatcgactggtctgtttgggaaaaagttgccactgttcccggcgtcgtggacgagaaaaatctctatgcacatgactatgaaacgtatcatcgaaacgataaataa

SEQ ID NO: 6614 - DNA, 1896 bp, Enterococcus faecalis
  CDS (1)...(1896)
gtgtcggtgaaagaattaaaagtaacagatttaaccaaaacatatggggaaaaaacactatttgatcatctttcttttttgattcatgaaaaagatcgcattggtttaattgggattaacggcacagggaaaaccagtttattaaatattattgctggcgtagatagcggtgatggtgatcttgctgcgattcagcagccaagtgattatcaaattgggtacctttcccagaatcaaacatttgacgagaatattacgattgcagaagccgtgtttcagggagacagcccgatcataaaaacagtcaaaaattatgaattagcgttagctgctttaagtgagaatggtttagacgaaggggttcaaagacgttacacgcaagcagaagaagccatgaataaacaagatgcttggacagcagataccaatgcaaaaattattttacaaaaattaggtattcccacattggaaaagaaaataggtgagctttctggtgggcagttaaaacgagtaagcttggcgcaagtcttaattgaagcgcctgatttactgttattggatgaaccaacgaaccatctggattatgaaacgattgaatggttggaaaactttttaaataactatcgtggcgcggttttaatggtgacccatgaccgctactttttagatcgagtaaccaatcggattttcgaactttcttttggaaaactgtatgaatacaaaggaaactatgaaacgtatgtgatggaaaaagccgaacgtgaacgtgtcgctgtagaacaagaagaaaaaagaaaacgcctcttcaaacaagaacttgcgtggatgcgagcaggcgttcaagcacgaggaacgaaacagcaagcaagaattgatcggtttcaggatttaaaagaaaacttgcatcaggtacaaaccaatggcaccttagaagcagactttgccacgcagcgtttagggaaaaaagttctggaaatcaaggaaggaaattatgccattgatcataaacagcttttgaaagactttaatttactcattcaagcaaacgatcgaattggcattactggtaaaaatggtgcaggaaaatccacattattaaatattttagctggacgcattcctttagagagtggcctatatagtatcggtgaaaccgtccgaattggctattatacccagcaaaacgaagaaatggaccctaatcaacggatgattgcttatttgcaagaagcagcagaagaagtgaaacgcagtgatggaagcagcgttggggtcgctgaaatgttagagcgctttttatttcctcgttttatgcatggcacactgattggcaaactgtctggtggagaaaaacgccggttatatctcttaaaattattaattagtcagcctaacgtgttattattggatgagccaaccaacgatttggacattgatacgttgaccattttagaagattatatccaaacgtttaaaggagcggtaattgcggtttctcatgaccgttatttcttggataaaacaatggataaattgttagtttttcaaggaaatgctcagatcctatcattttatggcacaatgagtgaatatttggcgaaccaaaaagaacaagaaaaggtcaaagaaaaaccgctcaataaaccagtaaaagaagcatcgacagaaaagaaagaaaaaacaaagctgacttatatggaacaaaaagagtgggcaacaattgaagaagatatcacacaattagaaacgaaattagaaacattaactgaagaaatgaatcatcagggtgatgattttgttcgtttacaagaattgcaagaagcagtaacagcaacggaacaattgttagaagaaaaaatgaatcgttgggaatacttgagtgaatacgcggattaa

SEQ ID NO: 6615 - DNA, 2055 bp, Enterococcus faecalis
  CDS (1)...(2055)
atggaatttacctttctaatcattgtttttgcactgtctattaccttctcaaacatattcaaccggattgttcccgtcattccgctgccaattgtgcaaattattgtaggcgttctaattggtttaactaaaatggggcaggaaattgaatttgagcctgaagtgtttttagtaatgattattgcaccgcttttatttagagaaggggagctaatcaatctgaaagcaatgatgaaaaatttcgggatgattcttttcttggccttttttggtgtgttaattaccttagtcggagtcggctggaccctgcatatgattttgcctactttaccattagccgcttgcttcgcttttggagcggctctagggccaacggatgcggtggcggtaggttcgttatcaggtcgaattgacattcctgaacgttcgatgaacattttatctggtgaaggactcattaatgatgcatcaggcgttacagcctttcaatttgcattagcggctttattaacggggtcattttcgccggtggaagcggcagggaccttggttatttccagtattggtggagcggtagtcggaatcgtgttagttctattaaaacagcaaattgttcatttacttgaaactgcggtggcaaaagatgttacaggctacttgttgattgaattactcttgccatttattgcttatttaatttcagagttgattggcgtttctggaattattgccgctgtgattgctggaattatgcaagcgtctagtttgaaaaaagtttcgctttttgaagcagagctgtcaaatgttggcgaaagtatttggagtatgattgagttcactttaaatgccttagttttcttattcttaggaattgaactttctcaagtgttttcgccaatttggattgaccaacaatattcaaactggttcctactaatggttgttttaattattagtggtgtcgtctttttaattcgtttcttagccattttcagtgtttacacgctacaacatggttttaaaaaagttaaaactgcaatgaatgaaatgttgattttaacatttggcggtgttaaggggacggtaagtttagccaccatctttattttgccaacagcgattaacggcgagcattttaaagaacgaccgttattgctattcattacggcttgtgttattttggtgactctgattggcgggattctagttttaccatttttaactgattcagagacggaagtggaaaatgaagagtcagtcgaaattgatttattacgtgatgtcattgatgtcttaaaacagcaaaatgaagagaatcctcgtggtgaaatgaatgcggtcattgaaaattatcaagatcgtttaaaagaattgtataccgagcagctaagtgcagaacgaaaacaagaagtgcaagagttgcggacgttaattgtgtccattgaacgagacggcttagaagaaagtctgaaacaaggagaaattagtgtcagaagttatcgtatgtatcaacgcttgattacacggatgcaacggtcgattgccaaacaattattatcgattgtaggcttttggttattatttgctcgacaaatcatttcgattcttttacatcctaagctatttttcaatcgtggtgaagcttctgaagaagaaaaagaattacgaaatgaagaactagaaaatattcgccaagtttttctaagaaattctcaagttattctgaagagtttagataatttgcgcggtgtctatgatgatgatttaattgatttcttcattgacggacgcttggatttagcccataagtttgaaaaaggcgaatttattgattcgtatattgttcatacggagacagactatgtcaaagacctattattaggcttccaagaagaacgacggatgattgatcattacgaacaatctgaacgcatttcaattatcgaagcgaacgagttacgaaaaaatgtcaatttattagagagttattcgattagcggcgaagtgaataacgttccgctgaaacgatttgttaaaaattttaataaagaataa

SEQ ID NO: 6616 - DNA, 858 bp, Enterococcus faecalis
  CDS (1)...(858)
gtgtataataaacaaaaattacattctagaggagattttatgaattacatttatttaattaatgaacattatcccttattaacaaaatcggaacgaaaagttgctgattttattcttaactctggagaatctattatttacagtactatgaatgatattaaaacaaaagcgaatgttggcgatgcaacaatcattcgcttttgtcaaaaacttggattttctggtttttctgatctaaaaattgaaattgctaaagaagattttagcaaaaaaaaagaaaaaccatctagtggtaaataccacgatgaagttgctaaaagtttgattgaagtacttcagtctacttcttgtttaattaatgaagaaaaattaacaaaagcaatccaacttattaatcaagcaagcagcctatatatttttggtgtaggatctagtggaaatactagtcttgatttggaaagtatgtttttgagggtaggaatacaagctaaagctgtattagatcctcattatcaagctcaagttgcttctttgttaacagatagagatttagttattatcttttctttatctggaaaaacaaaagatacttatgactcattaaaaattgcaaaaaataatggagcaaaaatacttgctataacgaattatattcattcaccgataggaaaatctgcagatttagttttacaaacagcaatcgaagaatttttaaatggtggttctttagctggaaaaatttcacaactttatatttgtgatttgttagtacatgaatatgaacaaaataacaagattaattcattggatttaagagaaaaagtcttacgttcaattattgataaaagaattgaatga

SEQ ID NO: 6617 - DNA, 1491 bp, Enterococcus faecalis
  CDS (1)...(1491)
atgagttatgttttaggtatagatttaggtacaagttcattaaaaggattattggtatctgaaataggggatgtcattgctacgtcttcatcagattatccattgttttcttcaagaccaggatatagtgaacaaaatccacacgattggattaaagcaattgaaaatgtaattaatgatttattgagtgaatttcccgaaatgaaaaaagaattgaaagggattagtatatctggacaaatgcatagtttagtattattagacaaggataatgaaataattcgtcctgctattttatggaatgatgtacgtacaacgaaacaatgtgaggatattatgaattgtatggggagagaagtacaggaaatcactaaaaatattgctttagaaggctttactttgccaaaaattttatgggttcaagaaaatgaagaaaagaattggactaaaacgaggcatataatgttacctaaggattatttggtacattggctaactggttgttattctacggattattcagatgcagctggtacgttaatgctagatgttaaaaagcgcatttggtccaagacaattcttgataagtttaatattcctaaggagtatttgccaacattatttgagtcttcagctaaagttggtaatatgagaagttcgttgattaataaatttggactagaaacaaaagtggaaatttttgcaggtggagctgataatgcttgtgcggctattggagctgggatagttaattctgaagtagcaatgctgtcaattggtactagtggcgtctttttgtcaatggaagacgatgctgagaacgaatatcaagataatctccacttatttaattcagctctgcctaattcttattactccatgggagtaacgttggcagcaggtaactctttaaaatggtttagagatacatttgctaaagatgcagaattttctgatttgttagcgaatattgatgaagtaatagtaggaagtgagggattgatttttactccctatataagaggagaaagaactccgtatcaagatagtcaaattcgggggagttttattggtatcgatagtcgacatagtctaaaacattttacacgatcagttattgaaggaataactttttcattaaaagaatctaaagtaatcatggaacaaagaaaaaatttgaaaataaaaaaaattatttctgtaggtggaggaacgaaaaatcaacaatggcttcagatacaggctgatatttttggccttcctatcactacattggaaacggaacagggtcctagtctgggagctgcaatattagcagttattggttgtggtatgtgtgcaaacattgatagttgtattaaaatgtttgtgaaatataaaaaagtatatcaaccaattgaaaaaaatgtgttgttatataataaattctttcaagtatatagtaaagtttattctactactaaagagatttgttatcaattacaagagtaa

SEQ ID NO: 6618 - DNA, 459 bp, Enterococcus faecalis
  CDS (1)...(459)
atgattaataatgtgacattagtcggccgcttaacaaaagatcctgacctgcgttacacgcaaagtggaacagcagttggacaatttacgttagcagttaatcgtaatttcacgaatcaacaaggagatagagaagcagattttattaattgtgttatttggcgtaaagcagctgaatctttcgctaattatgcgcgtaaaggcactttaattggtttgacaggacgtatacaaacaagaaattacgacaatcaacaagggcaacgcgtatatgtgacagaaattgttgtagaaaactttcaatttttggaatcaaaagaagtaaacgatcaacgtagaagtagtaagccagaccaagcgacttttgacaaaaaagcaactgagaaacctgaccctctcgatcctttttctaaagatgtaagtccgatagatatatcagatgacgaccttcctttttga

SEQ ID NO: 6619 - DNA, 549 bp, Enterococcus faecalis
  CDS (1)...(549)
atgagtttgaaatcaaaagaattaattaaaacagtcgtcttttttgcctgtttagctttgggtctgtttttactgagacaatttgtatttacgcctgtcgtagtgagaggtcattcaatggatccaacgttagcagatggtgaacgggtaattacgttaaaaaacacagaaattaatcgtttcgatattattactttcccagcgccagatgaaccagataaaaattatattaaacgtgtgattggtttacctggagatacaattgcgtacaaggatgatacgttgtacatcaatggaaaagaagttgacgaaccctatttagatgaatttaaaaaagccttaacagatggtcaacctttgacaggcgatttttcattaaaagaaaaagtaccagcagatagctactttgttttaggtgataatcgacggaattcaaaagacggtcgtgtcattggttttattcataaaaaagatattttgggtgaagtgaaatttgtgatgtggccattctcacggtttggtccaataccagaagtgtcaaaacaataa

SEQ ID NO: 6620 - DNA, 3816 bp, Enterococcus faecalis
  CDS (1)...(3816)
atgaggaaggagcaaccgaagatgagtaaaacaattccactacgtccagccaatgagcaattcaccgacagtcaatggcaagcggtgtttgatggcgatgaaaatatcttagtttctgcttcggctggctcaggaaaaaccaccgttttagtccgccgtgtcattgaaaaagtcaaaagcggcgtcgatatcgatcgtctcttgattgtgacgtacactgaagccgccgcccgtgagatgaaagaacgtatccaagtggctttacaaaaggcaatgaatgaagaacaagatccagaaagaagacggcatttttctcgtcaaattgctcttttgccaacagccaatatcagcacgttacatgccttttgtttaactgttattcgtcgtttttattatttaattgacatagatccagtttttcggatgttaacagatgaaacagaaacattgttattaaaagaagatgtttgggatgcattacgtgaacaattttatgcggaaaatcaagaagcgttttaccaattaacagcgaatttttccaatgaccgtagtgatgacggactcactaacttaattttttctttttatgaatttgccaaagccaatcctgatccagaggcgtggattaatggcttaacacaagcctacgaagtaggggatcagctaggcgaatcaacgttatttcagacgtatttaaaaccgctagccgttgagacgttacaacgaactcttcagcgttacgaagaaatggtgaccttaacagagggcgaagagaaacttcaaaagatttggtatttagctcaaaatgaaaaggaacaaacaaaacaatttttacaatttttagagagaaatgatttagaaagcgcctataatttgactgaattgttaagctttgaccgctacccaacggttcgtgccgaagagttgaaaccaaccgcggaacaagccaaacagttacgagaacaaaataaaaaagcgttaaatgatttgaaaaagcaactgtttacactttctccagatgccatgaaacaagtcttgaaagaggccacgcccattgttcaagaaatggctcacgtggggaaacaatttatggaggcctatggcgcagaaaaacggcttaaaaatttagtggattttaacgatttagaacattatacgttagctattttagcgaaaaatcaggcagatggctggcatgcatcagaagcctcggtttactatcgcgaaaaatttgatgaagtgttagtcgatgaataccaagatatcaatcaattacaagaatctattttgtattggttgcgccgtccgcttagcacagaaggaaacctttttatggtaggagatgtgaaacagtctatttattctttccgcttggcagatcctacattgtttattgaaaaatacaatcagtatgggcaaggcaaagagggtaaacgaatcattctagctgaaaattttcgttcccgcaaagacgttttagactttacgaatttagtatttagtcaattaatggatgagcgagtgggccaaattgcttacgatgagtcagctgctttggttcatggttttgatcaattttcggaggcggctgattattcaactgaattgctaatttatgaaaaaaaagcaacagaatcagttgaatttccagaattacaatcccctgagttgttgattgaagataagacagaaggggaactttacgttactgctttgaaaattcgtgaattaattgaccaaaatttcttaatttatgataaaaagctgaaaacggatcgaccgattacttatcaagatattgtcttattaacgcctacaaagaaaaataatttaactattttagatgtttttaaatcattagaaattccagttcaagtcaatgatgctcaaaattatttccaagcaacggaaattcgtacaatgattgccttgcttcaattgattgataatccctatcaagacattcctttggcagctgtgttacgttcaccaattgttggattaaaagaaaacgaattagtgcttattcgtttggctaataaggaaaccagttactacgaagcatttttaacgtttaatcaaaagatggaaccaaccatggaggaagcagttgttcaggaaaaaactatacgttttgctgaatcattagaaaaatggcgggaacaggctcgacgcaaccagattagcaccttgctgtggacgatttatcgggaaacggcctaccttgattatgttggcgggttgcctgttggtaaacaacgccaagccaatttatatgcgttggttgatcgggccgcggcgtatgaaaaaacaaccttccgcggattatttcaatttgttcgcttcatcgaaaaaatgcaagaaaaagacaaagatttagcagaaccagtcgttttaagtgaagagaatgccgtacgcgtcatgacgattcacgctagtaaagggttagaatttccggtggtattcgttttagatatgaccaaagaatttaatgtcagtgatttgaatgaacgctatatctttgaagaaaatttaggggtaggcattcgttatttacaacctgaagaacgagttatgtacgatactttaccatttttggcgattaaacaagtacgattaagaaaattactatccgaagaaatgcggaagttatatgtggcgttgacacgtgcagaacagaaactttttctggtgggctcctataaagaccaagcggcgatgtggaaagagtggctgaaagttggcgatgtagaaacactggtgctaccagctgaaaatcgcttgcaaagtaaaagtagtttaatgaattgggttgggatgacattggtacgccatcaaaaagccgatgaatatcagcaagaagtagtagtaagtaacgttccgcaagtcaaaaagcacccagctaactttcatattcagtggttcaacgaagaacaactacgagcagccattcagcaattacaattgccagaaagacaagcagaggatttagccgaaaaagcgcaattatctgctgacaaaatcaatcgtggccttgcacggttaagtttcaattatccgtttgaagtggctactcggaccaccagttatcagtctgtttctgaaatcaagcgagtatttgatgaccccgataacaaagaaattggtaaaattgaggttcgggaagacaatactattcaagcgcaaccgttgattgtcaatcgaatgattgaaggagatttaagtaagcctaaatttttagatacggttcaagcgccctcagcagctgaaattgggacagcaacccattatttattacaactaattgatttaagtaagcaaccttcttacgaggaagtgcgagctgttcaagaacgcttagtggaaaataaattgattttaccagcaattgctgaaaaaatgaatctggaacaaatcgtggccttctttgacaccgccttaggaaaacaattgattcaacaccatcaaaccgttagaagggaacaacctttttctatgctgattgaagcagaagagctcattcaaaattatccagaaacgacacaagatgatttattaattcatgggattattgatggctatatcgaattagacaatcaatgcattttgtatgactataaaaccgatcatgtaaaaagcacctctccccaagcgatttctgaaattgtcgaacggtatcgcggacagatgaatctttatcgtagagcactacaagaggcaacgcataaagaggtgtcgcacgtctatttaattttattaaatggaggagtaattattgacatgcagacaggaaatgttgtagattttataaagtag

SEQ ID NO: 6621 - DNA, 1047 bp, Enterococcus faecalis
  CDS (1)...(1047)
atgacattacaagcgcaattagaagctcttagagacaatacgctcaaagaaatcgcacaagttgctactttaaaagaattaaaccaaattcgcgtagaaacattaggaaaaaaagggccaatcaccgaagtattaagaggcatgaaaaacctttcaccagaagaacgaccagtggtggggggctttgcaaatgaaattcgtgatttattaacagaagcaattgaagcgcgcaaagttgttttagaaaacgaagcgttaaatgcggcactaaaagaagaaagtttagatgtaactttacctggaaaacaaatgcctcaaggcacacgtcatattttgacacaagttatggaagagattgaagatattttcttaggcatgggttatcaagtagtggaaggatacgaagtagaatccgatcattataatttcgaacgcatgaatctaccaaaagatcatccggcacgcgacatgcaagatacgttttatatttcagatgagatgttaattcgtacgcatacttcaccagttcaagctcgaacaatggaaaaacacgatttttcaaaaggtgcattacgaatgatttctcctgggaaagtattccgtcgtgatacagatgatgcgacacatagtcaccaattccatcagattgaaggccttgttgtcgataaaaatgtcacaatgggtgatttaaaagggacgttagaagtcatgatgaaaaaaatgtttggtgaagatcgtaaaattcgtttacgtcctagctatttcccttttacagaaccttcagtcgaagtagatgttagctgttttaaatgtggcggcgcaggttgtaacgtctgcaaacatacaggttggattgaaattttaggtgcggggatggttcatccagatgtgttacaaatgtcagggattgatccaacagagtactcaggctttgcctttggcttaggaccagatcgcgttgctatgttacgttacggtgtaaatgatatccgtaatttttatcaaaatgatttacgtttcttaaatcaattcaaggtaaaggagtag

SEQ ID NO: 6622 - DNA, 2424 bp, Enterococcus faecalis
  CDS (1)...(2424)
atgttagtttcttataaatggttaaatgaatatgttaatctttcaaacgttactccgcaagaattagcggacaaaatgtctgtgacaggtatcgaagttgagggcgttgctgtacctgaagaaggcttaaagaaaattgttgtcggtgaagtaaaagaatgtgttcctcatccaaactctgaccacttatcaatttgccaagtagacatcggtgaagaagaattgtcacaaattgtttgtggagcaccaaatgtaaaagccggaattaaagtcatcgtagcattacctggttcaagaattgcaggaaatcaaaaaattaaaaaaggtaaaatgcgtggcgaagtctctaacggaatgatttgttcgttagaagagctaggatattcagacaatgtcgtaccaaaagcctatgctgaagggatttattatttacctcaagaagcagtgaatgggacacctgttttcccttatttagacatggatgatgcgattattgaattatcaattacaccaaaccgtgcagatgcactaagtatgagaggggtagcctatgaagttggcgcaatttatcgtcaaacgcctcagtttaatgatcccgaactcaaagaagatgcttcagataacgtgggaaattacgtaacagtgactgttgaagattcacaagatgcgccagcgtatcaaattcgtgtcattaaagatgtgacgattgcagaaagtcctcagtggttgcaaaatcgattgatgaatgaaggaatccgtccgattaacaatgtggtggacgtgacaaattatattttattattatttggtcaaccgttgcatgcatttgactaccaaaaattagatagcaaagaaatcttggttcgtcgagcaacagcagcagaagaactaattacattagatggtgaaacacgtcaattaacagaagaaaatatcgtcattacgaatggaaaaacgcctgtcggtttagctggcgtaatgggtggggctaattctgaaatcagtcaagaaacaacaactgtggctttagaagcggcattgttcaatccattgtctattcgcaaaacgtctaaacaattcaatttacggagtgaatcttcaagtagatttgaaaaaggcatcaaccaagcgacagttgggttagcttgtgatgtggcagccgcgatgattgcagagttagccgacggaacagtggtttcaggcactgcagttggttctgaagtggccgttaaagaagcgcaggtagctgtgactttagagcgaatcaaccaatatttaggcactgcattagatgaagcaacggtgaatgaaatttttgaagcactcggttttgcttatgaagtaaatcaaggcgcatatgaaattacgattccaccaagacgttgggatattgcgattgaagcagatattattgaagaagtggcgcgcatttatggatatgatcatttaccttcaacattgccaagtggagaaacagttgctggaagtctaaccaaagcacaacatgttacgcgccaattaaagagcttactggaaggtcatggtacgagtgaagccatcagctatgcgttgacaacagaagaaaaatcccgtcaatttatgatgaaagaaagtcaaacaacacggttgcaatggccaatgagtgaagagcgttctgtgttacgtatgaacttaatttctggtttattagatgatgtcgcatacaatgtggcacgtaaaaataataatatcgccttctacgaagtaggacgcgttttctaccaaacagaagatccaacaaaaaatttacctacagaagaaaatcacttagcacttgctttaactggtaatacaatggttaaagattggcaaacaaaagcaacagccgttgatttttatacagtaaaaggcttagtggaaagtattgtagctgttttaggattaacagaaaaaatcagttatcaagcgacaacggcgattccagaaatgcatccaggccggacagcatggatttatttaaaagatgaagtggttggttttgtcggacaagttcacccaacgacagcaaaagcgtacgatattcctgaaacatatgttgctgaattaaacttgcaacaattagtagccacagaagcaggcggggttacttatgaagcagtttctaaattcccagcagtttctcgagatattgctttattagtcgatgaaacagttaccaatcaagaactagttaaaactatttcagataacgcaggtaaatatttgaaagagattcatttatttgatgtatatcaaggtgaaaaactaggcgctggcaaaaaatcaatggcgtatagtttaactttcgttaatgcagaagcgacattagtggatgaagaaattaaccgttcaatggaaaaagttgaaaaagcgctaattgaaaaacatcaagtagaagtaagataa

SEQ ID NO: 6623 - DNA, 828 bp, Enterococcus faecalis
  CDS (1)...(828)
atgagaatgagcaatcaagaagccattggattaattgattctggcgttggtggattaactgttttaaaggaagcgctaaagcaattaccaaatgaacgattaatttatttaggagatacagcccgttgcccatatggtccacgaccagccgaacaagtcgttcagtttacttgggaaatggccgattttttattgaaaaaacgaataaaaatgctagtaatcgcatgtaataccgcgacggctgtcgcattagaagaaattaaagctgccttgccaattccagttgttggtgttattttacctggcgcacgagcagccgttaaagtcacaaaaaataacaaaattggtgtcataggtaccttagggacaatcaaaagtgcttcctatgaaatcgccattaaaagtaaggcaccagcaattgaggtgactagtttagcttgccctaaatttgtccccattgttgaaagtaatcaatatcgttcttccgtagcaaaaaaaattgtggcagaaacacttcaagcactacaattaaaaggacttgatacgttgattttaggttgtacccattacccgttgttacgtccggtgattcaaaatgtgatggggagtcatgtgacattaattgactcaggagccgaaacagttggcgaagtcagcatgcttctcgattattttgacattgcccacacgcctgaagcgcctacacagccccatgaattttatacaactggttctgcaaaaatgtttgaagagattgcaagcagttggcttggtatagagaacttaaaagcacaacagattcacttaggaggaaacgaaaatgattag

SEQ ID NO: 6624 - DNA, 1356 bp, Enterococcus faecalis
  CDS (1)...(1356)
atgattagacatgatagtcgtgcaccaaaagaattgcgaaagatcactattgaaaccaatgtttttaaacatccagaaggttcggtggttatttcgtttggcgatacaaaagtaatttgctcagccactgtcgaagaaaaggttcccccatttttacgaggcgcgggaacaggttgggtagcagctgaatatagcatgctccctcgcgcgacgaacacaagaaatattcgggaaagtgcgaaaggaaaattaacagggcgaacaatggagattcaacgtttgattgggcggtcattgcgagctgttgttgacttagaaaagttaggggaacggagcattgttgtcgattgtgatgtgattcaagcagatgggggaacccgtactgctagtattacaggcgcttttgttgctctacgcttagcagttaatcatttattgatgactggtgcgctagcggaagacccaattaaagagcatttagctgctgtcagcgtgggtattttacccgatggttattgtgtgctggacttagattacgcagaggactcgaatgctgcagtggatatgaacatcgtgatgaccgagtctggtgaatttgtggaaattcaaggaacgggtgaagaagctaccttctcaggagatgagttaaatgccatgctcttttatggaaaaacagggatcgaggaattaattgcgtatcagaaagaagcgctttatgctttagcctctgaagaagtcccttcgcaagattcagaagagaaagtgattgtcattgcaactagaaatcctggtaaagcgaaagagtttagttcaatttttggtgaaaaaggatatacagttaagacgttattagattatccgaatttgccagatgtagaagaaactggtcgaacatttgaagaaaatgctcgtctaaaagctgaaacaattgcagaaattttacagaaaccagtattagcagatgattcaggattaattgttgatgcgttagggggaatgccgggaatctattctgctcgttttgctggtgagccaactaacgatgcttcaaataatgcgaaactactacatgagttaacgggcgtgccaaaagaaaaaagacaagcgcgtttccattgtacattggtttttgctgaaccaaagaaagaaagtctggtggtcgaagctgaatggccaggagaagtcggtacgattcctcgtggtgaaggaggctttgggtacgattcacttttctatgttccagagcttggtaagacggcagctgaattgtctggagaagagaaaaataaagtcagtcatcgtggacaagcagtggcaaaattaaaagaacaatgggaagaatggctaaaaaaatag

SEQ ID NO: 6625 - DNA, 381 bp, Enterococcus faecalis
  CDS (1)...(381)
gtgattatgatgggggctattctaaatattggcgccgtcgttggtgcagggactatgattgatatgggcgctgttttgggcggtcgtgcaactgtagggaagcattgtcatattggcgcaggaacggttttagctggtgtcattgaaccaccaagtgccgcacctgtggttattgaaaacgaggttgtcattggagcgaatgcggtcgtactagaaggggttcgtgttggtgaaggtgccgttgtggctgctggggcagtagttgtggaagacgttccagcgcataccgttgttgcaggcgtgccagcaaaagtaattaaacaaattgatgataaaaccaagagtaaaacagagattttagaagaattacgtaaactctaa

SEQ ID NO: 6626 - DNA, 921 bp, Enterococcus faecalis
  CDS (1)...(921)
atgttgatacttggtttagccagtactgaaacagtcgattcttctgctcctgatttagcagaagcgaccgtaaaaaaagtgagcgcgctacaacgcttttggaacaatattaattgggatgccattgtcgctaccttaattgaaaaaagtttatcaattttatttttaatttttctattttttatcattcagcgaatcgggaaatatttaattgatcgcacctatgcaaattatagtaaaaagcaacattttagtgaaagccgtttaaaaacgttacacactttaattattaatgcatttcaatatacgctgttctttttcttcatctattctcttttgaccattgtcggtgtgcctgttggctcattattagccggagcgggaattgccggtgttgccattggtttaggggctcaaggattcatgaatgacttaattaccggatttttcattattttagaacaacaaatggatgtaggcgattatattcgcttattggcgttaaatattgaaggaactgttacttctgtcggattacgaaccactcaaattaaagcggttgatggaactgttcattttattccaaaccgaaacatcaccacaatcagtaacctgtctcgtgccaatatgcaagtgttaattgatgtccgcatcaatcctgaagaaggttatgaaaaaatttgtgaagtgattacagaagtcaatgaaacgttaaaagaaaagtatatcgaaagtattcaaactgggccagatatttttggtatggtcgatttaggcaatggcaactttgcggtacgaacgaccatgtatgtactaaacggcaaacaatttgcggtcaaagaagaatttctagctcaatatatcaaagcattaacagaggccggctttacgattcccaatacgcccattattgcaaaataa

SEQ ID NO: 6627 - DNA, 873 bp, Enterococcus faecalis
  CDS (1)...(873)
atgcgtagtatactaaaagtaatgaaaatgaagggactgaagaaacacatgactttggataaaacaaaaaaattagcaaacggcaatgaaatgccacgcctaggtttaggtgtttggcgtgtagaagatggctcagaagcaacaaattcagtaaaatgggctttaaaagcgggttatcgcttgattgatacggcagccgtttataaaaacgaagtaggggtgggcgaaggtattcgtcaatcgggtattccccgcgaagaaattttcgtgacgacgaaattatggaatgaagatcaaggctatgaaaatgcgattaaagcatttgataaaagcttagaaaaattagggttagactatgttgatttatatttaattcactggcctgttgctggtaaatataaagaatcatggaaagcattagaagaaatttacgcaagtggtcgtgccaaagcaattggcgtttccaattttcatcaacatcatttggaagatttattaacagaagcaaatgttgtgccaatggtggatcaaattgaattacatcctacgttaacacaagaaccgctacgaaaatatttagccgaaaataagattgccgtggaggcttggtctcctctaggacaaggtaatttattatctgaaccagtactagtgaaaattggtgaaaaatatggtaaatcagcggcccaagtgattattcgttggcacttacaaaatgatattatcgtgattcctaaatctgttcacgaaaaaagaattcaggaaaattttgctgtctttgattttgaattaacaccagaagaaataaccgcaattaatcagttaaataaggatcatcgttttggtgcagatccagataattttgatttttaa

SEQ ID NO: 6628 - DNA, 813 bp, Enterococcus faecalis
  CDS (1)...(813)
atgtcaattaagttagtcgctattgatatcgacggaacattgctaaattcacaacacatgattaccccacgggtcaaagaagcgctccaaaaagcaaatgagcaaggcgttcgtattggtttatgtacaggccgttctttgccaggcgtgaaagaacaattggatgaattagccttatatggtgaaaatgatttcgtgattacctacaacggttcgcttgtccaagcaaccaaagataatgcgattatttcacgctataccttaagttatgaggattttttagaaattgaaatgtattctcgtaaagtcggcgctcacttgcacacaattgatgattccgctatttacactgccaatcgcaatattggtaaatatacgattcacgaagcatctttagtgaacatgcctttgaaatatcgtacggtggatgaaatgacaccagagatgaacattattaaaatgatgatgattgatgagccggaagttttagatcctgccattgcaaaattaccattacattttaccgaaaaatatacgactgttaaaagtacacctttttactatgaaatcatgaataaaaatgctagcaaaggcaatgctctagcaaaattggcagaccatttaggcttaaataaagacgaagtgatggccattggtgacaatgaaaatgacttatccatgattgattacgctgggattggtgttgcgatgggcaatgcgacagaaaatgttaaaacaattgccgatgtgcataccactagtaatgacgaagatggtgtcgctcaaattattgaaaaaatggttgtaatttaa

SEQ ID NO: 6629 - DNA, 852 bp, Enterococcus faecalis
  CDS (1)...(852)
atgagcacaacttttccccttcacaccgaatcatttatgctccttgattcaggttgtttaacaaacagtgactattttttaccttttgccttgaccgatgttttaactactttttcaggaatgcagcaccaaccaatcattcatttctggcaattggatcaagcaatgattcttggcatgaaagatacccgtgtaccacatctaaaagaaggcatcacttctctgcaagaaaacgattattctgtagtcgttcgcaatgccggcggtttaggggtgattgccgattcgggtattttaaatgtttcacttattttaccaaataattctgaacacaaattaagtatcgatgcggcttatgaattaatgtgggcttggctccgtcagagttttccggagaaagagattgacgcctttgaaattactacatcctattgtcccggtacttatgatttaagtattggcggtcaaaagtttgctgggattgcccaacgacgcgtcaaagacggtattgctgtcatgatttacatcagcgttaacggcaatcaacttgctcgtggagaagtggtgcgagacttttaccttgctggcttacaagaacaatttggtgaaaatggctatccacccgttgatccagcagtgatggcaaatttagaaaccctgattgagactccattaacaatagacgccgtaaaaacccgtttaatcgaagcattacctcaacaatttgaaaaatctattgatccaaacttaaccgaaccaattataacctcagaatggttccaaacaaatttaactgtccagctggaaaaaatggcgcaacgaaacgccttaattaaaggagagatcgtatga

SEQ ID NO: 6630 - DNA, 1611 bp, Enterococcus faecalis
  CDS (1)...(1611)
atgacaaaatacatctttgttacaggtggcgtggtttcttctatcggaaaagggattgtcgcagcatctttaggacgattattaaaaaatcgtggattaaaagtaacgattcaaaaattcgatccatatattaatgtggatccggggacaatgagtccttaccaacatggagaggtttttgtcacagatgatggtgccgaaacagatttggacttaggtcactatgaacgttttattgatattaacttaaataaatactcaaacgtaaccactggaaaaatttattcagaagttttacgtaaagaacgtaaaggggaatacttaggtgcaacagtgcaagttattccacacattaccaatgaaatcaaagaaaaaattatgcgtgcagcgaaaatgacggatgccgatgtgattatcacagaagtaggtggtactgtcggcgacatcgaatcattacctttcctagaagcattgcgtcaaatgaaagctgatatgggtagtgacaacgtaatgtacatccatacaaccttgattccttacttaaaagcggctggtgaaatgaaaactaaaccaacacaacatagtgtcaaagaattaagaagtttagggattcaaccaaatattttagtggtccgtacagaattacctgtttctcaaaacactaaaaacaaattagcacaattctgtgatgttaatccggaagcggtaattgaatctcgtgatgttgaaacattgtactccattccattagcacttcaagcacaaaacatggatcaaattgtttgtgatcatttaaaattggatgcaccggctgcagacatgactgagtggcgtgcattagaagaaaaagttcttaacttgaaaaagaaaacaaaaattgcgctggttggtaaatatgttgaattaccagatgcctatatttctgttgtagaagcattaaaacatgctgggtttgattttgattcagatatcgaaattgattgggttgattcacaagaattaactgctgaaaatgtcgctgaaagaattggttcagcagatggtattttggttcctggtggttttggtgatcgtggaattgaaggaaaaattgaagcgattcgttttgctcgcgaaaatgacgtaccattccttggtatttgtttaggtatgcaaatggcctgtgtagaatttggtcgtaacgttgtgggcttagaagatgctggttctgcagaaactaatcctgacgtgacaaataacattattgatttaatggcagatcaagaaaacatcgagaatttaggtggcacactacgtttaggtttatatccatgtaaattgaaaaaaggaacgaaaactgcggcagcatacggaaatgaagatgttgtccaagaacgtcaccgtcatcgttatgaatttaacaacaaatatcgtcaattatttgaagaaaatggcttagttttctctggagtttcaccagataatcgtttagttgagattgttgaaattcctgaaaaacaattctttgtggcttgtcaattccacccagaattaatttctcgtccaaatcgcccacaacgcttaatcaaaggatttgttggtgcagctttggcaaataaagaaagtaaataa

SEQ ID NO: 6631 - DNA, 2337 bp, Enterococcus faecalis
  CDS (1)...(2337)
atgccaaccgcaaattcaggctcgcgagctgctagacatgcatccaacacctcatcgaagtcgagttacaagaaaaagacacaaccgccgaaaaagaaaaaacggcttgttttaaaaatctttcttggcttacttatcgctgggatggtcgcttttttagcaggcgttggtcttttttggttctatgcacgacaagccccaaaattagaagatgacaaactgaatgcgacagtttcatcgaagctttacgatattaataatgaaatttttgaggatttaggcgcagaaaagcgtgaattaattcaaccaaatgatgtgcctcaattattaaaagatgccattgtttctgtcgaagaccgtcgtttctataaacacattggtgtggatccgattcggattatcggttctgctctttcaaatgtcaaaaatggtggattacaaggcggaagtaccttaacccaacaattaattaaattgtcctacttctctacaaaagaatctgaccaaaccttgaaacggaaagcacaagaagcatggatggctgttcgtttagaacgtgaaaaatcaaaagaagaaattttaacttactacattaacaaagtctacatggcgaatggtttctatggaatggaaacagcggctgaaaattattatggtaaacatttatctgaacttgatttaccacaaacggccctactggcaggaatgccacaagcgccaaactcatacgatccctatacaaaaccagatactgctaaagaacgccgggatgttgtactctacacaatgtacgacaataaaaaaatctcgaaagcagagtacgaaaaagccaaagctaccccaatcgatgaaggcttagtgccattaaaagccagtgatgacaatcgaaaagtcgtagataattacgtcaaagaagtaatcaatgaagtgaaagcaaaaactggtaaaaatgtttacacagacggactagatatctacacaaacttagatatgaatgcccaaaaacaactttacgatattgtcaacagtgatcaatacgttgcgtttccagatgataaaatgcaagtggcttcaaccgttattgatgttgcctctggacaagtccgagcacaaattggtggtcgtcacattcctgatgatgtgcaattaggaaacaatttagctgttaacacccaacgtgatgttggttcaaccgtgaaaccaatcatggattatggtcccgcaattgagaatttaaattattcgacaggtcgcctcatggtggataaaccaacgaaatatcctggtaccgacattgatgtcttcaactctgatttaacatatcaaggcgtcattactatgcgccgtgcgattatgggttctcgtaacacaaccgcggtccagacgtttgatgaagttggtaaagaaaacatcatgcctttcattaaaggactaggaattgactataaaaacttagaagcctcgaatgccatttcaagtaacacaagcgatgtagatggcgataaatatggaatttcctcattgaagttagcagcagcttatgcggctttcgccaataacgggatatacaacaaaccgtattacgtaaacaaagtcgttttcaatgatggaactagcgttgattatcaacctgatggcaaacgtgcaatgaaagactctaccgcctatatgatgacggatatgttaaaagatgttttaaacggcggaacaggatttaacggcgccattccaggcttaatccaagcggccaaaacagggacttctaactatactgatgaagatttagcgcgaatgggcacaacagaaaaaggaattgccccggatagtacctttgttggttatacaacacactatgccgtttctgtttggactggatacaatgatcgaaatacaccaatctatcaagaatactatgggattgcctcggatgtttatcgtgaaataatgagttacttgtctcaaaatgtttcaaacgatgactgggtgcagccagacagtgttgtgcgggtaggtaatgaattatacgtgaaagatgcctatgaggtaccaaatgtacaagttttaccaagtactacctcttcagcaccacagccggaatctagcagtacggtggaatcctcttccacaaaagaagcggaaagttcatcaagttctagttcagaaagtgcgccttcttcctctgaagcgccaccctcaaccgaacaaccggcaagctcttcctcagcagagcaaccggcaacatcggaacaaccacctgaaccatcaagttctagttcacaagaaccgccgcaaccacctgaaagtagttctaaaccagatgaaaataaagcagcataa

SEQ ID NO: 6632 - DNA, 411 bp, Enterococcus faecalis
  CDS (1)...(411)
atggcaaatttagtatatagtcctaaagacattttacaaaaagaatttaaaacgaaaatgatgaacgggtatgacccaattgaagtagacgaatttttagacaatgttattaaagactacgaagcttataataaagaattattaagcttgcaagaagaaaacagccgcttaatggcaaaattagaccaattatcaaaagcccaaccaacgcctcgtgttgctcaagaagtaccaaaaagtgcagcagtgaccaactttgatattttaaaacgtttatcaaacttagagcgtgaagtttttggtaaaaagttagatgaaacaccttcaacacctgtaacgccttccgcaccgtcaatgactgcagaaccagcgaaccatgatgttgataatgcacaaacacgtcaattttaa

SEQ ID NO: 6633 - DNA, 765 bp, Enterococcus faecalis
  CDS (1)...(765)
atgacagaaaatgcacccaaatttaagcaaatttctgcagaaattgaaaagaagattagagacggtctgtatgtaagtgcacaaaaattaccttcagaatatgatttagctaaagaatataactgcagtcgcttgaccatccgtaaagcgattgatgatttgatccgcaaaaatattttggtaaaacgacatggtaaaggtagttatgtgatgtcgcaagcgaaaattcaaagtggtcgcgctggcttacaaggttttactgaggcagccaaagcttacgggaaaaaaagccagacagaagtcatttcctttgaagaagtagtacatcccgctgaaaaaattcgggaggcgctccaagtgggcaaaaatgaggcaatttatgaactgattcgccgccgaatgttagacggcgagccaatgacagttgaaaaaatttatttgccacaggcatacgtacaaggccatacgaagcaagacttcgagggctctcttttctgcttaatcgagaagaacgtcgagattgcttattcgcatcaagaaattgaagcaatcttagttgaagcggaaatttcagaattattgaatgttcctgtgggccaaccacttttacaagtccactctatcacttatgcgcttgatgcaactcctattttatatgatgtctctttatatcgagcagatcggtacacgtttaaaaacacactgacccgctatagcccgtctgaaaacaaccaagtggagctaggaggttcttggaacgaatga

SEQ ID NO: 6634 - DNA, 1365 bp, Enterococcus faecalis
  CDS (1)...(1365)
gtgacgaccgtgcaaaaatttttggattggttagagcgcgtattgacccctttggcaaaagtgataggagaaaataagtatttagtagcgattcgtgatggcttccttttatcaacgcccttgttgattgttggttcggtcttcttattaattgctaattttcctttgccacaatgggatacttggatgtctcatttgcttggtaaagactgggcgacaatgatgtctgttccagctagtgctagttttgatgtaatgactattctggccgttgtcggtattgcctatagtttaggaaaacaattcaatgtggatgcaatgcaagcaggaattatcgcattggtttcattttttattgtaacgccttatcaaacattatttacaccggaaaatagttcaaaggtttatgaagttactagtttacctttaaaatggatgggttccagtggcttgtttttaggaatgattgtcgcattaattgcgactcgtttatttgtggccattgttcgtaaagggtggacaataaaaatgccagaaggagtgccaccaacagttgttaagtcttttgaggccctgattccgagttttttagttgttactctcatgtttttagtcaattggctggctgctttaactccttatggtaatttacaagatgttatttttgaatttctacaaacgcccttattgagtcttggtaataccttaggtgcgatgagcattgcttatttatttttacacttcttttggttctttggcattaacggaggtagcgtggttggcgcagtctttaatcctgttttgcgggcattgtctgttgaaaatttacaagcatttaaagacggtcatgaaattcccaacatcatcactggacaatttcaagatatgtttgcaacatttggtggcgccggttccacactctcattaatcattgtgatggtcttattctgtaaaagtcaacgaattaaaaagctttcgcaactttcactaattcctggtgtttttgggattaacgaaccaatcatttttgggttgccaattgttttaaatccaatccttttaattccatttgtattagtacccgcaattaatattattattgcctattttgctatggattggggcttagttccattgacgaacggtattcaattgccgtggacgaccccaccaattatctcaggatttttagtcagcggttggcaaggatcaattctgcaagctctcttattggtactaggaatgttcatttattatccttttattcgagttatggatgaccaatatttacgtgaagaatggaaagcacaagaagaagagagtgaagaaattgattttgattcctttgacttcgatgatttataa

SEQ ID NO: 6635 - DNA, 3150 bp, Enterococcus faecalis
  CDS (1)...(3150)
atgaaaattagtcaccgtgaggaagcggaagtcgaagaacagttgattcgtgtacttggggaaggacataatcagtggacgtatcgtcccgatctaaaatcagaagaagatctttgggtcaatttacgccaaaaaattatctcaaataatcaagcagaactgaatgattctcctttgaccgataaagaatttgaaacgatcaaaacggaattattgctacggacgaaaaccccctttgatgctgcgaaatggttaaaaggtgaaaatgggatggctcggatcacgattgaacgggaagattcgcaattgggttctgtctcacttatcctttattccaatcaagacattggtggaggaatctctacgtatgaagtggttcatcaaattgcaaaacgtggaagtaacatagaagcacgggatcgacgttttgatgttaccttattaatcaatggattaccgattgtccaaatcgagttgaaacaagtaaccgcaaaagatggcgtctatcaggcgtttaaccaaatcaaaaagtatgcagaagaaggcatgtttcggaacaatatcttttcgaccttgcagttgtttgtagtttccaatgaacaaacgacccggtattttgcaaatgccttaccgaaagacttgcaccctaagtttttatttagttggcgaacgaaagacaatgaaaaagtagaaaacttatatgagttttgtaaacaagtgctaaatatcccggatgcccatcgcttgattgcggattatacgattgtcagtgaagatcaagacaacaaaaccctcatggtgttacatccttatcaagttcatgcgattcaagccttgtttattgccgcaaataaacatcaatcagggtatgtgtggcatgcgactggttcaggaaagacgttgactagttttgtatctactaagcttttagcacgaaaatcggggatcgatcgaacgatcatgttagtggaccgcaaagatttagataatcagaccaccacagagtttacgaaatttgcttcggagtttaatactgggatttcttctggtaatgccaaagcgaatagcttgatcgtgggaacaggaagtgccaaagagttaagtgaaactctgttggcagatgccaatgcaaatgttgtgattattacaacccgtcaaaaactagatgcggcgttgaaatatgcaaagaaacaagaagagaaaaaaggaaccaatcgcttccaaaaattaatgggacaacatatcgtgtttgtagtagatgagtgtcatcgagcgttaagtgctgaaaatatggaagaaatcaaaaaaatgtttccgaagtccacttggtttggctttacaggtacgctgattttccctgagaatcggaaacaagccaaagggcaattggcacgtacgacccatgatcagtatggagaggtcttgcacacctacaccatcaagaatgcattagaagatggctcggttttaggatttcaagtagagcatgaaaataccgttgagccgacttcattagagaataaaatctatcggaaattaaaagaagtagaaacatatgcagagtattcatcagaacagatcaatcgtatgatcgatcaaatggagtcaatcaaaaaagaaagttatttggaccctgctgtttttgaagtagatgagcatatccaaaaagtcatccataaaatgttccgtccagataatgcctatacaaaatttgattttcgaaatggccgtccaacgaaatctgcaatcttaaccacgagttccattgacatggccaaaaagtattatcgggccatcaaagaaatgacaaaagaacctgaatggttaacaaaagagtttcccaatcagcccattcgtgaaggacgaacgatggaggatcctgatttcccaaggatcgctattacctattcattagaagaaaacagccgagattcaagtgtccaacaagaagaaatgcaaaaaattattgaggaatataatcagtattatgatacttcctggtcattagcagacattgagcgttataacggagatatcaataatcgtttggcacgaaaaagagcggaattcaaacaatttgggaaacaaattgatttagtgatcgtagtggatcgtctgttgacaggttttgatgcgcctacgattcaaaccctatttgtggatcgtaatctagagtatgcaggactgatccaagctttttcacgtacgaatcgtacgtatcctgataagacaaaaggattgattgtgacgtttcgtaagccagcgacaatggagaagaatgtcgaggatgcgacaaaactgtattcagaagctaaagaggaatcgggcttgatttgtccaagttatcaagaatccaaaaaaagattcaagcaagcatatggtaagttaaaggaggtttcatccatggaatccattgatgaacatacgccacttgaaatccgtatcgagtacgtcaaagcatttcaagaattgaatcgtgcgtatgaatcgttagtgacttatgacgattacaatgatgacattgtgcaatcttcaactttgaacaatcaaattcaacttttggaagaacaaattggcgtgtacgagaccgtgaaaggttcattgatagaggaagaaccagaaaaagaaggagaagatttttcaacgatcgaattttatagtgaaaatactactaagttgtatgatattgattctacttatattgatcaattactaggaacttatgctgcgaacagttcagatgcacgagatgaaattgaaaaagctttggctaaattgaataaaacagaaggagtcaaagaagtttaccgacaaattttaaatgcatttgatgtggggactttagatagtaatgaagatatctttgtcattaaacgtcgctattttacacaagcgagtgatgatttgattcatgtcttttccaacgagtggtttgtttctgagaaagaattacatgcttctaatctgcaatatatgccaggtgaagatccaattcctaatatgaaagcaattatcaacagtaaggattacgaaggatataaagccaaccatccagaagcgaaaccatttaaatacccacaagaaatgaagcgagcatggcgtaaaatgttagatgatgagctgattccacttgaaaatgaattgaggtaa

SEQ ID NO: 6636 - DNA, 1719 bp, Enterococcus faecalis
  CDS (1)...(1719)
atgaaacagtcaaaaatgttaattccaacgttaagagaagtaccaaatgatgcagaagtcttaagtcatcaaattctgttgcgcgcaggctatattcgtcaagtcgctgcagggatctattcttatttacctttagccaatcgtgttttagaaaaattaaaaacgattatgcgagaagaatttgagaaaattgatgcagttgaaatgttaatgcctgcgttattaccagcagaactttggaaagaatcaggccgttatgaaacttatggacctaacttgtatcgcttaaaagatcgcaatgaccgtgactatatcttaggcccaacgcatgaagaaaccttcacagaattaattcgtgatgaaatcaattcttacaaacgattacctttgaatttataccaaattcaaacaaaatatcgtgatgaaaaacgccctcgttctggcttattaagaggccgtgaatttatcatgaaagatggctattctttccatgccgatgaagctagtttagatcaatcataccgtgattacgaaaaagcttactcacgcatttttgaacgctgtggactagaattccgtgccattattggggacggtggtgccatgggtggtaaagattctaaagaatttatggcgatttctgaaattggggaagatactatttgttattcaacagaaagtgattatgctgccaatttagaaatggcaacaagtctttatacgccgaaaaaatcacatgaaacacaattagatttagaaaaaattgcaacaccagaagtgggtacaattgccgaagtggcaaacttctttgaagttgagccacaacgaattattaaatcagtactatttattgccgatgaagagccagtaatggtcttggttcgtggcgatcatgatgtcaatgatgtcaaattgaaaaacttcttaggcgctgatttcctagatgaagcaacagaagaagatgctcgccgtgtcttaggagctggctttggttcaattggtccagtcaatgtttccgaagatgttaaaatttatgcagatttagctgttcaagatttagccaacgccattgttggagctaacgaagatggctatcatttgacaaatgtaaatccagatcgtgatttccaaccaattagttacgaagatttacgctttgttcaagaaggcgatccttctcctgatggcaatggtgtcttagcctttactaaaggaatcgaaattggtcatatctttaaattaggaacgcgttatagtgatgctatgggcgcaacagttttagatgaaaacggtcgtgaaaaatcagtgatcatgggttgctatggcatcggcgttagtcgtttactttcagcaatcgttgaacaaaatgcagacgagcgcggtattaattggccaacaggaattgcgccatttgatttacacgtggtccaaatgaatgtgaaagatgagtaccaaacaaaactatcacaagaagttgaagcaatgatgaccgaagcgggctacgaagtattagttgatgaccgcaatgagcgcgcaggcgtaaaatttgctgatgctgatttaattggttgtccaatccgtatcacagtcggtaaaaaagcagtcgatggtgtggtagaagtcaaaatcaaacgtactggtgaaatgttggaagtacgcaaagaagaattagaaagtacactttctattttgatgaacacaacatcagaagtggaataa

SEQ ID NO: 6637 - DNA, 4356 bp, Enterococcus faecalis
  CDS (1)...(4356)
gtgacagaaaaagcacgcgatttatttgataaactgatgacgcaaattcagttagatgacacagcgaaagaacatcccttaattcaaaatggccggattgacaaggtcattgttcaccaacaaagtcgcttatgggaatttcatttaagttttgatgaattgatgccagtgatgctatatcaaacatttatgcaacaattggaactagcttttcaacaaattgcgcaggtttccgttcaaataaccacaaatcagacaacatttacagaggaacaattaacggattattggcagttggccttgttaaatagtcaatgcaatacaccgttagttcagaaagtcttaaaaacacagacaccacaatttgaagatcggaaaattatcttacctgttgataatgaagcagttattccttatttgaagcaacaatatttaccaattattgaggaactttatttctcttatgggtttcctaaatttcatattgaaccaaaaatggatcaacagcaagctgcagaagtgttgaaaaagtttgaagagcaaaaattagaacaagccgcagcctttcaacaacaagctgctgaatcgcttgttaaacatgaacaaatgaaaaaagaaaaacaacaacaagcgcctgcgtttgatggtccaattcgtttaggtcggaatattcccaatgatgaacccattatgcccatgggaaatatactggaagaagaacgtcgtataacgattgaaggctttatttttgataaagaagtgcgtgaattgcgttctaaacgaaaaattttaattttgaaaataactgattatacttcctctttcgtggtgaagaaattttcgaatggggaaaaggatgaacaagtttttgatgcgattcaaccgcaaagttggattcgtgttcgtggtagtgtacaagaagataccttcatgcgtgatttagtcatgaatgctcaagatttgatggaagtcgcccatgcgccaagaaaagactacgcgccagaaggtgaaaaacgtgtagaattacacatgcatagtaacatgagtacaatggatgcgaccaataaagtcggtgacttggtggcgcaagcggggaaatgggggcacaaggccatcgcaattacggatcatggcggcgcccaagcgtttcctgatgcccatgctgcaggtaaaaaagcaggcgttaaaattttatacggcgtggaagccaatattgttgatgatggtgtacctattgcttacaacgaagaacatattgaattaacagatgctacctatgtggtctttgacgtggaaacaacggggctttccgctgtttatgatacaattattgaattggccgcagtcaaaatgcacaaaggaaatgtcattgagacttttgagcagtttattgatcctggccatccattatctcaaacgacaattaatttaactgggattacagatgaaatggtgcgcggttcaaaatccgaagaagaagttttacgcatgtttaaagagttttcagaaggaactattttagtggcccacaacgcttcttttgatatggggttcttaaatacaagttatggcaaacatggaatacctgaagcggctaatcccgtcatcgatacattagaattatccagattcttgtatccacatttcaaaagccatcgtctaaataccttatcgaaaaaatttggcgtcaacttagaacaacatcaccgcgccatctatgactcggaatcaacaggtcatttgtgctggattttcttaaaagaagcgaaagagaatcatgatatgcatttccatgatgatttgaatcgtcatattggcgaaggagattcatacaaacgagctcgacctttccatgcaacgattttagcaacaactcaagcaggattaaaaaatctttttaaattgatttcgatgtccaatgtagattattttttccgagtaccacggattcctcgttcgcaattatcgaagttaagagaagggcttttaatcggttccgcatgttcaaacggcgaaatttttgaagcaatgatgcaaaaaggtgtcgaagaagcaaaaaatcgtgccaaattctacgattatattgaagttatgcccaaaccagtttacgcgccattaattgaacaagaattggtgaaaaatgaagcagatttggaagaaattattagtaatctagtgaaaatcggtgacgaacttggcaagctggttgtcgccactggaaatgttcattatttaaatgaagaagatgccatctatcggaaaattttagtcgggtctatgggtggcgctaatccgttaaatcgccatagtttaccaaaggttcatttccgaaccaccgatgaaatgttaacggaattccaatttttaggacaagacgtcgctaagcgaattgtagtagaaaatcccaacaaagtcgctgatttatgtgaagaagttattccagtaaaagacgatttatatacgccaaaaattcctgggtctgaacaagaaatcactgatttaagctacaatcgtgcgcgcgaattgtatggcgatcctttaccagaaattgtcgaaaaacggttagaaaaggaactgaattcgattaacgggaatggtttctcggtcatttatttaatttctcaaaaactggtgcataaaagtaatgaagacggctatttagttggttcacggggctctgtcggttcgagttttgttgcgacaatgacagggattactgaagtaaatcctttagcgccacattattattgtcctgagtgtcaatattctgagttctatgaagatggttcctatggttcagggtttgatatgcctgaaaaagcctgtccaaaatgtggcgctcgattgtttaaagatggtcacgatattccttttgaaacgttcttaggattccatggcgacaaagttcccgatatcgatttgaacttttctggcgattatcaagccgaagcccataactacacgaaagttctttttggtgaagaatatgtctaccgggcaggaaccattggtacagtagccgacaaaacagcgtatggctttgttaaaggatatgaaagagatcataatttacatttgcgtggcgctgaaattgatcgcttagccaaaggttcaacaggggttaaacggacgactgggcagcatcccggcggtattattgttattcctgattacatggatgtttatgattttacgccaatccaataccctgcagatgatcaagaggcagaatggaaaacgacgcactttgatttccattccattcacgataatattttaaaacttgatattctgggacatgatgatccaaccgtgattcggatgttacaagatttatctgggattgagccaaaaaccatcccaacagacgatccagaagtgatgcgtatttttgaaggacctgatgttctaggtgtggatgcagagcaaatttattctaaaacaggaactttaggaattcctgaatttgggacacgtttcgttcgaggtatgttagaacagacccatccatcaacttttgcagaattacttcaaatttctggactgtctcacggaaccgatgtgtggctagggaatgcagaagagttgattcgccgtggcgaagccaatcttgctgaagtaattggttgtcgggatgatatcatggtatatttaattcatgctggtttggacagtgggatggcctttaagattatggaaacggtacgtaaaggacaatggaataagattcctgatgaactacgggatacgtatttaaatgcgatgaaagaaaacaacgtccctgactggtatattgattcttgttctaaaattaaatatatgttcccgaaagcccatgcggcagcatacgtattaatggcgttgcgggtcgcttactttaaagtttatttcccaatcttatattactgtgcgtttttctccgttcgggcggatgacttcgacttagtggcaatgtcacaagggaaagaagctgtgaaagcacgaatgaaagaaattacggacaaagggatggacgcctccactaaagagaaaaacttattaacggttttagaattatgtaatgaaatgctggaacggggctataaatttggcatgattgatttgtacaaatcggatgctgaaaattttgtgattgaaggggataccttgattgcacctttccgagcagtgccaagtttaggcctcaacgtagcgaaagccattgtcgctgcgcgagaagagcaaccgttcttgtcgaaagaagatttggcaacacgaggtaaagtttctaaaacattgattgaatacatgaatgaaaatggtgtcttaaaagacttgccagatgaaaaccaattatcattatttgatatgttataa

SEQ ID NO: 6638 - DNA, 1296 bp, Enterococcus faecalis
  CDS (1)...(1296)
atgattgatcgttatacaagacccgaaatgggcgcaatttggacagatgagaaccgctacaaggcatggttagaagttgaaattttggcggatgaagcttgggcagaacttggcgagattcctaaagaagatgtacaaaaaatccgagaaaatgcatcatttgatgttgcacgtattttagaaattgaagcagaaacacgtcatgatgttgtcgcttttactcgtgccgtttcagaaacgcttggtgaagagcgaaaatgggtacactatgggttaaccagcacagatgttgtggatactgcctatggttatctattgaaacaggcgaatgatattttacggaaagatttacaaacatttacggagattgtcggagccaaagccaaagagtataaacatacggtcatgatgggaagaacgcatggcgttcatgcagaaccgactacatttggtttgaaattagcgttgtggtattctgaaatgaaacgcaacattgaacgttttgaacatgcagccaaaggtgtcgaagcgggtaaaatcagtggagccgtaggtacctttgccaatatttcaccatttgttgaagaatatgtttgcgaacatttggggatccgtgctcaagagatttcgacacaagttttaccacgtgatttacatgcagaatatgtttctgccatggcattaattgcgacaagtattgaaaaatttgcaacagaaattcgtggtctacaaaaatcagaaacacgtgaagtagaagaattttttgcaaaaggacaaaaaggatcttcggcaatgccgcataaacggaatccaattggttctgaaaatatgactggtttggcacgtgtgattcgtggtcatgtcattactgcctttgaaaatgtgagtttatggcatgaacgagatatttctcactcgtctgctgaacggattattattcccgatacgacgattttactaaattacatgttgaatcgttttggtaatattgtcaaaaacttaacggtcttcccagaaaatatgaaacgtaacatggatgcgacctatggtctaatttacagccaacgtgtcttgttaaaattgattgatcatggcatgacacgtgaagaagcgtatgatctggtccaaccaaaaacagcttacgcatgggatcatcaaacggcgttccgtccgttgctagatgcggatgaaaaaattacatctgtcttatcaaaagaagagctagatgatgcctttgattaccattatcatttaaaaaatgttgacacgatttttgaacgtgttggtttaggataa

SEQ ID NO: 6639 - DNA, 1023 bp, Enterococcus faecalis
  CDS (1)...(1023)
atggtacaagaatcggttactgaaaacgaaattgcgcaagtggtcggtcgtttaaccggcattcctgtgacaaaattagttgaaggcgaacgagaaaaattaatgaaactgaatgaaacattacacaaacgtgtgattggtcaagatgaagccgtcgatgctgttagtgatgcggtgattcgttcaagagcaggcttacaagatccaaatcgcccactcggttcgttccttttcctaggaccaactggtgttggtaaaacagaacttgctaaagctttagctgaagatttgtttgattctgaagatcatatggtacggattgacatgagtgaatacatggaaaaacatgccgtgtctcgtttggttggtgcccctccaggctatattggttatgaagaaggtggccagttaacagaagctgttcgtcgaaacccttatacaattgtcttattagacgaaattgaaaaagcgcacccagatgtctttaatatcttattacaagttttagatgatggtcgtttgacagattctaaaggtcgggtcgttgattttaaaaatacagttttaattatgacaagcaacatcggttctcagcttttattggaaggtgtgacacctgaaggaacaattccagaagaagttgaaaatcaagtcatgaatattctaaaaggacactttaaaccagagttcttaaacagaattgatgatactattttatttacaccattaagcttggataatgtgaaaggaatcattggtaaaatgaccgcacaacttgctcatcgtctagagcaacaagaaattgtgttggaaatcactgatgaagctaaaacatggattgctgaaaatgggtatgagccagcttatggagctcgtccgttaaaacgtttcattactcgcgaagtcgaaacaccattagcaaaagaaattgtttctggacgagtaatgccaaaaacaaaagtcacgattagtctattagacaatcaattagtttttgaaaatgaaccaatagaagaagtataa

SEQ ID NO: 6640 - DNA, 1536 bp, Enterococcus faecalis
  CDS (1)...(1536)
atggatgcgtcagaatataaaaattatttattgggactgattttctataaatatttatccgaccgtttgttggaacaagtggttcttttagcagatgaatccttagaggaatatgatacggtaagcaaacaaacgatgttgtatcgcgaattactttcagatgaagaatcaaaagaagatctgattgcaacaatcgttgatattttggggtatgcgatttcgccagagtatcttttcaacgtcttagcggatcaagcaaaacaagcaacgttccaattgaatgatctaaacaaagcctttgtgcaattggcatctacctacaatcaatttaatgggttatttgatgatgtggatctccaatcaaaaaaactaggaacagatgagcaacaacgaaatgtgacgattaccgaagtcattaagaaattgaatgacgtggaagttttaggtcacgatggggacgtgatcggggatgcttatgaatttctgatcagtcaatttgcttcagaagcagggaagaaagccggagaattttacacgcctcatatggtttctgatatgatggcacaaatcgtgacgttggatcaaaaagaacgacgattctttagtgtttttgatccaaccatgggttcaggttcattgatgttaaatgtgcgtaactacttaactcacccagataacgttaaatatcatgggcaagaattaaatacaacgacatacaatctagcaaaaatgaacttgattttacatggggtagatgccgaagaaatgaatctccgcaatggggatacgttgaataaggattggccaacagatgaaccttacacatttgatgcagtagtaatgaacccaccttattcggctaattggtcagcagatacgaccttcttagacgattctcggtttaatcgttatggaaaattagcgccaaaatccaaagcagattttgcgtttcttcttcatggtttctatcatttgaaggaaacagggactatggccatcgtcttgccacacggagttttattccgtggcgctgcagaaggagtcattcgtcaaaaattattagaagatggcagtatttacgccgtgattggtatgcctgcgaacttgttctttggtacgtcgattccaacgacggtgattgtattgaaaaagaaccgccaaaatcgagatgtattattcattgacgctagtcgagaatttgtcaaaggaaaaaatcagaataaattatcggaagaaaacattcaaaaaatcctcgaaaactacgctgaaagaaaagatgtcgagaaatacgctcatttggcaacctttgatgaaatcaaagaaaatgactataacttaaatatcccacgctatgtagatacgtttgaagaagaagaaccaattgatatggttcatgtcggaaatgacatcaagaagatacgacaagaacagcaagtgctagaaaaagaacttttagaagctatctcttccctgcaaacaacacctgaaaatgaagcgtggttacaaggtgcgctggaggtgtttaagcatgagtaa

SEQ ID NO: 6641 - DNA, 513 bp, Enterococcus faecalis
  CDS (1)...(513)
atgggagaagttatgcaaggaaaagaccgtattttattagttcgtcgcttggatgaagcagcgacaaagaaagcaatgaaacccttatttcaaattgaacatgaatgggaattctcacgtgaatcgagcggtacgcaaacaaaagatggcgttgcgaatgctgtttctggtttagaagttacgttatcgttaagcggtttagcctctcgagatgatgaaaatttatacatgaaagacgcagttgaagatggcatcttaatggaattttgggatgttgatttaaaaggtgaaaaaaatgcggaaggtaaatatccagcaatttatgcccaaggttatgtaaattcatggagtttaccagccaatgtagaagaattagtagaaatcgaaacagaagcctctattaatggcaaaccacaagatggttttgcaacagtagaagcagatattattgcagaagcacaatatgcgttccaagataccgttccagataaagcaccacaacctggcgcataa

SEQ ID NO: 6642 - DNA, 1068 bp, Enterococcus faecalis
  CDS (1)...(1068)
atgggaaaagaatatcatgttgccgtggtaggagcaacaggtgctgtcgggacaagaatgattgaattgttagcagaaacaagtttgccaattgccagtgtgaggttattggcgtctaagcgttctgctggacaagagattcagtttaaaggacaacctcttatcgtggaagaattagtcccggaatcatttgaaggaatcgatttagcattatttagtgctggtgggagtatttccgaaaagtttgcgccagaagcagttaagcgcggagctgttgttgttgacaacactagccattttagaatggcaaaagatgttcctttagttgttccagaagtgaacccggaagccttgaaaaatcatcagggaatcatcgcaaatcccaattgttctacgattcaaatgatggtggccttggaaccaattcggcaagcgtttggcttagaacgaatcatcgtttcaacgtatcaagctgtgagtggcgcaggtatccgtgcaattaatgagctaaaagaacaagccgaagattttttagagggaaaacctgtcagtgaatggtcagctgaaattttaccagctggcagtgacgaaaaacattatccaattgcttttaatgcgttgcctcaaattgatgttttttcagaagcagggtatacctacgaagaatggaaaatgatgaatgaaacaaaaaaaatcatgggagacaacaagctaaaagttgttgccacctgtgtccgtattccggtaatttcaggacattctgaatctgtttatatagaagtgaaacaagcagatgcatcggtctcagccatccaagaattaatggcgcaagctccaggtgtaattttgcaagatgagccaagtgaacaactatatccacaagcgctaaatagcgtcaaccagaaagaaacatttgtcggccgtattcgtcaagacgttgacgtgaagaacggtttccatttatggattgtgtcagacaacctattaaaaggagctgcttggaactcggtccaaattgctgaaacgctacacgaaatgaatttgcttcgtgtacctgaaaacgactag

SEQ ID NO: 6643 - DNA, 1830 bp, Enterococcus faecalis
  CDS (1)...(1830)
  misc_feature (1)...(1830): n = A,T,C or G
atgagtaaaattattggtattgacttaggaacaacaaactcagctgtcgcagtgctagaaggcggcgaacganaaattattgcaaacccagaaggtaaccgcacaactccttcggtcgtttcattcaaaaacggtgaaattcaagtgggcgaagtagcaaaacgtcaagctgttacaaatcctaacacgatttcatctattaaacgtcacatgggtgaagctggctacaaagttgatgttgaaggaaaatcatatacaccacaagaagtttctgcaatgatcttacaatatttaaaaggttttgctgaagactatttaggtgaaaaagttgaaaaagcagttattacagttcctgcatatttcaacgatgcgcaacgtcaagcaacaaaagatgctggtaaaattgctggtttagaagtagaacggatcgttaacgaaccaacagcagcagctttagcttatggcttagataaaacagacaaagatgaaaaaattcttgtctttgaccttggtggtggtacattcgacgtgtcaatccttgaattaggcgatggcgttttcgatgtattatcaacagccggtgataacaacctaggtggggatgactttgataataaaatcattgactacatggttgcagaatttaaaaaagaaaatggcattgacttagctaacgataaaatggcgttacaacgtttgaaagatgctgctgaaaaagcgaaaaaagacttatcaggtgtaacaagtacacaaatcagcttgccatttattactgctggcgaagcaggaccattgcacttagaaatgaacttaactcgtgcaaaatttgatgaattaacaagtgatttagttgaacgtacaaaagtaccagtacgtcaagccttgaaagatgctggattaaatccttctgaaatcgacgaagttatcctagttggtggttcaacacgtattccagctgtagttgaagctgttcgcaaagaaacaaacaaagaaccaaacaaatcagttaaccctgacgaagtagtagcaatgggtgctgcaatccaaggtggcgtaatcactggtgatgttaaagacgttgtcttattagacgtaacaccgttgtcattagggattgaaacaatgggtggcgtatttacaaaattaattgatcgtaacactacgattccaacaagtaaatcacaagtcttctcaactgctgctgacaatcaaccagctgttgatattcacgttttacaaggtgaacgtccaatggccgctgataataaaacattaggtcgtttccaattaacagatattcctgcggctcctcgtggtgtgccgcaaattgaagtaagctttgacattgataaaaacgggattgtaaatgttcgtgcgaaagacttaggcactcaaaaagaacaaacaatcacgatcaaatcttcttcaggtttatctgatgatgaaatcgaacgtatggtgaaagatgctgaagcaaacgctgaagcagataaacaacgtaaagaagaagttgacttacgtaacgatgcagatgctttattattcactgttgataaaacattgaaagaattagaaggcaaagtagacgctgaagaagtgaaaaaagcagaagatgcgcgtgatgaattaaaagcagccatcgaagcaaacgatatcgaacaaatgaaagcaaaacgtgattcattgaatgaaatcgtccaaaacttaacagtaaaactttacgaacaagctgcgcaacaacaagcacaagaaaatcctgaagctgcccaaggtggcgctgatgatgttgttgatgctgattttgaagaagtaaatggtgatgacaaataa

SEQ ID NO: 6644 - DNA, 2193 bp, Enterococcus faecalis
  CDS (1)...(2193)
atggcagaagcttataacgaagaagtagtagcgctacttcaaaaagaattgacaacgtatcgttcaaaacaaataacaacggttttaactttattaaatgaaggaaatacagttccttttattgcccgttaccggaaagaaatgactggaagtttagatgaagtccaaatccgtgaaatagaagaacgttatcattatttacaaaacttgaaaaagcggaaagaagaagttctccgtttaattgaagagcaaggaaaactaacaaaagaactcaaaacagatattcaaaaagcagtaaaaatgcaacaagtggaagatttatatcgaccatataaacaaaaacgtcggactaaagcgactatcgcgaaagaaaaagggttggaaccattagcagattggttgctctctttacctgaaaacgcggatatcttagctaaagcggctacttttattaatgaagaaaaagaagttgcaaccgctgaaatagccttgcaaggtgctcatgaaattttagcagaacgtattagcgatgaaccaaaataccgaacatggttacgtgattatatggttaaacatgcgcaatacgttagcgtagttaaggacgaagaaaaagacgaaaagcggacctatgaaatgtattacgattttgcagaaccagttagcaaaatggtgccgcaccgtgtcttagcaacgaatcgtggtgaaaaagaagacattttaaaggtttcccttgtcgctgatgaaacaaaaattaatgattatttccaacgtcaactaatcggcaaacaagcaacaagttttgctgctccatacattgaggctgcttatttagatagctataaacgatttattggaccagcgattgaacgggagatccgcaatgaattaacagaaaaagctgatgaacaagcgattgcaattttcggtgaaaatttacgtaatttattattacagtcaccacttaaaggaaaagttgttctaggatttgacccggcttatcggacaggctgtaaattagcagttgtcgatgaaactggtaaagttttagcaattcaagtgatttatccacataaaccagccactgctgcgaaacgtgaagccgctggtccagcctttaaaaagatcattgaagactatcaagtggacatggtagctattggaaacggaacggcaagtcgtgaatctgaattgtttgtggcagagcaattaaaagcggtgaaacgggacgtcttttacgtgattgttaatgaagcaggggcttccgtttactctgcgagtgaagtggctcgtaaagagtttcctgatttacaagtcgaagaacgaagtgcggtcagcattgcacgtcgtttacaagatccgttggcagaattagtaaaaattgatcccaaagcagtcggggtcggtcaatatcagcatgacgtatcgcaaaaacgtcttgccgagcaattggattttgttgtagaaactgcggtaaaccaagttggtgttgatgtgaatacagcgagtgctcaacttttacaacatatttctggcttaaataaaacaacggcgcaaaacttagtcacttatcgtgatgaaaatggtgtctttacagcacgaaatcaagtcaaaaaagtacctcgtttaggaccaaaagcatttgaacaagcaattggctttttacgaattcctaatggcaaaaatgtgttagataacactggcattcacccagaaagttatccagtagcacaagcaattttagaaaaagcagagattgcttctaaagaattagggacagcagaagctatcgaaaaattgaaacagttaccagtgaatcaattagctactgagttagaagtaggttcagaaacactcacggatattattgctagtttaatccaaccaggtcgtgatatgcgcgatgagatgtcagcaccacttttacgtaaagacgtgttgacgatggaagatttgaaaccaggaatggaaatgcaagggactgttcgaaacgtaattgactttggtgcgtttgtcgatattggtgtgaagcaagatggcttagtccacatttctaagttaagtcctaaatttgttaagcacccaacggatgttgttgcggtgggtgatgtagtcacagtttgggtagaagatgttgacttgaaaaaggggcgtattagtttaaccatgttgcctcgggctgatagaaaagagtaa

SEQ ID NO: 6645 - DNA, 1155 bp, Enterococcus faecalis
  CDS (1)...(1155)
atgaagatgaaaacatttatctttgcagacaagttctttttaaaaagcgatgttaaaggacctggttatttagaaatcacggatggtatctttggtaattatacaaaagatgaaccgcaaggggacgtaaaaattattcgtgaggaaggcaaatggattgccccaggtttagtggatactcatattcatggttacatgaatcatgacgtaatggataacgatgcagaaggcattaaagtgatgtctgaaggcttattatcttgtggtgtaacttcatttttaccaacaacgttaacgtcaagcaaagaacgtttaacagacgttgcacgtacgattggtcaagtctaccaagaagtacctggtgcaaaaattcaagggatttactttgaaggacctttctttactgaagaacataaaggcgcacaaaatccaagttattttggagatccagaccttgatacattccacgaatggcaagaagcttcaggcggaattattaagaaaattgcgttggcaccagaacgtaatggtgtgaaagaatttgttgaaaccgttacagatgaaggtgtcgttgttgctttaggccatagtaatgcgaccttagaagaagctgatgtggcagttgaagcaggcgctagcgtttttgttcatgcatataatgggatgcgtggcttaaatcaccgtgaaccagggatggttggtgcattgttaacgttacaacacgttttctctgaattaatttgtgatggacaccatgtacatccgcaagcggctgaagtattgatggaaaaagcgggccatgatcacgttgcgttaattacagactgcatgatggctggtggtatgccagatggcaactacaatttaggtgaatttcctgttgtggtagcagaaggaacggctcgtttggatactgggaacttagcaggaagtattttaaaactaaaagaagcaattaaaaatgtagttgattggggtattgcaacacctgcacaagcaattatgatggcttcattagttcctgcgatcagctgtaaaattgatgatcaatgtggcatgattgcaaatggtcgcgatgctgactttatcgtattagaaccaaccatggaattagcagccacttatttagatggcgtagaacgttatcgagcataa

SEQ ID NO: 6646 - DNA, 1698 bp, Enterococcus faecalis
  CDS (1)...(1698)
gtgaaaagagtgagtacaataaaaatcgttccattaggcggcgttcgtgaaaatggaaaaaatatgtacgttgctgaagtggaagatgaaatttttgtactggattgtggattacaatatccagagaacgaacttttaggaattgacgttgtcattccggattttacgtatttagaagaaaatagtgaacgaattgcaggggtctttttaacacatggccatgcagatgcaattggggccttaccgtatttgctttcaaaaattcaagtgcctgtttttgggacagaattaacgattgaactagcaaaactaagtgtcaacagtcatgcggaaacgaagaaatttaaagatttccatgtgattgacccgcatacagaaattgattttggtcaagcaacggtgagcttctttaaaacaacgcacaccattccagattcgattggcgttagcatcaaaacaaaagaaggcaacattgtttatactggtgattttaaatttgatcaaagtgcgattgagatgtatcaaaccgattatggccgcttggctgaaattgggaaagaaggcgtcttggcgctacttagtgattcatcaaatgctgaaaacccagcccaagttgcatcggaagcccaaatcgctgatgaagtgttcgacacgattcgctattgggaaggacgaatcatcgtggcatgtgtggcaagtaatttgcaacgggtccaacaagtattgaatgcagcggatcgttctggtcgtaaagtcgttttgacaggccaagattttgaacggattattcggacggcgatgaaattggaaaaattacaattgccaagtgaagatctattagtgaaaccaaaagaaatgaaaaaatatgcacccgaacagttattaattttagaaacaggccggatgggagaaccgattaagtcacttcaaaaaatggctaataatacacatggtgtcgttcgaattgaagaaggcgatttagtttatattacgacaacgccgacaacggccatggaaacaacggttgccaaaacagaggatattgtctatcgggccggtgctacggtgaagcaaatttccgacaatttacgtgtgtctggtcacgctaatccgaatgacttgcaattgatgctgaacttaatgaaaccaaaatatttcattcctgtccaaggtgaataccgccagttagctgcgcatgcggacttagcacacgaaattggcatgccttataaagatatctttattacaggtcgtggggacattctagagtatacaaaaggtagaatgtcggtagctggcagcacaacggccgaaaatattatgattgacgggattggtgtcggcgatattggtaatatcgttttacgggatcgtcgtattctttccgaagatggtatttttgtggctgttgtgacaattaatcgccgagaaaaacgaattgtttcaccagctaaaattacttctagaggttttgtttacgttaaaacaagtaaagacctaatgaaagaaagtagcaatattgttacagaaattgttgaaaagcatttagaaagtgacgatttcgaatggagcaaactgaaacaagaaatccgcgaaaacttaagccgttatttatttgaacaaaccaaacgtcgtcctgtgatcttaccagttatcatggaagcgacgcaacgcaagcgtcccaaaaataatgcatag

SEQ ID NO: 6647 - DNA, 3498 bp, Enterococcus faecalis
  CDS (1)...(3498)
atgaatcctgccatgaacgaattagccttaatgacaaaagagtatcatgcgcggatatatgaacgcatgatgactaatgaagattttttgacagttcgcttaggggttggtgaaatttcttcaagttttacgacaaattatcagtcaacggaagatgattcactaagtcaagaagctgaagaacaattagtatggccatataaacaattagaaaaggcgccgattgttgtaccactaatgggacaaaccttaggattggcgggaacacctgctgttttaaggacagccattcaaacgttgttatttcaagtgtctgttttacattcctatcgtgacgtagagtttgttactttagtaccagaggaagattatcagaaagattggcattcttggcgttggttgccacacgtcaaaatccgcagtctgaatttgcgtgggattgttcatgatcctcaaacaagggatatggttttaaattctttctatcaaatgattacgaaacgtcgtcaacaagtgcgcgaagccggcaatgaaaaagttcactttcaaccacagtacattctgtcgattttagaagaaagctggttgtcagggcatggcttaaatgaatttttagctgaagatatgagtcaatatggtgtgacagttatttggggaaaagatgctttaaatatgttaccagaaacgacaactacactgattgagtatcaaagtagtgaagcggcgactttaattaatcaaaataataaatatgtgaaccaaaacttcgttcctaatcatttaccgactgcttatccgcttgcttatgcgattcagcgcttggcgaatttgcagcatgtggaagtggagaagaatgctattcctgaagcaattgactttttagaattatatgatgtaaaggaaataaaggatttaaatgtaacagaccgttggcaaaaagccgatacttctaagtctttagcagttcctcttggcgttcgtggcaaagatgacattgtttacttgaacttacatgaacgtgcccatggaccgcatggacttgtcgcaggaacgactggctctggtaagtctgaaatcgttcaaagttatatgttgtcattagctgttaattttgctccagaagatgtaggttttttacctattgattttaaaggaggcggaatggctaacttatttgcaaaattacctcatttgttgggttcgatcactaacttagatggagctagttcagctagagcattacaaagtattcgtgcagaattacaaaaacgacaacgaaaatttggagaatacggggttaaccacatcaatggttatacgaaattatataaacaaggaaaagaaattactgacccagaagaaaagaaaaactatccaagtgagcccttaccccatttatttttaatcagtgatgaatttgctgaattaaaagccaatgaaccagattttatggcagaacttgtctctactgcacggattggtcgttcgttaggtgtacatttaattttagcgacacaaaaaccaagcggcgtagtggacgaccaaatctggtcaaactcacggtttaagctggcattaaaagttgctgacgccaatgattccaatgagattattaaaaccccagatgctgctagtattactcaaccgggtcgtgcttatttgcaagtagggaataatgaaatttacgaattattccaatctgcttggagtggtgctaactatgatccattcgctaccaaggaagaaaaagtggatgaaaggatttggtcaattaatcaattaggacaatacgaattattaactgccgacctttccgaagaagaagaggtttctattaaaacggaggaagagttaacacaattagacgcaattgttgaagaaattgccaagcatgcggaagaaagtcaagcaactttaccagagaaaccttggttacctccattagcaacagaaattgtttcaccactttttaaaacgcaatggcaagaacaacgagaactttctgttccttttgattttatggatattccagcaaaacaagaacaagtcaatttcaatttcgatttgcacgaattaaatcatactgccttatatggttcaccggggttcggtaaatcaacagctttgcaaaccctagtaatgaaccttgctcgtaaaaatacaccagaacaagttcaatttaatttgtttgattttggtacaaatgggttgttaccattgaaaaaattaccacacgttgctgatttagtccgtttggaagaagaggaaaaattggttaaattcttaaaacgaattcgtaaagaaattcaagagcgtaaagatgcctttactgaatacggtgttgctagtttaaatcaatacgaagaaaaatcaggacagaaattaccagtgattgttacgattgtagatgggtttgatgcagtcaaagaaagcccattagaagatccaattgaatctgttttaaatcaattgctacgagaaggagcaagtgttggcttgtataccattattacggtcttaagaacaaatagctttaaaatgagtatgacaagtaatatcccaacacatatcggtttgtatttagtagaagaagatgcgattcgtgatgttgttggacgagaagctttgattccacaagaatttatgggacgtgcacaagtgaaattggaacagccgcaagaaattcaaatctatctaccaacagaaggggaaaatgatatcgctcgtttaaaccgtttagaacaagaaattgaaaagatgaaccaaaaatggggcggtgaacgaccactaccaattccaatgttaccgaaaacaatcgctatggcgaatctatacaatcatccacacgctcaacaaatgctggaaaatatggagttccctattacctttgataaagaaacgactaacatagtgggcttcaaaccaacggaacatggttattttgtgattggtgatgatacaccacaacaaaatgaatctgttgaaaaagtgattatcgaagacatgaagcattttagagggcgtgccgaacggattatctttaaccatagtgaccgttttggcggttatgcagatagctttgatacagtgatcgcaggaactgaatatggaagctttgtcaatgaattattacaggaaattgaacaacgacaaatgattagtgagtatgaaccgatgttgatttatattcccgaagcgcaacaatttgtcgaaaaatcctttattagtgctgaaaacctaaatatcctactgaaaaaaggtagccaagtcgcgatgtattttattttccaaaccaatcaaaaattattggaaaacagttttaatgatgccgataaattattacgtgctaatatcccagcgggtatggttggtaccagactcgcagaccaaagctttgttaaaacgaaaagtgattataatgaacctgccgtggaattggatgaatctcatttctttgaaggtcgaacagcaatgcgggtgaagttagtaagtgaataa

SEQ ID NO: 6648 - DNA, 129 bp, Enterococcus faecalis
  CDS (1)...(129)
gtggatcactttcaatttgttccgtttttcccaacgattgagttagttggagaagtcgaatttttatttccagacgttttaagaactgtcgtggcgaactatctgcatgcccactatccaatcaaataa

SEQ ID NO: 6649 - DNA, 1626 bp, Enterococcus faecalis
  CDS (1)...(1626)
atggaaaaacattggtggcaagaagtcgtggtttatcagatttatcctcgcagttttaaggatagcaatggagatggcattggagatttaccaggaattattgaaaaattggattatttggaaacgttaggcattggggctatttggttatcaccagtttatcaatcacccaatgatgacaatggttatgacatttctgattatgaagcgattatgacagagtttgggacgatggcggatatggatcgtctaattgaggaagcgaaaaagcgaaagattgaaattattatggacttagtggttaaccatacgtcagatgaacatcgttggtttattgaagcgaaaaaaagcaaggagaacccctaccgagactattatgtatgggctgatcctgcttcagatggcggtgcgcctaaccgattgaaatctgccttttcgggttcggcgtggacgtttgatgaagcgagtgggcaatactatttgcatttgtttagtaaaaaacaaccagatttaaattgggaaaaccaacaaatgcgtcagtcggtttacgagatgatgaatttttggattgataaaggaattggcggtttccgtttagatgtaattgacttagtgggtaaaattccaggagaagagatcaccgcgaatgggcctcatttacatcgttatttacaagaaatgaacgccgcgacatttggcggcaaagagctgttaactgtaggtgaaacatggggggccacacctgagattgcaaaaatgtactctagtccagagcgtcatgaattatctatgatttttcagtttgaacatatgagcttagatcaacaaccaggtaaagaaaaatgggaccttcagccaatggaagttgccaagttgaaacaggtttttgcaaaatggcaaacagaattaggaaatgatggctggaattctttgttttggaataaccatgatttaccgagaatgatttcacgttggggaaatgatcaggaatattggttggaaagtagtaagttattcgctattttactgcacatgatgaaaggcacaccttatatttatcaaggggaagaaattggtatgaccaatacgccgattacagatattcgtgaagcgcgggacatcgaaacgattaacatgtaccatgagtatctagaaaaaggatattctaaagaagaaattttgctgaaaattaatactaaaggtcgtgataatgcacgccggcctatgcagtggaccgctgaaaaaaatgctggctttacgacgggtacaccttggattgatgttaatcccaattatcaaacgattaacgtcgctgctgctttggcagataaaaattcactattctatacgtaccaagaaatgattcgtttgagaaaagaacatcctttaattgtttggggcaactttgaattgctagaaacagtggacgaagtgatcagtttttatcgtacctatggtgaggaacgctggcttgttgtaacgaacttttctgacaaagttcagccattttctgcagacgttcatgtagaacaagtaatgattgaaaatatgccgacagatgtcactgctttagcagactattcgttagcgccttggcaagcatttgttgtgaaagtgagtcaataa

SEQ ID NO: 6650 - DNA, 870 bp, Enterococcus faecalis
  CDS (1)...(870)
atgccagtagtatcaggagcagaattcttaaaagcagcacgtaaaggcggttatgcagtaggtggctataacacaaataacttagaatggacacaagcgattttagaagcagcagaagctaaaaaagcaccagttttaatccaaacatcaatgggcgctgctaaatacatgggcggctacaaagtagctaaagacatgattactaatttagtagactcaatgaatatcacagttccagtagcaattcacttagaccacggtgactacgaagctgctttagaatgtatcgaagttggctatacttcaatcatgtttgatggttctcacttaccattcgaagaaaacttaagattagcgaaagatgtagttgaaaaagctcacgctaaaggtatatctgttgaatgtgaagttggttcaatcggtggtgaagaagacggaatcatcggtactggcgaattagctgatatcgaagaatgtaaacaaatggttgctacaggtattgactacttagcatgtggtatcggtaacatccatggtcaatatccagaaaactggaaaggtttagcatttgatcacttacaagcaattgctgaagctgtcggttctgatgtacctctagtattacacggaggttctggtattcctcaagaacaaattgaaaaagcaatttcaatgggtatctcaaaagttaacgtaaatacagaattccaattatcattcgctaaagcaacgcgcgaatatattgaagctggtaaagatttagaaggtaaaggatttgaccctcgtaaattattagcaccaggtaaagctgcaatcatcaaagatgcagaagaacacattgattggttcggttcagctaacaaagcttaa

SEQ ID NO: 6651 - DNA, 705 bp, Enterococcus faecalis
  CDS (1)...(705)
gtgaagaaaattttagtagttgatgacgagaagccaatttcagagatcgttaaatataatttggttaaagaaggatatgaagtatttactgcttatgatggagaagaagcacttgaaaaagtggaagaagtggaaccagacttaattattttagacttaatgctccctaaaatggatggcttagaagtcgcgcgagaagtgcgcaaaacacatgatatgccaatcattatggtgactgccaaagattctgaaattgataaggttttaggattggaattaggagccgatgactatgtaacgaaaccattttcaaatcgtgaattagttgctcgtgtaaaagccaatttacggcgaggtgcaaccaatgcgaaagaagctgaggtgacaacacaatctgaattaacgattggtgatttaaccattcatcctgatgcatacatggtctcaaaacggggtgaaaaaattgaattaacccaccgtgaatttgagttactttattacttagcaaaacatatcggacaagtgatgactcgtgaacatttgttacaaaccgtttggggttatgattattttggtgatgtgcggacagtggacgtaaccgtgcgtcgtttaagagaaaaaattgaagatagtccaagtcatccaacgtatttggttactcgtcgtggggttggttattatctaagaaatcctgaacaggagtaa

SEQ ID NO: 6652 - DNA, 1830 bp, Enterococcus faecalis
  CDS (1)...(1830)
atgaagaaaaaagttcacttttttcaatctgttaattttaagattgcgttatcatttattctgctgttactgattgcgattcaaatcattggtggctatttcattcgtgaattggaagccactacaatttccgattttaaaaaaaatatggattcccaagttgtccaattgtcaaatacgttaagcacgcagatgagcaacaaagatctcgaacgtagtgacgttgatgcaaatttaaaaaaagcgttatctgatttttcaaatgcagatatttctgaagcgagaattgtcgatgataaagggattattcgggcaaccaatgatttaaatcaacaaaatattattgggaaaaagaatgattatcgtgatttaaatgactttacgagtaaaaaatatcaagctttagataatgataaacgcgtgtatgtgaatgtccagccgattcaatcgcctactggagaaacagtgattggcgtcctttatgtgaaaagtaatttagaaaataaataccaagaaattaccaacacagcaagtatctttttcactgcttctattattgccgcagcaatctcgattattgtgaccttactgattgcacgatcaatcacgaagccgattggggaaatgcgcgagcaagccattcgaatcgctcgtggtgattacgctggaaaagtagaagtccatggaaaagatgaattaggccaattagcagaaacatttaatcaattatcagaacggattgaagaagcacaagaaacaatggaagcagaaagaaatcgtttagatagtgtcttaacgcatatgacagatggtgtcattgcgacggatcgccgcggaaaggtgattacgattaatgaaatggccctttcattattaaatgtaaaaaatgaaaatgtgattgggacctcgttattagagttgttagatattgaagaagattacacattgcggaagctgttagaagagccagatgaactgctgattgatcgctcaacgtctgatcgtgaagaagaccaaatgattatccgggtagactttacgatgattcgtcgggaatcaggatttattactggcttagtttgcgtacttcatgacgtcacagaacaggaaaaaaacgaacgggaaagacgggaatttgtttccaatgtttctcatgagttgcgaacgcctttgacaagtatgcgtagttatatagaggctttgagtgaaggagcttgggaaaaccctgagattgcgccgaacttcttaaaagtcacgttagaagaaaccgaccggatgattcgtatgattaatgatttgttgaatttatctcggatggactctgggaatacacatcttcaattagagtatgtgaattttaacgaattgattaattttgtcttggatcgctttgatatgatgattgaaaatgagcaaaaaaattacaaaattcgccgtgaatttactaaacgcgatttatgggtagagttagatacagacaaagtaattcaggttttagacaacattttgaacaatgcgattaagtattcgccagatggcggcgtcattacctgccgactagttgaaacacataataatgtcgtctttagtatctcggaccaaggtttgggcatccctaaaaaagatctcgggaaagtcttcgagcgtttttatcgtgtggataaagcacgtgcgcgagcacaaggtgggactggtttaggtttagcaatttctaaagaagtaattcgggcccataacgggagtatttgggtggaaagtacagaaggtgaaggatcgactttctatatttcactaccatatgaaccttatgaagaggattggtgggaatga

SEQ ID NO: 6653 - DNA, 1293 bp, Enterococcus faecalis
  CDS (1)...(1293)
atgaaaaaaatcgtaatcaataagaatcgtccattaaaaggcgaagtaaccattagcggcgctaaaaatagtgtggtcgctttaattccagctgctattttagcagattcgcccgtgactttagatggcgttcctgacattcaggatgttcactcattaattgaaattttagaaattatgggtgctaaaattacttttgaaaataatacattaattattgacccaacagaagttgtttctgtgccaatgccaaaaggaaaaatcaatagcttacgtgcatcctattattttatgggctcacttcttggtcgatttggggaaggcgttgtcggcttacctggcggttgttacttaggccctcgtccaattgatttacatatcaaaggatttgaagcattaggcgctcatgtaaccaacgaacatggggcgatgtacttgagaacagacgaagctggcttacaaggaacacgaatttttatggatatggtatctattggcgctacaatcaatgtcatgttagccgcagttaaagccaaaggcaaaacgattattgaaaatgctgcgcgtgagccagaaattattgatattgctacattattaaataacatgggtgcaaaagtccgaggagctggaacggacgttattcggattgaaggtgtcgaagaattacatggttgtcgtcactcgattattccagatcgaattgaagctgggacttatttagctatggcagcagctatgggtgaaggaatcaaagttcgaaatgttatttatgagcatttagaaagcttcattgcgaaattgcaagaaatgggcgttaagatgacaattgaagaagacatgattgaagttcatccgtcacatgatctgaaaatgacgacggtgaaaacctatccgtatcctggttttgccacagacttgcaacaaccgttaacgccattacttttaaaagcgcaaggaactggtgaaattattgatacgatttatgctcaacgaaataagcatatccctgagttggtgcggatgggggctgatgcttcggttgaaggcaatatgattatcttaaatggcccaaatcaattgcacggtgcagaagtagtcgcctctgatttacgggcaggcgcttgcctagtcactgccggcttgatggctgaaggtacgaccacgatttataatgtagaatatattttacgtgggtacgaccacattatcgaaaagttaactgctttgggtgctgatattcaaatgctagaaaccgaagaacaagaaggtccgtttgaggtggatcaatga

SEQ ID NO: 6654 - DNA, 285 bp, Enterococcus faecalis
  CDS (1)...(285)
gtgaggtgtagtaaaatgggttttacagacgaaacagtacgctttgattttgatgataatcgaaaaaaagcaatcagtgaaacgttagaaaccgtatatcgggcattagaagaaaagggatacaatcctattaaccaaatagtagggtatttactttctggggacccggcttacattcctcgttatcaagatgctcgaaacttaattcgtcgtcatgaacgtgatgaaatcatggaagaattaaccaaatattacttagcgaaccacggaatcgatatcaaatga

SEQ ID NO: 6655 - DNA, 423 bp, Enterococcus faecalis
  CDS (1)...(423)
atgaggatcatggggctagatgtaggttcacggacagtcggtgtggctgttagtgatttattaggttggacagcacaaggcatcgaaattattcgcatcaatgaagaggaagagaacttcggttttgagcgattaggtgaattggtgaaagaatacgaagtcacgaaatttgtcgtaggtttaccgaaaaacatgaataattccatcggtcctagagctgaagcatccatggcatatggtgataagattcaagaattatttcaattacctgttgactatcaagatgaacgattaacaactgtccaagcagagcgtttcttggtggagcaagcagatgcttcaagagccaaaagaaaaaaagtgattgataaactagcggcagtaatgattctacaaaattatttagatgcacatagccgataa

SEQ ID NO: 6656 - DNA, 360 bp, Enterococcus faecalis
  CDS (1)...(360)
atgcacatagccgataattatcgagctttgaatacatcaagggagagaagaagaatgacagaacataaccacgatcatgatcacgaaggacatgaacacattactttagtagacgaacaaggaaatgaaacattatacgagatcttactaactgttgacggtcaagaagaattcggtaaaaattatgttttattatatccagcaggaattcctgaggatgaagatgttgaattgcaagcttactcctatgtggaaaacgcagaaggtacagaaggcgatttacagcaaatcgaaacagacgctgaatgggatatgattgaagaagttttcaatacattcatggctgaagaagaagagtaa

SEQ ID NO: 6657 - DNA, 1044 bp, Enterococcus faecalis
  CDS (1)...(1044)
atgagcgactatttaacaatggctgaattggaaaacagtacgttaaaagatatttatgcgtacgcgaaagagtttaaaattccttattatagccaaatgaacaaaaaagaattgtctttagctgtgattcgtgcacaagctgagaagcaagggtttttcttcatggaaggaattttagatattgtttctcaggatggttatggttttttgcggccaattaattatggaccaagtgcagaagacatttatatttcttcttctcaaattcgtcgtttcggattgagaaatggggacaaagtagctggcaaggcgcgtccgccaaaggaatcagaacgttactatggactcatgcatgttgaaagtgtcaatgggaaagatcctgaagaagcgaaagagcggccacattttccagcgctaacaccgttgtatcctgaaaaacaattaacgttagaaacaacggctggcagattatcaacacgaatgattgatgtatttgccccaattggttttgggcaacgtggtttaattgtagcgccgccaaaagccgggaaaacaagtgttttaaaggaaattgctaatgggattacagaaaatcatcctgatgtggaattgattctgttgttaattgacgagcgtcctgaagaagtgactgatttagagcgaagcgttaaaggcgatgtggtttcttcaacttttgatcaacaaccacaaaatcatacgcgagttgctgaattggttttggatcgagcaatgcgcttagttgaagacaaacgggacgtagttattttaatggacagcatcactcgtttagcaagggcctataatttagtggtcccgcctagtggtcgaaccttaagtggcggaatagatccagctgcgtttttcaaacctaaacgattttttggtgctgccagaaatatcgaagaagggggcagtctgactattttagccacggcattggtggatacaggtagccgaatggatgatgtcatctatgaagaattcaaaggcacaggcaaatatggagctccatttatctcgtga

SEQ ID NO: 6658 - DNA, 936 bp, Enterococcus faecalis
  CDS (1)...(936)
gtgataaattattggaggaaaaatatgtcaaaagggaagaaaatttttgccattatctttggaattatcttggttctatttcttgcagttgttggaatgggagcaaaactttattgggatgtttctaaatcaatggataaaacctatgaaacagtagaacgatctaaaaaaagtcaggtcaatttaaacaataaggagcctttttctgttttattattagggatcgatacaggcgatgatgggcgtgtcgagcaaggtcgttcggatacaacaattgttgcaacagttaatcctcgtgacaagcaaacaaccttagtcagtcttgctcgcgatacctatgttgatattccaggtcaaggaaaacaagataaattgaatcacgcctatgcttttggtggcgcatctttagcaatggacacagttgaaaactatttaaacatacctattaatcattatgtttcaattaatatggctggtttaaaagaattagtcaacgcggttggcggaatcgaagtgaacaataatctgactttttctcaagacgggtatgattttacgattggtaaaatttcattggatggtgaacaagcactctcctattcaagaatgcgttacgaagatcctaatggtgactacggccgccaagaacgtcaaagaaaagtgattgaaggcatcgtccaaaaagtcttaagtcttaatagcgtgagcaactatcaagaaattttaacagctgtttctgataatatgaagacagatttaagttttgatgacatgaaaaaaattgccttagattatcgcagtgcctttggtaaagtgaaacaagaccaacttcaaggtactggttttatgcaagatggtgtttcctatcaacgtgtggatgaacaagaattaactcgtgtccaacaagagttgaaaaatcaattgaatacaaaataa

SEQ ID NO: 6659 - DNA, 1653 bp, Enterococcus faecalis
  CDS (1)...(1653)
gtgagtaaaaaaggatcagatatcatagtagaaagtttaatcaatcacgaagtgccctatatttttgggattcccggtgcaaaaattgatggagtttttgatgcattagttgacaaaggtccagaattaattttagctcgacatgaacaaaatgcagcctttatggcacaagggattggtcgtttgacgggagagcctggcttagttattgcaactagtggacctggtgccagcaatttagcaactgggttagtaactgcgactgcagaaggggaccctgttttagcattggctggacaggtgaaacggtccgatttgtcaaaattaactcaccaaagcatgaataatgctgcattatttagtccaataacaaaattcagtacagaaattcaagatccagaaacattatctgaaaatattgccaatgcttaccgtatcgccaaaacagcgaaaaaaggcgcaacattcttatcgatcccacaagatgtcacagatagtccggtgacaggcgaagcgattaagcctttgtcggctccgaaactgggccatgcatcagcagaaacaatcgcagctttagctgaacgaatcaagcaagcgaaattacctgttttacttttaggaatgcgggcctctgcacgaaaagttaccgcagccattcgtgaattggttgctataactggtttgccagtcgtggaaacgttccaaggagcaggcattatttcaaaagaattagaagaacatttctttgggcgtgttggtttatttcgaaaccaacctggggaccgtttgttaaaaagaagtgatttagtgattgcgattggttatgacccaattgaatatgaggcacgtaattggaacgcagaaaaagatgcgcgcgttattgttattgatgaagttcaaatggaaattgatcaatatatgcaaccggaagaagagctaattggtgatatgtctaaaaatattttgaaattatcagaagcatttagtgaaccaatattaacagaagatgcgcaagattatttagaaacgcttcaagaaaaattaacgattaaagaagtaaaaacaagtacaattgaaaatcgattacatccattagaaattgttcaaacgcttcaagaaaaaaccacgaatgaaatgacagttactgttgatgtagggagccactacatttggatggctcgccactttagaagttatgaaccgcgtcatttattatttagtaacggtatgcaaacattaggtgtcgctttgccttgggcaatctcagctgcactagttcgtccaaatacacaaattatctctgtttctggggacggcggtttcctattttcagcgcaagaattagaaacagcggttcggttaaagcaaaatatcgtgcatattatttggaatgatggtagttatgatatggttaaattccaagaagaaatgaaatataatcgatcctctggcgtagattttggtccagttgattttgtgaaatatgctgaagcttttggagccaaaggggttcgagtacattcacaagcagaatttgccgcagctttagaagaaggaatgcaaacagaaggctcagtgattattgatgttcctgtggattattcagataatcaagaattaggtaaaacattgttaccagatcaactttattag

SEQ ID NO: 6660 - DNA, 705 bp, Enterococcus faecalis
  CDS (1)...(705)
atgagcgaacaatatgtttatcaacatggtacgctaggcggtttaatggaaagtttgatggcaggaacggcagaaattggtacgttactcacgcaaggtgattttggaattgggacattagaaggctcaaatggcgaaattattttattggacggtacattgtatcatgcaaatcaaactggcgaaattactattctagaaggcgaagaattaacgccatatgccgcagttactcgttttcaagaagatggcgcattccctgtatcaacggaaaccgatgaaaatattaaagcacaaattttagaaaaaattagtcctaatttttttgcggcaattaaaattagcggtctttttgcgaagatgcatgtccgtgtggcacctaaacaagaaaaaccatatccaccatttgtagaagcagcacgcaatcaacctgaatttacagcggagaatattcagggaacagttgtagggttctttacacctaaattatttcatggtgcctctgccgcagggtttcatttgcactttatcagtgaggatcaccaatttggtgggcacattcttgattttggcattaaacaagggactgtttcgtggatggaaacagcagaattgcgacagcattttccagttcatgatgctgattatcggaataaagaaattgatattgcaaaagctttgtccgcaattgaagaagcggaataa

SEQ ID NO: 6661 - DNA, 270 bp, Enterococcus faecalis
  CDS (1)...(270)
atgaaacaagatatccatccaaattaccaaccagtagtattcatggattcaacaacaggtttcaaattcctttcaggttcaactaaaggatcttcagaaactgttgaatgggaagatggcaacacttatccattattacgtgttgaggttacttcagactcacacccattctacactggtcgtcaaaaattcacacaagccgacggacgtgtggaccgtttcaacaaaaaatacggtctcaaagacgaaaacgcaaatccagacgcatag

SEQ ID NO: 6662 - DNA, 1440 bp, Enterococcus faecalis
  CDS (1)...(1440)
atgacaatggaacatcaccaactaagagcatttccgcaagattttttatggggctctgcttcggccgcttatcaagtagaaggtgcttggaatgaagatggcaaaggcgcatctgtttgggatgaatttgttcggctaccaggaaaaacgttcaaagagacaactggtgatttagccgtcgatcattatcatcgtttcaaagaagatgtggctttaatgaaacaacaaggtttaaaagcatatcgtttctcgattgcatggacacgaattttacctgaagggcgtggtcaagtaaatcaagcgggactgaaattttattcagatttaattgatgagttattagcggcaggaattgaaccaatggtaactttatatcattgggatttgccagctgttttgcaaaaagaatatggtggctgggaatcaagaaaaattattgctgattttgtggcctatgcgaaaattttatttgacgctttccgtggcaaagttcgctattggattagtttaaacgaacaaaatgtgtttacttcgttaggttatcaattagccgtgcatcctcccggcgtaacagacaataaacggatgtatgaggccaatcatattgctaatttagccaatgcagcagtgattaatgcgtttcatgaattagaaatgcctggcaaaattggccctagctttgcttatacgcctgtttatgccgttgatgcgcatcctgccaatgttttagcggctgaaaatgcagaagatttgctgtcgcatttttggttagatgtctatctttggggagaatacccaattgccgcattaaattacttaaaggagcaaggtgtggccccaacgataaaagagggcgatttagcgttactacgttcagccaaacctgattttctaggtattaattattatcggacggatacggttgctgctaatccattagatggcgttggaatagggaagatgaatacaacgggtgaaaaggggtctgaaacggaatctggggtaccgggtttatttaaaaaagtaaataatccatatgttgaacgaacgaactgggattgggccattgacccgcaaggtttgagaattgccttacgacgattagctagtcgctatcaagtccctattttaattactgaaaatgggttaggcgaatatgataccttaacagaagataaacaaattcatgatacgtatcgtattgattatttgcgaagccatatccaagcgattcaagaggcgattacggatggcgtttcagttattggttattgtacatggagttacaccgatttactgtcgtggctcaacggctatcaaaagcgttatggttttgtctatgtggatcaagatgaaacacaaaaaggttccttagaaagaatcccgaaagacagttattattggtatcaaaaagtcattgaaacaaatggacttatctaa

SEQ ID NO: 6663 - DNA, 1713 bp, Enterococcus faecalis
  CDS (1)...(1713)
atgtcatttgatggcgtatttactcatagcatggttcatgagttgacagaaacactcgtaagtggccggatttcaaaaatccatcagccttatgaaaacgaagtcgttttagtcattcgtgcgaaaggtaaaaaccataaattattattatcagcacatcctagttatgcgcgcatacaactatctacaattacctatagcaatccggaaacacctcctaattttgtgatgatgttacgaaaatttctggacggtgccattttagaaacgattcaacaaatagaaaatgatcgcgtgattcacttcaccttttcaaaaagagatgaactaggtgacttacaaaatattgttttgattgttgaattaatgggacgtcacagtacaatcgttttagttaaccaatcttctggaaaaatcttagatgcgataaaacacattggaatgagccaaaatagttatcgttcgttgcttcctggagcaacttatattgaaccgccaaaaccaatggggcttaatccgctcacggccgcaaaagaagaagtctttgcgcttctttctacagctcctgaattaaacggacgctatttacaacaacatttccaaggtctaggcaaagatacagcagacgaattaagtgcccgtttacttgcacaaccaaatgaaaaaatggccatctggacggaattttggtcctcagtcactgaagctgttgtaccgacattaacagttactgaaaaaaaagaatattttacgcccattccttatcaatcattagttggtgaacaaacaacgtatgcgacactcagtgaattactagatgccttttattctggtaaagcagagaaagaccgtgtcaaacaacaaggcggcgaactaattcgcaaaattgaaaatgaactaaaaagaaatcaaaagaaacttaaaaaattacaacaaaccttagccgatacagaaaacgctgaaaattaccgtcgcgacggagaactattaacaaccttcatggcacaagtcccaaaaggagccaccgaggtggaattaccaaattattatgaagaaaatgcaccgttgcgtatctcgctaaatcctgcactttcacctaatcaaaatgcacaaaaatattttcaaaaatatcaaaaattgaaaaatgctgtccgagttgttaagacacaaattcagcaaacgcaacaagaaatttcttatttagagtcagttgtggcacaacttgaaattgcgacaccaatggacattgaagtgattcgtgaagaactgattgagcaaggctatttaaaacgtaaaaaaaataaaaaacaaaaacagccgaaaaaaagccaacccgatcttttttatgccacagatagcacacctattctcgttggaaaaaacaatttgcaaaatgatcaattgactttacgaaccgctaaaaaaactgattattggctccatgccaaagatattcctggatctcatgtaattattcgtgacgcacatcctagcgaagaaacccttactgaagccgcacttctagcagcttatttttcaaaatatcgactttcttcacaagtgcctgtcgactatgtccaagtaaaacatgtgcacaaacccaatggagcaaaaccaggttatgtgatttatgaaaaccaacgaacgttatatgtgacgccaacagaagaatcgatcaaaaaaatccagcaaaataaggcttctgcttcctaa

SEQ ID NO: 6664 - DNA, 1182 bp, Enterococcus faecalis
  CDS (1)...(1182)
gtgtacagaatgaaacttcaagtaactaaaaaagcagaacataaatttaaaaaaggatatcctttaattcagaaagaagatttgcaacaagtgccagcgccgttgccaacagattggcttactttgattgatagtaaaggccagcgtttagccgaaggatatttaggcgaacaaaataaaggaattggttggttgctgtcatggcatggaccaattaatcaatctttttttcagcaactttttgaaataagtcgtgagaagcggacgtcttttgaaaaggattcgctgacaaccgcttatcgattatttaatggagaaggggatggcattgggggagtgatcatcgatcgctatgcagattacgccgttttttcatggtataatgaaaccctttatcagaaaaaagccgaacttttgacggcgtttcgcacagtttaccctgacattattggtgcctacgaaaagattcgcttttccacaaaagatttaccagaatcacagtttttgtatggcgaacaagcacccgagccattacttgtcactgaaaatggcgttcaatttgctacctatttaaacgaaggattaatgacaggcatctttttagatcaaaaagaagttcgtggtcgattagtagatggttttgcagtaggtaaaacagtcttaaatatgtttagttatacaggtgctttttcagtagctgccgctatgggaggtgccgtggccaccactagtgtggatttagctacacgaagcttaccgaaaacgactgagcaatttgaagtcaatcatttaaatcttgccccgcaaaagattattgttatggatgtttttgactattttaaatatgcttcacgtaaaggcttgagttatgacatgatcattttggatccgccaagttttgctcgcaacaaaaagaaagttttttccgttgctaaaaattatggggagctagtgaaagattctattgatattttatcggataagggaacgcttattgcctcaaccaatgcggcaaatttatccttagccaaatatcaaaaaatggtgattactgccttgcaagagaaaaatgtccgttacaagattacggacacgtatcaattaccggcagactttcaagtgaatcctaattttccagaaggtaattacttaaaagtcctgtttatcgaaattgaaaaataa

SEQ ID NO: 6665 - DNA, 249 bp, Enterococcus faecalis
  CDS (1)...(249)
atggcagatttaaaaggacgttttgacgatgcaaaagataaagtagaaggtactgcaaaagaagcgcaaggcaaagttacggatgataaaggcaaagaacttgaaggaaaagctcaatcaacctttgctgacgtaaaagacaaagcacgtgatgccggcgacgaccttaaagaaggcgctgaaaaattaactgataaagttaaagaaggctttgaagacttaaaagacaaatttagtaaagataaataa

SEQ ID NO: 6666 - DNA, 1200 bp, Enterococcus faecalis
  CDS (1)...(1200)
atgagcaaagaaatgttaaatgcattagacgtattagaagctgaaaaagggattcctaaagatacggtgattgaagcgttacaagcagctttagtttctgcatataaaagacattatggacaagcaagcaacgtcgaagttgaatttgaaccaaaaaaaggcaatattcacgtgtatgctgtcaaagaagtaacagaagaagtatttgattcacaattggaagtttcattaaaagatgccgttgcattaaatggtgcatatgaaatcggcgacaaaattcgttttgaagttacgccaaaagactttggccgcattgctgcccaaacagcaaagcaagtaattttacaacgtgtccgtgaagcagaaagaacaattatttataatgaatttagcgaatacgaaaatgacatcatgcaaggaattgttgaacgtcaagatcgtcgttatatctatgtaaacttaggcaaaatcgaagcagtcttatcaaaacaagatcaaatgccaaatgaattttaccaaccgcatgatcggattaaagtttacgtatcacgtgttgaaaacacatcaaaaggcccacaagtttttgtaagccgtagccatccagatttactaaaacgtctttttgaacaagaaattccagaagtttatgatggaattgttgaaatcgtaagtgtcgctcgtgaagctggcgatcgttcaaaagtagctgttcgttcaacagatcctaatattgatccagtgggtacctgtgtcggtccaaaaggccaacgtgtccaagcgattgtgaatgaattaaaaggcgaaaatatggatattgtggaatggaacgaagatccagctatttatattagtaatgccttgaatccagctcaagtattagatgttatttttgatccagaaaatagcaaagcatgtacagttgttgtacctgattatcaattgtcattagcaattggtaaacgtggtcaaaatgcgcgcttagctgctaaattaacgggccataaaattgatatcaaatcagaatctgatatggctgaattttatgaacaacaagccaatcaagaagttgccgaagtggcagaagaaatggatgaagcaattatccattcagatatgacggcagatgattacgaaaacttggctgctgaagaagcagttgttgaagcagaaattacagaagaattacctgaacaagaataa

SEQ ID NO: 6667 - DNA, 2397 bp, Enterococcus faecalis
  CDS (1)...(2397)
atgggaaaaaaaagaatttatgaactagcaaaagaaatgaataaagcaagcaaagacgttgtcgataaagcgcatcaattaggtatggatgttaaaaaccatatgggcgcaattagttccgagcaagaaacaaagcttcgtcaagcattcggaggaggaagtaccgtaaatactcaatcaaaagcaacaaacaaccaaaagcaacaaacaacacaaaataaaccagccaataagaaaccaatgaacaataaacctggtgaacaaagaaataaccaaaatcgtccaaacaatcaatcaacgaatggacaacaaagaaacaacaacaaccaaaatcgtcacggccaaagcaacacacaaaaccgtagcaatcaaacaaatacaaacaatcaaaaccgcaatacccaaaacaataacggttctacaacgaatcaaaatcggaccagccaaaataacaatggcgggaacaaccaaaaccgtggcggccaaaaccgtaacaacaattttggtggcggtcaaaatcgtaataaccggaataactttaataaccaaaaccgcaatcgtttcaacaaaaaagggaaaaaaggcaaacatcaacaagaatcagcgaagccagcagtaccagcacgtaaattccgtgaattaccagatgttttagaatatacagaaggtatgaacgtggcagatattgcgaaaaaaatccaccgcgaaccagcggaaatcatcaaaaaattatttatgatgggtgtcatggttaaccaaaaccaagccttagataaagatacaattgaattattagctgtggactatggcatggaaccgcaagaaaaagtccaagttgatattgcggacattgataaattcttcgaaccggaagcagttgttgaagaaaacttaactacacgtccccctgttgtcacaatcatgggacacgtagaccacgggaaaacgacattattagatacattgcgccattctcgtgtgacttcaggtgaagcgggcggtatcacgcagcatattggtgcctatcagttagatattgatggcaaaccaattacgttcttagatacaccaggacatgcggcctttacaagtatgcgcgcacgtggtgccagcatcactgatattaccatcttagttgttgcagcggacgatggagtaatgccacaaacaatcgaggcgattaaccatgcgaaagcggcaaaagtgccgattattgtagcagttaacaaaattgataagcctggtgcaaatcctgatcatgtgaaacaagaattaagtgaacatgaattaattcctgaagaatggggtggagatacgattttcgtcaatatttcagcgaaattcaatcaaaacattgatgagctattggaaaatattttattgattgctgaagtagaagacttaaaagctgatccaacgcaaaaagcaattggaacagtgattgaagcgcgcttagataaaggtaaaggtccggttgcgacattactcgttcaacaaggaactttacatgttggtgatccaatcgttgttggtaatacttacggacgtgttcgtgtgatgaccaatgacatgggccgccgtgataaagaagcaggacccgcaactcctgtagaaattaccggattaaatgatgttcctcaagcgggtgatcgttttgtggtctttgaagatgaaaaaacagcacgtcaagcaggggaagaacgggctaaacgtgcgttgcttgaacaacgttcagcaagtagccgtgtgacattggataacttatttgaaagcctaaaagaaggcgaattaaaagaagttaatatcattgtcaaagcagacgtacaaggatctgccgaagccgtttcagcaagtttacaaaaaattgatgtagaaggcgttcgtgtgaaaattgttcacgcggcagttggggccatcaatgaaagcgacgtaactttagccgcagcaagtaatgcgattattatcggctttaacgttcgcccaacaccacaagcgaaacaacaagcagaacaagaagaagttgatattcgtttacaccgtattatctataaagccctagaagaaatcgaaacagcgatgaaagggttattagatccagaatttgaagaaaaaattacgggtcaaatgacggttcgtgaattgtacaaagtatctaaagttggcacaatcgctggctgttatgttacagaaggctttattcgccgcgatagtggcgtgcgtgtcattcgtgatggtattgttatttatgaaggtaaattagcaagcttgaaacgctttaaagatgacgtgaaagaagtcaaacttggttttgaatgtggcgctatgattgaaaacttcaatgatttacgtgtagatgatgcgattgaaggcttcattatggaagaaatcaaacaataa

SEQ ID NO: 6668 - DNA, 1878 bp, Enterococcus faecalis
  CDS (1)...(1878)
atgaatcagacagcaaatagcaagaaaaaacgctatattacaggttttgatggcattcggacgatcgctgtaattggcgtgattttgtatcacctttttccccaagtcatgcgaggtggctacttaggtgttccgattttctttgttgtttcaggttatcttattaacgacttgttgcggcaagaatgggcagaaaatcagaccattgatttaaaaggattttatgtgcgaaggatgaaacggctgtatccagcattaattgtgatgcttttaagtgcagttagttatattacactctttcagcaggatttattaaacaatattcgcagcgttgtcgctagtagtgttttttattacaacaactggtggcaaatttttaaagggttttcttattttgatggatttgcgacacaatcgccatttgtacatatttggtcattggcagttgaagcgcaaaattatttaatttggccattactttttattcttctggaacgctttgttcgtaagcgcggtcgaattttcagtttagttttaatcggcgccttaatttcggtgacgctgatggccgttttatatgttcctggcgcagatcctacacgtgtctattatggaacagacacacgtgttttttctattttactaggtagtgcattggcgtatgtttggccaagcacacgtttgaaagaagaaattccagaagcctctaaaaaaatcttaaatggtgctggtttaagtgccttagttcttttagtattagcctttttaacattatcagatcatacaaattttgtttattacggcggcatgtttttaattagtttggcagccaccgttttagtggccgtcactgcacatccaggggcagatatgaatcgttggttaacgaatccagtctttacgtggataggtaaacggagttatggcatttacttgtatcaattccccatcatgattttttatgaggccaaaattaagaccttatcggaccatgtttttctacattcattggttgaaatagcattaattttagtcgtgagcgaattgtcttatcgttttatcgaacatccactgacacgattgtcttataaggatgtctggactcaatttactgagttcttacggaaaccgtgggaccttcgtgaaaaagggacaatggcctttatgacagtgattagcgtgattgcagtattcggtttaattgtggctccagcaaacgctaaaagtgcgcaacaagagcaactagaaaaaaatattgcgaaaaatcagcaaaaaattgaagaacgtaaaaaagaagtccaagaaagtggcacgaaaaatagtagcacgtccacagaaagtagtacaaaaccgagtgaaagccaagacgttctacccgcacaactcacaccagagcaagtaaaaaaagcgcagaatttagaaatcacaactattggtgattctgttattctagatggtgctagcgggttacaagatattttccctaaaatgattatcgatggggaagtgggccgtcaattgtatagtagcatttcactaattggtgaactagacaaaaagaaaatgctcaaagatactgttttagtgagtttaggtacaaatggtccttttacagaggcacaatttgatgaatttatgaaagcgttaggtaatcgaaaagtttattggattaatgttcgcgttccaactagaagatggcaaaatcaagtaaatagtttacttagtcaaatggacaaaaaatacgataacttaacggtcattgactggtttaattatagtaacgcccatgatgattggttttatgatgaccgagttcatccaaatgtggcaggtggcgagcaatatacacactttatcgcggagaaaattttacagtag

SEQ ID NO: 6669 - DNA, 1185 bp, Enterococcus faecalis
  CDS (1)...(1185)
atgacagaaagacatttatttacatcagaatccgtttcagaaggacatccagataaggtagctgaccaagtcagtgatgcaattttagatgcgattttggagaaagatccgatggcccgcgtggcatgtgaaacatccgtaacaactggtttagtcctagtatttggagaaatttctacaacagcttatgtagatatccaaaaaattgttcgtcaaactgtgaaagatattggttatacacgagcaaaatatggatttgatggagagactgtcgcagttcttgtagcaatcgatgagcaatcacctgatatcgctcaaggggttgacgcagccttagaagtgcgtgatcaagatgaaaaagacgatattggcgctggtgaccaaggcttactgtttggttttgccgttgacgaaacaccagaattaatgccattaccgatcgcgttaagtcatcgtttggttcgccgtttagcagaattgcggaaggaaaaagtcttaccttacttacgtcctgatgcaaaatctcaagtaacagtggaatatgatgatcaaggtcaaccacaacgtgtggatacgattgtcatcagtacacaacatgatgatgaaacaaccttagaacaaatcgaaaaagacattaaagaacaagtaatcaatgaggtgattcctcatgaacttttagatgatgaaacaaaatactttatcaacccaactggtcgctttgtaatcggtggccctcaaggagatgccggcttaactggtcgtaaaattatcgttgatacttatggcggttatgctcgtcatggcggcggtgctttttctggaaaagatgcaaccaaagttgaccgctctgctagttatgctgcgcgttatatcgcgaaaaacattgttgctgctggtttggcgaaaaaagtagaagtccaattagcttatgcaattggcgtggcgcaaccagtgtctatttctattaatacgtttggtacgagtgctcttccagaaagtaaattaatcgaagcagttcgtaaaaactttgatttacgtccagcaggtattattgaaatgctagatttacgtcgcccaatttataaacaaactgcggcttatggtcattttggtcgaacagatattgatttaccgtgggaacaaacagataaagttgaagcgttaaaagctagtttagctgaataa

SEQ ID NO: 6670 - DNA, 1467 bp, Enterococcus faecalis
  CDS (1)...(1467)
atggcaaaagaaacaaatgttaagttagtcacggtgagtgtttttgtggcaacatttatgacagccattgaagggaccattgtgtctactgcgatgccaacgattgtcggctcgttacatggcatggaaattatgaactgggtattttcaatttatttattaacgaatgcgatgttaacaccgatttatgggaaacttgcggataaaattggtcgtaaacctgtcttcatgattggcattatcatttttattttgggctcctcgttgtgtggctttgctcaagatatgttgactttaattattgcccgcgcaattcaaggtgtgggggcaggcgcaattttaccagttgcgttaaccattattgccgatatgtattcattggacaagcgagcgaaaattttaggtttaaacagtgccgcctggggaattgctagtatttttggtccgttagcaggtggttttattgtagatacagtcggttggcattggattttcttcattaatgttcctattggacttgttttattgggcttgattagtattttcttagttgaaccaaagcgggaacggaccaagatgccaatggatattttgggcagcgttactttgatggccgtgctgctaacgttattgctaggttttcaaatgattagcgataatggttttacattagtaacatttggttgtttgagtttgagtgtgctcttttttgtagcgtttgtgatgatagaaaaacgcgcgcaagacccagtgattgatttgcatttatttaatcaaccaacgtttgttttagtaaatcttattgcagcgcttattagcggtttcttaatggggattgatgtctacattccgatgtggatgcaaggtgtcttaggaaaaagtgcaggaattggtggcttagttttagcgcctatgtcgttactttggatggctggatcatttatagcaagtagctttatggaaaaatatgctatgaaaaaagtcttaacgattgggttatcgattctattagtcggggccatctttttagtggtaatgccaatggccgttccgttttggcttttctttgtagtgtcttctgtcttaggagttggttttgggattactatcacaacgactacggtgacagcacaaagtacagtggagcctgaaaaaatgggggttgcaacatcgtttaatacgttggtgcgtacaattgggcagactgtgatggtgtcaatttttggtgtgattttaaatgcaggaatgtttgcgaaattggaagcgagcgcgttaaacgtcgatgcagatgtcatgaatcaattagtgaatccacatactgcaaatttaattccagctgcgttgttaaaaccattacgcggtatcctctatgcaggtctgcataatgtttacttagtcggtgcgggcttagttgttgtcgctcttttgttaaatattttcgcaaaagcgcaacgagcgaaggtttag

SEQ ID NO: 6671 - DNA, 669 bp, Enterococcus faecalis
  CDS (1)...(669)
atggcaaatgttttagaaatgaaaaatatttataaaaaatatggtgaaaaacatacagaagtgatcgcgttaaaagaattatcttttgcggttcagccaggtgaatttgtcgcagtaattggtccttctggttctggtaaaagtacctttttaacgattgcagctggtttacaggcaccgacaagtggcgaagtcattgttggcgggcaatcactaaataagttaacgaagaagcaacgtttggcgcaacgttttcaaaaaatcggctttattttacaaagctctaatttggtgccatttttaacagtggaagatcaatttcacttaattgaaaaagttgataaatcacgtaaaaatagtgaattaaaagagcaattgttagagacgttgggtttaaaagaattacgaaatagttatcctcgtgatctctctggtggggaaagacaacgggtagccattgcgtgtgcattatatcatgagccagacgtaattttggcagatgaaccaacggctagtttagatacagaaaaggcatttgatgttgtccaattactagcgaaagaggccaaagagaaagataaagggattatcatggtgacacatgatgagcgtttgttgaaatactgtgatcgagtggttcgtattcgtgatggtgaattgacggagtaa

SEQ ID NO: 6672 - DNA, 150 bp, Enterococcus faecalis
  CDS (1)...(150)
atgattggggttagtcgaatctatttaggtgtccatttccctagcgatatcttaggtggtttttgtcttggtttagcttggttgttattaagttaccctatttatttagaaaaacgctttgtttggcgatttcaaagcaaacaacgctag

SEQ ID NO: 6673 - DNA, 780 bp, Enterococcus faecalis
  CDS (1)...(780)
atggaatttcagttggataaagactggcgtctgcagccgataaagggcgcaactggtcaaacatacatgggaataaaagaaacagagaaagtgttcattaaacgaaacacttctccacttcttgcagcattgtctaaagaagggttagccccgaagatgatttggacaaagcggacagcgaatggcgacgtactaacagcccaagaatggctggaaggacgtttattacatgcggacgaaattggcaaacgcaatgacgtgattgacgtgttataccaattgcatcattccaatttgctgaaagacatgttgaaaaaaattggtggcgaagtttgtaccccgctaacaatgttgaaagagtataagcgtcaactacctaaagaattaaaacgaaacagttatttaaaagaagtaatcacttatttatataatcatttaccagaatatccagaaactagttatgtagctgttcacggcgatgtgaatcatcggaattggttagtctcgaataattatctctatttagtagattgggattctgtgatggtcgcggacccagcggtagatttaggaatgattttgagtcattatgtccctcgttccggttggaatcaatggttactatcttatggtttaatcccgaatgaaagtacggttcaacgaatttattggtatggtttatttagctttttacaagagattgttcgtcatcaccaagagggcgaaagaagagcaatgactgcagaaattttacaattaaaacgaatgtttagtagttaa

SEQ ID NO: 6674 - DNA, 2463 bp, Enterococcus faecalis
  CDS (1)...(2463)
gtggcaaattttaagaatgaaaaattttatattactaggaggaataacatgagctacaatcacaaagagattgagaaaaaatggcaaaaatattgggctaagaacaattgtttcaatacattggacgacccaaataaagaaaaattttatgcactagatatgtttccctatccatctggacaaggcttacacgtaggtcacccggaaggctatacagcaaccgatattctttcacgtatgaaacgtgcgcaaggctataatgtgttgcatccaatgggctgggatgcgtttggtttgccagcagagcaatatgcgttagatacaggaaatgacccagctgaatttactaagaaaaatatcgaaacattccgtcgccaaattaattcactaggattcagctatgattggaatcgcgaaattaataccactgatcctgaatattacaaatggacacaatggatatttacaaaattatatgaaaaagggttagcttatgaagcagaagttgcggttaactgggtacctgaactaggaactgttatttcaaatgaagaagtcattgatggaaaaagtgaacgtggcggttatgatgtggttcgccgaccaatgcgtcaatggatgctgaaaattactgcttatgcagatcgcttattagaagatttagagcttgttgattggccagaaagtattaaagatatgcaacgaaattggattggacgttctgaaggagccaatgtgacctttaaagtcgctggtacagaagaaagtttcacggtgtttacaacccgtcctgataccttgttcggtgcaacctatactgttctagctcctgaactagaactagtgaaaaaaattacgacacctgaacaaacagcagctgtagaagcatatattgaagaaacctcaaaaaaatctgatttaaatagaacggatttagcaaaagaaaaaacaggtgttttcacaggtgcgtatgctataaatccagtcaatggccaagaaattccaatttggattggcgattatgttttagcaagctatggcacaggcgcaatcatggcggtcccagcgcatgatgaacgggattacgaatttgcgaaaacatttggcattgatatcctaccagtaatcgcaggtggcgacattacaacagaagcctatacaggggatggaccgcatatcaattctgatttcttaaatggattaaacaaagcagaagccatcgctaaaatgaatgagtggctagaagaaaatcacgtagggaaaaaagaagtatcctatcgtttacgtgactggttattctctcgtcaacgctactggggtgaaccaattcctgtgatccattgggaagatggaacaaccacaacggttcctgaatctgagttacctctacgtttaccagtaacatcggatattcgcccaagtggaactggggaatcgccattagcaaacattgatgaatgggtcaatgtcgtcgaccctgaaactggcatgaagggaaaacgtgaaacgaatactatgccacaatgggctggaagctcttggtattacttacgattcattgatcctcataataaaaatgaaattgctgattttgaaaaattaaaacgttggttaccagttgatatctatattggtggtgccgaacatgcggtgttgcatttactttatgctcgtttttggcataaattcttatatgatattggtgtggttcctaccaaagaacctttccaaaaattatacaaccaaggtatgattttaggagaaaacaacgaaaaaatgtctaaatcacgtggcaatgttgtaaatcccgatgatgtggtggctaaatatggtgcggatacattacgtctttatgaaatgttcatgggcccattagatgcttccattgcttggaatgaaaatggcttagaaggaagtcgtaaattcttagatcgcgtttggcgtctgattgttgatgaagaaggcaaaatgcgtgaccgaattaccacaattaatgatggccgtttaacgaaagtttatcatcaaacggttaaaaaagtgacagaagatatggcaaacttgcactttaatacagcgatttctcaattaatggtttttgtgaatgaagccaataaagtggatgccttaccttatgaatatgtggaaggatttgtccaattacttgcgccaatcgcgccacatattggtgaagaactatggcaaattttaggtaacgaggaaagtttaacttatgtcccttggccaacctatgatgaagcagccttagtagaagatgaagtggaagtagttttccaagtgaacggaaaattacgtggcaaacaaaatgtcgctcgtgggttaatcaaagaagaattagaacaaattgcaatgaaccatgaagctgttaaagaatttattgaaggaaaaacagtgcgcaaagtgattgctgttccagataaattagtaaatattgttgcaaattaa

SEQ ID NO: 6675 - DNA, 1026 bp, Enterococcus faecalis
  CDS (1)...(1026)
gtgtctgttttgtctgcatattccgttttaaatgcaatctattataaatattatcaagtacagttagtctttattagtaaagacggtcaatgggtaaaaggccctctcttatctgaacgaccacaaaataaagaagttttacatttaacttgggcacaaacacctgaagaaacaggcgaattttcaggaaaacgaatcagtccttcggaaatttatgaagaagaagcgattgttttccctgttttacatgggccaaatggtgaagatggaacaattcaaggattcatggaaaccattaatatgccttatgtaggcgcaggtgtcttagctagtgctaacgcaatggacaaaatcatgacgaaatatcttttacaaactgttggcattccacaagtaccattcgtgccagttttaagaagtgactggaaaggaaatccaaaagaagtctttgaaaaatgtgaaggttctttaatctatccggtctttgttaaacccgccaatatgggttctagtgtcggaattagcaaagcggaaaatcgtgaagaattgcaagaagcattggaagaagctttccgttatgatgcccgagcaattgttgaacaagggattgaagcacgtgaaattgaagtagccattttaggaaatgaagatgtccgtacgactttacctggtgaagtggtgaaagatgtcgctttctatgattatgatgcaaaatacatcaataacacgattgaaatgcaaatcccagcgcatgttccagaagaagtagctcatcaagcgcaagaatacgctaaaaaagcgtatattatgttagatggaagtggcttaagtcgctgtgatttcttcttaacaagcaaaaacgaattattcctgaatgaattgaacaccatgcctggttttactgactttagtatgtatcctttactgtgggaaaatatgggcttgaaatacagtgatttaattgaggaactgattcagttagctttgaatcgttttaaacaacgccaagaattttataataactaa

SEQ ID NO: 6676 - DNA, 1425 bp, Enterococcus faecalis
  CDS (1)...(1425)
atgacaagactttggcatgtcccagtccctgtgtcagaggagcaaaacataatgaaattaaccttctgggaagtagcgcaagcggttgaagccagtaatgattggcaacaatggcctgattttcctttaacaggcattgaatttgatagtcgtaaaattgtgaaaggaaatctctttgttcctttacaaggtgaaaatgatggtcatcgttttattgagagtgccatggctaatggctgtcaggccgctttttggggacaggatttagtcgatgcgccgcaacaattgcctgttttgcatgttactgatccactggttgctatgcaaaaattagctacctattatttaaataaaatgcaaccgaatgtcatcgctgtgactggcagtaatggaaaaaccaccactaaagatttaattgctgctgtgttatctgaaaagtttgtgacttacaaaacgcaaggcaattacaataatcaaattggcttaccctatactattttacacatgcctgatgaaacagaaaaactgattttagaaatgggcatggatcatgctcaggaaatttctttcctttccaatctggctcagccagaagttgccgccatcacaatgattggcgaagcccatgtggaaaatttaggctcacgagcaggcattgcacaagcaaaaatggaaatcgtagatggtttagccaaagacggtagtttatttgtgccaagcgatgaacctttgctagaaccattggtggaaaaagtcactcaacaagtgattacttttggttttagccaggaaagtcaacttcaaggaatcgtcacaaatgaagccaaagagcaaacctcattcaaaatcagtgatacacaaatgacgtttacgattccagtgccaggaacctataatgtcaccaatgcattaatcgcaattggcattggtcgttatttccaattaacggatagtgagattcaaaaagggttggctacagcggaactaacaaagaatcggacagaatggctgaaagcagcgaatggtgctgaaattttaagtgacgtgtacaatgccaatccgacagctatgggtcttgttctggacagttttagcaaaatgtccaaagtaggaaaacgaattgctgttttaggagacatgctagaattaggtcctgattctgctgccatgcatcaagcaatggcgcagcatttagccccagatgcgattgaagaagtctttttatatggttctgaaatggcttatttagctgataaattgcaagaaacctatgcaccagctaacattcattcttttaaaaaagaagaaaaaaatgagttgattgaagctgtcaaaaaagttttacagccagaagatatggtggttttaaagggaagtaacgggatgggacttcgtgaagtcatcgatgcacttttggaaaagtaa

SEQ ID NO: 6677 - DNA, 1611 bp, Enterococcus faecalis
  CDS (1)...(1611)
gtgaagacacctgaaactaggaagaaatcgttctttccgaaacaaaatctaggaggatatcatttgaaatttaaagaacttggtttagcgccagaattattatcagcggtagaacgcgcaggcttcgaggaagcaacccctattcaatcagaaacaattccgttagcgttagcaggaaaagacgtaatcggacaagcacaaacaggaacagggaaaaccgctgcttttggcttaccaatgcttaacaaaattgacgcagacaaccgcgttattcaaggattagtcattgcaccaacccgtgagttggctatccaaacacaagaagagttattccgtttaggccgcgataaaaagattcgcgtccaagccgtttacggtggggctgatatcggtcgccaaatccgtggactaaaagatcgtccacatatcgttgtaggtacaccaggacgcttactagaccatattaaccgtcgtaccttgaaattagaaactgttgaaacattagttttagacgaagcagatgaaatgttaaacatgggcttcttggaagacattgaaaaaatcatctcacaagtgccagaacaacgtcaaacacttctattttcagcaactatgccgccagcaatcaagaatattggcgtgaaattcatgaaacaaccagaacatgtgaagattaaagccaaagaaatgacggctgatttaattgatcaatattatgtacgttcaaaagactttgaaaaatttgacattatgacacgtttactagacgtgcaaaccccagaattgaccattgtctttggtcggacaaaacgccgtgttgatgaacttgcccgcgggttagaagcgcgtggttacaaagcagaaggcatccatggcgacctatcacaacaaaaacggatgagcgttttacgttcattcaaaaatggtaacttagatatcttagtggcaacagatgtagcagcacgtgggttagatatttcaggtgtcacccatgtctataactacgatattccacaagatccagaaagttatgttcaccgtattggtcggacaggtcgtgctggtaaaggtggtatgtctgtgacgtttgtaacaccaaacgaaatgggttacttacatgtcatcgaaaacctaacgaaaaaacggatgacaccattacgtccaccaaccgaaaaagaagcatttaaaggacaattaagtgcagctgttgaaaccatcgaaagtgatctagaagaaaatggtttagacaaatatctagaatctgctgaagcgttattagaaaaatattcagcgacagacttagctgcgttattattaaaaacagtagcgaaagatccagcagatgcggttcctgtaaaaattaccccagaacgaccattgccttcaaataaaaaaggctttaacaaaaatggccgtggtggtggcggtgggaacaaccgtaatcgcaaccgtggtggcaatggtaaaggtggcagctatcgtggcaacaaaaaccataaagatggcgaccgtaattacaaaaatagcgaccgcaaaaataaagatcaacgtggcggcaaacgtcataacgataaaaaacgtggtttcgtcattcgcgaaaacgccaaataa

SEQ ID NO: 6678 - DNA, 927 bp, Enterococcus faecalis
  CDS (1)...(927)
gtgactatttatacatgtacattaaatttagccattgatttatttatcgaaacagaagagctagttccttttgtcgtgaatcgcacgaaggaagatgatattcaagcaaacgggaaaggagtcaatgtttccctaattttaaagatgttagggattgataataccgctttgggagtcaaagctggtttcactgggaactatgtcgaggattatttaaaagaaaaagagataaccactgattttatcgaagtcgctggcacaacgagaatcaatgtgtttacaaaagttacccaagatcaaaaggaatacaaattagtcaataagggaccaaaattatctgaagaacatgtacaacgttttttgaaaaaaatttcagagttacgtaaaggggattatttgtgcgtatcaggaagtttaccacaaggggtttcgccaagtattttgattgaaattagccgaatttgttttgaaaagcaggtgttcttaattttagacagtagttatgaagaaattttagattgtttgccttatcaaccatttttattgaaaccaaatgaagaagaacttcaagagtggtttcatacagaagtgcagactaaggacgattacattttttacggacaagaattactgaagcggggagccaaaaatattttactttctttaggtagtgaaggggctttatttatgaataatgaaaaggttctttcaggcaattcaccaactggaatggttgtgaatacagcttgttcaggggatgcaatgttaggtacctttttagctggctggcatcaaggactttcattggaaaaaaatttaaaaagaagtattgcagcaggtagttcaacagcatttcgcaaaggattgacagatttttcagatgttcaggagttagagcaacaaataaagattcaagaggaggaataa

SEQ ID NO: 6679 - DNA, 354 bp, Enterococcus faecalis
  CDS (1)...(354)
atgataaagggaattggtattgacgcagtagaattaagtcggataaaaccgattgttgaaaaacaaggatcgtttattcaacgggttttaacacctaacgaattgaccctttttgaaaagttatctacaaaacgtcaaatagaatttttagctggtcgttttgcttgtaaagaagcgttttctaaagcatggggcacagggattggtaaagttggtttacaagatattgaggtgctgactgaaaaaacaggtgcaccatacgtagcaaactcgccccataatggtaaagtgtttgtctcaattacgcacacagatactatggcgattgcacaaattgttttagaaagcgaataa

SEQ ID NO: 6680 - DNA, 1116 bp, Enterococcus faecalis
  CDS (1)...(1116)
atggtcgttggatggcatcgtcctacacggttacatatcgatacgcaagcaattactgaaaatgtccaaaaggaatgtcaacgtttgccagaaggaactgctttatttgcggttgtgaaagcgaacggctatgggcatggcgccgtagaatccgctaaagcggcgaaaaaaggtggcgcgacaggtttttgtgtcgccttattggatgaagcaattgaattgagagaagcaggtgttcaggaccccattttaattttgagtgtggtagacttagcttatgtgcctttgttgattcaatatgatttgtctgtaacggtagctacacaagaatggttagaagctgctcttcaacaactaacgcctgagagtaacacgccattacgtgttcacttaaaagtcgatactggcatgggacggattggctttttaaccccggaagagactaagcaagcagtgcggtttgttcaatcccacaaagaatttttatgggaagggatttttactcatttttcaacagctgatgaaatcgatacaagctattttgaaaaacaagcagggcgttttaaggctgttctagcagttttagaagagttaccacggtatgtccatgttagcaatagtgcgacagcgttatggcatcctgatgtgccaggaaacatgattcgctatggagtagccatgtatggattgaacccttcaggtaataagcttgccccaagctatgcgttaaagccggccttacggttgaccagtgaacttatccatgtaaaacgcttagcggctggtgaagggattggctatggcgaaacctacgtaactgaagctgaagaatggattgggacagtgccaatcggctatgcagatggctggttgcgtcatctccaaggatttacagtgctcgtgaatggtaagcgttgcgaaatcgtcggacgagtgtgtatggatcaatgtatgattcgtttagcagaagaagttcctgtcggctcagtcgttacattagttggaaaagatggcaatgaagaaaatacgttacaaatggtagccgaaaaattagaaaccattcattatgaagttgcatgtactttctcacaaagaatccccagagaatataactag

SEQ ID NO: 6681 - DNA, 1419 bp, Enterococcus faecalis
  CDS (1)...(1419)
atggctacgtatcaattaatagctgctacaggttgtccgacgggaatagcgcacacgtatatggcacaggaggcattggaacaagctgcgaaacgtaaaggtattacgattaaggttgaaacacatggtcagattggtatagaaaacgagttaacacctgcagaaatccaaggagcggaggcaatcattattgccgccgacaaagacgttcaagcagaacgttttgctgggaaacgaattattgatgtccctgtcagcgttggcattaaagaagcagatcgcttaattgaagaagcgctcgcaggaaaaggatcgattgcggccgaaaaccaagcagtggacgaacttgaacaggagacacaaatttcttcaggaaatgttggacatagtatttataaaaacttaatgaatggcgtttctcacatgttgccgtttgtagtagcaggcggcattttaattgctctttcttttgctatttggggtatttattcatttgatccagaaagtagtcagtataatgctaccgctgctatgttaaaaagtattggtgatgcctcaatgggaatgatggtgccaatcttatctgcgtatatcgcagaggggattgcgaaacgacctggtttggttgtgggctttgtcggtggtttgattgctaacactggtggtactggctttttaggagggatattatctggtttccttgctgggtatttcattcttttattacaaagagtatttaaaggtttgcctaaatcattagatggtttaaaagcaattttcctttatccagtcattggcgttgcagttattggtatcactatgtctttactagcagatccgatgaaagctgttaacgaaggaatgatgagctttttagctagtttccaaaattccagtccgttggttttaggaattattgtgggttgtatgtgtgcctttgatatgggaggtccagttaataaagcggcctatgttactggaacggcactcttagctcaaggaaatacttcttttatggcaggagtttctgctgcctgcatagcgccacctttaattacaggctttgctacattattctttggaaaatactttgacacaaatgaacgcaatgcgggcctagtgaactttattttaggctccacacatattacagaaggcgctattccgtttgcggcaaaagacccattgaaggttttaccaattatgatgctcggatcttcaattgcggcagtcttaacgtatatgtttggggtacaagtgccagcacctcatggaggatttcttgttttaccagttgttactcacgctgttcaatgggttctggcaattttagctggttcattggtaggtggtttattgctaggttttgtacaaaaaagtagaatcgccaaacaagagcaatcgttatcaaaaaaatga

SEQ ID NO: 6682 - DNA, 2793 bp, Enterococcus faecalis
  CDS (1)...(2793)
atgtgtcgtaacattcaagcttttgtttgttattctcttgtattttatgctaaagttattcaggcacaaaaaaaagcaggtgattttatgaaacatataaaaaatacatgggaactatttattttagattggaaaagaatttttaaaaacccagtagcaacatttttgattgttgccttaatgattattccatcattatatgcatggtttaacattaaagcactatgggatccgtattcaaatacaggagagttaccaatagcggtctatagtgatgaccaaacagcaacttttcaagataaatcggtcaatattggtgatgaagtcttgaaaaacttgaagaaaaacaagcaattaggttggcgttttgttgattcgaaaaaggaattagacaaaggggtccaatcaggaaaatattttgccgggatttatttacctaaagatttttccaaagatttgctaagttttacttctggtgatatcaataaacctaaaattgaatactcaattaacgaaaaaattaatgcaattgcgccgaaaattacgtcaaaaggcgcttcttccattcagtcacaaatttcggaagaattcatcaaaacggcaagtagtacgttaatcaaaacattcaatgatattggctatgatattgataaaaacatggtcagcattcaaaaagttaagagcatgattttagatacagatgccaacattggaaccattgatacgtatgcaaaacaagtcacagacttacatggtaagatgccagagctaaaagaaaaattagcgaaagccaacgatgcgatgaaatatttacctgaagttgatgctttaggagagaagattgttgagctaaatggcaaaatgccaagcatcaaagaacaagctagtgttattttgacgttacaagaaaaaattccagaaattcaaaacgctggccgacaaattgctatgattgatgaagactttgcctctgtggaacaaacaatgagcgaaggaatccaagacgcaaaacaaggattagaaatcattcaacaagtccaaacggcgttaccagatattcgtaaactaggtgatcaagccaatgatttagggaatgtcacattagatggcgccaataaattgcaagaggcgttaccaagtattacgaatagcgttgaagtgactttgaaatctatccagcaagttgctacaacaacaacttccgtagtcgctactattcgtcaagcgttagatgatggacagttaacgccagaagaaaaacaacatattaatgaagtagtacaagatttcacaactaatatccaacggcaacagcaagcaattaacgacattattgcgtttatgaaacaactccaagaaaatgctggtaatcatgacttagatggtgcgattgctcaattaagccatgtaaatgatttattaacagattttagcaatcgcttgaatcaattaaatgctttagtccaagcgggtgatatctctggagtacaaaattatttaaatgagattgacgaaatggcaactaatatttctagtattgtgggcagtgttgatgtaaacggaattagtaataccgtttcaaccattttaaacaaactaactagtaccatccaaaacgctcaaggtcaactaaacaaagcacaacaaattgactttgaagggttattgagttcaacaagtcaaacggtcactaatgcgatttctttattagaaaaatatcaagccgaaatgccggcaattaaacaagaaattcatgatgcgaatacgatgttgaatggcaatatggaaaccattgtcaatggcattaaccgtggtgctgatttgtacaaaaacgatttaccagtcattcaagataaagtcagcaaagcggcagcctttatgcaaaatgactatccaggtatccgaaaagatttaacgaataccttgaaaacagtcaatgagaaaatgccagatgttgaagcggccttagacaaagccaacgaactgattattaatgattggccaaatatcaaaacaggattacacaaagcagcgaatgcaatccgtaaaggtgaaaaagaagttgatttaggtgaaattcttaaattactaaaattagatgccaataaagaaagtgacttctttacacaaccagttgaagtcaaagaacatgctgtttatccgattgctaataatggttcggcaagtacgccattctatacagctttgtgtttatgggttggtgctgtattattctcaagtgttgcgacaacggatgtttatcttgaaggaaaagataaaaaacgcttctctaaacgggaacaattttcagcacggatgtttactttcattgtcatggggattggtcaagcactgattgtaaccttaggtaattactttgcgttaggcgtagatgttcgtaatccagcgtatagcgtctggtttgcggtattgattgccattacgtttatgataatggtttatgtgctcgttgctctctttggcaatgtagggaaaggaattgcgataataatcttggtactatccatctctggtgggggtgggaactacccaattcaagtctcaggtaaattcttccaaatgattaatccgttcttgccgtttacgcatgccgtgaacttgctaagggaatcagcaggaggcatttactggccaaatgcttggtttgccatttggattatggtggggatttcagtcgtctttagtattggcggtgcaattctttatccacatctggaacacagatcgaaaaaatttgcggctttagcacaaaagagccatttattccattaa

SEQ ID NO: 6683 - DNA, 1194 bp, Enterococcus faecalis
  CDS (1)...(1194)
gtgagtaagttgatagaatttcagcatgtatcaaaattttataaaggcggaaaagtcgccgttgatgacattaatttgtctttcgataaaggtgaatttatctgcttcatcggaacaagtggtagtgggaaaacaacatcaatgcggatgcttaaccgcatgaccgacccttcaaaaggaaaaattttaattgatggccaagatattcaaaaaatcaatcctgtagagctacgtcgccaaattggctatgtcattcaaaatatcggcttgatgcctcacatgaccattcgtgaaaatatcgttttagtgcctaaattattaaaagtacctgtggaagaacgcaataagatagccgaaaaaatgattgatttggttgagttaccacgagaaatgttggaccgctatcccaatgaactttctgggggacaacaacaaagaatcggcgttgtgcgggctttagctgccaatcaagatattattctaatggatgaaccttttggtgctttagatcctatcacccgtgattcattacaagatttagtgaaagatttgcaagaacgtttaggaaaaactattgtctttgttacccatgatatggatgaagcgttgaaattagcaaataaaattgccattatgagcgaaggcaaagtaattcaatttgacacaccagataatattttacgtcatccagccaatgaatttgtagaagaactcatcggagaagatcgcctattacaagccaaacctgatttcaccacagtggatgaagtcatgttaaattcagcaattactatcacgccggaaaaatctttacaagaagcgattaaattgatgcgtgaaaaacgggttgataccttattagttgttgataattcccatgtgcttaaaggctttatcgatgttgaaacattagatcagcaacgtggcaaagcttctagcgttggtgatatcttgaataaagatgtcttctttgttcaaaaaaccgctcttttacgtgatgctttacaaagaatcttaaaacgtggcttaaaatatgtgccagtcgttgatgaacaaaaacgagtggtgggcatcttaacacgtgcttcccttgttgacattgtttatgatgttatctggggcgatgaaacaacgattagtgaagctgtagaagcaaaacaaagcgagtccgaaactgataaagaggaggcgtaa

SEQ ID NO: 6684 - DNA, 1041 bp, Enterococcus faecalis
  CDS (1)...(1041)
gtgacggaaatgctaagtacagaagattttgattttgatttaccagaagaattaattgctcaaaccccactaaaagatcgcgctagttcacgattattagttgtaaataaagaaacaggggacatggaggataaacatttccatgatattcttgatgaattacagcctggggatgcattagtcatgaataatacacgggtactgccggcccgtttatatggagaaaaacctgaaacaggcggtcatttggaagttttacttttaacaaatacagaaggcgatacatgggaaaccttgattaaacccgcgaaacgtgcaaaagtcggcacggaaattcaatttggcgatggtcggctaaaagcggtggttaaagaagagttggaacatggtggtcgaatcattgaatttaaatatgatggtattttcttagaaattttagaatcgttaggagaaatgccattgccgccatatatcaaagaacgtctagatgacccagatcgttatcaaacggtttatgctgaagaaaatggttcagctgcagcaccaacagcgggtttgcattttacaaaagaactattagaagagatcaaagcaaaaggtgttcatctcgtttatttaactttacatgtcggtttaggaacattccgtcccgtgagcgttgataatatagaagaacatcatatgcatagcgaattctatcgtttaactgaagaagcggctaagcaattaaatgaagtgcgccaagcaggcggtcggattgttgcggttggaacaacttctattcgtacgttggaaacaattggcacaaaatttaatggtgaaatccaagctgacagtggctggaccgatatttttatcacaccagggtatcaatttaaagtcgtagaggctttttcaacgaacttccatttaccaaagtctacgttggtgatgcttgtgagtgcctttgcaggaaaagacttaacattggctgcttaccaacatgcaattgaggaaaaatatcgtttctttagttttggcgatgcaatgtttattaaataa

SEQ ID NO: 6685 - DNA, 1071 bp, Enterococcus faecalis; identical to SEQ ID NO: 3820
  CDS (1)...(1071)

SEQ ID NO: 6686 - DNA, 2253 bp, Enterococcus faecalis
  CDS (1)...(2253)
gtgtttcattcaatgatttgtcaaaattgtcaacaaaatgaagcaacaattcatttatatgcaaatgtgaatggtcaaagaaaacaactggactattgccaaagctgctatcaaaaattaaaaaatcaagcaaataattcccctcaaaatatgggacaagacccttttggctttgggagtttagacgatttatatcgttctctttctcgccaaatgcaacaaggtaatccttatgaacaacaaacaccacccactcaatttggtgatggtggtaatggaggtcaaccccctcgcggaggcgctggcgctggtcaaggtttactaggcgagtatgggattaacatcaccgaagcggcacgccaaggagatatcgatcctgtggtaggacgtgatcaagaaattaagcgtgtcattgaaatcttaaatcgccgtacaaaaaacaaccccgttttaatcggtgaaccaggtgttggtaaaacagccgttgttgaaggtttagcccaaaaaattgtcgatggcgatgtgccccaaaaattattggacaaagaagtcattcgtttagatgtggtttcacttgttcaaggaactggtattcgcggacaatttgaagaacggatgcaaaaattgattgaagaaatcactgaagctgaaaatgtcattttatttattgatgaagtccatgaaattgtgggtgctggtgctgctggtgatggcaatatggatgctggcaatattttaaaaccagccttagcacgtggtgaattacaattagtcggtgccacaactttaaatgagtaccgtattattgaaaaagatgctgccttagaacgtcggatgcaaccagtccaagtagatgagccaaccgttgccgaaaccataacgattttacatggtttgcaaaaacgttatgaagattatcatcatgttaaatatacagatgaagcgattaacgcagcagcaaacttatccaatcgttacattcaagatcgctttttaccagataaagcgattgacttgttagatgaatctggttcaaaaatgaatctaactattcaactcgtcgatccaaaaacaattgataaaaaattagcagaagcggaacaacaaaaacaacaagcttccgcagaagaagattttgaaaaagcggcttattatcgtgatcaaatcaataaattacaagcaatgaaagaaaaacaaatcagcgatgaagaaacacccgtcatcactgaaaaagatattgaagccattgtggaacaaaaaactggcattcctgtcggtgacttaaaagaaaaagaacaaacccaattgaaaaatttagctgttgacttaaaagctcatgttgtcggacaagatgatgccgtcgataaagtagctaaagcgattcgtcgcaatcgtgtaggcctaggcaaacaaaaccgcccaattggttccttcttatttgttgggccaacaggcgttggtaaaacagaattagcaaaacaattagcttttgagctattcggttcagaagattcgatggttcgttttgatatgagtgagtatatggaaaaacacagtgtttctaaactgattggttctcctccaggctatgttgggtatgacgaagctggacaactcacagaaaaagtccgtcgtaatccttatagtttaattttattggatgaaattgaaaaagcgcatcctgatgttttacacatgtttttacaaattctcgacgatggtcgtttaacagatgcacaaggtcgtacggtcagctttaaagacaccatcattatcatgacaagtaatgctggaacaggagctgtggaagccaacgttggcttcggtgctgcccgtgaaggtgtgactaaatccgttttaggtcaattgaacaacttcttcacccccgaattccttaaccgtttcgatggtattatcgaattcaaagcattaagcaaagaaaacctgatgaacattgtcagcttgatgttagaagaagtaaatagcttattagctaaacaaaaattacacattgaggttccaacagaagtcaaagagaaactcgttgatttaggttatgatcctgcaatgggcgctcgtcctttacgtcgaacaattcaagaacaaattgaagacggcattgctgaatactatctagatcatcctgaaaatcatcaattagtcgcagcgttagataacgaaggtaaaattatcgtaactggcgcacaagaagtgactaaaacagaaacttcaacatctgaccaagcagaataa

SEQ ID NO: 6687 - DNA, 267 bp, Enterococcus faecalis
  CDS (1)...(267)
atggaaaagaaagaatttcacattgtagcagaaacaggaattcacgcacgtccagctactttattagtacaaactgcaagcaaatttaactcagatattaacttagaatacaaaggtaaatctgttaacttaaaatcaatcatgggcgttatgtctttaggcgttggtcaaggttctgacgtaacaatcactgttgatggtgctgacgaagctgaaggaatggcagcaatcgttgaaacattacaaaaagaaggattggctgaataa

SEQ ID NO: 6688 - DNA, 1728 bp, Enterococcus faecalis
  CDS (1)...(1728)
atgtctgagatgctaaaagggattgccgcaagtgatggcgttgctgttgctaaagcttacctgctagttcaacctgacttgtctttcaacaaaacttccgtagaagatactgatgcagaagcaactcgcttagacgatgctttagcaaaatctactgaagagttgcaagcaattcgcgacaaagcagctcaaagccttggtgaagcagaagcgcaagttttcgatgctcatttaatggttttatctgacccagaaatggttggtcaaatcaaacaaaatatccaagacaacaaagtcaatgcagaagctgccttgaaagaagttacggatatgtatattggtatgtttgaagcaatggacgacaatgcttacatgcaagagcgtgcagcagatattcgtgacgttgccaaacgtatcttagcacatttattaggtgtgactcttccaaatccttcaatgattaacgaagaagtaatcgtggttgcccatgacttaacacctagtgatactgcacaattagaccgtacgtatgttaaagcctttgttacagacatcggcggacgtacttctcactcagcaatcatggctcgttcgttagaaatccctgcaatcgttggtacaaaagaaattactgacaaagtaaaagcaggcgatattttagcagtgaacggaatcattggggatgttattattgacccaacagatgctgaaaaatctgaatttgaagcagaagcaaaagcttatgcagatcaaaaagcagaatgggataaactaaaaaatgcagaaacagtgacagctgacggcaaacatgttgagttagctgcaaacattggtacaccaaaagatttagaaggcgtacacaaaaacggcggcgaagctgttggtttatatcgtacagaattcttatacatggattcatctgactttccaactgaagaggaccaataccaagcgtataaagcagttcttgaaggaatggaaggaaaaccagttgtggttcgtacaatggatattggtggggacaaagagcttccttacctaacattaccacacgaaatgaacccattcttaggttaccgtgcattacgtattagcttatcagaactaggtgacggcatgttccgtacacaaatgcgtgcattattacgtgcgtctgttcatggtaacttacgtatcatgttcccaatggttgctactttgaaagaatttagagcagcgaaagcaatctttgaagacgaaaaacaaaaattagtcaacgaaggtgttgaagtttcaaacgatatccaagtaggtattatgattgaaattccagcagctgccgtattagctgataaatttgccaaagaagtagacttctttagtgttggaaccaacgacttaatccaatacacaatggcggcagaccgtatgaacgaacgcgtttcttacttataccaaccatacaacccatcaatcttacgtttaattaaaaatgtaattgatgcagcacacgctgaaggtaaatgggctggtatgtgtggtgaaatggcgggcgatcaaacagctgttccattactattgggtatgggcttagatgagttctcaatgagtgctacatctatccttaaaacacgtagcttgatgaaacgtctagacacaactaaaatggctgaacttgctgaccgcgcattaaaagaatgcgacacgatggaagaagtcgttgcattagttgaagaatatacaaaataa

SEQ ID NO: 6689 - DNA, 1923 bp, Enterococcus faecalis
  CDS (1)...(1923)
gtgaacattaatgatttattaataaaagatgtcatgattatggatttacaagctactgataaaaaaggcgcgattgatgaaatggtccaaaaattatacgatggtggccgcatctctgacattgacacttacaaagaaggaattttaaaacgcgaagcacaaacatcgactggtttaggcgacggcatcgctatgcctcacgcaaaaaatagtgccgtaaaagaaccgacagttcttttcgctaaaagtaaaaaaggtgttgattatgaagcactagatggacaacctacttatctattcttcatgattgctgctccagaaggcgccaatgatacacatctccaagcgcttgcggccctttctcgattacttatcgacccagaatttgttggcaaattgaaagaagcggaaactccagaagcagtacaagcacttttccaagcagcggaagatcaaaaagaagcggaagaaaaagcagaacaagaacaaacaacgccagcaccagaaagcaatcgtaaatatattattgctgtgactgcttgtcctacaggaattgctcatacttacatggccgaagatgcactgaagaaaaaagcaaaagaaatgggcgtagacattaaagtagaaacaaacggttcagaaggaattaaaaatcgtttaactgctgaagatattgctcgtgctgatggcgtgattgttgcagccgataaaaaagtagaaatgaatcgatttgatggtaaaaaattagtcaatcgtcccgtcagtgatggaattcgtaaaaccgaagaactaattaacttagccattagtggtgaagctcctactttccatggcagtgactcggctgcaagcgaccaagaggattcagcggaaggttcaatcggttctcgtatctataaagatttaatgaatggtgtttctcatatgttacctttcgttattggtggcggaattgccattgctctttcctttatgattgatcaatttatcggagttcctcaagatcaattagccaacttaggtaattacaatgacgtagctagctggtttaaccaaattggtggcgcagcatttggctttatgttacctgtcttagctggttttattgcttctagtattggggatcgtccaggcttagttgctggtttcgcggctggtgcattagcaaatgctggcggagctggattccttggggccctaatcggtggtttcttagctggttatgtagtggttcttttacgtaaagtcttcaaaggcttgccaaaatcattagatggaattaaaaccattttattctatccagtttttggtttgattattacgggcttattaatgttagtcattaacatcccgatgaaagcaattaatgatgcgttaaatcatttcctacttggtttagatggcacaaatgctgctttacttggtgccttattagctggtatgatggccatcgacttaggtggaccagttaacaaagctgcttatgttttcggtacagctacgttagcaagtactgttgcagaaggtggcagcgtggtcatggcttctgtaatggctggcggaatggttcctccattagcaattttcgtagcaactcgtttatttaaaaataaatttacaaaagatcaacaagatgccggcttaaccaatattgtaatgggactttcttttgtcactgaaggggcaattccttttgcagcagctgacccattacgtgtgattccaagtttcgtggtaggttctgcctttactggtgcgttggttggtgcgtttggtatcaaattattggcaccacatggaggaatcttcgtcgtcttcctattaagtaatccattactatatctattgttcatcttaattggggcgattatttcaggaattgtctacggacttttgaaaaaacctgtcgaagtacctgcttaa

SEQ ID NO: 6690 - DNA, 918 bp, Enterococcus faecalis
  CDS (1)...(918)
atgatttacacagtgactttaaacccttctatcgactttatcgttcatgtcgatcatctacaaattggtgatttaaatcggatgacgaatgattttaaattacctggcggcaaaggaatcaacgtttcacgtattttaaaacgtatggagacagaatccactgccttaggttttttaggtggttttacaggctcattcattgccgattggttgaaaaaagaagaaatccaaacgaatttcactcccgtgtctgctgatacacgaatcaacattaaattgaaatcagatactgaaacagaaattaacggcttaggacctgctctaacaaacgaagaaattcaagaactaaaacaagcagttagtcgtgttcaggctggtgatattgttgttctttcaggaagtacacctgcttctctacgcaaaggattttacgaagaattaatccaaattgtgaaggaaaaaggcgcagaatttgttattgatacgacaggtgaagatttaatgaacgctttgtcacaaaagcctttattggtcaagccaaataatcatgagttggcagaattatatcatacaacctttacaagtgttgaagatattttaccttatggacatcggttactagaagaaggagcgcaacacgtaattatctcaatggctggtgatggtgcattacttttcacaacagaaggtgtttatcgttccaacgttttaaaacgtccactgaaaaattctgtcggcgctggcgactcaatgattgctggttttattggcaacttttcaaaaacacaagatcctttagaggctttcaaatggggtgtcgcttgcggtagcgcgactgcattttctgatgatttagcctcagaagattttatccaagaacttatccacgaagtaacaattgaaaaaatttcagaataa

SEQ ID NO: 6691 - DNA, 2259 bp, Enterococcus faecalis
  CDS (1)...(2259)
atgacacaaaaacatgccttggttcagggaatgaatcctcgacaagaagaagccgttttgcatacagaaggaccactgttagtcatggctggtgctggtagtggaaaaacgcgggttttaacacaccgaattgcctatctaattgaggaaaaagaagtaaatccatggaatattttggcgattacgtttaccaataaagctgctaaagaaatgaaagagcgtgtaaataaattactggaaacgggtggcgaagatgtatgggtctccacttttcactccatgtgtgtaagaattttacgtcgtgatgtggatcagattggttacaaccgtaattttacaattattgacccatcggaacaaaaaacattaatgaaacgcatcttaaacgacttaaatattgattcaaaaaaatatgatcctcgctcaattttaggtacgattagcaatgccaaaaatgaattacaaacgcctgaaaaagttgctgaaatgcaaggttccttatatgaagaaattgtcgcaaaatgctatgaagcctatcaaaaagaattacgcaaaaaccaatgtatggattttgatgatttgattatgaatacgattcgtttattcaatgaacaaccagatacgttggcgttctaccaaaataaatttcactatattcatgtggatgaataccaagataccaatcatgcacaatataccttagtcaatttattggctgcacgtttcaaaaatctgtgtgtcgtaggtgatgccgaccaaagtatctatggttggcgcggggcggatatgcaaaatatcttggattttgaaaaagattatccagatgccagtgtaattttgctagaacaaaattatcgatccaccaaaaacattttggcggctgcgaatgatgtcatcaaaaataaccgtaaccgccgcgagaaagaactgtggacagaaaatatagacggtgaaaaaattgtctattatcgcggggacacagaacgggatgaaacacaatttattgtgagccaaatccaaaaagaaatgcgggaaaatgaccgaatttatggtgattttgcggtattatatcggaccaatgcccaatcccgtgtagtggaagaaatgctcttgaaatctaatattccgtataccatggtgggcggacataaattctacgaccgtaaagaaattaaagatattttggcttatttaagtttgattgccaatccagatgattcgattagttttgaacgaattgtcaatgaaccaaaacgaggaatcggtaaaagttcaattgaaaaattacgactatttgcggatacgcatggttgggctttgctggaagctgcccaaaatgttgatttggcaaatatttcaggaaaagcgggtaaagagcttggtaattttggcatgatgattcaagacttaacgaaaacagtgccctatttaacgattacagaattggtgaaagaaactttacaacgtagtggttatcgggaagctttgatggcgcaaaataatttagagtctcaagctcgcttagaaaacttggacgaatttttatctgtgacacaagaatttgataaacgttttgaagcgcaaaataacgacgatccaaatggcgaagaaacaaaattagcggattttttaacagatttagccttggtttctgatttagataatttagaagagagctcttcacaagtaaccttaatgacgttgcatgcggccaaagggctggaatttccagtggtctttttaatgggcttagaagaaggggttttcccattatcacgtgccatgctagaagaaagtgaactggaagaagaacggcgcttggcttatgttggtatcacacgagcggaagaagccctgttcttaacgaatgcttattcgagaacattatatggtcgcacgcaatataatcgaccaagtcgctttttagaagaaattgaggcggagcgtttaatgaaacaaggggcggcggccaatttacagaaagctccagcgcgcacctttgatcctaaagtattcaagcccagcgcaagtaaaccagcttatacacagccagctacaaaatcagttagcaacaaagtggcaagtggtggcgaaaaagtttcttggcaagcaggtgataaggtccaacataaagcatggggcgttggtacagtcgttcgtgtaggcggttcggccaaagacttagagttggacattgctttcccagaaaaaggcataaaacggttgttagcggcatttgcaccaattgaaaaaatttaa

SEQ ID NO: 6692 - DNA, 2049 bp, Enterococcus faecalis
  CDS (1)...(2049)
atgaggaggagttctacgatggaacaacaaccattaacattaacggcggcgacaactcgtgcgcaagaattaagaaaacaactcaatcaatattcccatgaatattatgtcaaagatcaaccatccgtagaagattatgtttacgatcgtttgtataaagagttagtcgatattgaaacggagtttcctgatttaatcacgccagattcgccgacacaacgtgtaggtggcaaagttttatctggttttgaaaaagctccgcatgacattccaatgtatagtttaaatgatgggtttagcaaggaagacatttttgcttttgatgaacgtgttcgtaaggcgattggtaaacccgttgcttactgttgcgagttgaaaattgatgggttagcaatttcattacgttatgaaaacggggtgtttgtacgcggagcaacacgaggcgatggaacggttggtgaaaacattacagagaacttacgaacggttcgctctgtaccgatgcgtttaacggagcccatttcagtggaagttcgtggcgagtgctacatgcctaaacaatcctttgtcgcgttgaatgaagaacgtgaagaaaatggccaagatatttttgccaatcctcggaatgcagcggcgggaagcttgcgccaattagacacaaaaattgtggcaaaacggaacttaaatacgtttttatacacagttgctgactttggaccaatgaaagcgaagacgcagtttgaggcattagaagagctttctgcaattggttttagaaccaatcccgaacggcaattatgtcagtcaatcgatgaagtttgggcctacattgaagaataccatgaaaagcggagcactttgccatacgaaatcgatggaattgtgattaaagtgaacgaatttgtgttgcaagatgaattaggtttcactgtcaaagcacctcgctgggcgattgcctacaaatttccaccagaagaagcagagacagtagtggaagatattgaatggacaattgggcgcacgggagtggtcactcctactgcggtcatggctcctgtacgagtcgcgggaaccacggttagtcgggcaagtttgcataatgcagattttattcaaatgaaagatatccgtttaaatgatcatgttattatttacaaagccggcgatattatcccagaagtagcgcaagtcctagttgaaaaacgtgcagccgatagtcagccttatgaaatgccgacacattgtccaatttgtcatagtgagttggtgcatttagatgaggaagtggcgttacgttgtattaatccaaaatgccctgcgcaaattaaagaagggctgaatcactttgtctcacgaaacgcaatgaacattgatggcttggggccacgagtgttagcacaaatgtatgacaaaggattagtgaaagacgtagcggatctgtatttcttaacagaagaacaattaatgactttggataaaatcaaagaaaaatcagcaaacaacatttacactgccattcaagggagtaaagaaaactctgtcgaacgtttgatttttggcttaggaattcgccatgtgggggcgaaagcggcgaaaattttagcggagcattttggtgatttaccaaccttaagtcgtgcaactgcggaagaaattgtggctttggattcaattggcgaaacaatcgcagacagcgttgtgacgtattttgaaaatgaggaagttcatgaattaatggctgaactggaaaaagcccaagtgaacttgacatataaaggtctccggacagaacaattagcagaagtggagtcacctttcaaagacaaaacagttgttttaacaggaaaattaacgcagtacactcgcgaagaagccaaagaaaaaattgaaaatcttggtggaaaagttacagggagtgtttcgaaaaaaactgacattgtggttgctggcgaagatgcaggcagtaaattaaccaaagctgaaagcttaggcgtgagcgtttggaatgaacaagaaatggtcgatgcgttagatgcaagtcatttttaa

SEQ ID NO: 6693 - DNA, 327 bp, Enterococcus faecalis
  CDS (1)...(327)
atgatagaaagaagggtatctatggcaattacagaagaacaagtcaaacatgtcgctaaattatcaaaattatctttctccgaagaagaattagcggactttaccaatcaactagataaaattattgatatggtggaattactagaagaagtagatacaacaggggttccttttacttcaaatgtgaatgaatcaatcaatgtcatgcgtgaagacgtagcgacaccaggaatggaccgtaaagaattaatgcggaatgttccggaatcagagaatggttacattaaagtgcctgcaattatggataacggggaggcaggagcctaa

SEQ ID NO: 6694 - DNA, 1470 bp, Enterococcus faecalis
  CDS (1)...(1470)
atggaaaaattatacgacaaatcgttaacagagttacatgatttattggtttcaaaagaaatcacagcagttgatttaaccgaagaaacattaaatcgtattcaagatacagaagaacaactaggttcttttatcacagttagtgaagaaaaagcaatggcattagccaaagcgattgacttaaaaggcatcactgaaagtaatccattagctgggattccaattgggattaaagacaacattgtcacaaaagatattttaacaacagctggctcaaaaatgttacacaattttgacccaatttatgatgcgaccgtgatggataaagtctatcaagcggatatgattccagtcggaaaattgaacatggatgaatttgccatgggtggaagtacggaaacgtcttacttcaagaaaacaaaaaatgcttgggatcaaaccaaagtccctggtggttcttctggtggttcagcttctgctgtcgcagccggacaagtcccagtttctttagggagcgatacaggtggcagtatccgccaaccagccgcattcaacggtattgtgggcttgaagccaacttatggacgtgtgtctcgttttggcttgattgcttttgcttcaagtttagaccaaattggtccattgacacgaaatgttaaagacaatgccttagctttaaatgcaattagtggttatgacgaaaaagacggcacttctgcaggcgtttctgttcctgattttacggcagatttaactggcgacatcaaaggcatgaaaattgctttaccaaaagaatacttaggtgaaggggtacaacctgatgttcgtgaagcggtattaaaagcagcagaaacatttaaatctttaggagcaacggtggaagaagttagtttgccacattctaagtacggcgtagcggtttattatattattgcctcttcagaagcaagttcaaacttacaacgctttgatggcattcgttacgggtaccgttcagacaatgtacaaaacttagaagatgtctatgttaattcacgttctgaaggtttcggaacagaagttaaacgtcggattatgttaggaaccttctctttaagtgctggttattatgatgcgcactttaaaaaggctggtcaagtccgtacactaatcaaacaagattttgagaatgtctttgcggattatgacttaatcattggcccatccacaccaacagttgcctttggtctaggggaaaacatcaatgatccaatcacaatgtatatgaatgatattttaaccattcctgtcaacttagcaggactaccaggcatgtccattccagcaggcttctcagaaggcttgccagttggtttacaaattattggaaaacattttgacgaacatacaatgtataaagcagcctatgcttttgaacaagcgacagatttccatacgaaaaaaccagtcattttaggggggaacgattaa

SEQ ID NO: 6695 - DNA, 1431 bp, Enterococcus faecalis
  CDS (1)...(1431)
atgaactttgaaactgtcattggattagaagtccacgtagaattgaaaaccaactctaaaattttctcctctgcgccagcgcatttcggagcagaaccaaatagcaacacaaatgtggttgactggagttacccaggtgttttgcctgtcatgaataaaggtgccttagaatttggcatgaaagcagcacttgccttgaactgtgaaatttcaaaagaaacacattttgaccgtaaaaactatttttacccagataacccgaaagcataccaaatttctcaatttgatcaaccaatcggacatgatggttggattgaaattgaagtcgaaggcaaaaagaaaaaaattcgcattgaacgggtgcatttagaagaagatgctgggaaaaatattcacggcacagatggctattcttatgtagacttgaatcgtcaaggtacgcctttaattgaaatcgtttctgaagcagacatgcgctcaccagaagaagcgtatgcttatttagaagcgttgcgttcaattatccaatttacagaagtttctgatgtgaaaatggaagaaggttctatgcgttgtgatgccaatatttctttacgtccgtatggtcaagaagaatttggtactaaagcggaattaaagaacttgaactctatgaactttgtaaaaaaaggtttagcttatgaagaaaaacgccaggccaaagtcctattatctggtggcgaaattcaacaagaaacacgccgctttgatgaagcaactagtacaacgttgcttatgcgtgttaaagaaggctcaagtgactaccgttacttcccagagccagatgttcctcgtttttcaattgatgatgaatggattgaaaaagttcgcgctagtttgccagaaatgccagcctcacgtcgtgcccgttatatcagtgaattagggttacctgaatacgacgcaatggtcttaactttaacgaaagaaatgtcagatttctttgaagcaactttagcaaacggtgcagatgcgaaacaagcatcaaactggttaatgggcgaagtttctgcttacttaaacagtgaaaaagttgaattagccgatactaaactaacaccagaaaatctagcgggtatgattactttgattaacgatggcacaatcagctcgaaaattgcgaagaaagtgttcaaagagttaattgaaaacggtggagacgctaaagaagttgtcgaagcaaaaggtttggttcaattatctgatccagcgcaattattaccaatgattaacgaagttttagacaacaaccaacaatcaattgatgactttaaaaacggaaaagaccgtgcagttggtttccttgttggacaaattatgaaagcaactcgtggacaagcaaacccaggtgtggttaacaagttattgcaagaagagctttcaaaacgataa

SEQ ID NO: 6696 - DNA, 1089 bp, Enterococcus faecalis
  CDS (1)...(1089)
atgaaaaaagctagagtgatttataatccaacgtcaggaaaagagttaatcaaaaagaacttagccgatattttatctattttagaagaatgtggttatgaagccagtgcatttgcgaccacaccagaagaaaattcagcacgcaatgaagcacatcgtgctgcgcgtgcaggatttgatttactagtagccgcaggtggagatgggaccattaatgaagtcgtgaatgggattgctccgttgaagcggcgccctaaaatggccattattcctgctggaacgacgaatgactatgcacgggccttgaagattcctcgtgataatatcgttaaggcagcagaagtgattaaaaaaaatcaaactgtcaaaatggatattggccaagccggcaaaaattactttatcaatattgcggcgggtggtcatttaacggaactgacttatgaggttccgtcagagttgaaaagtatttttggttatttagcgtacttagccaaaggagccgaaatgttgccacgagtgaagccgattaaaatgcgcatgacgtatgatgaaggtgtgtacgaaggcaatgcatcaatgtttttcctagggctgactaactcggtgggtggttttgagcaaatcgtaccagatgctaaattagacgatggtaagttttcattaatcattgtaaaaacagccaatatttttgagattcttcatttagttgcgttaatgttaaatggtggaaagcatgttgaagatcatcgactaatctatacaaagaccagctatttacatgcagaaacgttagaaaagaacaataaaatgatgattaatttagatggtgaatatggaggcgatgctccaatgacctttaaaaatatgcatcaacacattgaaatttttgcaaattgtgatgcactgccgtccaatgcaattatgggttctgtcttaactggtagcgatgagattgtcgtagaatcagaagacgaagaggaagaagcatataacgaagccagcaaagaatttgtcaaagaagttgaacgactaacagacgaagatattgatggcgatggaaagattgccgaaaaagaaaagcactag

SEQ ID NO: 6697 - DNA, 945 bp, Enterococcus faecalis
  CDS (1)...(945)
gtgaaaaaattacgtgaattaacagtagaagaactttttgaatcatttgttctaattaaaaatgccgatgtacgtgtagctaaaaatgggaaaaagtttattgcctttacctttcaagacacatctggcacgattgacggaaaatattgggacgcctctgaggatgaaattacacggtttactgcgggaaacgttgttttactgaatgggaaacgagaagtttatcaaaataaaccccaagtaaaaattttacacatgcgtttagcgacagcagaggaaccaagccagccaagtttatatatggaacgagcgcctttgaaaaaagaagagatggtcgaggaaatcaatcaagtgatttttgagattaccaatgctcattggaatcgtattgtgcgctatctcatgacgaaataccaacaagaattttatgaatttcctgcagccaaacggaaccatcatgcttttgcgaatggcttagcttaccacactgtctcaatgttgcgcctaggcaaagcaattgctaaggaatatcctgaaattaacacgtcactattatacgcggggattattttacatgacttaggaaaagttttagagttatctggcgctattacgacagaatatacggtggcagggaacttaattggtcatttagttttggtggatgaggaaattaccaaggcgtgtttggctttgaaaattgatgatcgagaagaagacgttgtcgttcttcggcacatggtcttagcccaccatggattgttggaatatggctcacctgtgcgaccaagaattatggaagcggaaatcttacatcaaattgataccatggatgcgtccattcaaatgatgctaggggcaattcgtcaaacacagcctggggagtatacggaacgaatctttggtttagataaccgcagtttctatgttccaaaagataaataa

SEQ ID NO: 6698 - DNA, 951 bp, Enterococcus faecalis
  CDS (1)...(951)
atgaaataccaagtattactttattacaaatatacaacaattgaagatccagaagcttttgcgaaagagcatctagctttttgcaaatcattaaatttaaaaggccgtattttagtagcgacagaagggattaacggaacgttatctggtactgtcgaagaaacagaaaagtacatggaagcaatgcaagcagatgagcgctttaaggatacattctttaaaattgatccagcagaagaaatggcgttccgcaaaatgtttgttcgcccacgttctgaattagtggcgttgaacttagaagaagacgttgatccattagaaacgacggggaaatatttggaacctgcagaatttaaagaagccttactagacgaagacactgttgtaatcgatgctcgtaacgattatgaatatgatttaggtcatttccgtggtgccgtgcgcccagatatccgtagcttccgtgagttaccacaatggattcgcgagaacaaagaacaatttatggataaaaaaattgttacctattgtactggcgggattcgctgtgaaaaattttctggctggttattaaaagaaggatttgaagatgttgctcaattgcatggtggtatcgccaactatgggaaaaatccagaaacacgtggcgaactttgggacggcaaaatgtatgtctttgatgaccgaatcagtgtcgaaattaatcatgttgataaaaaagttattgggaaagactggtttgatggaacaccttgcgaacgctacattaactgtgcaaacccagaatgtaatcgtcaaatcttaacttcagaagaaaatgaacataaacatttaggtggctgctcattagaatgtagccagcatcctgccaaccgttatgtaaaaaaatataatttaacagaagcagaagttgctgaacgtttagctttgttagaagcggttgaagtataa

SEQ ID NO: 6699 - DNA, 2169 bp, Enterococcus faecalis
  CDS (1)...(2169)
atgaaaaggaaacactttttactttctttctttgtgatgatggtaactctgctaacattcattagtggcacttcagcacatgcagaaggaaagaaatatacaattggaacggatttaacattcgccccttttgaattccaagactcaaaaggaaaatacattggtattgacgttgatttattagatgcgattgccaaagatcaaggttttgaagtggatttaaaaccattaggcttcgatagtgcagtccaagcgattcaatctaaacaaattgatggcatgattgctggaatgagtattacggatgagcgaaaaaaatcctttgatttttcagatccatacttcgatagtggtttacaattagcggttaaaaaaggaaacgacaaaattaaatcatatgatgatttaaaaggcaaaacggttgcggctaaagttggaactgaaagtgccaatttccttgaaaaaaataaagagaaatatgactacactatcaaaaattttgacgatgcaacgggtctttataaagccttagaaaacggtgaagcggatgcaatcgttgatgattatcctgtattgggctacgcagttaaaaatggtcaaaaattacaattagttggcgataaagaaacaggcagttcttatggtttcgcagtgaaaaaaggtcaaaaccctgaattaatcaaaaagttcaacgctggtttgaaaaatcttaaagacaatggtacttatgataaaattttaaacaactacttagcgacaggcgatgaaacaaacacacaagacgctggcgaacagatgaaaaaaatcactcctaaaaaagagaaatatgtgattgctagtgattctacatttgctccgtttgagtttcaaaatgcccaaggcgattatgtcggaattgatgtagatttagtcaaacgtgcagctgaattgcaaggttttactgttgaatttaaatttattggttttagttctgctgtccaagctgttgaatctggtcaagcagatgggatggttgcaggcatgacgattacggatgatcgtaaaaaagccttcgacttctctgttccttactttgatagcggtattcaaattgcggtcaaaaaaggcaatgacaaaattaaatcgtatgatgatttaaaaggcaaaaaagtcggcgtaaaaattggtactgaaagtgctgatttcttagaaaaaaataaaaagaaatatgattactcaattaagtatttagacacaactgatgcattatacagtgcattagaaattggcgaagttgatgccatgatggatgattatcctgtcattggctacggggttgcgcaaaatcaaccactagcgacaccaattcctcgtgaaaaaggtggttcttacggttttgctgtcaaaaaagggcaaaatcctgaactacttgaaatgtttaacgaaggcttaaaagaaatgaaacgtacaggtgaatacgataaaattatcggcacttacgtaaaagatggcaacgaagccaaagaagaaacagctgacgaatctacgtttgttggcttcatgcaaaacaactggaaacaattgttacacggtttatggatgacgattctattaacgttgatttccttcgtacttgctttaattgtcggcgttatttttgggctattcagcgtttcaccaatcaaagcattacgtgtactttcaaccatttatgttgatttaattcgcggaattcctttaatggtcttagcgttcttcatctatttcggattacctggtgtgcttggctttaatatcccggtcttcattgctgggattatcacattaactttaaatgccagtgcctatatttctgaaattgtgcgcggcggaatcaaagctgttccagttggccaaatggaagcttcaagaagtttaggtctttcctataatcggacaatgcaaaaaattattttaccacaagcgattcgcattatgattccttcattcattaaccaatttgttatttcattgaaagatacaactatcctttcagcaattggcttaatcgaactactacaaacaggaaaaattattgttgctcggacattacaaagtacaatggtttacttcgttattgcgttaatctacttaattttaattactagtttaactaaattagcgaaaaaccttgaaaagaaggtgaactaa

SEQ ID NO: 6700 - DNA, 2820 bp, Enterococcus faecalis
  CDS (1)...(2820)
atggcaaatgataaaattgtgattcatggtgcacgcgcccataacttaaaaaatattgatgtcacgattcctcgtgacaaaatggttgttgtaactggactatctggttctggcaaaagttcattagcgtttgatacgctttacgcagaagggcaacgacgttatgtagagagtctctctgcttatgcgcgacaatttttgggacagatggataaaccagatgttgacagcatcgatggtttaagtccagctatttcaattgatcaaaagacgacaagtaaaaacccgcgctcaacggtggggacggtcacggaaatcaatgattatttacgattgttatttgctcgggtaggtcatccaatttgtcctaacgatcatattgaaattaccagtcagtctgttgaacagatggttgataaagtcttagagctaccagagcgaacaaaaattcaaattttggcgcctgttgtggtcaagaaaaaaggccaacataaaaaagtgtttgaaatgatccaacgtgaagggtatgtcagaatgcgggtggatggtgaaacctatgatgttagtgaggcaccagaacttgaaaaaaataaaaaacatgatattgcgattgtgattgaccgtatcgttgtgaaagaaggtattcgctctcgcttgtttgattcgtttgaagcggctttgcgtttagctgaaggttacgcaattgttggtgtgattggtcaagaagagatgttgtttagtgaacattatgcttgtccttattgtgggttcacagtcggtgaattggaaccgcgcttgttttcatttaatgcaccatttggcgcttgtcccgattgtgatggtttaggtgttaaattagaagtggacaaagacttagtgattccagatcccactaaaaccttgagagaaggagccattgttccgtggaaccctattagttcccaatattatccacaaatgttggagcaagcagctaccagttttgggattgatatggatacgccgtttgaagaattacctgcagaccaacaagaaattattttaaatggttctggcgagaaaaactttcattttcattatgaaaatgactttggtggtgttcgtgatgtggaagtaccatttgaaggtattttaaaaaatattaaacgacgttatcatgaaacaaatagcgattttacacgagatcaaatgcggttatacatgacagaattgacttgtcgaagctgtcaagggtatcgtttgaatccgcaagctttagctgtaaaaatcaatggcacgcacattggtgaagtcagtgaattagcaataaaaaatgcggtccaattttttgaaggtgtgtctttatctgaacaagaaataacgattgctcggccaattttaaaagaagtcgaagatcggttaaccttcttaaaaaatgttgggttagattacttaaccttaagtcgagctgctggtacactttctggcggagaagcacaaagaattcgcttagcaacacaaattggatcaaacttatcaggcgttctttacattttagatgaaccatcaattggtttgcatcaacgagataacgaccgcttgattgactcattgaaaaaaatgcgggacttaggcaatacattaattgtggtggaacacgatgaagatacaatgatggcttcggattacttgattgatgtgggacctggcgctggacatctgggcggtgaaattgtagccgctggtacgccggaagaggttgctaaaaatccgcattcattgactggacaatatctttctgggaaaaaagtgattcctgtaccaaaagaacgtcgcaaaggtaatggcaaagcgatcaaagtcactggtgccagtgaaaataatttaaaaaatgtcagtgttgaatttccgctaggtgaatttgttgctgtcacaggcgtttcaggttcagggaaaagtactttagtcaatcaaattttgaaaaaagcactggcccaaaaattaaatcgtaattccaataaacctgggaaacacaaaagtatcactggttatgaagccattgaaaagattgttgacattgatcaaagtccaattggtcgaacgccaagaagtaatccagcgacttatactagtgtttttgatgacattcgcgatttgtttgcccaaacaaatgaagccaaggttcgtggttataaaaaaggccgctttagttttaacgtcaaaggtggccgttgtgaagcttgtcgcggggatggtatcatcaaaattgaaatgcactttttacctgacgtctatgtgccttgcgaagtttgtcatggcaaacgttataattctgagacgttagaagttcattataaaggcaaaaacatttctgatattttagatatgacggtggaagatgccgtagaatttttcaaacatatccctaaaattcatcgtaaattgcaaacaattgtggatgtaggcttaggctatgtgacattggggcagccagcaactactttatctggtggagaagcacagcggatgaagctagcgagtgaacttcataaaaattctaatgggaaaaacttttatattctggatgaaccaacaacaggcttgcataccgatgatattgcgcgattgcttctagtattagagcgtttagtggaagcgggcaataccgttttagtgattgaacataacttggatgtcatcaaatctgcggatcatgtgattgatctagggccagaaggtggcgacggtggtgggacgatcgtggcgacaggaacaccagaagaagttgctaaagtcaaagacagttacacaggatattatttaaaacgtgttctgaaataa

SEQ ID NO: 6701 - DNA, 1005 bp, Enterococcus faecalis
  CDS (1)...(1005)
atgtcaatgctgtttttctatgaaagaatagaaatctttataagaatgattgaaaagctttctttgatacgcccggggtgttataatatagtgatgcaagtgaagggagtgttgaatatgccagaaaatttacaactggttattattacaggaatgagtggcgctggaaaaacagtcgctgttcaaagctttgaagacatgggctatttctgtatcgacaatttaccaccaagcttaatcccaaaattttgggaattaattaaagaatctggaaaagttaccaagattgcgttagtgatcgatttacgttcacggaccttctttagagaaattcaggatatgttagtcgaacttgaaaatactaattttattgatacaacgattttatttttagatgccaccgatgaagagttagtttctcgttataaagagacacggcgtgcgcatccaatggcgatggatggtttagtgacagaaggtattcgtaaagaacgtgcaatgctggaagaaatcaaggcggatgctcagttggttattgataccacggacttgtcccctcgtcaattgcgggaacgtttgaataaagaactagcaacgagagagacacacgaatttcgagtggaaatggtgtccttcggctttaaatatggtttgccgattgatgcagatatcgttatggatgttcgctttttacctaatccccattatattgatgaactacggccgttaactggaatggatcaacctgtttatgattatgtgatgggcttcccagaaacagatgaattttataccaaatttatcgatttactgcgaacagtcttacctggatataaaaaagaaggtaaaagtagcgtcaccattgcaattggctgtactggcggacaacatcgctctgttgcattgacagaacgtgttggcgctgaattaaaagaggaagattaccatgtaaatattacccaccgcgaccgcttaaaaagaaaagaaacggttaatcgctcttaa

SEQ ID NO: 6702 - DNA, 996 bp, Enterococcus faecalis
  CDS (1)...(996)
atgaaaacctatcgaattcgtaaaccgaagattgtggttgttggtggtggaacaggcttgccagtaattttaaaaagtttaagaaatcaaagtgttgatattactgccgtcgtaacggtcgctgatgacggcggtagtagtggcgagcttcgttcctctattaataacatgacacctccgggagatttaagaaatgttttagtggcattgtcagatatgccacaattatatgaagatatttttcaatatcgttttgataaatcagatagtcattttgccaatcatgcaatcggtaatttaatcattgctgctgtctcagaaatgagaggaagtacgtatgaagcgattcaattgctttcaaaaatgatgcatgttgatggacggatttatccatcatcagaacggccattaacgttacatgccgtatttaaagatggctcagtggcggtgggagaatcaaaaattgcactggatcgcaagacgattgaccatgtgtttgtaacaaatacacacggagaagaacagccaagagctgcgcgtaaagtcgtcaaagcaattgaagaagcagacatggtcgtgttaggaccagggagtctttttacaagtattttacctaatttagttattacagaaattggtgaagccatcaaacaaacagctgcggaagtagtctatatttgtaacatcatgacccaaaaaggggaaacggaacattttacggatgcagatcatgttcgtgtcttaaacgaacatctacaagcgcagtttgttgatacagtgctggttaatacagaaaaagtaccagaaaattacatggatcctgaaatttatgatgaatatttggttcaagtaaagcatgattttcaaggattacgtgaagaaggatgccgagttatttcgacagactttttagaattaagagatggcggagtttttcatgatggggaaaaagttgttgaagaacttttccgtatcgtatttggaacgaaatattaa

SEQ ID NO: 6703 - DNA, 936 bp, Enterococcus faecalis
  CDS (1)...(936)
atgtcttttgcctcggatgtcaaaaaagagttaactggtttagaagtccatcgagaacacgcgaaagcagaattagcagcattaattcggatgaacggctcacttagcttagttaatcaacagtttgtcttgaatgtacaaacggaaaatgctgcaattgctcgtcgaatgtattcattgctgaaagatcattaccatgcacaagcagaattattagttcgtaaaaaaatgaaactaaagaaaaataatgtttacattgtgcgtctaaaacaagatacacaaaaaattctagctgatttggatattatggatggggtcgtttttaatggcaatgtgtcaaatgaaatcatgggtaacgcgcaaaaaatgcgttcctatttacgtggagccttcatggcttctggctcagttaataatccggaaacaagtcgctatcatttagaaattttttcaatttatgaagaacacaataatgatatttgtaagatgttgaattactatgacttaaacgctcgaacattgggacgccgaaatgggtatatttgttatttaaaaggtgctgaaaaaattgccgactttttaacattaattggtgccacgaactctatgttgaaatttgaagatgtccggattgtccgtgatatgcggaattcagtaaatcgtttagtgaattgcgaaacagcgaatttaaataaaaccattgatgcggcttcaaaacaaattgaaaatattcaatttattgaaagtacagtagggctgacgtcattaccggagaaacttcaggaaatcgcagaattacggttagagtatccggaagttagtctcaaagaactaggggaaatgattccttcaggagctatttctaagtcaggtattaatcatcgtattcgaaaaattaatgaatttgcagaaaaattacgagaaaaaagtgcgtaa

SEQ ID NO: 6704 - DNA, 1557 bp, Enterococcus faecalis
  CDS (1)...(1557)
atggctatcaaagcagaagaaatcagtgccttgattaaagaacaaatcgaaaactatcaacaacagcttgctgttgaagaagttggaacagtcacttacgtcggtgacggaattgcccgcgcccacggtttagaaaatgccatgagtggagaacttgttgagttttcaaacggttcatacggaatggcacaaaacttagaaacaaatgatgtagggattattatccttggcgattttgaaaccattcgtgaaggagataaagtacaacgcacaggcaaaatcatggaagtacccgttggggaagctttgattggccgtgttgttaatccattaggtcaaccattagatggtttaggcgaaattaaaacagacaaaacacgtcctgtggaagcaacagctcccggtgttatgcaacgtcaatctgttgctgaaccaatgcaaactggcttaaaagccattgatgccctcgtaccaattggtcgtggacaacgggaattagttattggagaccgtaaaacagggaaaacatcgattgcaattgatacaattattaaccaaaaaggacaagatgtaatttgtatttatgtagcgattggtcaaaaagaatctactgttcgtaaccaagtagaaacacttcgtaaatttggtgccttagattatacaatcgttgtgactgcaggggcttcacaaccagcaccattactttacattgcaccatatgcaggaactgcaatgggtgaagaattcatgtataacggcaaacacgtcttaattatttttgatgacttatcaaaacaagccgtggcttatcgtgaactttctctactattacgccgtccaccaggtcgtgaagcttatccaggggatgtcttctatttacactcacgtttattagaacgtgcagctaaattaagtgatgaattaggtggcggctcaatgacagccttaccattcgttgaaacacaagcaggcgatatttctgcttatattccaacaaacgttatttcaatcactgatggacaaattttcttagaaagcgacttgttctatgcaggcactcgtccagccgttgatgctgggttatctgtttctcgggttggaggatcagcgcaaatcaaagcaatgaaaaaagttgccggaacgcttcgtttagacttagctagttaccgtgagttagaagcctttacacaatttggctctgatttagatgcggcaacacaagctaaattaaaccgtggtcgtcgtacggtagaaattttaaaacaaaaactacatgcgccactgcctgtagaaaaacaagtcttaattttatatgcgttaacacacggctttttagatagcgtgagcgtagataaaattttacactttgaacaagatttattcgattattttgatggcaaacatgcagacttattggaaaccattcgtacaacgaaagacttaccagatactgatgcattagatgcagcgattacagagttttctgaaatgtttgcagcggcaaacaatagcggagattcagccaaagaagctttagaaaaaatcgataacgcataa

SEQ ID NO: 6705 - DNA, 1809 bp, Enterococcus faecalis
  CDS (1)...(1809)
gtggcaattatcgcccacgttgaccatggtaaaacaaccttagtagatgaacttttaaaacaatctgacactttagatggacacacacaattacaagaacgtgcaatggattccaatgcacttgaaagtgaacgtggaattactatcttagcaaaaaatacagccgtagattataacggtacacgtatcaacattctagatacaccaggacacgcggacttcggtggtgaagtagaacgtatcatgaaaatggtagatggtgttgttttagttgtcgatgcgtatgaaggaacaatgcctcaaacacgtttcgtattgaaaaaagcattagaacaaaaagtaacaccaatcgtggttgttaacaaaattgacaaaccttctgctcgtcctgaacacgtagtagatgaagttttagagttattcatcgaattaggcgcagacgacgatcaattagatttcccagttgtttatgcttctgctttaaacggaacttcaagtgaatcagatgatccagcagatcaagagccaacaatggccccaatttttgataaaattattgaacatgtgccagctccagttgacaattcagacgaaccacttcaattccaagtctcattactagactacaacgattacgttggacgtattgggattggccgtgtgttccgtggcacaatgaaagtcggcgaccaagttgcgttgatgaaattagatggcagcgtgaaaaatttccgtgtaacgaaaattttaggtttctttggcttacaacgtgtggaaattgatgaagcaaaagcgggcgatttaattgccgtttccggaatggaagacattttcgttggggaaacagttgtagatgttcacaatcaagaagcattaccaattctgcacattgatgagccaaccttacaaatgactttcttagttaacaattctccatttgcgggacgtgaaggaaaatacatcaccgctcgtaaaatcgaagaacgtttaatggctgaattacaaacagacgtatctttacgtgttgatccaattggcccagattcttggactgtatcaggccgcggcgaattgcatttatcaattttaattgaaaacatgcgtcgagaaggttatgaattacaagtttctcgtccagaagttattgaacgtgaaattgatggggttaaatgtgaaccatttgaacgtgttcaaattgacacacctgaagaatacatgggtagcgtgattgaatcactaagtttacgtaaaggcgaaatgcaagatatgattaatgccggtaacggacaaatgcgtttaatcttcttagcaccagctcgtggcttaattggttattcaacagaattcttatcaatgactcgtggttatggtattatgaaccacaccttcgatcaatacttaccaatgattcaaggaacgattggtggccgtcatcaaggtgcactagtttcaatcgatactggtaaagcaacgacttactcaatcatgagtattgaagaacgtggtacagttttcgttgaaccaacgacagaagtttacgaaggaatgattgttggggaaaacaaccgcgacaacgatttaactgtgaacatcacaaaagctaaacaaatgactaacgttcgttcggcaacgaaagaccaaacatcagtcatcaaaaaaccgaaaaaattaacgttagaagaatcattagaattcttgaatgaagatgaatactgtgaagtaacaccagaaagcatccgtttaagaaaacaaattcttaacaaaaacgaacgcgaaaaagcaagcaagaaaaagaaaaaagctgaataa

SEQ ID NO: 6706 - DNA, 1770 bp, Enterococcus faecalis
  CDS (1)...(1770)
atgagtgcattacaagaattattaaaagatacatttggctatgatgattttcggtcaggacaagaaacgattattcgtcatgtattgcgacaagaaaatgtcttaggcattatgccaacaggtggaggcaaatcgatttgttatcagttgccagccttacttctggataatttaacattggtgatttcaccattaatttctttaatgaaagatcaagtagatgccctgaatttaatggggattccagctacatatatcaatagtaccatttcctatcaagaaatgaatcaacgtattcaattagcggttaacaaagaagtcaagctattgtatgttgcgccagagcgattagaatcttatgattttcaacagatgctgacacatgtaccgattgatttattggcagtagatgaggcacactgtatttcacaatgggggcatgattttcgtccaagctatttgcgtttagcagagattatcgatcaatttcaacagcaaccaactgtgattgcactaacagcaacagcaacgccacaagtagcggaggatattgtcaagcaattaagaattccatcagaaaatgaaatcaaaacaggattcgctcgagaaaatttatcttttcaagtcgtgaaggatcaaaacagagacgtttttcttttggaatatttaaagatgaatactgggcaatcaggtattatctatgcaagcacgcggaaggaagttgaacgaatttatcatttattagaaagtaaaaaaattgcagctgggatgtatcatgggggcatgagtgaacagttacgtagtgaaaatcaagaagcattcttgtatgatcaagtgcaagtgatggtagcaacaaatgcctttggtatggggattaataagagtaatgttcgttttgtcattcacgcacaagtaccagggaatattgaatcttattaccaagaagccggccgagctggtcgtgacggtctgcctagtgatgctgtgttaatgtttgctccacaagacttgcaaattcaacaatactttattgaacaatctgaaatgaccattgattataagcagaaagagtacttgaaattacgggaaatgtcacaatatgcgaatgcacaaatgtgtttacaaaaatatattttacgctattttggtgaagaagggacggactgcggtcgctgctcgaattgtctggataatcgagaattagtcgatattacggtcgatgcccaaaaagtcttgtcttgtgtaaaacgtatgggagaacgtttcggtaagggcttagttggtaaagtcctgactggctcaaaagatcaaaaaattgatcaatggcattttgatcgtttgccaacatacggactaatgaaaggtcgcacgcaaaaagaagtcacacagctgattgattatttgacagcagaacgttatttaattccttctgatgggcaatttccgttgttatcagtctcgacagaaggtgttcaggtgcttttaggggaacggaaagtcttccgaaaagaagaccaaaaagttcgaaaagtagcagtggatgatgccttgtttgaacgattacgcgaattacgtatggacatggctcaagaggcaggcgtgccgccatatgtagtcttttccgatagtacacttaaagaaatgtgtgaaaaattaccgcaaacaacgattcaattattgcaaataaaaggggtcggccaaaataaattagataaatatggcaccgcctttttagaagtaattaaagaatatcaagagacaaaaaaatga

SEQ ID NO: 6707 - DNA, 306 bp, Enterococcus faecalis
  CDS (1)...(306)
atggacgaaggaatttcaaagaaatttgccattcaattattagaagacgatgcagaacgcattaaaatgcttattcgtaatcaaaaaaacagtttgtgcatttctcaatgtaaagcatttgaagaagtggtggatacacaaatgtatggtttttcaagacaagtgacctatgcgacccgtttggggattttaactaatgatgaaggacatcgcttactaagtgatttagaacgcgaattgaatcaattatatacagatgtttatgaagaaacacaagaaaaaaacgagattggcaaggagggttaa

SEQ ID NO: 6708 - DNA, 1137 bp, Enterococcus faecalis
  CDS (1)...(1137)
gtgggattgattatggtatatagttccacatccgcattacaagtaatgaaaggtttttcacctacgtcattcgttattaaccaggttgccttttgggtagtagggttagttgcaatgttttttatttataagatgaaaacatccgtttttcagaatcgaagttttatcatgtttgccattgcagtaattacggttatggttttagccgttcggattcctggtatcgggaaagaaattaacggcgcacgtggttggattgagattggtggattttcgatgcaaccagctgagtatttaaaaattatggttgtctggtatctgtcttatattttagcacggcgacaaaagacaattaatggaggcatggatcaatttaaacaagctgccgggcgcccgttgatgctcgtttttgtattaattgctctagttgcaatccagcctgacttcgggaatgcggccattctaacattaattaccatcgtgatggttttagcaagtgggattaattatatgtatacctacttggttggtggcttgggcattttaggtagtatcacggctattcagttattaattatgtcgaaaggaaaaattttcccagcgcgttaccaatatatttataatcgttttgctgtttttaaaaatccatttttagatgaacggaacttaggccatcagttagctaattcttattatgcaatcagtaatggcggctggtttggcaaaggtctagggaatagtgttcagaaaaaaggctttttaccagaagcacatacggactttatctttgcgattactttagaagagttaggcattatcggcggtctagcgattttaggattgttgatgtttatgattgcgcgaattattttagtcggtgtacgctcgaagaaaccttttaattcactaatgtgtattggaattggtacaatgttattaattcaagtctttattaatgttggtgggattactgggattattccattaacaggaattactttcccgttcttgagtcaaggtgggaatagtttgctgattatttcgattgctgtggcctttgtcctgaatatcagtgcagatgaaacacgtcagaaattagaaaatgagtactatttatctttagaacagaaccaataa

SEQ ID NO: 6709 - DNA, 3429 bp, Enterococcus faecalis
  CDS (1)...(3429)
atgaaaaaggtattagttgccaatcgtggcgaaattgcgattcgaatttttagagcttgtacagaattagatatccgtacagtagcgatttatgctgcagaagatgagtattctgttcatcgtttcaaagcagatgaagcgtatttagttggtaaggagaaaaaaccaattgaagcctatttagacattgaaaatattatccaaattgccaaaaaatcgggagcagatgccattcatcctggttatggctttttatcagagaacttacgcttcgccgaacgttgtgaagaagaaggaatcatttttgtcggacctaaaacacatcatttagatatttttggcgataaaattaaagcgaaagaagcagctgtagctgcggggattgcttcgattccaggctcagacgggccagtagcaacggtggaagaggtcgtagcttttggtgaaacgcatggctttcctatcatgattaaagctgctttaggtggcggcggtcgcgggatgcgcgttgcccacgatgccaaagaagcacgagaaggttacgagagagccaaaagtgaagcgaaagcagcctttggttctgacgaggtttatgttgaaaagtatatttctaatcctaaacatatcgaagtacaaattttaggcgatcatcatgggaatgtcttgcatttatttgaacgtgattgttccgttcaacgacgccaccaaaaagtggtagaagtcgcaccatgtgtatcaatgaatgaagaacaacgagcagccatttgttcggctgctgtgcagttaatggcgcatgtcggctacgtgaatgcgggaacggttgagtttttagtagaaggggatcagttttattttattgaagtgaatcctcgtgttcaggtagaacatactatcacagaaatgattacagatattgatattgtgatctctcaattacaaattgcacaagggcttgatttgcataaagatatgcatttgccaaaacaaaacgaattgacattaaaaggcgcggctattcaatgtcggattacgactgaagatcccctgaaccagtttatgccagatacagggaaaatcgatacgtatcgttcaccaggtgggtttggtgtgcgtttagatgtaggaaatgcttattctggctacgctgtgacgccttactttgattctttattggttaaagtctgtacgcatggtttctcttttgaacaggcaatcagtaaaatgcaacgctgcttaaaagaatttcggattcgtggcgtgaaaacaaatattccgtttttacaaaatgttgtgagctatccagcgtttcaatctggcgaagccaaaacaacctttattgataatacacctgaattatttgaatttcctcgtatgcgcgatcgtggcaataaaacgatgaaatacattggagaagtaacggtcaatgggttccctggcattgaacgaacggagaaaaaatattttgaagccccgcgcgtgccgacagatattgaagttccagaaaaagtgatcacagctaaaaatattctagacgctcaaggagcaaccgccgtcatcgattgggttaagaatcaagaaagtgtgttaatgacagataccacgttccgtgatgcgcaccaaagtttattagctactcgtgtgagaacacaagattttaaagcaattgctggactaactgatgtagccctgcctgagctgttttctagtgaaatgtggggtggcgctacgttcgatgttgcctatcgcttcttaaccgaagacccatggcaacgtttaagaaaaattcgtcagttgatgccaaacatacttttacaaatgctgttcagaggatctaatgcggtaggctatcaaaattaccctgataatgttattgaagaattcattaaagaatctgctcgccaaggagtcgatgttttccgaatttttgatagcttaaactggattcctcaaatggaaaaaagtattcaagtcgttcgggataccggaaaaattgcggaagcagcaatttgttatactggggacatcaatgatccagcccgagcaaaatataatgttcaatattaccttgatatggctaaagaattggaaaatttaggggcacaaatcattgcgattaaagatatggctggcttattgaaaccacaagctgcttatcgtttaattagtgaattaaaggcagccacggatttaccaattcatctccatactcacgatactagtggcaatgggatcatcacttattcagcagctactaaagcaggcgttgatattgttgacgtcgcaatgagtgcgatgagtggcgcaactagccagccaagtatgaacagtctatattatgctttagtcaatggtgaacggacgccaactattaacattgataatgcacagaaaatcaatcattattgggaagatgtgcgcatgtattatcaaccatttgaaaatgggttaaatgcaccgcaaacagaagtctatatgcatgaaatgcctggtggtcaatactctaatctacagcagcaagcaaaagcggtaggcttagggcaccgttgggatgaaatcaaaaaaatgtatcacacagtgaatttgatgtttggtgatattgtaaaagtgacgccatcttcaaaagtcgtgggagacatggcactcttcatggttcaaaatcatctgacagaacaagatgtttatgcgcgtggtgaagaactaagttttcctgaatcagttgtgacttttttccaaggtgatttaggtcaaccagttggtgggttcccgaaagagctccaacgaattattctaaaaggtcgaccagccttcacagagcggccaggtgacttagcagcacctgttgattttgcgaaagtacaagaagaattagccgaaaaaattgggtatcaacctaaattggaagaagttttaagttatttaatgtatccacaagtatttttagagtatcgtcaaaaatacgaaacctttggagatataaccttattagatacgccaacattctttaatggtattcgtcaaggagagacattggaagttcaaattgaacgaggaaaaacgttaattattcgtttagatgaaattggcgaacctgatattgacggaaaccgtgtcttgttcttcaatttgaatgggcaacgtcgtgaggttttagttaaagatgcctccattaagtctgctgttcaagtaaaacaaaaggcggaaccaactaataaagaacaaatcggcgcaacgatgtctggttctgttctacaagtattggtcaaacgtggcgataaagtagaaaaaggtcagccgttgctgattacagaagccatgaaaatggaaacgactatcgaagcacgttttgcgggcacggttgatcacatttatgttgaagaaggcgaagcaatcagctcaggtgatttgttattagaagtgaaagaaaaataa

SEQ ID NO: 6710 - DNA, 1110 bp, Enterococcus faecalis
  CDS (1)...(1110)
atgtatggtatttcagtttttcttggtgaagagattacaaacgatacaattatttatatcaaaaagatgaaagcgcttggatttgatggtattttcacttctttacacattccagaagatgatacttccctttaccgccaacgcttgactgatttaggggcaattgctaaggcagaaaaaatgaaaattatggtagatatttcaggtgaagcgttaaaaagagcgggtttttctttcgatgaattagagcctttaatcgagttgggcgtaactggccttcggatggactatggcattacgatagaacaaatggctcatgcttcacataagattgatataggattgaatgctagtaccattacactggaagaagtggctgagttaaaggctcaccaagcggacttttctcgcttagaagcttggcataattattatccaagacctgaaaccggcattggaacaacattttttaatgaaaagaaccgctggcttaaagaattaggcttacaagtttttacttttgtgccaggagatgggcaaacaagaggcccaatttttgctggtttaccaacattagaaaaacatcgggggcaaaatcctttcgccgctgccgttggtttgatggctgatccttatgtcgatgctgtttatattggtgaccccacaattagtgagcgaaccatggctcaatttggttattattaccaaaccaatcaatttctgttagaagtagcacctaacaagagccgctatttgaagcgaatacttgggactcataccaatcgtttagatgctgcaagagatgttttgcgaagtgaattatcaagaacgagtgaaatgttcagaaaagatgaaattgcaacgattgagtcagagcagactgaagcacgtccagtgggaaccgtaacgattgataatgaaaaatatggtcgctatatgggagaaattcaagtcacacttgtggacttgccgaaagatgaaaaagtcaatacgattacacgaattattgaaaaagatcaaacgatattgccgttaatcaaggcaggaaatcaatttacgctagtcacggaaggaacgatagagaatgaatttagaaaacttaacaactga

SEQ ID NO: 6711 - DNA, 891 bp, Enterococcus faecalis
  CDS (1)...(891)
atgaatttagaaaacttaacaactgaacgtagaaatgaaaatacaatgggtttagatgagatgagtgtcaaagaagctttacaaaaaatgaatcaagaagaccaaaaagttgcaatggcagtgggtcaagaattagcagccattgaaccagtggtagaagccatcatcaaaagcttcaatcaaggcggccgcttgatctacatgggtgctggtacgagtggtcggttaggtgtcttagatgcagccgaatgcgtaccaacttttggcgtcgagccagagatggttcaaggcctcatcgctggtggtcaaaaagcaatgactgtcgcagtagagggtgccgaagattcaaaagaactaggtcgtcaagatttagttgatctaaaattatcagcaaatgacattgttgttgggattgcagccagtggtcggacgccttatgtaattggcggtttagaatatgctacaacggtgggagcagctaccgcaactgtggcatgtaataaagatgccgaaattagtaagtatgcacaaatgccgattgaagtagatgcaggacctgaatttttaacaggttcgactcgcttgaaatctggaacagctcaaaaattaattttaaatatgttatcaactatttccatgattggtattgggaaagtctacaataacttaatggttgatgtaaaaccaaccaatgaaaaattagtggagcgttccaaacggattattatggaagcaacgggttgtagttatgaagttgccgaactaaaatttgtagaagcagaagaaaatgtgaagttagcaattgtaatgattttaactgatagtactaaagaagaagcaacacaaaaattaattgacgggaatcaatttatcaagaatacattaaattaa

SEQ ID NO: 6712 - DNA, 1455 bp, Enterococcus faecalis
  CDS (1)...(1455)
atggcagaagaaagaattaaacgcattgctgatgggatttataaagaagttggtggtcaagaaaacgtggacaaagtcattcattgtatgactcgtgttcgtatggatatccgcgattatgacaaagtagatattgaaggattgaaaaaaattgatggcgttatgggcgtcgtagaagatgatacgttacaagtagttgttggtccagggactgttaacaaggttgcacaagaaatggtagatcaagcaggtgtcaaattgggagaaccatttaatcatggcaccacaactgatgcttcagcaggcaaatctggaaaagatttagtagaagaaaaagccgctcaaatgaaagcacaacaaaaagcgaaacaaaataacacttcaccatttaaaaaagtgttaaaagccatttctagtatctttgttccgatgattcctgcctttgttggggctggtattattggcgggattgcagctgttatgtctaacttagttgttgctggtgatatttcagcttcatggcaacaatatattgatgtcttaaatatcattaaaaatgggatttttgcttatttagctctttacactgggattaacagtgccagcgtttttggtgcaacgccagcgttgggtggtgttattggggcagtcacaatgttgacaggaatgaatccagatgctccaatcagtaatattttcactgggggaacattatctgcaggacaaggcggaattatcggtgttatttttgccgtatggttattatcattgttagaaaaacaattgcataaaattgtcccagaatcaattgatattatcgtaacgccaaccatttcacttttagtgattggcttagcaactattttcttaatcatgcctgtagccggagctatttctaatggcttagttggtattatcaatgttgtcttagaaaaaggtggcatggttgctggctttactcttggtttaaccttcttgccaatggtaatgtttggtttacatcaaattttgacgccaatccacattgaaatgattaatcaaacagggatgactttgttattaccaattctggccatggctggtgcgggacaagtcggtgcagctttagcattatggattcgttgtaaatcagataaaaaattagttgaaatgattaaaggtgccttgccagttgggattttaggtattggtgaaccattaatctacggagttactttaccattaggacgtccattcattactgcttgtatcggcggtggtattggtggtgcggtgattggggccttcggtaatgttggtgcaattgctattggaccaagtggggtggctttaattccattaattgccaacaaccaatggcttgcatatgtattaggtttattggctgcttacgcaggtggttttgtagcaacgttattctttgggattcctaaagatatgcaaacaactaaataa

SEQ ID NO: 6713 - DNA, 1386 bp, Enterococcus faecalis
  CDS (1)...(1386)
atgtttcattttgtaataaaaggaacaggtttttctagtaaaaatttgcaagagattaaagtttatgaagaaacacttttttgtatagatgaggccggagtaattcaggaaataattgaaccagatgctgaagcgtatgaaactgtgctagcagaacaaaaagaggcgcaacgttttcaagaattgccccaagattcttatcttttacctggctttgttgatttacatgtccatgcacctcagtgggcacaatctgggaccgccttggatattccattgtatgaatggctgaatacgtacacgtttcctttggagtccaaatttgcagatttaacatttgcccaacaagtctatgatgaattggtaacccaattgttagctaatgggacaacaacagccctttattttgcaaccattcattatgaagctagccgtcgtttggcagagatttgtgcggaaaaagggcagcgtggcttaattggtaaagttgtaatggatgatcttaatgagaatccagaatactatcgtgatcaaacaacgcaacaagcattagaagaaacggaacggtttattcaagaaattcaaacattagcgcagcaaacaaaacaaggcgtgtatcccgttgtaactccgcgtttcattccaagttgtacagaggaagcacttaaaggattaggagaattagcagcgaaatatcaagtccatgttcaaagtcattgtagtgagagtgattgggaacatcaatttgttcaagaacgttttggaaaaaatgatactcaagcattgaatgattttggtttattgacagaaaaagcagtgatggcacatgcaggctttttagaagaagcagatatgaatttattccatgaaacagggacggctgtggcgcactgcccaatctctaatgcttattttggtaatgcagtaacaccgattgcaaaattagtacatcaacatcaagtagaagttggtttaggtagtgatctttcaggtggtttttcaccaagtctttttgacaatttaaagcaagcggttatttcttctagaatgttagaagatggcgtcgatgctacaaaaaaaccagaagtacgaggtgttaaaacagcacggattacagtaaatgaagcgttttatttagctactgctggtggtggtcaagcgctaagtttgccaattggaaaattagaaaaagggtatgcttgggatgttcaaattattaatacaagcttgtcacaagcacgaatccctaaaaatccaggggaatcattgcttgatattttccaaaaaatcttatatttagcacgaccagaaaatattcgagaagtctgggtacaaggtgaaaaagtacatgataaaaatttaatgtcagcaactaaaggagtataa

SEQ ID NO: 6714 - DNA, 978 bp, Enterococcus faecalis
  CDS (1)...(978)
atgaaagtttttgattatgaagacgtccaattaattcccaataaatgtatcgtgaatagtcgttctgaatgtgatactacagtaactttaggaaaacattcgtttaaaatgcctgtcgttccagcgaacatgcaaacaattattgatgaaacgattgcggaaacccttgctgaaaatggttatttttatatcatgcatcggtttgatgaagaggcgcgagtgccatttattaaaaaaatgcaacaaaagggcttaatcacgtcaattagtgtgggtgtgaaagaaggggaatacgcttttgttgaaacgttagcccgagaaggtttagttcctgactacgtgacaattgatatcgcccatggtcattcaaatgcggtgattaatatgattcaacacttgaaaaaatttttaccagaaacgttcgttattgcgggcaatgttggaacgccagaagccgttcgcgaattagaaaacgctggagccgatgccaccaaagtggggattggaccaggaaaagtatgtattactaaaattaagactggctttgggacaggtggctggcagttagcggctttacgttggtgtgccaaagctgctcggaaaccaattattgcagatggtggaattcggacccatggagacattgcaaaatctgtgcgttttggggcaactatggtcatgattggttcattatttgctggacatgaagaatcaccaggtgaaacaaaagtggaagatggcgttgtttacaaagaatactttggtagcgcctctgaattccaaaaaggcgaaaagaaaaacgttgaaggcaaaaaaatctggttacgccataaagggaagttggcagatactttagtcgaaatgcaacaagatttacaatcttccatttcatacgcgggaggtcgcgatttagaagcgattcgtaaagttgattatgtgattgtaaaaaattctatttttaatggtgataccatttaa

SEQ ID NO: 6715 - DNA, 1773 bp, Enterococcus faecalis
  CDS (1)...(1773)
atgctatacttaaaaagtaaaaacaaaaaaacaaatgaggtgttttccatgtcttgggaacaagtttaccaacaatggttaaatgaagaaaatattccagaaaatttaaaaaatgaattaaaggacttaaatacagaccctgaaaaatgtgaagatgcattttacgcaccattagaatttgggactgccgggatgcgcgggattttaggcgccggtattaatcggatgaatatctttacggttcgtcaagcaacagaaggacttgcacgttttatggatacgcaagatcctgaaacaaaacgtcgcggtgtagctattgcctatgattcacgtcatatgtctccagaatttgcaatggaagcagctaaaacattagctaaacatgatattccttcttttgtgtttgaaagcttacgaccaacaccagaattatcttttgcggtccgctactttaaagcttttgcgggaatcatgattacggcttctcacaatccagctgcctataatggctacaaagtctatggtgaagacggtggtcaaatgccgccagctgatgcagatgcattaactaaatatgttcgtagtatcgaaaatcctttgaaaattgatgtcttatcagatgaagaagttgcccacagcggtttaattaacattgttggtgaagaagtcgataacgcgtatttgaaagaaattaaaacagttacgattaatcaagaattaattaacgaaatgggtaaagaattaaaattagtttacactcccttacatggaactgggaaaatgttaggagaaaaggcattaaaacaagccggttttgaaaaatttgttttagtacctgagcaagccgttgctgatcctgactttactacagttaagtcaccaaaccctgaagaacattcagcttttgaatacgcgattcgtttaggggaaaaagaaggcgctgatttattgattgcaacagatccagatgctgatcgtttaggtgccgctgtgcggatgccaaacggagactaccaagtattaacaggaaatcaattaggttcaattatgattcattatattttagaagcccatcaacaagcaggcacgttgcctcaaaatgctgcggttctaaaatcaatcgtttctagtgaacttgctacagcgattgctgagaaatataatacgaagatgtttaatgttttaacaggtttcaaatttattgctgaaaaaattcaacaatacgaagaagaccacagtcaaacgtttatgtttggttttgaagaaagttatggttacttagtgaaaccttttgttcgtgataaagatgcaattcaagcgttagttttattagcagaagtagcggctttctataaaaaacaaggaaaaacattatacgatggcttacaagatatctttgaagaatttggttactttgaagaaaaaactatttccgtaacaatgagcggaattgaaggcagcggtaaaatcaaagctttaatggcaaaatgtcgtgaacaagcgccaactgagtttgccgggattcaagttgctcaaacggaagattttaaagaattaacacgcacttttgcagatggtcaaacagaacaattacaaacgcctccttctgatgtgttgaaatatcatttagaagatggcagttggattgctatccgaccatcaggaacagaaccaaaaattaaattctatctagcgacaaaagcaacaagtagttcagaagcttctgaaaaaattgctgcttttgaagcagtcgttaatgaattaacaaaataa

SEQ ID NO: 6716 - DNA, 1302 bp, Enterococcus faecalis
  CDS (1)...(1302)
atggaacaaattattgttcatggtggtaatacaaaattagaaggaactgtaaaaattgaaggcgccaaaaacgctgttttaccaattttagcagctactcttttagctgaagaaggcgttactactttaaaaaatgtaccaattttatctgatgtatttacaatgaatcaagtaattaagcatttgaatgtagccattgattttgatgaagacgcgaatgaagtaacaatagacgcaacacaacctttagggatcgaagcaaactatgagtacgttagtaaaatgcgtgcttctatcgttgtaatgggacctttattggctcgtaatggtcatgccaaagtggcaatgccaggtggctgtgccattggcaaacgaccaattgatttacacttaaaaggcttccaagcattaggtgcaaaaatcatccaaaaaaatggttacattgaagcaattgcggatgaactaatcggtaacactatttacttagacttcccaagtgtcggcgctacgcaaaacattatgatggctgctgttcgtgcgaaaggaacaaccatcattgaaaacgttgctcgtgaacctgaaatcgttgacttagcaaacattttaaacaaaatgggtgccaatgttatcggtgctggaacagaaacgatgcgtatcgaaggcgtcgataaattacatgccgtagagcattcaatcgttcaagatcgaattgaagcaggtacgttcatggtagctgcagcaatgactgagggcaatgttttaattgaagaagcaatttctgaacataatcgtccgctaatttctaaattaactgaaatgggtgcaatcattgaagaagaagaaaacggcatccgtgtaattggaccaaaacatctaaaaccaacagatgttaagacaatgccgcatcctggtttcccaacagacatgcaagcgcaaatgacagcgatccaaatgtttgctgaaggaacaagcatcgtgacagaaacagtctttgaaaatcgttaccaacacttagaggaaatgcgtcgaatgaacgctgacttaaaaattgacggcaacattgccgttattaatggtggcaacgagttacaaggagcagcagtggaagccactgatttacgggcagctgccgcattgattttagtagggttacgtgcaaatggcattacacgtgtctctaatttgaaatatttagatcgtggctattatgagttccataaaaaacttcaaaaattaggcgcgaacgttgaacgtgtcaatgatgaaaaaattgaagaaaaacaagcaacgacagtaatctaa

SEQ ID NO: 6717 - DNA, 840 bp, Enterococcus faecalis
  CDS (1)...(840)
atgaaaataagagtacctgccactagtgccaacttaggacctggctttgattcatgtggcattgcattatccgcttatttaacaatcaacgttttaggtgaaagtgaattttgggaaattcaacatactttgggagaagagattcctactaatgaagagaatttattaattcaaacggcattgaaaattgcaccagaattaacaccaaaagttattcggatggtttctgacattccacttgcaagaggactaggcagtagctcaagtgtgattgtagcaggcattgaattagctaaccgactagcacatttaaatttgtcccctaaagaaaaagtccgtttggcgacagagatggaaggacatccggataatgttgccccagctattttaggagatttcgtggtggctagccatgtagaaaaccaagtctaccatgtcaaacatcactttccaatgtgtgatgtcattgcatttattccagaggaaccgttatttaccgaaaaaagtcgcgctgttttgcccgaaaaattgacttataaagaagcggtcgcggccagctcaattgccaatgttatgattgccgcaattttaaacggggatttacctttagcaggcaaaatgatggaacaagataaatggcatgaaacgtatcgtcgttcattggttcctcacttaaaagaaattcgtcgtttaactcagcaaaaaggtgcttatggctctttcttaagcggtgctggtccaactgtgctaatcttgtcgccagaagaacgaaccaacgaaattgttcaaagcttcggagaaattatctaccaaagcgagcatccaaattttcaatattga

SEQ ID NO: 6718 - DNA, 177 bp, Enterococcus faecalis
  CDS (1)...(177)
atgtcaaaaacagtcgttcgtaaaaacgaatctcttgatgatgctcttcgtcgcttcaaacgttccgtttcaaaagcgggtactttacaagaatcacgtaaacgtgaattctacgaaaaaccaagtgtaaagcgtaagaaaaaatctgaagcagctagaaaacgtaaaaaattctag

SEQ ID NO: 6719 - DNA, 450 bp, Enterococcus faecalis
  CDS (1)...(450)
atgtcattgctaaccacattgaatgacgacattaaaacagcgatgaaagctaaagacaaagaaactttagccgtacttcgtatgttaaagactgccattcaaaatgatcagattaaagcgggccgtgaattgaacggagaagaagaactcactgtattgtctcgtgagatgaaacagagaaaagattctttatcagagtttgaaaaggcgggacgcgacgatcttgttgaaaaagtaaaagttgaaatagcaattgttgaaaaatatatgcctcaacaactaacagaggaagaaattcgtcaactagttcaagaggtaatgacgcaaactggcgccacttcaccaaaagattttggtaaagtgatgggcgctatgatgccgaaagtcaaaggcaaagccgatggcaaccaagttaacgcaattgtgaaagaattattacaagaaaactaa

SEQ ID NO: 6720 - DNA, 903 bp, Enterococcus faecalis
  CDS (1)...(903)
atgacaactgaacataaatctggtttcgtagccattgtcggcagaccaaatgttggaaaatcaacattgttaaatcgaattgtcggccaaaaaattgcaattatgagtgacaaagcacaaacaactcgtaataagattcaaggaatttatacaattcctgaagcacaaattgtttttatcgatactccagggattcacaaacctaaacaccgcttaggcgatttcatggtggaaagtgcctataatgcgatgcgtgaagtagatgctactttatttatggtaagtgctgatcaaaaacgcgggaaaggtgacgactttattattgaacgattgaaaaataataatagtccagtctacttgattattaataaaattgacaaagtccatccagatgatttattgagtatcattgaagactattcgaaacaaatggactttaaagaaattattcccatttctgccactgaaggaaataattttgagcatttgatggatgttctcgttgagcaaatgccagaaggaccacagtatttccctgatgaccaaattacggatcatccagaatattttatcgtttccgaattaattcgtgaaaaagtgttacttttaacaagagatgagattcctcattctgtcgctgtcgttgtggactcaatgaaacgggatgaaaacgataaagtccatgtccaagcaaccattattgtggaacgggacagtcaaaaaggtatcattattggcaaaggcggaaaaatgctgaaacaaattggtaccaaggcgcgtcaagatattgaatatttattagatgacaaagtgtatttggagctgtgggtaaaagtccaaaaagactggcgtgacaaaaaaatctatttacaagattttggttatcgcaaagaagaatattaa

SEQ ID NO: 6721 - DNA, 942 bp, Enterococcus faecalis
  CDS (1)...(942)
atgtctataaaaaatattccaaggaggaaaacaatgaaaaacaagttaaccgtacaagaaatgattttaaccttgcaaaaattttggtcatctaatggctgtatgttaatgcaagcctatgatacagaaaagggagccggcaccatgagtccttacacgtttttacgtgccattggacctgaaccatggaatgctgcctacgtagaaccttctcgtcgtccagctgatggacgctatggtgaaaatccaaaccgtctataccaacatcatcaattccaagttgtaatgaagccttctcctgaaaatatccaagaactttatctagaaagtttgaaattattaggaattgatccattagaacatgacattcgttttgtagaagataactgggaaaatccctcaatgggttgtgctggtttaggttgggaagtttggttagatggcatggaaattacccaatttacgtatttccaacaagtcgggggcttacaatgtcatcctgtcacttctgaaattacttacgggttagaacgcttggcatcatatatccaagaagtcgaaagtgtctatgatttagaatggacacaaggcgttaaatatggtgaaatttttgttcaacctgaatatgaacattcaaaatattcctttgaaattagtaaccaagaaatgcttttagaaaactttgacaaatttgaaaaagaagctaaacgctgtattgaagaaagcttagttcatccagcctatgattatattttaaaatgtagccatacattcaatttattagatgctcgcggcgctgtctctgtaacggaacgtgcaggatatttagcccgcattcggaatatggctcgttccgtagcgaaaatttttgtggctgaacgtgaaaaattagggttcccattattaaataaagaccaacacgtatccaaggaggcagaataa

SEQ ID NO: 6722 - DNA, 972 bp, Enterococcus faecalis
  CDS (1)...(972)
atgcaagaaccattatttttacaacctgtttttcaagaaaaaatttggggcggcaatcgtctacacacgctatttggtttcgatttaccgagcgataaaattggtgaagattgggcaatcagtgcacatccacatggcgttagtactgttttaaatggcgaatttaaaggaaaaaaattagatgaattgtgggcagaccatcaagagttattcggccatgcaggtggcgctgtctttccattattaacgaaaattttagatgctgaagatgatttatccgtgcaagttcatcccgatgatgcatatggccaaaaacatgaaggcgagctaggcaaaactgaatgttggtacattattgatgcagaacctggcgctgaaatcatttatggacatcacgcgaaaacaaaagaagaactagctgaaatgattgaagaaggtcgttgggacgatcttttaagaaaagtaccagtgaaaaaaggcgatttttattatgtaccaagtggcactattcatgccatcggctcgggtattttaattttagaaacgcaacaaagcagtgatactacgtatcgggtttatgattatgatcgaacagatgatcaaggaaagacccgggaattgcatattcaacaatccattgatgtgacaaccgttccggcaaaggatcctgacctctctattcaacaagaaaatcaaggacaatcaagcattgttacttatgtaaaaacagatttctttaatgtctatgagtggcgtgtcagtgggattctaaaagtcaaaaaacaagcaccttatacattagcaacagttattgaaggtgtgggtcgattgattacagaagatgctgcaaaagcagatgtggctacttttgatttgaaaaaaggcgatagctttatctttccaacagatattccgagctggcgttttgaaggtgatttaacgattatagcttcagaacctggcagtcgctaa

SEQ ID NO: 6723 - DNA, 693 bp, Enterococcus faecalis
  CDS (1)...(693)
atggtgtctaaagaattagtcgtttgtcatttatatggcaacttattaaatacttacggagataacggaaatttattgatgcttaaatatttaaccgaaaaaatgggcgttaccttccgatcagaaattatcagtatctacgaaccgtttgatcccgaaaaatatgatttagtctttgttggtggcggtcaagactttgagcaactgatcatctcagaagacattcagaataaaaaagaagctttgacttcttatattgaaaatgacggcgtcttgttagctatctgtggtggttatcaacttctaggacattactatgtcggcgcacaaggcgaaaaaattaaaggaatcggtgcattagatcattacactttgagccaagacaacaatcgtttcattggtgatatcgaaatttataatgaagaattcgatgaaacgtattatggttttgagaatcataatggcatgacttttttaggcgaaggtgaacgacctttaggaacagtcaaacaaggcaaaggcaataacggtcaagataatggcgaaggcgttgtctataaaaatgtgtttggctcctacttccacggtccaatcttagcacgcaacaaaaatctagggattcggttaattcggaccgctttagagaaaaaatatggtgaaccgatcgctattcctgaaacgctttataaataa

SEQ ID NO: 6724 - DNA, 843 bp, Enterococcus faecalis
  CDS (1)...(843)
atggggattcgaagtcatttagcaattgctgcaggaaaaacttcgcaatgggttttacaaacattttttaaaggcggcagtagctacccagggaaattagccctaaaaatcgatcctaaaattttagatacattggcaaaagactatgaaattgtcgtagtcactggaacgaacggcaaaacattgacaactgctttaactgttaacattttacgccaagaatttgatgaggtattaacaaatccaacgggtgctaacatggagcaaggaattgtctctacttttttaaatgccaaggcgaaaaaaggacaaaagaaatttgcggttttagaaattgatgaagcaagtttaagccgtgtcactaaatatattcaaccaaaattatttgtttttacgaatattttccgcgaccaaatggatcgctatggtgaaatttatacgacgtatcgcttaattatggaaggcgccgctgttgctcctgaagcaactattttgtgcaatggtgattcgccaatttttaattcaaaagaaactgtaaatcctcgcaaatactatggatttaatcatttaccacctaaagagcaattggctcattacaatacagatggggttttatgtccaaaatgtaatcatattcttcattataaaatgattacgtatgctaatttaggtgattactattgcccaaattgtggcttcaaacgccctgaattggatgtgcagttaacggaaatggtccggatggataatacatctgctgattttgtgattgatggcgaagaatacggcattgctgttggtgggatgtataatgtttataatgcgctacggccacagcggtag

SEQ ID NO: 6725 - DNA, 945 bp, Enterococcus faecalis
  CDS (1)...(945)
atgggcaaacgcgtcgtagtagctttaggtggcaatgctttaggaaataatttgacggagcagatgactgccgtaaaacagacctccaaagcgattgcagatttgattgaagcaggatatgaagttattttatctcatggcaatggtcctcaagtggggatgattcaattagctatggaagaattttcctttaataatccacaatatccagttgttccgttatccatgtgcgtagccatgagtcaaagttacattggctatgatttagagaatgcgctacaagaagagttgcgtcaacgaaatataagtaaagccgtcaccaccatagtcactcaagtggtcgtggatgaaaatgatccggcgttcaaaaaaccaacgaaaccaattggccgcttcatgacaaaagaagaagcagaacaattagtcaaagaaaaaaatatacaagtgatggaagatgctggccgtggttatcgccaagtcgtcgcttctcctaaaccaaaaaatattgtcgaacttctcacgattcaaacattggttgatgctggccaaacagtcattgctggcggcggtggtggcatcccagtcattcaagaagggaaccgactaaaaggtgtcaatgcagtcatcgacaaagatttttgtagtgaacgactggctgaacaagtggatgctgatctgctcgtgattttaacagcagttgaaaaagtttgtattaattttggtaaagaaaatcaagaagccttagggaatgtttcaacagaaaaaatgaaacaatatgcgcaagaaggtcagtttgctccaggttcaatgttaccaaaagttgaagcagcgattaagtttgctgaatctaagccaggtcgaaaaacattgattacgttattagaaaaagccaaagaaggattatctggaaaaacagggactttaattgaaaataaagaatcatag

SEQ ID NO: 6726 - DNA, 2583 bp, Enterococcus faecalis
  CDS (1)...(2583)
gtgcaagaaatgtattcaattattgtaaatggtcaaagtgaaacctgtgaaacaaacaaaaaattaatggactttttgcgggaggatctgggcctaactggaacaaaagatggctgtaaccaaggctcttgcggtgcatgtacggtgttagtaaatggaaaggcttccaaagcatgtttgtttactctagaaaaattagctggtaaagaagtcacgacaatcgaaggtttaagccaacggcaaaaagatgtttatgcctatgcgtttgcaaaaacgggtgcagttcagtgcgggtattgcatccctgggatggttatttcggcacaaggattattgaacaagaaacccgaacccacaaaagaagacattcagaaagctatacgaggaaacatttgtcgttgtacaggatatgtgaaaataatagaagccattcagttagctgctaaaatgttttgtgaagaaacgagcattccagaagaacattcaaatggtaaattaggggaagacttccaacgggtcgattcagtggagaaaaccttaggaactgggatttatgtagatgacattgacatagaaggaatgcttcatgcatctgctttgcggagtgcctatcctcgcgcaaaagttctatcaatcgatagtacccaagcattggcgcatcctgactgtgtggctgtgttcacagctaaagacgttccaggaaataataaaattggtcatttagaatttatttccgattgggatgtaatgattccagaaggtgaaataacacggtatgttggggatgcagtggcactcgttgtttcaaaaagaaaagaaaccttaccagagataaaaaatttagtggaagttgattacgaagaaatgataccgcttacttcttgtgaagctgctttagcagaaggtgcaccagctattcatgaaaagggcaatatcttgtctcatgaacacttggtacgtggcaacacagatgaagtattagcaaattctgcgtttgtagtgacagaacattattccgtaccaattaacgaacatgccttcatggaacccgagtgtgcgattgcacagcctgaaggtgagggcattttactctttagtgcgggtcaaagtatctatgatgaacaacgggaagtggctcggatgttaggactagacaaggaaaaaattcatgttcaatcaaaacttgttggtggtggttttggtggaaaagaagacatgagtgttcagcatcatgcatccttagccgcttggttattgaagaaaccagtaaaagtactgctaagccgtgaagaaagtttgatggttcatcccaaacgccatggcatggaaatggactttacgaccggctgtgatgaagaaggcaatttaactgcaatgaaagcagtgatttatgcggatactggggcctatgcttctttaggaggaccagtattgcaacgggcttgtacacatgcggcaggtccctacaagtatcaaacgattgatgtggaagggtttgctgtatatactaataatccgccagcaggtgcatttcgcggatttggtgtttgccaaacggcttttgcaattgaaagtaatttaaacttgttagcagaaaaagtcggactatcaccatgggaaatacgctttaaaaatgccgtcgccccaggagatactttaccgaatggacaattggtctcgaaaaatgcggcgttaaaagaagccttgttagcggttaaagacgtctatgaacaagcggaagttgctggaatttctagtttctttaaaaatagtggcgtgggtgtggggctacctgatacagggcgttgtattatttctgttgaagaaggaaaaatacatgtccgcacaagtgctgcttgtatcggtcaagggatggcaaccgttacgacgcaaattgcctgtgaaacattaaatttaccaccagaaatgattgttgcggaagcacctgatacgagaagaacgccgaattcaggaacaacaacggcttcgaggcagtcactcttcacaggagaagctactagaagagcggcaatgcaattacggtatgagcttgatatgggacgtgctttaagtgatttggaaggcgaagaattttatggggaatattcagcgaaaacggatccattaatcaatgataaaaaaagtccagttagtcatgctggttatggttatgctgctgaagtagctattctagatgacaaaggaaaagtagctaaatttgtggctgcgtatgatatggggcaagtggtgaatccacgagctgctgaaggtcaaattgaaggtgggattgcgatgggcatggggtatgctttaactgaaaaatttgccttagaagaaggctatgttaaagcaaaatatgcaacgctaggattagtgaacgccactcaagtaccaccaattgaaacaattttggttcatgctgacaatcttcacgaaggtttagcttatggaattaaaggcgtaggtgagttagcaacgatccctaccgcaccagctttagcaggcgcatattttgccttggatggtcagctccgaccaagtctgcctttagaaaataccccttatcaaaagaaaaaaagataa

SEQ ID NO: 6727 - DNA, 1419 bp, Enterococcus faecalis
  CDS (1)...(1419)
atggctagaaaaagtcgtataaaaacaccgattgcggaacaagcacctactatcagaaagaataattttgaagaggtttgcttaggctatacattagcagaagggcaagaagaagcgattcgctgtttacaatgtaaaaatgcaccttgtattgctaaatgccccgtgatgattgatattcctggatttattttagctattcgtgaaggaaacatggaacaagcagccgatattttaagtaaatatacgaatttacctgctatttgtggacgcgtttgtccgcaagagaaacaatgtgaacaagtttgtaaattagggaaagccaaaaactttgaaccagtggcaattggcaaattagaacgtttagttgccgattgggcattagaaaatcacaagtttcctaagaaaacagcggaaccaacaaaaggaaaaatcgcagtggtcggttctggtccttctgggttaacagttgcgggggatttggcaaagctaggctacgaagtaattatttttgaagcgcttcatgaagctggcggcgtattaacctatggcatacctgaatttcgattaccgaaaaaaattgttaaacaagaaattgcgagtattgaagccttaggtgtaacaatagaaaccaatgtggtagtaggtaaaacgattacgatggaagaaataatgtcagagtttgatgcctgttatctatcggttggtgcaggggcaccaaattttatgggaattccaggaactagtttaaatggggtttattcttctagtgaatttttaacacgaatcaatttaatgcatagctatgagtttccagaatatgatacaccgattaaacgtgctaaaaatgttgttgtgattggcggcgggaatgttgcaatggatgccgctcgttcagccaaacgattaggcgctgaaaatgtgaacattgtgtatcgtcgttcgttagaagaattaccagcaagaattgaagaataccaccattcccttgaagaaggaattaactattattggttaacgaatccaattgcttatttagatgaccaacaaggaaatctagccggtgttgaatgtatcaaaatggttttaggtgaaccagatgtgtctggaagacgacggccagaaccggttccagacagcacgtttaccattcctgctgatgcagtaatcgaggcaattggccaagaggcaaatcgagtcttgttatcaacatatccagaaatagaactaaaccaatggggttacattcaagctgatcctaaaacaggagcaacctcaatacttggcgtttttgctgggggcgatatagtcacaggtgctgccaccgttattttagcgatgggcgctgggaaaatcgcagctaatgcaattgatcagtatgtcaaaacacaaaaaacaacagtcacaagcaatgtttag

SEQ ID NO: 6728 - DNA, 591 bp, Enterococcus faecalis
  CDS (1)...(591)
gtgaacatggctcaattatttttcaagtatggcgcaatgaacagtggtaaaaccattgaaatcttaaaagtagcacacaattacgaagaacaagacaaaccagttgttttgatgaccagtggactagatacacgtgatggtgtcgggaaagtatccagtcgcatcggattacgcagagatgctattccaatttttgaagaaaccaatgtctttgacttgattaatgatttgtcttacaaacctttttgcgtattagtcgatgaatgtcaatttttaaacaagcatcatgtcattgaatttgcacgaattgttgacgaattagatattccagtaatggcatttgggctaaagaatgattttagaaatgaattatttgaaggctcaaagtatttacttttatatgcagacaaattagaagaattaaaaacgatttgctggttctgtcataaaaaagcaactatgaacttgcactatattgatggcaaacccgtttatgaaggggatcaagtccaaattggtgggaatgaagcctactatcctgtttgtcgcaaacattattttcatccaaaaacagtgaatgaagaacagtaa

SEQ ID NO: 6729 - DNA, 1074 bp, Enterococcus faecalis
  CDS (1)...(1074)
atgtacgatcaattacaatctattgaagatcgctatgaggaattgggcgaattattaagtgacccagcagtcattagcgatacaaaacgtttcatggaattatcgaaagaagaagctaatacacgtgagacggttgaggtttatcgccgatataaacaagttgttgaagggattagcgatgccgaagaacttttaagtgaaaacttagatgcggaaatggccgaaatggcgaaagaagaactttctgatttgaaaaaagaaaaagaagtgttagaagaccgcattaaaattttattattaccaaaagacccaaatgatgataaaaatatcatcatggaaatccgtggtgcagccggtggcgatgaagccgcactttttgctggcgacttatttaatatgtaccaaaaatatgcagaagcacaagggtggaaagcggaagttttagaagcgaacgtcactggaatcggtggatataaagaagtaattatgatgatttcaggagataacgtcttttcaaaattaaaatatgaaagtggcgctcaccgcgtgcaacgagttccttcaacagaatcacaaggacggattcatacatcgacagcaaccgttgtagttatgccggaagcggaagaagtcgaaatcgaattagctgataaagatatccgtgtcgatatttatcatgcaagtggcgctggtggacagcacgtcaataaaaccgcttcggctgttcgattaacccatttaccaacaggaatcgtagtcgcaatgcaagatgaacgttcacagctaaaaaaccgtgaaaaagcaatgaaagttttgcgtgctcgtgtgtatgaccaaattcaacaagaagcacaaagtgaatatgatgctaaccgtaaatcggcggtggggaccggagatcgttcagaacgaatcagaacgtataacttcccgcaaaatcgagtaacggatcatcgtatcggtttaaccatccaaaaactagaccagattcttgctggcaaattagatgaaatcattgatgcattagtcttatatgatcaaacatcgaaattagaagagatgcaaaatggctaa

SEQ ID NO: 6730 - DNA, 1239 bp, Enterococcus faecalis
  CDS (1)...(1239)
atggattacaaaacgtatgacccagatttatggaatgcaattgcaagagaagaagagcgccaagaaaataacttggaactaatcgcatctgagaatgttgtgtcaaaagcagttatggctgcccaaggaagtattttaacgaataaatacgcagaaggttaccctggcaaacggtactatggtggttgtgaatttatcgatatcgtagaaaatttagctattgatcgtgccaaagaattatttggtgcaaaattcgcgaatgtacaagcccattcaggttctcaagccaatacagcggcatacctttcattggttgaaccaggtgataccattttggggatggatttatcagctggtggtcacttaacacatggttcgcccgttaactttagtggcaaaacctataattttgtcagttatggagtggatccttcaacagaagtaatcgattacgatgtcgtgcgaattttagcaagagaacatcgtccaaaactaatcattgcaggcgcaagtgcgtattcacgaacgattgacttcaaacgtttccgtgaaatcgctgatgaagtagatgccaagttaatggttgatatggcacatattgcaggcttggtagcttcagggttgcacccaaatccagttccgtatgctgatatcgtaacaagtacgacccataaaacattgcgtggtcctcgtggcggtttaattttgacaaatagcgaagaattggcgaaaaaagtaaatagtagtattttcccaggcattcaaggtggcccattggaacatgtgattgccggaaaagccgcagcttttaaagaagctttggatccaagttttgctgaatatagtcagcaagtgattgcaaatgcacaagcgatgacgaaagttttcaatcaagcgccagaagctcgtttaattagtggggcaacagacaaccacttattactgattgaagtgacaggttttggtttaaatggaaaagaagcagaagctattttagatagtgtaaatattactgtcaataaaaattcaattccgtttgaacaattaagtccatttaaaacaagtggtatccgtattggaacgcctgcaattacttcacgtggttttaaagaagaagatgcggtagaagttgctaaattaatcgttcaagtcttaaaagatccagaaaatacagcagttcatgatgaagttaaagcagctgtagcagcgctaactaaaaaatatccattatataactaa

SEQ ID NO: 6731 - DNA, 630 bp, Enterococcus faecalis
  CDS (1)...(630)
atgggaaaatttcaagtaattgatcatccgctaattcaacacaaactaacaatgattcgcgaaaagaactgtgggacaaaggttttccgcgaagttgtcaacgaaattgctatgttaatggcttatgaagtatcacgggatatgcctttagaggatgttgtcatcgaaacaccgatgggtaaatcaacacaaaaaacactttcagggaaaaaagtagcaattattcctattttacgtgccggcattggcatggttgatgggattttagaattaattccagcagcgaaagttggacacgttggactttaccgtgatgaagaaacattgcaaccgaatgaatacttcgtgaaattacctgaagacattgcaagtcgtcaattatttgttgttgacccaatgctagcaacaggtggttccgcaattatggccatcgattccttaaaagaacgtggtgctagcaacattaaatttgtatgtctagtggccgttccagaaggtgtgaaagctttacaagaagcgcacccagatgtagatatttatacagcagctttagatgagcgcttaaacgaagacggctatatcgttcctggtttaggggatgctggtgaccgtttattcggaacaaaataa

SEQ ID NO: 6732 - DNA, 702 bp, Enterococcus faecalis; identical to SEQ ID NO: 3911
  CDS (1)...(702)

SEQ ID NO: 6733 - DNA, 657 bp, Enterococcus faecalis
  CDS (1)...(657)
atggtgctgttgacgtgtatcattgttttcgcctttgtctatgcttgtacgagaaatatgaagctacgacctaaaggcaaacaaacggtcatcgaatggttagtggattttattcgtggaatcattacagacaatttacctcgtaaagaagtgagcaattttcatttaatggcgtttaccctcttcatgtttgtacttgtttcaaacatcttgggtctcgttacaaaaatcgttgtgggcgacgatctcagcgtttggaaaagtccaaccgccgatccaatcgtaaccttaacgttagcgatgatgatgattgtcttaacacacttctttggtatgaaacgctttggttttaaaggctatctagttaatagttatttaagacccgttggtttcttactaccggtaaaattaatggaagaattcacgaatctattaacattaggcttgcgtttgtacggaaacatttttgccggcgaagttctcttgggcttgattgctggaaccgtagcaagcgtcggattatgggttatcccactagcaattccgctagaaatgatttgggtagcattctcaatctttattggatgtatccaagcgtttatctttgtgacactttcaatggtttatatgtcacacaaaattgaaacagaagaataa

SEQ ID NO: 6734 - DNA, 324 bp, Enterococcus faecalis
  CDS (1)...(324)
atgagtgaaatgaaacaaattgatcaattatggatcttaccaacagaagcaggttataaaattggtttaaccgccgaagcccaagaggatttaggaaagattacttttgcaacgtttccaaaagtcggacaaacattagctaaaggtgactctttaattgaattagaagcagaaaaagcagtcagtgaattcagtagtccattatctggtaaagtagtcgcgattaatgaagcggctgatcaagagccaagtgcgttagatgaagaaaatgcctggattgctgttttagcagatgttgaaccaacagaatttgaaaatctttag

SEQ ID NO: 6735 - DNA, 687 bp, Enterococcus faecalis
  CDS (1)...(687)
atgaataatcgtggcttagcaagtttctttgatttttcccaaattgatataagtaaactacaagaaaaaacgattgaaacactctatatgacagggatttcaatcatagtggtcgccattttagggctgattttaggactactactttttgaaacgtcaggcagaaaagggattttgagccgattactgtattggctagtggccatttttgtaaatattttccgttcgattccgtttattatcttaatcgttctgttaattccttttacaaaaattattttagggagtatgtctggtgtcaaaggctccttaccagcattgattatttccgcagcacctttttatgctcgcatggtcgaaatcgcttttcgtgaagtcgataaaggcgtgattgaagcagccaaagcaatgggggccaaccgtttccaaattatttggaaagttctattaccagaaagtctgccagcgcttgtttctggcttaaccgttacaaccatttctttagtgggctacactgcaatggcagctgctattggagcgggcggtttaggaagtttggcgtatcaagatggcttccaacgtggtcaaaatacagttaccttagtagcaacgatttgtatcttaattattgtctttgcgattcaatggattggggatacagtcgctaaaaaaatagataaacgataa

SEQ ID NO: 6736 - DNA, 819 bp, Enterococcus faecalis
  CDS (1)...(819)
atgaaaaaacgtacattatggtcagtaattactgtagcagtagctgtcttagttttaggggcttgcggcaataaaaagagtgatgactcggtcttgaaagttggagcttcaccagttccacatgcagagattttagaacatgtaaaacctttattagaaaaagaaggcgtaaaattagaagtgacgacttatacagattacgtgctacctaacaaggcgttggaaagtggcgatatcgatgccaactatttccaacatgtgccgttctttaatgaagcggttaaagaaaatgattatgactttgtgaatgcaggtgcgattcatttagaaccagttgggctttactcgaaaaaatacaaatcgttacaagaaattcctgatggttcaacgatttacgttagctcttccgtttcagattggccacgtgttttaacgattttagaagatgctggtttaatcacgctgaaagaaggggtagaccggacaactgctactttcgatgatattgataaaaatactaaaaagttgaaattcaatcatgaaagtgatccagcaatcatgaccactctttatgacaatgaagaaggggctgcggttttaattaactcaaactttgccgtggatcaaggattaaatccgaaaaaagatgcgattgccttagaaaaagaaagttcaccttatgccaatattattgcggttcgtaaagaagacgaaaacaacgaaaatgtaaaaaaattagtcaaagtgttacgtagcaaagaagtccaagattggattacgaaaaaatggaacggtgccattgttccagtcaatgaataa

SEQ ID NO: 6737 - DNA, 816 bp, Enterococcus faecalis
  CDS (1)...(816)
atgctacgtttttttccgcaaaaaaataaatatgtagaagaagcaagccagtacgcctttgataaagaaggccaaattccgcagcacattgccattattatggacggaaatggccggtgggcacagaatcgaagactgccgagaattgctggacataaagaaggcatggatacggtcaaaaaaataacgaagcatgctagtcatttaggcgttaaagttttaacactttatgcattttcaacggaaaattggaagagaccaacagatgaagtcaatttcttaatgcaattgcctgttgatttttttgatacattcgtgcctgaattaattaaggaaaatgttaaagtcaatgtaatgggctaccaagagtttctaccaagccatacgcaagatgctgttaagcgggccattgagcaaaccaaggacaatacgggcatggttttgaactttgctttgaattatggggcgcgtgcggagctactaactgccatgaaacagattgctgcagaggtttcagaaaaagcatatacggcagatgagattacagaagaaacgatcgcagatcacttaatgactggctttttacccacggaacttcgtgatccagaattgttgattcgaacaagtggggaagagagaattagtaatttcttgctatggcaaattgcttatagcgagttgttttttacaaaagcattatggcctgatttttcaggggacactttagaaaccgcgattgcttctttccaaaatcgtaatcgtcgttttggaggtctaaaagaaactacagaaacagaagggagcgatccgcagtga

SEQ ID NO: 6738 - DNA, 801 bp, Enterococcus faecalis
  CDS (1)...(801)
gtgagacaacgtgtcatcacagctatcgtcgcattaatcatctttattccaattatctggtatggtggttttgcaattgagattgccgctgttgctttggcagtagtcggcgtgtacgagttattccgtatgaaaggattaacgttattaagttttgaaggtgttttatcagcattaggggccgtttttttagttatcccaacaattaaatggttaaactttttgccggaaatgcaaacaaatttcattttattttatgtcactgtaatgttgttgttaggtgcttcggtaatttctaaaaatacatatacgattgaagaagctggctttccagttattgtcagtttatatgtagggatggggttccagaactttattagtgcccgttccgcaggttttgaagtcttgttatttgctttattcattgtctgggcaacggatattggtgcatatctatttggacgccgatttggtcgtcataaattgatgccagatgtttcacccaacaagacaatagaaggtgcacttggtggtattttatcagccgtcgttgtagcagcgttgtttttagttttcacagctaataaagggctatttccttatccgatgccggtgatgctcgtattgacggttctattttctatagtagggcaattcggtgatttggttgaatcttctatcaaacgtcattatggcgtgaaagactctggtaacatcttgccaggacatggtggtattttagatcgttttgatagtttattatttgttttcccaattatgcacttatgtggattattttaa

SEQ ID NO: 6739 - DNA, 1170 bp, Enterococcus faecalis
  CDS (1)...(1170)
atgaaaaaatttttagagaatagtatacatcaagccataaaagcttgttttttctttttaggtaaactacctaaaaagaagttatttatttttgaaagttttcatggaaaacagtatagtgataatccgcgtgcaatttttgagtacataagagataactgtcctgaatatcaatgtatttgggcagtcaaaaaaggatatgagatgccttttgtggaagagaatgttcctttcgtcaaacgattaagttggagatggctatggttgatgccaagagctcagtattgggtttttaacacacggatgccagcctggatgtataagaatcaaacaacaatctatatacagacgtggcatggaacccctctaaagaaactgggcttagatattgaaacagtcaaaatgccagagcatgaaacagagagctataaactagaagtcattcaagaagcaaagcgttgggattatctcatctcacctaatgcatacagtacaagagtgtttcgacaagcctttcattatgaaggggaaatattagaaataggttatccaaaaaatgatttgttagtttgtgaaaataaggacaaaatagctttttctgttcgcaatcagctaggtcttgcagctaacaaaaaaattattctttatgcgccaacatggcgcgatgatgagtctatccgaaaaggagcctatcgttttaccaatcatttgccagttgaacaacttttagaaattgattcttctattgtaatacttacacgattacattatttaattgcagaaagttttgatataagtgcatttggttcacgtgtaatcgatgtttcttcttatccagatatcaatcaactttatttaatcgctgacttattaattacagattattcatcggttatgtttgattttgcattaacaaaaaaaccgatgctattttttatgtatgataaggaaaagtatcaaaatagtacaaggggattctattttgacccaacagcaattttgcctgggaaaattgtgacagatacggatagcctagtaacgtctgtaaaaaacgtattgttttctaaaacggaacaggaacaacgtttatatgtgcagttttttcgtgaattttgccttgaaaatcaggatgccactagacagctgatttcagaaattttaaagagataa

SEQ ID NO: 6740 - DNA, 1386 bp, Enterococcus faecalis
  CDS (1)...(1386)
gtgaaatggccaactagtgaacggttagactcggaggaacaaatggaaaaagaactgaaagttagaacaaaattacttaccaaagaatacagtttagcgcaaacacgtattgacaaattgaagacactttttagtgtttttcaaaacaaagttcccacattttgggcgttaaaaggtgttagcctcgacgtatattctggagaaacaattggtattattggtttaaatggttcaggcaaatccactttatcaaatattatttcaggcatcacccctcaaacgtcaggagaacttgaaataaatggtgaagtttcaattatttcgattggtgcaggactaaataataatttaacaggacgagaaaatattcgaatgaaatgtttaatgttgggggaaaagaataaagaaattgatgccaaaatcgatgatattattgaattctcagaattaggcgtttttatcgaccagcctgttaaaacttattctagcggtatgcgtgctaagcttggtttttcaattgcggttcatcaaaatccagatattttagtgatcgatgaagcgttatctgtaggagatcaaaccttctataataaaggcttaaaaaaaatgcttgcatttaaagagcaaggcaaaactatcttttttgtctctcattctattcaacaagtagagcaaatttgtgatcgtgtcgcttggatgcattatggtgacctacgtgcatttggtgaaactaagcatattttaaaggaatatcgtgctttcttgcaccgttataatcatttcactgaaccgcaaaaagaatcgtatcagagagatggcaaggccaaacagagaaatttttctttggaacaacttcaagaaacaattcttgaaaaagccaatcaacaagtaggcagtcgccggacgactaaagaagtcataaaatttactactaaaaataaaattggagataaaatgactcttggtacgaagagcttgttaattttgctactttgtatgattttttatgtaagtcttacctttgtaaaaggtatttcattaacaacagctttcattcatccagcggaaacaattcaacgtatatttgttcctgagaaagtagcagggaaggatacaaacgctgtgaaaacaactaaagctaaaccagcttcaacaaaagaatctagccagcaggaagaagttcagtctagctcaacgaacgcatcagaaaataataatggtgaacaagctgtgtcaacgtatactgtggaagttggagattcagtcagtttgattgctgaaaatcacggactcactatagaacaacttcaaactttgaacccagaaatcattgaggtacctatttatcctggacaagtgttgaaattgaaagaggtgactgaataa

SEQ ID NO: 6741 - DNA, 732 bp, Enterococcus faecalis
  CDS (1)...(732)
atggaaaatcgaggaattttatttgataaagatggtacgtgtattcgttttgacactctttggcaagcaggtttgcaagcttgttttgaaacactaagtatgttagcccctcatcattcagcagaaataaaaaagatattagctattcaggagcaacgttttttgcaaaaacatttacttgatgaagtcctttatcaggaactttatcaggaattggcgcaatttgaggaattagtcgaacagggaatcagcagtcgatggctggagcaatttttttatgattatttacgaaaaaatctgaaaaagatcgaaccaattggtgatttaaaacagttatttcttgagctaaaacggaagaactataaaattggattagcaacttcagatactttgccagcgactatgttgattatggaatatcttggtttaacagaaatgtttgattttattgcgacaggagatcgttacttaccgaaaccagatgcggacatgctccaagccttttgtcagtcatgtcaattgaaggcgacagaagtaattatggtaggtgattcgctcgtggatgtttttatgggaacgtgtcatggcaaagcaggaattggtgttttaacaggcaactgccagtcaactgattttgaaaattttgaagtagcttattttcgtgatatccatgaaataccttatcaagaattatgggaaaataccaagaagaaaaaaatatattatttttga

SEQ ID NO: 6742 - DNA, 531 bp, Enterococcus faecalis
  CDS (1)...(531)
atgctacttactatattggtagtcggtgaaacggctcctagtaccacactaggcacgatgattgttgtcagtggtgcatttttaatcttgatgctcttattaaagaaatatgcatggggagcaatcgtagatattttgacacaacgtgaagaaaaaattgccaacgatttagactctgcagaacaatctcgcgtagcagcagcgaaaatggaaaaagaacgtcaacaacaattactttcttccagatcagaagcagctgaaattattaaaaacgcgaaagaaagtggagaacagactcgccaaaaaacattaaaagaaacaactgcggaagttactcgcttacgcgaaaaagctcggacagatatttctcaagaacgtgaagaagcattgtcttcagtaaaaaatgaagtggcagatctttctcttcaaattgcagccaaaattttaaataaagaattaacaccagatgcacatgaagcattgattgattcttatattgaaagtttaggtaaagcaaatgaaactagataa

SEQ ID NO: 6743 - DNA, 1074 bp, Enterococcus faecalis
  CDS (1)...(1074)
gtgtgcgaaattaaggaaggaagcccaatgacaatttttacaaaagaacgtaaattattattagctgtggaaagtagctgtgatgaaacaagtgtggctgtcattgaagatggcgacaaaattctttccaatatcgtagcttcgcaaattaagagccatcaacgttttggcggagtcgttccagaagttgcgagtcgtcatcatgtcgaacaagtgacaatctgtattgaagaagcattaacagaagcaaaagtcacaccagaagagcttagtggcgttgctgtgacctatgggcctgggttagtcggtgctttattaataggactttctgcagcaaaagcatttgcttgggcgcaccaattaccacttattccagtcaatcatatggctgggcacatttatgctgcccgttttgtagcaccgctcgaatttccattgatggccttactcgttagtggaggacatacggaattggtctacatgaaagaagatggctctttcgaaattgttggtgaaacacgtgatgatgcagctggtgaagcgtatgataaagtcggacgggtgttagggttgccttatcctagtggcaaagagattgatgctttggcccatgaaggcacagatacctaccaatttccacgggcgatgctaaaagaggataactatgactttagctttagtggtttgaaaagtgcgtttattaacacggttcataatgcagagcaacgtggtgaagtactgtctacaaaggatttagccgcaagttttcaggcgagtgtggtggaagtattagtggctaaaaccattcgtgcttgtcaagaatatcctgttaagcaattgctaatcgctgggggcgttgctgcgaatcaaggattacgagaagcaatgagacatgcaatcagtgaacaattaccagcagtaacattacttattccgccattaaaactttgtggggataacgcggcgatgattggcgctgccgcctttatcgaagctgaaaagaatcactttgcttcgtataacttaaatgcagaacctggcgttagttttatgacaattagtgaagaaggctag

SEQ ID NO: 6744 - DNA, 1692 bp, Enterococcus faecalis
  CDS (1)...(1692)
atgaacaacaaagaaatcgtagcaaaagcgttacatgatgttttaaatgaagaattaacgatggatcaaatcgaacaattattggaaaatcctaaatctgttgatcatggagatgtggcttttccagccttttcattagctaaaatttatcgtaaagcaccacaacagattgcagcagaattagcagaaaaaattgatggcacaaattttgaaaaaattgaagtggtgggaccttatttaaacttcttcatgaataaagaagcagtcagtcaagctgttattggcgcagtagtcaaagaaaaaaacaactacggaaacagtacctttggcaataatggcaatgttcctattgatatgtcttcaccaaacattgctaaaccaatttctatggggcacttacgttctacggtaatcgggaattcaattgcctttattttagaaaaaattgggtatcagccaattcggattaaccacttaggtgactggggtacacagtttggtaagttaattgtagcttataaaaaatggggttctgaagaagcagtccgccaacaaccaattaatgaattattgcgcttatatgtgcaatttcatgaagaagcagaagaaaaaccagaattagaagacgaagcacgtgcatggtttaaaaaattagaagaaggagaccaagaagctaatgaattatggaaatggttccgtagcgagtctctaaaagaatttgataaaatctattccatgttagaagttgaatttgattcttataatggcgaagccttttataatgataaaatggatgaaattgttactttattagaagaaaaacatttattaacagaaaatcaaggtgcagaaattgttgatttgacagaatataatttaaatccagcacttattcgtaaatcagatggtgcgacgttatatatcacacgggatttagctgctgcgctttaccgtaaacggacgtatgattttgccaaatcactttatgtagtcggcaacgaacaaagcaatcacttcaaacaattaaaagcagtcttgaaagaactaggatttgaatggtcagatgatatggaacacattccgtttggtttaattactcaaggcggtaaaaaattatccacacgtaaagggaaaatcgttttattagaagaagtattgaatgaagctgttactttagcaggaaatcaaattaacgagaaaaacccagacttagcaaatcgtgaagaagtggcgaaacaagtaggtgtaggtgcagttattttccatgaccttaaaaatgatcgtctaaataatttcgattttgtattagatgaagttgttcgttttgaaggcgaaactgggccatatgttcaatatacacatgctcgtgcgatgagtattttacgtaaagcaaactttacaccagacgctacacaacgttatgcactaaatgacaaggatagctgggaagtcgtgaagttgttacaaaaattccctgaaactgtgatgcaagctgctgaaaaatatgaaccatctgttattgcgaaacatagcattcatttagcacaagcgttcaataaatattatgcccatgttcggattttggatgaagatgctcaaaaagaggcacgcttagcgttagtttatgcagttgctactgttttaaaagaagatttacgtttactagggttacatgcaccagaagaaatgtag

SEQ ID NO: 6745 - DNA, 828 bp, Enterococcus faecalis
  CDS (1)...(828)
atgaaaaatacagcagttacatttaaagaatctaaattaagaaatgaaaaattaacaatgcttacagcttatgactattcaacagcaaaaataattgatgaagctgggataaatggaatattagtaggagattctcttggtatggtatgtctaggacatgaagatacactttcagtaacaatggaagacatgattcatcatactagagcagttacaagaggagctaagaacactttagttgttgcagatatgccatttatgtcttatcaaacttcagtatatgattcagtagttaatgcaggaagattaataaaagaaggacgagctcaggttgttaaattagaaggagggatagaagtatgcgataaaatagaggctatagtaaaggcttctatacctgttatggcgcatataggtttaacacctcaatctgttaatgcatttggaggatttaaggtacaaggaaaggacaaggaagctgctaaagaattaataagagctgctaaagctgtagaaaaagcaggagcattcgctgtagtgttagaatgtgttccaactaagcttgcagagttaatttctaaagagatatcaatacctacaattggtattggagcaggtgcagggtgtgatggacaaattcttgtatatcaagatatgttggggatgtatagtgattttacccctaaatttgtgaagaaatatgctaatttatcagaagagatgaataaagcatttacaaaatatatagaggaagtaaaagatggagtttttccaggtccagaacatgggtttaaaataagtgatgatgttttagaaaaattatattaa

SEQ ID NO: 6746 - DNA, 2061 bp, Enterococcus faecalis
  CDS (1)...(2061)
atgaaaaaaataaataaccgattaggactctttttattttttgttttactcttttgggcaaaaacgattctggcgtattacctagatttctcattgggcgttaagggcagtctccaacgagaaattttatggttcaatccagttgctactacgctgttattatttggctttagtttgtattttaaaaagcataaaacatttatgcttagcttaactcttttaaatgttttaaatacattaattttatatttgaatattattttttatcgtgaattcactgactttattaccatccaatctgtttttggcttttcaaaagttttagaaggaatttctggtgatttacttgccttaatgagggtccacgatgtcttttattggctagatactttagtgctgctcgttttggtattttactcttttaaacagcgacggaatcatcaagtctttgtgaccaaacctatcaacagaagattggcgatctcaattagttgtttaagtgtcttgctcttttcggttaacttatttttaagcgaaaccgatcgtcctcaattgcttcaaagaatttttgaccgtaattatattgtaaaatatcttggcttggatgcattcacagccatcgatggtgtcaaaacagccatgtcaaatgaggtaagagcagaagctagttcaaacgaattacctgaaatcatgaaatttaccaagcaaaacaatttaccgcttaatccacagtatgccgggattgccaaaggaaaaaatgtatttgtgattcatttagaaagttttcaacaatttttgattaatatgaaagtccaaggccaagaggttacaccgtttttaaatcagctttatcaaaacaaagcgacaatcagttttgataatttctttcatgaagtagggcaaggaaaaacgagtgatgcggagaacatgttggaaacaggaacattcgggttaccgcaaggctctctttttacacaattaggatcagacaatactttcgaagcggctcccgcagttttaggacaaaaaggctatacaaccgctgttttccatggaaatgtggggagtttttggaatcgagaccatgtgtataaaaacttaggatatcaatacttttttgatcggtcatatttttcaaaagatgacaaaatgctaggttacggtattttagataaacaattgttgcgtgaatcagctagtgagcttgaacatttacagcagccattctatgcgaagtttttaactgtgaccaatcataccccttattatacggatgaccaaaacttcccgtttcctaaattgaacacaggcaattcgattgtggatgattatgttcgaacagcgcactatttggatcaatcgctagaacaatttttccattacttgcaaacaacaagtttatacaatcattctatttttgttatttatggtgaccacttcggtatttcagatgcgaacaacaaggacttatgtaaagctttcaaccgcgatccaaaaacgtggacaaactatgacaatgcgcaattgcaaagagtacctttgatgttttacatgccaggctatacgcaagggaaaatcatgcacgaatatggtggggaaattgacgttttaccgacactgtaccatcttttaggtgtcgatgataaaaattatatccattttggcacggaccttttatctcctcaatataaacaagtggttccttttagaaatggcgattttgtaacgcctcgattttcttatctaggtggggaaatctacaataatcaagggaaaaaattagaccaagttccagcagatttaaaagcagaagtcacgaaagataacgattgggtgaaaaaatcgttaagtttatctgacaaattaaatcaggaaaaccttttacgtttttataaaccacaaggattccaagaagtgcaaccaaaggactacaactatgatgtggcttttgaaaaaaacaaagtcttagaagtagaaaaacaaaaaaatgcacaatcaaccagcttgtttagtcaaaatggcaatcaaacgacagtccaaaattatccgactacgccatag

SEQ ID NO: 6747 - DNA, 1032 bp, Enterococcus faecalis
  CDS (1)...(1032)
atgactataaataatacaacatttggaggaggaactatgcttacgttaacagctggaaaaaaagcggcaatggatcgtttgtcaacccaagaaggaatcattagcgcattagccattgatcaacgaggtgccttgaaaaaaatgatcaaagcgctagatgtagagccaactgatgcacaaattgaaacgtttaaagaattagtctcgaaagaattgacaccttatgcgtccgccattttattggatccagaatatggattgcctgctgcaaaagcacgcgataccgaggctggattgttactcgcttatgaaaaaacgggctatgatgcaacaactccgggacgattgcctgatttactagcagattggtctgttttacgcttgaaagaagaaggcgcagatgcgattaaatttttactatactatgatgtggatgaggattcagaaatcaatcatcaaaaacatgtattcattgaacgcttaggaagtgaatgtgcagaagaagacctaccattttacttagaattagtttcttatgatgcacaaatagcagatgcgacttctttagaatatgcaaaagttaaaccgcataaagtgaatgaaatgatgaaagaattttctaaaccccaatataaagtagatgtattgaaagtggaagttccagttaatatgaattttgtagaaggttttgcgccggctgaaacagcgtatacaaaagaggaagcggcgaattatttcttagaacaaagtcaagccactgatttaccattcatctttttaagtgccggtgtctcaacagagctattccaagaaacactacgtttcgctaaagaagctggttcaacatttaatggtgttttatgtggccgagctacgtggaaaaatggcgtgaaacctttcgttgaagcaggagaaactgcggcttgtgattggttaaaaacagaaggccgagaaaacattgaaagtttaaatgaagtcatcgcagcaaccgccagctcttggcatgcgaaagttcaagtaaacgaagggtaa

SEQ ID NO: 6748 - DNA, 1038 bp, Enterococcus faecalis
  CDS (1)...(1038)
atgttaaaagaatttaaaatgattgaagcagttgctccagatatgctcgatgtattacaagaaagattccaaattcttcgcaatatttattggatgcaacctattggacgtagaagtttatcagaaacgatgggaattacagagcgagtcttgcgtacagaaacagatgttttgaagcagctcaacctgattgaaccttcaaaaagcggaatgacattaacagaacgcggtttggaagtctatcaaggcttagaattagtcatgaatcaattgcttggcatgcaccaaatcgaaaaagaaatgacacagtactttggcattcaacgttgtatcgttgttgcaggagatagtgatatccaaaagaaagttctttcggactttggagatgtcttaaccaatacgctgaatttactcttaccaaatggtgagaatacaattgcggttatgggtgggacaacaatggccatggtggccgaaaatatgggatcactagaaactgaaaaacgtcataatttgtttgttccagccagaggagggattggtgaagcagtttctgtccaagccaattcaattagtgctgtaatggccaacaaaacgggtggtaactaccgggcgttatatgtcccagaacaattgagtcgtgaaacgtataatagtttattacaagaaccctcgattcaagaagttcttacgttaattagtcatgccaactgtgtggtgcacagtattggtcgagcgttgcacatggcggcacgccgaaaaatgtctgatgacgaaatggttatgctcaaacaaaaaaatgccgtggcagaatcgtttggttatttctttgatgaagaaggaaaagtggtctataaaattccacgaattggccttcaattaaaaaacttacaagaaattccctatgtcgtcgcaattgcgggcggcaaaacgaaagccaaagccattcgcgcatatatgaaaaatgcaccaaaacaaacgtggctcatcacagatgaagctgccgcaaacgagattttaaaaggggtaaccctttaa

SEQ ID NO: 6749 - DNA, 786 bp, Enterococcus faecalis
  CDS (1)...(786)
atgtttaaaggagtttttcttatgccaaaagaatttgaaacaaaacgggtgcttgtaaccggtgcagcttcagggattggccaagcacaagcaattgcctttgctgagcaaggtgctgaagttattggcatcgacctagacgaaacggggttaaagcagacagccgcactggttaacccagattctactaagccatttacttattttgtcggtgatgtgtcttctccctcatttgtgcaagccacgatgaaacaaattgtgaaagacaacggccaaattgatattttattaaatacggcaggtattttagatgattatcgtccttctctagaaacttcggaagctttatgggatcaaattttagcaaccaatttaaaaagtgtctttttagtgaccaatgctctattaccttatttcctccaacaaaaaaaaggagtaatcgttaatatggcatctatcgctggcttagtagctgggggcggcggcgcagcgtacactgcctccaaacacgcaatcatcgggtatacaaaacaactttcctacgattatgccaaattaggcattcgagcaaatgcgattgcgccaggtgccatccaaacacccatgaacgcagctgattttgcaggagaaggtgaaatggctacttgggtagcaagtgaaacacctgcgggccgttgggcacagccacaagaggtagcaaaactttcattatttctagctagtgatgacgctgattatatccatggcacagttatgaccattgatggtggttggaccatgaaataa

SEQ ID NO: 6750 - DNA, 1002 bp, Enterococcus faecalis
  CDS (1)...(1002)
atgacagttaaagtaggtattaatggatttggacgtatcggacgcttagctttccgtcgtatccaagatgtagaaggaatcgaagtagttgcaatcaacgacttaacagatgctaaaatgttagcacacttgttaaaatatgacacaactcaaggccgtttcaacggtacagttgaagttcacgaaggttcattcaacgttaacggcaaaaaaatcaaagttttagctaaccgtaaccctgaagaattaccatggggcgaattaggcgtagacatcgttttagaatgtactggtttctttacttctaaagaagctgctgaaaaacatttaactgctggtgcaaaacgtgtagttatttcagctcctggtggtaacgatgtaccaacaatcgtttacaacacaaaccatgaaacattaactggagaagaaactgtaatttcaggcgcttcttgtactacaaactgcttagctccaatggctaaagctttacatgacaactttggtgttgttgaaggtttaatgacaactatccacgcttacacaggtgaccaaatgacattagacggaccacatcctaaaggcgacttccgtcgtgcgcgcgctgctgctgcaaacatcgtacctaactcaactggtgctgctaaagcaatcggcttagtaatcccagaattgaacggtaaattagatggcgctgctcaacgtgttcctgtagcaactggttcattaactgaattagttactgtattagacaaagaagttactgttgatgaagtgaatgcagtaatggaaaaagctgctaacgaatcttatggttataacacagacgaaatcgtttcttctgatatcgtaggtatgacttacggttcattattcgatgcaactcaaacaaaagttatgacagttggcgacaaacaattagttaaaactgttgcttggtatgacaacgaaatgtcatacactgctcaattagttcgtactttagaatacttcgctaacttataa

SEQ ID NO: 6751 - DNA, 2538 bp, Enterococcus faecalis
  CDS (1)...(2538)
atggcaaattttttgaaaaaaatgattgaaaacgataaaaaagaattaagacgattagaaaaaatcgccgataaaattgatgcacatgcaagtgcaatggaacaactaagcgatgaacaattacgtgaaaaaacagatgaatttaaagcccgttatcaaaaaggggaaaccttagacgaactattaccagaagcgtttgcggttgtccgtgaagctgctaaacgagtactaggtttattcccataccgtgtccaattaatgggtgggattgtgcttcatgacgggaacattcctgaaatgagaacaggtgaagggaaaaccttgactgccacaatgcctgtatacttgaatgcactatctggcgaaggagtacacgttgttacagttaatgaatacttagcaacccgtgactctaacgaaatgggagaattatataatttcttaggcttaagcgttggtttaaacattaactctaaatcttctgatgaaaaacgtgaagcgtataactgtgatatcacttatagtacaaataacgaattaggatttgactatttgcgtgataacatggttgtttatcgcagccaaatggttcaacgtccattaaactatgcaattgtcgatgaagtggattcaatcttaattgatgaagcaagaaccccattaattatttctggacaagctgaaaaatcgacagcactctatacgcgtgccgataattttgtcaaacgcttaaaagaagacgaagattacaaaattgatattcagtctaaaacaattggtttaacagaagcagggattgaaaaagctgaacaaactttcggattggataacctgtacgatattgaaaatacagcattaacgcaccatttagatcaagcgttacgggcaaactatatcatgttattagacattgattacgtggttcaagacaataaagtcttaattgttgaccaatttactggtcgtatcatggatggtcgtcgttattctgatggcttgcatcaagcgattgaagcaaaagaaggcgtcgaaattgaagatgaaacaaaaacaatggcgacgattacgttccaaaactacttccggatgtacaaaaaactagccgggatgactggtactgctaaaacagaagaagaagaattccgtgaaatttacaatattcaagtcattcaaattccaaccaatcgtccaattatccgtgacgatcgtccagatttactttatccaaccttagaaagtaaatttaatgcagtggtggaagatattaaagaacgttaccacaaaggacaaccagtgttggtggggactgttgcggtagaaacgtcagaattactttctgataaattaaacgcagctaaaattcctcatgaagtattaaatgcgaaaaatcactttaaagaagccgaaatcattatgaatgccggtcaaaaaggcgcagttacaattgcaacaaatatggctggtcgtggaacggatattaaacttggtttaggtgtacttgaactaggtggtctagcggttatcgggacagaacgtcatgagtcacgtcgtattgataatcagttgcgtggacgtgcaggacgtcaaggggatccaggggtttcacaattttatttatctttagaagatgacttaatgaaacgctttggttcagaacgaattaaaacattcttagaacgaatgaatgtgcaagaagaagatgcagttattcaaagtaaaatgtttactcgccaagtagagtctgctcaaaaacgtgtggaaggaaataactatgacacacgtaaaaatgtcttacaatacgatgacgtgatgcgcgagcaacgtgaagttatttatgcgcaacgacaagaagtaattatggaagaaaatgacttgtctgatgtattgatgggcatggtaaaacggacgattggccgagtggtggatagccatacacaattagaaaaagaagaatggaatttagatgggattgtcgattttgcagcctcaacacttgtccatgaagatacgatttctaaaaaagatttagaaaataaatcagctgaagaaatcaaagactacttagtggcacgtgcgcaagaagtatttgaagaaaaatctcaacaattgaatggccaagaacaattgctagaatttgaaaaagtagtcatcttgcgtgttgtcgatactaaatggacagatcacattgatgcaatggatcaattacgccaatctgtcggcttacgtgcgtacggtcaaaacaacccattagtagaatatcaaacagaaggttattctatgtataacaatatggtgggttcaatcgaatatgaagtaacacgtttattcatgaaatcggaaattcgccaaaatgtccaacgtgagcaagtagctcaaggacaagcggaacatccagaaacagaacaagatgcagctgcacaaagcaacacaagtgcgaagcgtcaacctgtgcgtgtagataaaaaagtgggccgtaatgatttatgcccatgcggaagtggcaaaaaattcaaaaattgtcatggaagaaacgcttaa

SEQ ID NO: 6752 - DNA, 873 bp, Enterococcus faecalis
  CDS (1)...(873)
atggagcaacgagggaaatttattagtttcctatgtattgccttaattgtagcagtggttgtttcaattttctattttgttgcaagtaaaggacttgctacattctttaaagataagattaatgtgtttgatttcttatttggaacaaactggaacccaagtgatatcggcgcagacggtaaacccatggttggggctttaccgatgattgcgggttcctttattgtaacgtttttgtcagcgattgttgcgacaccatttgcgattggagcggctgtttttatgacagaaatttcacctaaaaaaggagcaaaatttttacaaccagttattgaattacttgtagggattccctctgttgtttatggatttattggtttatctgtcattgttccttttgtccgttcaatctttggcggaactggcttcggtattttagctggtacgtttgtgctatttgtcatgattttaccaacggttactacgatgaccgtagatgcattaaaagctgtacctcgacattatcgtgaagcgtcgttggcgcttggtgctacgcgttggcaaacgatttataaagttgtcttgcgggcagctgtgcctggtattttaactgcggttgtctttggtatggctcgtgcgtttggtgaagccttagcaatccaaatggtaatcggaaatgcagctgtgatgccaactagtttgacaacaccagcttcgacactaacaagtattttgacaatggggattgggaatacaattatgggaacagttgaaaacaacgttctttggtctttagccttgattctattgttgatgtctttactattcaacattgttatccgaattatcggtaagagaggagccttaaaataa

SEQ ID NO: 6753 - DNA, 1194 bp, Enterococcus faecalis
  CDS (1)...(1194)
atggctaaaaagacaattaaagatgtagatttaaaagacaaaaaagtccttgtccgtgttgactttaacgttccgttaaaagatggcgtgatcacaaacgataatcgtatcgtagcggctttaccaacaatcaaatacgtgattgaaaatggcggaaaagcaattcttttctctcatttaggtcgtgtaaaaacagaagaagacaaagctggcaaatcattaaaaccagtggctgaacgtttaagcgaattactaggtcaaccagttacttttgttccagaaacacgtggtaaagaattagaagacgctgttaacaatatgaaagacggcgacgttttagtatttgaaaacactcgttttgaagatgttgacggcaaaaaagaaagcggcaatgacgctgaattgggtaaatactgggcttctttaggcgatgtatttgtcaatgatgcttttggtactgcacaccgtgcacatgcctcaaacgttggaattgcttcaactggtatcccaacagttgctggtttcttaatggaaaaagaaattaaattcatcggcgaagctgttgaaaatccaaaacgtccattcgtagcaatcttgggtggcgcaaaagtttctgacaaaatcgctgtcattgaaaacctaattgaaaaagccgacaaaattttaatcggtggcggtatggcttacacattcatgaaagcacaaggctatagtgttggtttatctttacttgaagaagataaagtggacttagcgaaaagcttaatggaaaaagctggcgacaaattagtattaccggttgatacagttgtctctaaagagttcagcaatgacgctcctttccacacggttccttcaactgaaatcccagatgatgaagaaggcttggatattggtgaaaaaacaattgaattattcgctaacgaattacaaggtgcgaaaacagttgtttggaatggaccaatgggcgtatttgaaatgagtaactttgccaaaggaacaattggtgtttgtgaagcgattgctaatttagaagacgcaacaacaatcatcggtggcggggactctgctgctgcagcaattcaattaggctacgaaaacaaattctctcacatctcaacaggtggcggagcaagtttagaattattagaaggcaaaactttaccaggtttagcttctattaacgataaataa

SEQ ID NO: 6754 - DNA, 936 bp, Enterococcus faecalis
  CDS (1)...(936)
atgacagaagtggtaaagatttatcaactggtagaaaatctttctttagaagtagtctacggagatgaagaaagcttaaatagaacaattaaaactggtgaaatttcccggccaggcttagaattaactgggtattttaattattattcccatgatcgtttacaattatttgggagcaaagaaattacctttgcggaacgaatgatgcctgaagagcgtttattagtgatgcgccgtttatgtgcgaaagatactccagcctttatagtatccagaggactagaaatccccgaagaattgattacagcagcaaaagaaaatggggtttctgtattacgttcaccgatttcaacttcccgtttattaggggagctatccagttatttagatggtcgcttagctgttcggacaagtgtccatggggttttagttgatgtttatggacttggtgttttgattcaaggagatagcggtattggtaaaagtgaaacagctttagagcttattaaacgtggacatcggctaatcgcagacgatcgtgtcgatgtttatcagcaagatgaattaaccgtggtgggagagccaccaaaaattttgcagcatttaattgaaattcgtggtatcggaattattgacgtcatgaacctgtttggagctagtgcggtccgcggctttatgcaagttcaattggtcgtttatttagaggcatgggaaaaagacaagaaatatgatcgtcttggtagtgatgatgcaatggttgaaatagctaacgttgatgtccctcagattcgtattcctgttaagaccggccgaaatgtggccattatcattgaagtagcagcaatgaacttccgcgcgaaaacaatgggctatgatgcaacaaaaacgttcgaagagcgcttaacccgtttgattgaagaaaattcaggagaatag

SEQ ID NO: 6755 - DNA, 1023 bp, Enterococcus faecalis
  CDS (1)...(1023)
atgaaacaaaaagtcgctgttttaggtccaggttcctgggggacagctttagctcaagtattagccgaaaatggacacgaggtctgtatttggggaaataaaccagagcaaatcgatgaaataaatacaaaacacaccaacaaacattatttaccagaattaatcttacctacttcaattcaggcaaccactgatttagccactgctttagtagatgtggatgcggtactgtttgtggtaccaactaaagccattcgttcagtagcacaagaagtggcccaacatttaaaaacaaaaccaattattattcatgcaagtaaagggctcgaacaaggtacacataagcggatttcagaagtgatagcggaagagattccagcagaaaaacggcaagggattgtggttttatctggtccaagccatgcagaagaagtcgctgttcatgacattacaaccattacagcagcaagcgaaaatttagcagacgctgtgtatgtgcaagagttgtttatgaatgattactttagaatttatacgaatgatgatgtgattggtgtagaaacaggggcggccttaaaaaatattattgctttgggcgccggagcgattcatggcttaggctttggtgataatgccaaagcggcaattatgactcgtggtttagcagaaattagtcgtttaggggttgcgatgggagcaaacccattaacatttattggtttaagtggtgttggggatttaattgttacttgtacaagtgtccattctcgaaattggcgtgcgggtaatttattaggaaaaggccataagttagatgaagtcttagaaaacatgggcatgattgtggaaggtgtttcaacaactaaagcagcctatgaattggcacaacaactagaagtcgaaatgccaatcacagaaacaatctacaatgtcttgtacaatgacgaagatgtacaacaagcagcaaaagaaatcatgttgcgcgatggcaaaaccgaaaacgaatttacacttgatttttag

SEQ ID NO: 6756 - DNA, 765 bp, Enterococcus faecalis
  CDS (1)...(765)
gtgcttttcatgcgcaaaccaattatcgctggtaactggaaaatgaacaaaactttaagcgaagcacaaagctttgcagaagcagtaaaaaatgctgttccatcaaacgacgttgttgacgctgtgattggatctccagcattattcttagctcctttagcttggaacctaaaagattctgaagtgaaattagctgcacaaaactgctactgggaaaacgctggtgccttcactggtgaaaactcaccagctgcaattgcagatttaggtgtaaactatgtgattatcggacactctgaacgtcgcgaatatttccacgaaacagatgaagatatcaataaaaaagccaaagcaatctttgcaaatggtatgataccaatcttctgttgtggtgaaactttagaaacgtatgaagctggtaaaacagcggaatggatcgaaggtcaaatcactaacggcttagttggtttatcaaacgaacaagttgcttcaatggttatcgcttacgaaccaatctgggcaatcggaactggtaaatctgcagatgctaatattgcagatgaaatctgtggtgttgttcgttcaacagttgaaaaattatacggcaaagaagtttctgaagctgttcgtattcaatacggtggttctgttaaaccagaaaacatcgctgaatatatggcaaaagaaaacgttgacggtgctttagtcggcggcgcaagcttagaagcagactcattcctagctttattagatgctgtaaaataa

SEQ ID NO: 6757 - DNA, 1299 bp, Enterococcus faecalis
  CDS (1)...(1299)
atgtcaattattactgatatttacgcacgcgaagtcttagactcacgcggtaacccaacaatcgaagtagaagtttacactgaaagcggagctttcggccgtggaatggttccttcaggagcttcaactggtgaatacgaagcagttgaattacgtgatggcgacaaagctcgttacttaggtaaaggtgttactaaagctgtagataacgtaaacaacatcattgctgaagcaatcatcggttacgatgtacgcgatcaaatggctatcgataaagcaatgatcgatttagatggaactcctaacaaaggtaaattaggtgctaacgctattcttggtgtgtctatcgccgtagctcgtgctgctgctgattacctagaagtgcctttatatcattacttaggcggattcaatacaaaagtattaccaactccaatgatgaacatcatcaatggtggatcacatgctgacaacagtattgacttccaagaattcatgattatgcctgtaggtgcgcctacattcaaagaagctttacgtatgggtgcagaagtattccacgcattagcttcaatcttaaaaggccgcggcttagctacttcagtaggtgacgaaggtggtttcgctcctaacttaggttcaaacgaagaaggtttcgaagtaatcatcgaagctatcgaaaaagctggctatgttcctggtaaagacgttgttcttgctatggatgctgcttcttcagaattctacgacaaagaaaaaggcgtttacgttttagctgactcaggcgaaggcgaaaaaacaactgaagaaatgatcgcgttctacgaagaattagtttctaaatacccaatcatttcaatcgaagacggcttagacgaaaacgactgggacggattcaaaaaattaactgaagtattaggcgacaaagttcaattagttggtgacgatttattcgtaacaaacacaactaaattagctgaaggtatcgaaaaaggtatcgctaactcaatcctaatcaaagttaaccaaatcggtactttaactgaaacatttgaagcaatcgaaatggctaaagaagctggctacactgcagttgtatctcaccgttctggtgaaacagaagattcaacaatctctgatatcgctgttgcaacaaacgctggccaaatcaaaactggttcattaagccgtactgaccgtattgctaaatacaaccaattattacgtattgaagatcaattaggcgatgtagctgaatacaaaggcttaaaatctttctacaacttaaaaaacaaataa

SEQ ID NO: 6758 - DNA, 894 bp, Enterococcus faecalis
  CDS (1)...(894)
atgttattaggatcacacgttagtatgagtggcaagaaaatgctattaggctctgccgaggaagcggctagttatggctcaacaacctttatgatttatacaggtgcgccacaaaacacgcgccggaaaccgattgaagaaatgaatattgaagctgggcaagcgtttatgaaggaacacaatttaagtaatatcgtcgttcatgccccgtatattattaatttaggcaatacaattaaaacggaaaatttcggttttgccgtagactttttgcgacaagaaattgagcgagcacaagcgttgggagcaacgcaaatcacgttacacccaggtgcgcatgttggcgcaggtccagaagccggcattaaacaaattgttaaaggtctaaacgaagtcttgtggaaagagcaaatccctcaaatcgctttagaaacaatggctggtaaaggaaccgaaatcggccgtacgtttgacgaactagctgcgattattgacggagttacgctaaatgataagctttctgtcactctggatacttgccacattaatgatgcagggtataatgtaaaagatgattttgatggcgtattagttgaatttgataaaattatcggattggatcgtttaaaagttattcatgtgaatgattctaaaaatcctatgggctcacataaagatcgtcatgccaatattggctttggcactattggttttgaagctttaaacggtgtggttcaccatgaaaaattaactgctttaccaaaaattttagaaacaccttatgtcggagaagacaaaaaaaataaaaaggccccttacggctttgaaattgcgatgttaaaaaatcaaacatttgatccagaattattagaaaaaattcaaggacaaaactaa

SEQ ID NO: 6759 - DNA, 801 bp, Enterococcus faecalis
  CDS (1)...(801)
atgaagagagaaaaacaaacgaggaagttaggtggaactgtgaagccagttatagtcaaaaatgtgcgaataggtgaagggaatcccaaaattgtggtgcccattgttgctccaacagccgaggatattttggccgaagcaacggcgagccaaacactagattgtgatttggtggaatggcgtttagactattatgaaaatgtcgctgatttttccgatgtatgtaatctttcacaacaagtaatggaacggttggggcaaaaaccgttattgttaacttttcgtacacaaaaagaaggcggcgaaatggctttttctgaggaaaattattttgctttgtatcatgaattagtgaaaaaaggtgccttggatttattagatattgaattatttgcgaatccgctggcggcagatacgttaattcacgaagctaaaaagatggggattaaaattgttctctgtaatcacgactttcagaaaacaccgtcgcaagaggagattgtcgcgcggttacgccaaatgcaaatgcgtcaggcggatatttgtaaaatagctgtgatgccacaagatgcgacagatgtacttacgttactttcagcaaccaatgaaatgtacacccattatgcatccgtcccaatcgttactatgtcaatgggacagttagggatgattagtcgcgtaacaggtcaactgttcgggtcggcactaacttttggctcagcccagcaagcgtctgcaccaggccaactatccgtacaagtattaagaaattatttaaagacattcgaacaaaacaagtga

SEQ ID NO: 6760 - DNA, 933 bp, Enterococcus faecalis
  CDS (1)...(933)
atgaaaaagcagcaaaggaaggcaaaaatggaacaaattaacgtaacgattcaaacagaaaaaggccggattgacaaagtattaagtgaacatttacccaatcattcccgctcgcaaattcaacaatggttaaaagaaaaacacgtaacagttaatggtgaaacggtccgcgcaaattacaaagttacagcaggcgatgaaattgttgtaacaattcctgaaccagaagctctagatatggtagcagaggatattcctttgaccattgtttatgaagacaatgatgtgattgtcgtcaacaaacctcaaggcatggttgttcatccttcggcagggcatcccaagggtacattagtgaacgcgttacttcatcatgcggatcacttatcggcgattaatgatgtggtgcgaccaggaattgttcatcgaattgataaagatacttcggggctattgatggtggctaaaaatgatcaagcccatgaatcattagcgaaacagctaaaagaaaaaacatcgttacgcaaatacgttgccttggtccacggtgttattcctcacgataagggagaaataaatgcgcctattggtcgttccaaggttgaccgcaaaatgcaagcggtcattgaaggcggtaaagaagcagtcacgcattttactgttttagagcgttttgatgcatttaccttagttgaattacaactagaaacaggccggacacatcaaatccgtgttcacatgaaatatatcggttatccattagctggagatccattatatggaccgaaaaaaacattgcctggcaatggacaatttttacatgcgaagttattaggctttacacatcctactacaggtgaacaattagtctttgaagcacctttaccagaagtttttgaaaaaactttacaccaattaagaaataatcattga

SEQ ID NO: 6761 - DNA, 1284 bp, Enterococcus faecalis
  CDS (1)...(1284)
atgaagacgttaattaagaatggaaaaatcatcaaaaaagagaatcaattgattgaggcagcactttggctagaaaatggtgtgattcacgcaatcggagaatcgtttgacgaagcagattttgagcaagtgtttgatgcgaaagggcaactaatcacgccaggcttggtggatgtgcatgttcactttagagaaccaggctttacgtataaagaaacgattaaaacgggtagtaaagctgctgctcgcggtggttttactacggtttgcgcaatgcccaatttgaatccagtaccagatacggctgaaaaattaagtgaggtttacgacttaattcaaaaagatgcagtcgtgaaagttttacaatatgcccccattacagaagagctacggagtgaagttttaaccaatcagaaggccttaaaagaagcgggcgcctttgcatttacgaatgatggtgttggtgtccaaacggcaggaacgatgtacttagccatgaaagaagcggctgcattaaatatggcacttgttgcgcacacggaagatgaatctttattatttggtggtgtgatgcatgaaggagaagtttctaagaaattaggcctaccagggattttaagtgcaacggaagcttcacaaattgctcgggatattactttagcgaaagaaacaggcgttcattatcatgtttgtcatgtttcaacagaagaaagcgtgcgcgttattcgggatgctaaaaaagcagggattcacgtaacagccgaagtttcgccacaccatttaattttagtcgatgaggatattcctggtgacgaagggttttggaaaatgaacccaccattacgtggtttagcagatcgacaagcattgattgacggcttgttagatggcacgattgactgtattgctaccgaccatgcgccccatggtttagaagaaaaacaacaatcatttttaaacgcaccttttggtattgtcggtagtgaaacggccttccaattgatttatacgaactttgtcgaaacaggcattttcacattagaacaagtgattgattggatggcagtgaaaccggcagaaatttttggattaaacgcaggaacactaacaattggtgcaccagcagatattgcagtttttgacttagcaacagctgcaccaattgatgcagaagcatttgaatcaatggctgtcaatacaccatttacagggtggacagtcaaaggaaagacacttatgacatttgttgacggagcattagcttggtcggaggaggcgcagtag

SEQ ID NO: 6762 - DNA, 774 bp, Enterococcus faecalis
  CDS (1)...(774)
gtgaccaacaacgggtcgttacgccgcaacatgctcgcgaaatcgggtccacatatatcgttgttggccgacctattacccaagcagaaaatccttatgaagcctatcaagaaatcaaaaaagactggagcggaaagtaacatgacaaaagtagcaaaaaagattgccaaagatttattagatattgaagcggtatttttaaaccctaatgagccttttacttgggctagtggcataaaaagcccgatttattgtgataaccgtatcacgatgagttatcctgctgtgcgtaaagaaattgcagaaggcttagcggcaaaaattaaagagactttcccagaagtcgaagtgattgctgggacagctaccgcagggattccacatgcggcatgggtagccgatattttaggattaccaatggtttatatccgcagtaaagccaaagatcacggcaaagggaatcaaattgaaggccgaatttctgaaggacaaaaaatggtagttatcgaggatttaatttcaacaggcggtagcgtgttagaagcggcagaagcggcggaacgtgaaggagcaacggttttaggtgttgcggcaatcttcacttatgagttacccaaaggaacggcaaattttgcagataaacagatgacgttactaacgttaaccaattattcaactttaattgatgctgcattagaagcaaattatatcgaagaaaaagatgttaccttattacaagaatggaaaaaagatcctgaaaactggggcaaataa

SEQ ID NO: 6763 - DNA, 384 bp, Enterococcus faecalis
  CDS (1)...(384)
atgaaatcggtaacctataagggattgaagatgggagcacggctcatggaaatggaaaaaacaaaccgcatgaatgcgttatttgaattttattcgacattattaacggaaaagcagatgaattatatggagctttactatgctgatgacttttctttaggagaaattgcggaagaatatgaggttagtcgtcaagcggtttatgataacattaaacgaaccgaaaaaattttagaagaatacgaaaaaaagttacatctttattcaaactatgttgtacggaaagaatatcttgaacaactacagcagtatgttcaagaaacttatcccaaagatagtgaaatcaaaaaatatattgaacaaattcaagaaatagaggaatga

SEQ ID NO: 6764 - DNA, 1434 bp, Enterococcus faecalis
  CDS (1)...(1434)
atggcttttgagagtttaacaaaccgcctacaacaggcaatgagtaaaatccgtcgtaagggaaaagtttccgaagccgacgtaaaagaaatgatgcgagaaatccgtttggctttattagaagccgacgttaatttacaagtggtcaaagatttcacaaaacgcgtcagagaacgggcagtaggagtcgaagtattagaaagcttatcaccagcccaacaaattgtaaaaattgttgatgaagaattaacgaaaacgttaggttcagaaacggttgaactgaataaatctccaaaaatcccgacagtgattatgatgacagggttacaaggggctggtaaaacaacttttactggtaaattagcaaaacacttaatgaaaactgaaaacgctcgtccgcttttaatcgctggtgacgtttatcgtccagcagcgattgatcagttgaaggttttaggtcaacaattagaagttcccgtttttgatatgggaacagatgctaatccagtggaaattgttcgtcaagggttagcattagcaaaagaaaagaaaaatgattatgtcttaattgatacggccggccgtttacacattgacgaagctttaatggacgaattgaaacaaattaaagagttggctaatcccaatgaaattctgttagttgttgatgcgatgacggggcaagatgctgtcaacgttgcagatagttttaatgaacagcttggaattactggggttgttattaccaaaatggacggcgatactcgtgggggggctgcgctgtcaattcgggcagtaacgggcgctccgattaaatttgtcggttctggtgaaaaattaaccgatttagaaattttccatcccgatcgtatgtcgagtcgtatcctaggtatgggggacatgttgacgctaattgaaaaagcgcaacaagattacgatgagaaaaaagcagaagaacttgctcaaaaaatgaaagaaaacagttttgactttaacgatttcattgagcaattggatcaagttatgggcatgggaccgattgaagacttattaaaaatgatccctggaatgagtaacatgcctggtattgaaaatgtcaaagtcgatccaaaagatgtggcacggaaacgggcgatggtcctatcaatgacccctgcagaacgtgaaaatcctgatctattaaatcctagtcgccgtcgcagaattgcagctggttcaggaaatagtgtggttgaagtcaatcgtatgattaaacaatttaaagaatccaaaaaaatgatgcaacaaatgtccaaaggggatatgaacattcctggtatggatcaaatgctaggtggcggcgttaaaggcaagttaggtaaaatggccatgaatcgtatgatgaagaaaaacaaaaagaagaaaaagaaaaaaagattaacaggctttagttaa

SEQ ID NO: 6765 - DNA, 249 bp, Enterococcus faecalis
  CDS (1)...(249)
atggggtctaaaaagaagtccttttaccgtattgtatcagctgagtctcggtcttctcgcgaaggacgtttcattgaaactgttggtacttacaaccctttggaagaccctgcacaaattgatttaaaagaagatttagttttagattggttatctaaaggtgcgcaaccttctgatacagttcgtaacatcctttcaaaagaaggcgttatgaaaaaacatcatgaagctaaaaacgttaagaaataa

SEQ ID NO: 6766 - DNA, 246 bp, Enterococcus faecalis
  CDS (1)...(246)
atggcagatgtgaaagagttaattttaactattgtccgtccgttagtcagtcaacctgaagcagtctcattagaaattgaggaatcaactgatttcctcgagtataatttgactgtggccaaagaagatattggacgtatcattggtaaacaagggcgtgttgcaaaagcaattcggacaattgtttatagtgtacgtatcgatggtccgaaaaaggtccgtttaaatattcttgatggtaaataa

SEQ ID NO: 6767 - DNA, 1857 bp, Enterococcus faecalis
  CDS (1)...(1857)
atgaagcaattagctacgctatggctcaagggggtagatgtaatcgttactgaccatcatgaattgcctgaacaattaccagaagcctttgcgattgtccaccctagacatccgcaaggtgactatccttttggagatttagctggtgttggtgtggctttcaaagtcgctactgcgttacttggtgaattgccaattgagttattagatttggtagcaattgggacaattgctgacttggtttcattaaccgatgaaaatagaacgtttgtcaaaatgggccttcaaatgattcaaactggtgatcgaattggtttagacgttttattacaagaagcgggtgtgaaaaaggaagctgtttcagaagaatcaattggctttaccattggacctcgtttaaatgcgttaggtcgattaggggaagccgcaccaggtgttgaattaatgactacatttgatgaagagcaagcgctggaaatcgctaaatatattgatcaacaaaacaatgaacgaaaagatattgtaacgacgattgccaaagaagcgctggatttaatcgacccgaatgcgccggtccatattttagcgaaacaaggctggcatgaaggcgtcttagggattgtcgcgggccgcattatgcaagaaacggggaaaccaaccattattttagcaatagatgaatctggtacgaccgctaaaggctctggacgcagcattagcgcattgaatctctatgaggcgttgaacgaagtgcgtgagcaattcactcattttggtgggcatcatatggcagcgggaatgactttacctgttgaaaatattccttttgttcaagaacatttgtcacactttattgaaaaaaatcaaattgatatggctaatggacaagagttgctcattagtgagagcttagcggtttcgcaggcaacgactacttttattgatcaattgcgtattttggcgccttttgggactgataatactgtgccaacttttgtatttaaggaaatcacgcctacgcaaattcgtaaaattggtgcagataatgcacatctgaaatttcaaatgaatcaagaaggggcgcaattggatgcaattgcttttcaaatggggcctcaagcggatgaactagcacaaggaaccgccgatgtggcaggccaactttccatcaatgaatggaatggtcgtaagaaaccacaattaatggtgactgattttgctgtatcgggaagacaattatttgattttcgtggcaaaaataatcaaacgaaaccaattccttcagaagcaacagcttatcttttgtttgatgaaaaaaatcaaaaattcatttcagatccaaccgctaatattattgtttggtcaaaccaagaagaattggtggaagctgtttctcaaaatcaaatcgaacaactggtttttgtcgactgtcctgtggaagcaatcacggttaaagaaattgttgaagcgactgagatacaacgtatatacatgatgtttatttcaccagaagaagcttatttaaacggtatggcttcacgtgaacaatttgcaacattgtataaatttattttgcagcaaaaagaagtaaatctacgttcccagctatcgaaggtggcaaattacttaaatatccaagaaaaattattaattttcatgatacaggtgttttttgacttaggatttgttacaatagaaagcggtgttttaaacagtattgagaaacccgacaatcgaccattgactgaaagtcaagtgtaccaacaacgattgaaaaaaataaaaacagaagaatttctactttacagtgattgtcaaacaatacaacaatggctgtggaatgaggaggacaaataa

SEQ ID NO: 6768 - DNA, 855 bp, Enterococcus faecalis
  CDS (1)...(855)
atgagtttgcgggtggaatcagtaagtaaaaaatatcatcaaaaaaaagcactagataatatttcaattacttttgaaaaagaaacgatttatgggctcttaggcagaaacggggctggtaaaagtacgttattaaatatcattaataatcgaagttttgccacttcaggttccgttcaattggcgggagaaacagtgaccgataatgagactgctttgaatcatatttacttaatgagtgaagataatttatttcctcctcagttaaaaattaaagatatttttaaaacgactgaaggtttttatggatcctttgactggtctttagccgaacaaatgttaagcgattttggtttagatagtaaaaagacattcaaaaaattatcaactggttatcggagtattgctaaactaatagtggcgctatccgtcccctgtgagtatatttttttagatgagccagtcttaggtttagacgccaatcatcgggaattattttatacttatttaattgagacataccaagaacgtccccgtacgtttgtgatttccacccatttgattgaagaaattgcgaatttattagaagatattatcatcattgatcaaggaaaattgattcgcgcagaatctattgaaacaattttgaaaaacggtcgcattgtttctgggccgaaagaacaagtagagcgctatactcagtcattggaaatcttaggcatggacactttaggtggggcagttacggcttacgtgtacggcgacttgccgactgaaaaagcagaggttcaaattgcgccgctaaatttacaaacatattttgtgcaattaaccaatagaaagaaggaaaagtaa

SEQ ID NO: 6769 - DNA, 1506 bp, Enterococcus faecalis
  CDS (1)...(1506)
atggcagaagaaaaatacattatggcgattgatcaaggaacgactagttctcgtgcaattatttttgataaaaaaggaaacaaaattggtagttcacaaaaggaatttactcaatattttcctaatgcaggctgggtggaacataatgccaatgaaatttggaattctgttcaatccgttattgcaggttctttaattgagtcaggagtgaaacctacagatattgccggaattgggattacaaaccaacgggaaacaaccgttgtttgggacaaagcaactgggttaccaatttataacgcaattgtttggcaatcacgccaaacgacacctattgctgatcaactaaaagaagatggctacagcgaaatgattcatgaaaaaactgggttaatcattgatgcttatttctcagcaacgaaggttcgttggatcttagatcacgtagaaggtgcgcaagaacgtgcagaaaatggagaattgatgtttgggacaattgacacttggctcgtttggaaattaacgggagatactcatgtcactgattattcaaatgcaagtcggacgatgttgtttaatatccatgatttagattgggatcaagaaattttgaatcttttaaatatcccacgagtgatgttaccgaaagtcgtttcgaactctgaagtgtatggactaacaaaaaattaccatttttacggaagtgaagttcctatcgctgggatggctggtgaccaacaagccgctttatttggtcaaatggcctttgaacctgggatggttaaaaatacctatggaacaggctcatttattgtcatgaacactggcgaagaacctcaactttctaaaaataatctgcttaccactattggctatggcattaacggcaaagtatattatgccttggaaggaagtatcttcgtggctggttcagcgattcaatggttacgagatggcttaaaaatgttgcaaacggctgctgaatctgaagcagtagccaaagcgtcaacaggacacaatgaagtttatgtggttccggcattcactggtttgggcgcaccatattgggattcacaagcgcgtggggctgtctttggattgacacgtggtaccacgagagaagattttgtcaaagcgacacttcaagcagttgcgtatcaagttcgtgacattattgacacgatgaaagaagatacaggcatagatattcccgtcttaaaagtagacggtggagcagcaaacaatgatttcttgatgcaattccaagcagatattttaaacactgctgttcaaagagcccataacttagaaacaacggccttaggcgcagctttcttggcgggcttagcggttggcttctggaaagacttagaagaaatcaaagcattccaagaagaaggacaacaatttgaaccaattatggcggaagaagaacgagaagatttatatgaaggttggcaacaagcagtagcagctacccaacaattcaaacgtaaaaataagtaa

SEQ ID NO: 6770 - DNA, 477 bp, Enterococcus faecalis
  CDS (1)...(477)
atgaaaattagagtggctgatgagaaagagttaccgatgattcttcaatttttaacagaagtaaaggcatatatggatgttgtgggcattacacagtggacaaaggactatccttctcaaggagatatccaagaagacattacaaaaaaacgattatatttgctagtgcacgaagaaatgattttttcaatggcaacgttatgtatggagcaggaacaagactttgtttggttaaagcgctttgcaacttcgcctaattatattgccaagggttatggcagtttgttgttccatgaattggagaaacgagcagtctgggaaggaagacgtaaaatgtatgctcaaactaatcatacaaaccatagaatgattcgatttttcgaaagtaaagggttcacaaaaattcatgaatctttacaaatgaatcgcttagactttggctctttttatttatacgttaaagaattggagaactaa

SEQ ID NO: 6771 - DNA, 825 bp, Enterococcus faecalis
  CDS (1)...(825)
atggcaattttagcatttgatcttggcggttcttccgtgaaatacggcgtttggacaggcaaagaattaacaaatcaagggagctttccaacacctggctcttgggaagaaatgaaagcgcatttatattcggtttatgcagacaaaagaaatgagtcgattagtggtgttgcttttagttcacctggagtagttgacgaaaaaagtcaacagattttagggatttccgccattccatatattcatcattttaacatttatgaagaattagaagcgttgtttggcttaccagtgactatcgaaaatgatgcgaattgtgctggtttagctgagatatatgaaggcgcggcgaaagggaaaaaagaagtgctttttgtcgttattgggacaggaattggcggagcaatttttcgcaatggtgaattgtacaaaggcgctcatttatatggaggcgagtttggactgaactttttaagtaatggccaaacattcagtgaaattggcacagctgtcaaaatggctcagcgctattgtgaacgaattggagtcgaaaaacaggcggtgacaggagaagaagtttttgaactggcacaacgaggggatgagattgctcgcgaagaagtcaataatttttatgattatttaacacaaggattattcggcttacagttttcttatgatcctgaaatgattgtactcagaggcggtgtttctgctaaagaaggcttattagcagagattaatcgccggatgctaacgcatttacagacctttgaattaaaaagattttgttccagaaatcgtgacctgccattatcaaaatga

SEQ ID NO: 6772 - DNA, 993 bp, Enterococcus faecalis
  CDS (1)...(993)
gtgaagaattattattttttaaggggagtatgcatgaaaattggtttacaaacagtcaagacagccattagcgctgcattagcaatgattattgcggaaaaactgggattactttatgccccttcggcagggattatttcggtcttaagtgttactagcacgaaaaaaacatctgtcatgacaggaatttatcgtttgttatccttagctttagcaactattttagcgtatatttgttttacttttttgggttttacagcgattgcttttggtatttttttgttattatttattccagcagctgtgtattttcaattatctgatgggattgttgtgagttccgttttggtaactcattatttagtcgaaaaaaatctttcttgggcgattattggaaatgagtttttattaatgagtattggtgtgggactagcgttattagctaattcctatatgcctgatacagaaaaacgtttaagagaagaccaagaagtcattgaaacaatgtttcgtaaaattttaagggaaatggcgctacatttaaacaacgctgcaggagagcgaaatttggtcatgcattgtgcagatttaaaaacctttattcgcacaggcgagacgtgggccaaaaatcatgccgagaatcaattgctgtctaccaatacgtactatttagagtactttgcgatgagaaaaatgcaaagtaatattctaaaaaacatgttggaattattagaagatattactgttgatgcgcaacaagttcgctatattcaacaattgttggaatatacggcagaaacatttgcagagaataatgatggacaagaaattatgaatcgaattaagaccgtttatgaaacctatcgcacaaaaccattaccgcaaacaagaagtgaatttgaaaatcgggcgcgactctttcagtttttacaattgtttcagtcattcattcaagtcaaagcggactttgccaaattacaactagataaataa

SEQ ID NO: 6773 - DNA, 1371 bp, Enterococcus faecalis
  CDS (1)...(1371)
atgttttatatagtgacagagaagaggattataatgggaaatcaagagaacaaattataccattttgtcggaattaaaggttctggcatgagctcattagcgttggtcttacaccaaaaaggctacaacgttcaaggatcagatgtagaagagtatttctttacacaacgggatcttgaaaaatcaggtgtccctattttaccatttaatgcagataatattgataaagacatgattgttattgctggaaatgcttttccagatacccatgaggaaatcgcccgcgccatcgaattaggcgcagaagtaattcgttaccacgatttcattgctcgttttatcgaaccgtacacaagcattgctgtaacagggtcacatgggaaaacaagtacgactggtttgctagcacatgtattaagtggtatcaatccaactagttatttaataggggatggcactggccacggcgaaccagatgctgatttctttgcatttgaagcgtgtgaatatcgccgtcatttcttggcttattcaccagattatgcgattatgacgaatatcgattttgatcatccagattactacaagagcattgaggacgttttttcagcgttccaaacaatggctcatcaagtcaaaaaaggaatttttgcttatggtgatgataagtatcttcgccagttagaatcagaagtgccagtttattattatggcgtcagcgaagaggatgatatccaagcccgaaatattcaacgaacaacggaaggctcatcttttgatgtttatcacaaggctgattttgtaggtcattttgtcttaccagcatttggccatcacaatatcatgaatgcgctaggtgtgattgctgtggcttattttgaaaaacttgatatgcaaaaagtcgcagaagaaatgctaagttttaaaggtgtgaaacgtcgttttagcgagaaaaaagtcagtgacatgattattgttgatgattatgcgcaccatccagctgaaattaaagcaacgattgatggcgcccgccaaaaatatcctgacaaagaaattattgctgtcttccagccacatacatttacacgaacaattgccttaatggatgaatttgctgaagcactggatttggcagatgaagtattcttatgtaatatttttggctctgcgcgtgaaacacaaggcgaggtacgcattgaagatttaggtgaaaaaattcaaaaaggtggacaagtaattaccgaagataatgtgtcgcctttactagattttgaaaatgcagaggtggtctttatgggtgctggcgacgttcagaaatttgaacaagcctacgaaacattactaagtaacacaactagaaacgttttataa

SEQ ID NO: 6774 - DNA, 753 bp, Enterococcus faecalis
  CDS (1)...(753)
atgcaacggtatttcatgaaagaagattatcaagaaaaagatttgtataaagtcgcagatgaaaactatcatcatattgtgcgagttatgcgaatgacgccgaatgatcgttgttatttagtatttcaaaataaaactgccattttagctgagattgtggaaattgattcaacatctgtttactttaaagaaattagtaaagaagaaatggacaaagaattgccaattgaagtgacgattgcgtgtgggttaccaaaaggggacaagttagaatggattgttcaaaaaggcacggagctaggtggcaatcagtttatcggctttcctgcgaaaacttccgttgtcaaatgggaccacaaaaaaagagcagccaaagaaaaaagattacaaaaaattgccacagaagcggcggagcaatcgcatcggcagcagacaccaagtgtttctttggtggaaaaaacacaagaaatcattgcgcaatttgactcatatgacacagtcttggttgcgtatgaagaatcagcaaaacaaggagaaaaaagtcaattagcacaagtattatccacttgccagccaggcgcacgtttgtgtgtgctctttggacctgaaggtggctttgcaccgcaagaaattgaacaatttctgcaggctggggcgaaactttgcgggttgggtccgagaattttacgagcagaaacagcaccgttgtatcttttaagtgcggttagctaccaaatggaacttttaaattaa

SEQ ID NO: 6775 - DNA, 1362 bp, Enterococcus faecalis
  CDS (1)...(1362)
atgaaagaaaagaaaacggaaaaaatgcttaattatgcaaatggacctagtttagaagagataaataataccgtcgaggtacctaaaaacgcaagcttttggcgaactttgttagcctatagcggacctggcgctttagtggctgttggttatatggatccaggaaattggattacgtcaattgctggcggagcggaatataagtacacgttacttagtgtgattttactttctagtttagttgccatgttactacaaagtatggctgcacgcttaggaatcgtgacaggaatggatttagctcaagcgactagagagcatacaagtaaacgaacgggcgttgccttgtgggtggtgacggagttagccataatggcaacagatatcgctaaggtaattggtggtgccgttgctttgcaattattatttggttttccattattaattggtgtgttgataacaacgtttgatgttttattacttttgctactgacaaagttaggctttcgcaaaatcgaagcaattgtttcttgtttaattgcagttatcttttttgtttttgcttatgaagtggcattagcagatccaaatgttggtgaagtattacgaggttttattccagacacaaaaatagcgacagataaatccatgttatttttagccttgggaatcgttggagcgacagtcatgcctcataacttatatttgcattcttccattgcgcaagctcggaaatttgatcgtaacgatgatgctgagaaagccaaagcaattcgtttcactacttgggattcaaatattcaattaactgtcgcttttgtcgtaaattgtttgttgttaattttaggaggagcattattttatggaaccaacagtgaattaggtaaattcgttgatttatttgatgctctgaaaaatccagatattgttggtaatattgctagcccagtgttaagtattctttttgcaattgctttactggcttcgggtcaaaattcaacgattacaggtacgctgtcaggacaaattgtaatggaaggctttatccatttaaaaatgccgttgtgggcacgacgagtgttaactcgtttgttagcaattgtgccagtcattatctgtgtcattatttatggcggtagcgaaacggctgttgaagacttgttactttatactcaagttttcctaagtattgctttgccagtgtcgattattcctttaacgatgtatacaagtgataaaaaattaatgggccaatttgcgaatccagcgtgggtgaaatttttagcttggattattgcaattgccttgacgttattgaatttatttttaatttatggcacattaactggtttaacgaattaa

SEQ ID NO: 6776 - DNA, 105 bp, Enterococcus faecalis
  CDS (1)...(105)
atgggggaatcaattattgggaaagctcgggaaaagcagttattagaattgaatgtctctaattttcgcgatttttcagataacaaacaccaaaccggtcgatga

SEQ ID NO: 6777 - DNA, 642 bp, Enterococcus faecalis
  CDS (1)...(642)
atgtctctaattttcgcgatttttcagataacaaacaccaaaccggtcgatgattatccgtatggcggttgcgcggggatgcttttaaaagtacaaccgatctatgataacctaaaggcaattgaagaagagacaaaccagcaaccaaaacgggtcatcttattagatccagcaggaaaaccgtttaatcagaaaatggccgaggaattttcacaagaagaacatttagtttttatttgtggacattatgaaggctatgatgagcgaattcgcacgatggtcacagatgaagtttcattgggggattacgttttaacagggggcgaattaggcgcaatggtcatgattgatgcgacagtccgtttattacctgatgtcttaggtaacaatctttctgcacaaacggattcacattccactggcctattagagcatccacaatataccagacctgctattttcaacgatatggaagtccctgccgtgctaacgaatggtaaccataaattaattgcagaatggcaactaaaagaatcattacgacggacctttttgcgtcgacctgacatgttggaatcagtagaaatgacgcctgaaatgttgaagttattagaggaaattaaacaagaagagcaaaaataa

SEQ ID NO: 6778 - DNA, 396 bp, Enterococcus faecalis
  CDS (1)...(396)
gtggcagaagtgaccataagaatatttgggaataaggagaaggataaaatgaatccattaattcaagaattaacacaagaacaattacgtacggatattcctgcgttccgccctggtgacactgttcgcgttcatgcgaaagtagtcgaaggtactcgtgaacgtatccagttattcgaaggtgttgtaattaaacgccgtggtgctggaatcagcgaaacttacacagtacgtaaagtttcaaatggtgttggtgtggaacgtacattcccattacacacaccacgtgttgctcaaattgaagtggttcgctacggtaaagtacgtcgtgcaaaactttactacttacgcgcattacacggaaaagcagctcgtatcaaagaaatcagaagataa

SEQ ID NO: 6779 - DNA, 2223 bp, Enterococcus faecalis
  CDS (1)...(2223)
gtgaataccatgccaaaagaagaaatactgacaggcccagcggtcatcaaaattgtaagtacctatatgggaccagaacatgttgagttggttcaaaaagcattaacttatgctgaaaaagcacacgaaggtcaagtccgacaatcaggtgaaccttacatcatccatccgattcaagtggcaggcattctggctgaattacatatggatccccatactgtagcaacaggatttttacatgatgttgtcgaagatacggacgtaacactggacgatttaaaagaagaatttggcgaagacatcgcaatgttagtcgatggcgtaacgaaactaggaaaaattaaatataaatctcatgaagaacaattagccgaaaaccatcggaaaatgttattggcaatggcgcaagatttacgggtcattatggtgaaactagccgatcgtttgcacaatatgcgcacattaaaacatttacgtgaagataagcaacgacggattgcgcaagaaactttagaaatttatgcgcctttagcacatcgcttagggattagtcgaattaaatgggaattagaagatactgccttacgttatattaaccccaaccaatactatcgaattgttaatttgatgcaaagtaaacgtgatgaacgtgaagcttatgtggcagaagcagtcgaagatattcgtttagctacggaagatttagaaatttacgcagaaatatatggtcgaccaaaacatatttattcaatctatcgtaaaatgaaggaccaaaagaaacagtttaatgaaatctatgacttattagccattcgtgttattgtcgattccattaaagattgctatgccgtgttaggggcgattcatacacgttggacaccaatgccaggtcgctttaaagattatattgctatgccaaaagcgaatatgtatcaatctatccatacgacagttattgggccaaaagggaatccagtagaggtccaaattcggacccatgagatgcaccaaatcgccgaatttggggtggcggctcactgggcctataaagaaggcaaagcggaaaaaattgaaacagatgaactgacgaagcaagtcgattggttccatgaaattattgaattacaagatgaaagctatgatgcttctgaatttatgcaaggtgtgaaagaagacatttttagcgacaaagtctatgtctttacgccaagtggagatgtaaccgaactgccaaaaggctccggaccactagattttgcttacagtatccatactgaaattgggaataaaacaactggcgcgaaggtcaacggcaaaatggtacagttagattatgtcctaaaaaatggggatattattgaagtcctaacatcaccgaattctttcggacctagccgcgactggctgaaaatggttaaaacaagtaaagctaaaaataaaatcaaacgtttctttaaagaacaagaccgtgaagataatattattaaagggcatgatgctgtcattaaatacatgacagaaatcggctttacaccaaaagaatttttaacgaagaataaaatggcggaagtgctagataaattcaaatttcaaacggaagatgatttatttgcggcagtaggttatggcgaagtaagtgcgcaagtagtgtgcaatcgtttaacagaaaaagaacgccgcgaacaagagttggaacgccaacgtcaagaagcagaagagttgttaaatcagccagctaaaaaagaatcagaaaaaatgaaagttcgtcatgaaggtggcatcgtgattcaaggggtggacaacctattgattcgtttaagccgctgttgtaatccagtgcctggtgatgaaatcgttggttacattaccaaaggacgtggcgtttcaattcatcgtgcggactgtcctaacgtacaacatcgagaagaactagcacaacgtctaattgaagatgagtgcccagataccgagcacagtcgcaaagaatacgctgccgatttggagatttacggctatgatcgtagtggcttactgagtgatgttttacaagtcattagttcgatgacaaaaaatttagtcggcgttgaagctcgtccatccaaagataagatggcccagattcatgtcactgtgaaaattcaaaacctttctcatttaaaaaccatcgttgacaaaattaaaagtgtaccagatgtttatagtgttcgtcgaaccaatgggtaa

SEQ ID NO: 6780 - DNA, 1302 bp, Enterococcus faecalis
  CDS (1)...(1302)
atgagttatcaaaaaccaaaaggaacaaacgatattttgccaggaacttctgaaaaatggcaatttgtggaagaaacagctcgtttgatttttaaagattatcaataccaagaaatcagaaccccgatttttgaacattatgaagtaatatctcgcagtgttggcgatactacagatattgtttcaaaagaaatgtatgatttttatgataaaggagatcgtcacgtgacgctacgtcctgaggggacagcgccaattgttcgggccttcgttgaaaataaattatatggtccggaatatacgaaaccatataaaacctattacatggggccgatgttccgctatgaacgcccacaagctggtcgtttgcgtcaattccatcaaattggtgtggaagcatttggtagtgaaaacccagcattggatgttgaaatcatggctatggctttggacttcttcaaacaattaggcatccaacaaatcaaattagttattaattccttgggggataaagaaacacgtgctacgtaccgtcaagcattaatcgattatttagagccccatatggcagaattaagcgaggattcacaacgtcgcttacacgaaaatccattgcgggtgttagacagcaaagataaaaaagacaaggtgattgtcgcagaagcgccctccattttagattatttaaatgaaccatctaaagcacattttgaagcagtaactgatatgttagatttactagaaattccttatgaaattgatagtaatatggttcgcggcttggattattatacacacacaatttttgaaattatgagtgaagcgcctaaaatgggggcgcaatcaactatttgtgcaggaggccgatacaatggtttagttgaagaattaggcggcccagacacaccaggttttggttttggtatgggcattgagcgagtgttgttaacaatggaagctgaagaagttgtgattccagcgttatctgaattagacgcatatgtggttgggattggttcagaaaccaacatcacagctttgcaacttgttcaaagcattcgtaactttggtttctcagctgatcgtgattacatgaatcgcaaaccaaaagcgcaatttaaaacggccgataaattacaagcaaaattagttttaacaatcggtgaaaatgaattgaatgaaggcattgtcaacgtaaaatcaatggcaacacgcgaagaaaaagccttcccgttaagtgctatccatgattcatttgatgaagtgtatgacgaaatgatgacaaaaatgattgaagaataa

SEQ ID NO: 6781 - DNA, 1770 bp, Enterococcus faecalis
  CDS (1)...(1770)
atggcaaaacgcacaacctattgcggcaatgtatctgccgaatttattgaaaaagaagttgtattaaaaggatgggttcaaaaacgtcgtgacttaggaggggttatctttattgatttacgtgaccgtgaaggaatcgtccaagtggtctttaacccagaaaagtcaaaagaagcatgggaaattgctgataaatgtcgtagtgaatacgtcatcgaagttaaaggtcaagtcgtttatcgtgataaagaagcgattaatcccaaaatgaaaactggcgagtttgaagtgatggcgactgacattacgattttaaatactgcgaaaacaacgccatttaccattgaagatgacaataacgttaatgacgaattgcgcatgaaatatcgttatttagatttacgtcgtccatcaatgacaaacaacattaaattacgtcaccaagtaacgaaaacaatccgtcactatttagataatcatgactttttagacattgaaactccttatttaggcaaatcaacaccagaaggcgctcgcgattatttggttccttctcgtgtccatgccggtcatttttatgctttaccacaatcaccacaactctttaaacaattattaatgggggcaggcttcgatcgctattaccaaatcgttcgttgtttccgtgatgaagatttacgaggcgaccgtcagccagaatttacacaaatcgatatcgaaacgacctttttaacaccagaagaaattcaaacatatacagaaaatatgttggctgaagtgatgaaagagacaaaaggaattgagatttctgttccgtttccacgaatgagctatgacgaagcaatggcacgctatggtagcgataaacccgacactcgttttgctatggaattaattgatgtcgcagatgtagtgaaagacgtagacttcaaagttttccaagcagcgttggaaaatggcggacatgtgaaggctttgaatgcaaaaggcgccgcagataagtattctcgtaaagatatggataacttaggtaagtatgtgagtcaatttggtgcaaaaggcttagcttggttaaaagttgaagaagatggcttaaaaggaccaattgctaaattcttaacagaagttagtgatgaattaattgctgctaccaatgcagaagtcggtgatattttaatgtttggtgccgataaacctgaaatcgtagccgctgctttaggtgcggtacgtacacgtttaggtaaagaattaggtttaattgatgaatcgaaattcaatttcttatggattgtggattggccgttgtttgaatatgatgaagaagctggccgctatgtttctgctcatcatccatttacacaaccaaaagcagaggatgtggcccgcttagcaacagacccagcctctgtgtatgctgaagcttacgatgttgtcttaaacggctacgaattaggtggcggctcattacggatccatacacgagaattacaagaaaaaatgtttgaaacgttaggttttacaaaagaagaagcacaagaccaatttggtttcttgctagacgcattagattacggcttcccgccacatggagggattgctttagggctagaccgcttagcaatgctattggctggggaagaaaatattcgtgaagtgattgccttccctaaaaacgggaaagcaattgacccaatgaacaacgcaccaagtttagtttctccattacaattgtttgaattaaacattgatgtaacagccattgacgaataa

SEQ ID NO: 6782 - DNA, 612 bp, Enterococcus faecalis
  CDS (1)...(612)
atgtctcgttatactggaccatcatggaaagtatctcgtcgtctaggtatctctttatcaggtactggtaaagaactagctcgtcgcccttacaaaccaggacaacacggacctaacagccgtggtaaagtttctgaatacggaatgcaattaactgaaaaacaaaaattacgtcatatgtatggcatgaacgaacgtcaattccgtacgttgttcattaaagcaagcaaaatcaaagaaggtaaacacggtgttaacttcatggttttactagaacaacgcttagataacgttgtttaccgtttaggtcttgcaactactcgtcgtcaagcacgtcaattagttaaccatggtcacatcactgtagacggcaaacgtgttgatattccatcataccacgttgaagttggtcaagtgatcggtgttcgtgaaaaatctcaaaacatctcaacaattaaagaagcggttgaagcaactgttggacgtccagcattcgtaagctttgacactgaaaaattagaaggtagcttcactcgtttaccagaacgtgatgaactttacccagaaatcgacgaagcacttgtcgttgaatactacaaccaaaaactttaa

SEQ ID NO: 6783 - DNA, 750 bp, Enterococcus faecalis
  CDS (1)...(750)
gtgaatttattctcaaacagcttttcccgctacgctgttcgtgcaatgcttgcttgtctatttttaacgttgggaacagccgttgcttttgcaatcgcaattaaaggagaaggaatttctcatggtttagggaaaatgctttacgccttcatgttcagttggtcacttgtaatgattttatatatgaatgccgaacttggtacctcgaatatgttgtacatgactgttggggtctatcgtaaaaaagtcaacttttccttagctgcaaaaattttatttacctgtatcttattcaatttaattggtggcgtcttgtttggtttcttggtatcacttacggtgccgttccaagatttgccaaaagatagtttcttctttacatcgattgctggaaaattagaaaaaaccaccctacagattttagttgaagctatgttcgccaatattgtagttaatacagccgtattagtgagtatgcgaatgaaagatgacgccggcaaagtcgcggccattattttcattatctttatctttgcgttccttggttttgaacacgtgattgccaacttcccagccttcagtttagcttactttgcttcgaacggcgcaattgaagctttcacagctggtaatgttgttcataatctgttctgggcctttatcggtaactttatcggtggtggcttaattatgggtctcggctatgcctggttagataaagacaacaaaaacttaacgtattttgattaa

SEQ ID NO: 6784 - DNA, 306 bp, Enterococcus faecalis
  CDS (1)...(306)
gtgatcagacgaataatagagaaagaggtggaacaaatggcaatttcacaagaaagaaaaaacgaaatcattaaagaatacgcacgtcatgaaggagatactggttctccagaagtacaaattgctgtcttaactgaagacattaaccaattgaacgaacatgcgcgtacacacaaaaaagatcaccattcttaccgtggtttaatgaaaaaaatcggtcaccgtcgtaacttgttagcttacttacgtaaaactgacatccaacgttaccgcgaattgatccaacgtttaggattacgtcgttaa

SEQ ID NO: 6785 - DNA, 2115 bp, Enterococcus faecalis
  CDS (1)...(2115)
atgacagaaaaacaagtctttaaaacaacttggggcggccgcccactagaagtagaaatcggccaattagccaaacaagccaatggagctgtcttagtacgttacggcgatacggtcgttttaagtgctgctgttgcctctaaagaagcaaaagatgtagactttttcccattaactgtaaactatgaagaaaaaatgtatgcggtaggaaaaattcctggcggcttcattaaacgtgaaggtcgtccaagtgaacgtgcgacattaaccgctcgtttaatcgaccgtcctattcgtccaatgttctcagaaggcttccgtaacgaagttcaaattacgaacatcgttatgagtgtggagcaagactgtacaccagaaatggctgcaatgtttgggtcttccttagcgttagcaatttcagatattccgtttgatggaccaattgctggtgttgacgttggccgtattaatggcgaatatgttttaaatccaacggtagaacaagcggaacaaacagatattgaattaactgttgctggaacaaaagaagccatcaacatggttgaaagtggtgccaaagaagtatcagaagaagatatgttaggtgccttacttttcggttttgatgccattaaagaactagtggcgttccaagaagaaatcgttgccgctgtaggtaaaccaaaaatggacgtggacttattacaagtggacgctgatcttaaaaaagaaatttttgatgcgtactacaatacaatgaaaacagccgtaatgacggaagaaaaattagcacgtgaagttgaaattgacaaagtaaaagatacagtcaaagaagtttacgctgaaaaatttgcggaacacgaagaagaagcgcaattactaaaagaagtgaaacaaattgcggaagatcttgaaaaagatgtcgtacgtgagttaatcacgatcgataagattcgcccggatggccgtaaattagacgaaattcgtcatttatcatcagaagtaagtattttaccacgtgtgcatggttctggcttatttactcggggtcaaacacaagctttatccgtttgtacattagcgcctttaggggaacatcaaattatcgatgggttgggtgtccaagatagcaaacgtttcatccatcattataacttcccacaattctctgttggttcaacaggacgcgcgggctcaccaggtcgtcgtgaaatcggtcacggtgcgttaggtgaacgtgccttagcacaaattattccatcagaagaagacttcccttacacaatccgcttagtagcagaagtgttagaatcaaatggttcttcttcacaagcaagtatttgcgcgggaacattagcattaatggatgcgggtgtgccaattaaagcgccagttgcaggtattgcaatgggtcttgttagtgatggcgaaaactatacaatcttaacagatattcaaggtttagaagaccaccttggcgatatggactttaaagtagcgggaacgaaagacggaatcactgctttacaaatggacatcaaaatccaaggaattacagaacaaattttaacggaagcattagaccaagcgaagaaagcacggatggaaattctagaagaattaacaacaacgattgctgctcctcgtgaagaattaagtcaatatgcaccgaaaattgaaatgattcaaattaaaccagcgaaaattaaagatgtcattggtaaaggtggcgaaacaatcaacagcattattgatgaaaccggcgttaagattgatatcgatcaagacggtaacgtaagtattgcttcatcagatgctgaaatgattaaaaaagccatcaagattattgaagaattaaccaaagaagttgaagtcggtcaagtttacttagcaaaagttgtccgcattgaaaaatttggtgcgtttgttaacctaattaaaggcaaagatggcttgatccatatttctcaattagcaaacgaacgtgtgaacaacgttgaagatgtcgtgaaattaggcgacgaagtccttgtcaaagtaactgaaattgacaaacaaggccgtgtcaacgtgtcaagaaaagcattattaaacgaagaaaacaaagaaaaataa

SEQ ID NO: 6786 - DNA, 735 bp, Enterococcus faecalis
  CDS (1)...(735)
atgcgcccaaaagagaaaaaaagaggaaaaaattggttaatcaacagtttattagttttactatttatcattggcttggccttaatttttaacaatcagatacgcagttgggtggttcaacaaaatagccgctcgtacgccgttagcaagttgaaaccagccgatgtgaagaaaaatatggctcgtgaaacaacgtttgactttgattcagttgagtccttgagcacagaagcggtgatgaaagcccaatttgaaaacaaaaacttacctgtgattggtgccattgcgataccaagtgtcgaaattaatttgcccatttttaaaggattgtcaaatgtcgctttattaactggtgccgggaccatgaaagaagatcaagtcatggggaaaaacaattatgccttggctagtcatcgaacggaagatggcgtttccttattttcacctttagaaagaaccaaaaaagacgaactcatttatatcactgatttatctactgtttatacatacaaaataacttctgtagaaaaaatcgaaccaacccgtgttgagttaattgatgacgttcctggtcaaaatatgattaccttaattacctgtggcgatttacaagcaacgacgcgaattgctgttcaaggaacattagcagcaacgacgcctattaaagacgccaacgacgatatgttaaaggctttccaattggagcaaaaaaccttagccgattgggtggcttaa

SEQ ID NO: 6787 - DNA, 681 bp, Enterococcus faecalis
  CDS (1)...(681)
atgcacaaggggtcaatttttgataagataagacaggaaaacgacagaggaggaacagaaatgatttttgcatataacaaagaacacgttggcgatgtcttacttgtcatcgttgcggacgatcaaggtgcggaaaaccaagtaaaacgtgtcggcgatgtggcacgtgtaagtttagttgaggcgccagaaacagtggtagcttggaatattttcaatgcttcagcgcttctaggtgacattaatggcaccggccaagtgactttaacagacgaacaaatcgaaaaagtcaatacagcgattaaagatgcgggattttcagaaatccttgaaaaagacgacacccctaaaattgtggttggctttgtcaaatcatgtaaaaaacacccagattcagatcatttatctatcacacaaacagaagtagacaacggcgaaatcttacaaattgtttgtggcgcaccgaacatcaaagcaggacaaaaagtagttgtggccaaaccaggcgcaatgatgcctgatggtttaatgatttggccaggggttttacgtggggaagaaagttttggaatgatttgttcagcaaaagaattacgtttaccaaatgcacctgctaaaaaaggaatcttagaattgccttttgatgcagaagttggttctgcatttgcggtaggagaataa

SEQ ID NO: 6788 - DNA, 1068 bp, Enterococcus faecalis
  CDS (1)...(1068)
atgtgtacaggcatcaagattatttccaaaacaaatgatattttttatggacgtacgatggattttacgtttgactttttcggcaacgaagatccaattgcaccaaaaatccctactctaattgctcaatttccaaaaggtacagttctaaatagccaactaaatccttggacggcaaaatattcctttatgggactagcaatgtcaggcacagatcaaccagcgaacgatggtaaaaccgtcagccttgctatcacagatggtatcaatgaagccggcttatctggtgatattcaatatttaatggaatcttcaacagcacctgctgaaagtttagcagagcgtggtttaacacctcatattgcagaagaagttctcgcttatattttgagtaattttgaaagcgttgacgaagtaaaagtagcttttgaaaaaatcggcctgttagatcaaaaattccaacttgattcattgggggaagttcatttcaccttacactggaccattaatgataaaaataataatagtatcgttttgcaaccaacagataacggagcgttcgtcatttatgattcgattggcgtagtcacaaacagcccagaatacaattatcatttaaccaatgcacgaaactatatcggaatgcgcaactacgctattaaagaaccttacactttaaaatcaggcgcaacacttgacccaattgaaggtgggacttcttacggactattaggaatcccaggagacttcacttcgccgtcacgcttcattcgtgcgttatactattctgacaatctccaagaatttgatagctctgaagggattatgcaactctatcgcgccttccaaacagtgatgattcctcggggaattggccatttaggtcaaagtaattctctgtctgatttcacacattattggtcaggatatgatgtgactaatctaaccatgtatgtccaaccagaaagtactacctcatttacaaaatacactttggatccagctttaacagaagttactacttttgctgtttctaacgaactactactaacagatttaaatcaataa

SEQ ID NO: 6789 - DNA, 513 bp, Enterococcus faecalis
  CDS (1)...(513)
atgggagaaataaaacaattaacaatagaagatgcaccagcgttacaagaaatcagcattgaaacttatacagatactttcggaccatataataccccagaaaatatgcaagcctatttagtagaagcctacaatttagaaaaattacaaaaggaattggctaatccccactctgacttttattttatctttgtcgataatcaattagctggctacatgaaattaaatcgtgagacggcacaaacggaaccgatggggccagaaaagctcgaggttgagcgattgtatattttgcctgcgtttaaaggaaagaagctggggacacaattgttagaactggcggaagagaaagctcgtgaatttggtaaaaacgcactgtggctaggtgtctgggaacacaatgatgcggcgcgggcattttataaaacgattggctaccgctattacagtcaacattcattttttatgggagacgatgaacagacggattttattttgttaaaggaattatag

SEQ ID NO: 6790 - DNA, 387 bp, Enterococcus faecalis
  CDS (1)...(387)
atgaaaaagttagacttgtcaactgaagagatttctgccatttttagattcaaagaaaagatagttgacaaaaatacctcgtgtaggtatattttaaaccaatcactactcttaaggaggggcaaaatgactgaagaaaaaaagaaagtgctgaatcgtttacgccgcacagaaggtcaaattcgcgggattcaaaaaatgattgatgaagaaaaagaatgtatcgatgttatcactcagttgagtgcggtccgttctagtattgatcgcgtaatggggatgattgttgcggagaatttaaagcattgctttgaaaatcctgaaaaagatcctaaagaacaagaagagcgattagcacaagcgattaatatgattgtcaaaaagtaa

SEQ ID NO: 6791 - DNA, 1446 bp, Enterococcus faecalis
  CDS (1)...(1446)
atgggtagatatgaaggaggaaacaaggaaatgaagaaaagagctttgctaggggttaccttattaacattcacaacattagcgggttgtacaaatttatctgaacagaaaagcggcgaaaaacaaacagaggttgctgaagcgaaggcaactgaatctgaaaaagcatcagtaaaaaatgttatttttatgattggagatggcatggggaatccgtatacaacgggctatcgctatttcaaagccaatcactcagacaagcgtgttccccaaacagcttttgatacctatttggtcggacagcaagccacttatccagaagatgaagaagagaatgtcaccgattcagcttccgcagcgacagcgatggctgccggagtgaaaacctataataatgctattgcactcgataatgacaagtccaaaacagaaacagtgctcgaacgtgcgaaaaaagtggggaaatcaacgggtcttgtagcaacatctgaaataacacatgcaacccctgctgcatatggcgcacataatgtttcacgcaaaaatatggcagaaatcgccgatgactattttgatgatcaaatcgacggacaacacaaagtcgatgtgttacttggcggcggctccgaattatttgcccgaaaagatcgtgatttagtcaaagaattttcccaagcgggttatggtcatgtcacagacaaaaagtcgttaaatgagaaccaagacgacaaaattttaggcttgtttgcaccaggcgggctacctaaaatgattgaccgaacggaagaagtcccttcattagctgatatgacagaagcggctcttcaacggttagataaaaatgaaaaaggtttctttttaatggttgaaggtagtcaaattgattgggccgggcatagcaatgatattgttggcgcgatgagcgaaatgcaagacttcgaagcggcgtttgaaaaggccatcgattttgccaaaaaagatggtgaaacattggtggttacaactgcagatcattcaacagggggcttgtctttaggcaaaggagatcaatacaactggttgacggagcctttacatgcggcaaaacgcacgcctgatttcatggcagaagaaattattaaaaatggtaatgtggaaaaaacagtgactgagtatattgattttcaattaagtgaggctgaattgaaagcagtgaaaacagcgtcggagtcaaaagatgttgaaaaaatcgctcaggcattaagaaagatttttgatgaacgttcgaatactggttggactactggcggacacacaggagaagatgtaaatgtctatgcttatggcccacaagcagaagctttttcaggacaaattgataatacagaccaagcgaagattatttttggcttagtagatggcaccgggcaaaaagctgagattaaagataaaggtattggcaaataa

SEQ ID NO: 6792 - DNA, 2010 bp, Enterococcus faecalis
  CDS (1)...(2010)
gtgaattataaaataagttatctccttgacgagtatgcagggcaaaaaattgcgctctctttggctcaacaaataaccgatctttcgcaacgagaattagtgacgcaactttcgacaataggcggagtagttcaacagaataccgtcagcattccaaacctttccgcaaatgaatggggaaaacaactttttcaacaacgtcaagtgatctatagcgaaacagaaagacaagcacttatttttttgctcacttattcagaaatcgaagaactatcggtgtatcattatcaaaattttttagacgtttcgaaaggcactattttagcggacatcaaaaaagtacgacaccaactagcaactgaaaacattgctttatcctacgaacgaaaacgagggttttacctagaaggagatgaatttcggattcgtcgtttcgggaaaaattggcttgcccgcctcttacaacaaaagtcgggcacctttgctttattttgctggctcagtcagcatcaaatgagccaatacgcaaaaatgcgtgacggcattcaattagccgtccaggaagcacagcttcaactggtacccagcagattagatgaaattagttactttcttgctttttctcaaaaaagattaggcaaatataaaacagtcgtctggcctgagaaccagttaattcagtccttacgcgcttatcccgtcagtcgtcgtattttaagtgatttagttgggccagtggcgaatgtagaaactgagagtctttttttcacgatttgtttaatgacagccttgcaaggagaattgcgagatacgaagttagagtttttattagatatttctggtgaaattattcggaaaatggaattattggccgtcgttcaatttgagcagcctcgtgaattgctcatgaatgtgtattatcatctggttcctgcctattttcggattaactatggcttttacttgccgaatgttttaatcaaggatattcgacaatcgtatcggtcgctttatcatctttgtgaacaagcgttagatcctttagaaaaattaacgaaacggtcaatcccgtcagaggaaatcggtttttttaccatattatttggtggagaaattttcggccaaaaaaatgagcagcggcaagaaaagctaaaagcgctaattgtttgtcccagtggtatcagttcttcgttgattttgcaatcggaattgcgtcggctatttccaatgattgaatttaaagaaacgaatgcggtgagggaaatagagaatgtatctgaaaaaagctatgacatcattttctcaacggtccctattgaaacagccaaaaaggtttattttaccaagcccattatgagctctttggagaaaaatcaattgatgcaccaagttcaatcagattggctattgccaggtatttccatgccagatgttaaagatattttagatgcgttaaaaccttacatttccttaaaaaaaggagtcacagaagcgcagttatatcgtgtcttgcatcgtaaaatgaacaaaattttagaaaaagaggaggatctgcgtccaatgttatcggaattattaacaacagaaacagtccaagtcctgcctgaagttgcagactggcgagcgggaattacagaagctgccaagccgttattaaaaaatggcagtattacggaaaagtacattgatgcaatgattcaaaaagtcgaatcgtttgggccatttatccatatctgtccagacgtagcattgcctcatgcgcgaccagaagatggcgttaatcagttaggcatgtcattactaaaaatccaaaaaagtgtcgatttattagaagatcctaagcatgaaattcacctttttatttgtttagctgcttcagataacgaaacacatttacgggccttatctagtctgacaaaaattctatcaaaaaaagaatcattacatcgcttagtggcggctgaaaccgtcccagaaatactatcaattatccaagaaggagagaaataa

SEQ ID NO: 6793 - DNA, 1368 bp, Enterococcus faecalis
  CDS (1)...(1368)
atggaaactttattgaatttatttgtttcaattgttagccagccagcgattctggtttcattaattgctttgttgggattagttttacagaaaaagaaattttctgatgttgttcaaggaacgttgaaaacattcgtcggctttttagttttaattggtggcgcagggctattagcgaactcgttaacgccctttgcggagatgttccaaaccgcgttaaatacacaaggcgtggtgcctagtaatgaagcagttgtagcgattgccttgcaacaatatgggacaccaactgctctgattatgttggtgggcatggttgttaatattctgttggcgcgttttacacgttttaaatatatctttttgacaggtcaagcgatgatgtacgtttcgtgtttgacagccgttattttagtgggggccggttttagcgttagtttgccaatgattcttttaggtggtttatttgaaggaactttattaacagtgacacctgctctttgtcagccctttatgaaacaaattactggaaatgataaagtagcaatggggcatacagggaatattggttatgcggcaagtggctttattggaaaagtctttgggaataaagaaaagtcaacggaagatattaaaattcctaaaagttttggttttttaagagactcaaccatctcaattatgattttgatgtcgattgtctatgtgattttggctttgctggctgggacaggctatgtcgagcatgagttaagcaatggcgaaaatgcgatcatcttttcattaattcaagcaggaacctttacggctggtttcgtagtggttttacagggtgtgcggatggttttaggagaaattgtgccagctttccaaggaattgctaaaaaattagtgcctaattctaaaccagcacttgatgttcccattatctttccttatgcgccaaatgctgtcttgattgggttctttgtgagctttattgtgggaactatttcaatgttagcgatggttggtctgaataccaccgtgattataccaggcgttgtcgggcactttttctgtggtgccgcggcaggcgtttttggaaattccacagggggacgtcggggagcgattttaggggctgcgtttaatggcttattaattagttggttaccgttattcattttaccagtcttgggtgatctacagttagcatcctcaacgtttgcggatacggattatttaatcccaggcctatttttaggcaaattaggtgaggcaggtccgagtcttttagtaggaggaatcattgcttttgtagtggttgttcttttggctagcgctgttttgactatgcgggagaaaaaagtcgccgaagaaaactaa

SEQ ID NO: 6794 - DNA, 1557 bp, Enterococcus faecalis
  CDS (1)...(1557)
atggttttaaatattctcctcgctatcgtcggtttgattgtcggtcttggtttaggatttgttattgcaaagtcacgtcatgataaagcaataaatggtgcaaaaatttcagcgtcgagtattctcgagaacgctcggaaagaatcagaaacactgaaaaaagaagcattgctagaagctaaggaagagaaccagaagtatcgttcagaaattgaaagtgagttgaaagaaagcagattagaacttaaatctcaagaaaatcgtttaattcaacgggaacaaacgttggatcgtaaagatgactctcttgaaaaacgtgaaggctcactggaagaaaaagaagagaaacttggtgctagacagcaattaattgatgagcgagaaaaagaagtagaaaacttaattaatcagcaacatcaagaattagaacgaattgcttccctttcaaaagaagaagcaaaatcgattattatgaagtcaacagaagaagagttgaatcatgaactaaccttgatggtcaaggagtcagaacaacgtgccaaagaagaatctgatcgcaaagcgaagaacttgctttccctagcaattcaacgttgcgccgccgattctgtttctgaaacaactgtttccgtggtcactttaccaaatgatgagatgaaaggtcgcattattggtcgtgaaggacgtaatattcgtacattggaaacattaacagggattgacttaatcattgatgatacgccagaagcggttgtgttatccggatttgatccaatcagacgagaaatcgctcgaatgaccttggaaaaattaatccaagatggtcggattcatcccgctcgtatcgaagaaatggtagaaaaatcacgtaaagaaatggatgaacggattcgtgaatacggagaacaagcagcctttgaagtaggtgctcatacgttacatcctgatttaattaaaattttaggccgtttacgtttcagaacaagttatggtcaaaatgtcttgaaccactcaatcgaagtagcaaaactggctggcgttttagccgccgaattaggcgaagatgttcaattagccaaacgtgcaggtttactacatgatattgggaaagcattggatcatgaaattgaaggttctcacgttgagattggcgcagaattagctgcgaaatataaagaaaattcagtagttattaatgccattgcctcgcatcatggtgatgtggaagcaacctcagttatttctgttttagtggcagccgcagatgcgttatctgcagcccgtccaggtgcacgtagtgaatcgttagaaaactacattcgccgcttagaaaacttagaaaatatttctaatagttttgaaggcgttgattcaagttttgctgttcaagcaggacgtgaagttcgtgtcatggtgaaaccagaagaaatttctgatttagaatctgttcgtttagttcgagacattcggaagaaaattgaagatgacttggattatccaggacatatcaaagtaacggttatccgtgaaacacgtgccgtagactatgcgaaataa

SEQ ID NO: 6795 - DNA, 918 bp, Enterococcus faecalis
  CDS (1)...(918)
atgaaaatgaacgcggttacaattatcggaagtatcaatttagacacaacattaagagtcaaagaaatgccaaaaccaggcgaaacaattcacgccattgaacattttacagcgggtggtggtaaaggagcaaaccaagcagtcgcagcgaaacgttcaggcgcagaaacatattttattggtgctgtgggaaatgatggcgctggagctatgatgactgatttaatgagtcaagatgaaattaatttaactggggtcaccactttagagaaaacagctactggccaagcctttattatggtagataacgctggtgaaaatagcattatgatttacgcgggagccaataacgcctttacgccaaaacaagtacaggaacatcaagaaattattgaaaaaagtgattttgtgattgcccaatttgaaagtgcgattgatagtacgattgcagcgtttaaaattgctaaaaaagcaggcgtcaaaacgattttaaatcccgcacctgcgttagaacaagttcctgaagaattactaaacgtgacagatatgattgtaccaaatgaaacagaaaccgaaattttaacaggcattaaaatcacagatgaagcgagtatgcgtaaagccgcagaagcacttcatcaattagggattgaagcagtaattattacagtaggtagtaaaggagccttttatgacgtcaatggacgaagtggtattgtgcctgcttttaaagtgaaagcggttgatacaacggctgctggcgatacttttattggcgcattaagtagtatattagaaaaagattttagcaatttggaagaagctattcgttatggaaacaaggcgtcctcgttgactgttcaacgttttggagcccaaccttcgattccttatcaacacgaattggtagacaaataa

SEQ ID NO: 6796 - DNA, 702 bp, Enterococcus faecalis
  CDS (1)...(702)
gtgaccattgccaatggtgaaaatgcggcatctggtcggggaattactggcaagatttataagaaatttttgcaagatggtgtcgatgttgttacgatgggtaaccatacgtgggacaacaaggatatctttgaattcattgatgatgcgaagaaaatggttcgtccagcgaactttccagaagatgtgcctggtcaaggaatggtttttgtgaaagtcaatcaattggaactagcggtgattaatttacaggcccgcacatttatggtgccattggaagatcctttcaagaaagccgccgagttagtagctatcgctcgcaaacggacaccgctcatttttgtggattttcatggcgaaacgacgagtgaaaaacaagccatgagctggtttttagatggccaagtttcagccgttgttggaacacatacgcatgttcaaacaaatgatgctcggattttaccgaaagggacagccttcttaagtgatgtcggtatgaccggtccttatgatgggattctaggaatgaagcgtgaaccgattattgagaagtttatgacagcattgccgaagcgctttgaggtagtcgaaacagggcggacaattttatctgcctgtattttagagattgatgaccaaacgggccaagcgaagatgattgagccgattcagattagtgaagatcgcccgtttcaagaataa

SEQ ID NO: 6797 - DNA, 2577 bp, Enterococcus faecalis
  CDS (1)...(2577)
atgccacaaaagacaaaaaatacacccatgatggaacaatatttatccattaaggcccaatacaaggatgcgtttttattttatcgcttaggtgatttttatgaattattttatgaagatgctatcaatgcagcgcaaatcttagaattgacgttaaccagtcgtaaccgcaatgcggatgatccgattcctatgtgtggcgttccttatcatgccgcgcaaggctacattgatacgttgattgagcaaggctataaagtagcgatttgtgagcaagtggaagatccaaagactaccaagggcatggtcaaacgagaagtggtccagttggtaacgccaggaacggtgatgaatagtaaaggcttggaagccaaagacaataattacttaaccgctgtgctaacagatggtaatcagttcggttttgcctatgtagatttgagtacaggcgaattaaaaacagcagtcttggctgatgaagagggcgttttaaacgaagcttctgcgttgcaaacaaaagaaatggtcctaggttcagggattcctgaatcgttaaaagagaacttaagtttacgtttaaacatcatcttttcgacacaagaaacggtggaagaaaatgccgagtttagttttttaaccaatgaactgattaatccattagaaattgaaattacaggcaagttattatcttatttatccgttacccaaaagcggagcttgtcccatattcagaaagctgtggaatatcagccagatcatttcttgaaaatggatcattattctaaattcaatttagaattgagtcagtcgattcgaacaggacagaaaaaagggactcttttgtggctattagatgaaacgaaaacagctatgggcggccgtttgttgaaacaatggttggatcgtccactgattcaggaacgtcaaattaagacgcgtcaagaaatggtgcaatccttattaaattcctattttgaacgcttggatttgcaagcagcattgacgaacgtgtatgatttagagcggttagcaggacgcgtggcattcggcagtgtgaatgggcgtgatttaattcaattacggacctctttagaacaagtaccaacgattcgacagttaattgtcgggatcaatcaaggggaatgggatgatttgttagtcgacttaaaccccgttgaagatttagtggaattgattgcgacggcgattaatgaagaagcccctttacaaattactgaaggaaacgttattaaggacggctataacgaccaattagatgaataccgtgatgccatgcgcaatggtaagcaatggttagcggagttagaagcgaaagaacgccaagaaacagggattaaaaacttgaagattggttacaatcgggtctttggttatttcattgaaatcactaagtcaaatttagcgaatttagaagaaggaaaatacgagcgtaagcaaacattagccaatgcggagcgctttattacgccagagctaaaagaattagaacgtttaatcttagaagccgaagaaaaatcagttgaactagaatatcaattgttcttggccgtgagagaacaagtgaaaacgaacattgatcggttgcaaacactggctaaaaccattagtgcggttgatgttttacaatcttttgcaacaattagtgaacggtatcaatacgttcgaccaacgttaagaagtaacacgaaaaatttggcgattgtcgaaggacgacacccagtcgtggaaaaagttttagggcatcaagaatacattccaaacagtatccgcatgaacccagaaacagatattctcttgattactggaccaaacatgtcagggaaaagtacctacatgcgtcaattggctttgacggtggtcatggcgcaaattggctgttttgtaccagcggaaagtgctgaaatgccaattttcgatcaaatttttacacggattggagcctctgatgatctaattgcagggcaaagtacctttatggtagaaatgatggaagccaaccaagcactgcggcatgccacgcctaacagcctaattttatttgatgaattaggacgcggcacggcaacctatgatggaatggcgctagcgcaagccatcattgaatatatccatcgtgaagtacaagccaaaacgctattctctacacattatcatgaactaactgttctagatgaaaccttaaaaggcttgaagaatattcacgtgggcgctgtcgaaaaagatggcgaagtggtctttcttcataaaatgatggaaggacctgctgataagagctatgggatacatgttgctaaaatcgctggtttaccaagcccgcttttagaacgagcagccaccattttatccgctttagaagcggaagaaacaacgattccaagttcagttcatcatgaagaagtttcagaagtccatgaagaaaccgagcaactttcattatttaaagaagtttcaacagaagaattaagtgtcattgacacattgaagaaaatgaatctattagaaatgacaccactagatgcgttaaacatgcttcatcaattgcaaaaacgtatctaa

SEQ ID NO: 6798 - DNA, 2133 bp, Enterococcus faecalis
  CDS (1)...(2133)
atggggaaaattcaagaactatccgaacaactagccaaccagattgctgctggtgaagttgttgaacgtcccgcttctgtcgtcaaagaattggtggaaaatgcactggatgcaggaagcacccaaattgatatttttattgaagaagctggcttgaaaaccattcaaattattgataatggtgaaggaattgccaaagaagatgtactgaatgccttcaaacgccatgccacaagcaaaattcatacaagagatgatttgttccgaattcgcagcttggggttccgaggcgaagccttaccaagtattgcctcagtttctgaaatgattgtcgaaactgccacagctgaggaagaagaaggcagctatgtgattctaaaagggggcaaggtcgaagaaaaccgaccagcagccctccgtaaaggcacaaaaatgaccgtttctaatttattttataatacgcctgctcgtttgaaatacgtcaaaacgatccaaacggaattggccaatatcggtgacattgtcaatcgtctggcgttaagccaccctaaagtcgcttttcgcttagttcatgacggccacaaaatgatgagtacaacaggcaatggtgatttaaaacaaacgattgccgggatttatggcattagtaccgcaaagaaaatgttgaaaattgaaggaaaagaccttgattttactttgacagggtatgtttcattgccagaagtcacacgggccagccgcaactatttatcaacgattatcaatggtcgttatattaaaaatttcgcgttaaataaagcaattgtagccggctatggttcgaaactaatggtggggcgttttccaattgctgtgttagaaattgaaatggatccgctgttagtcgatgtcaatgtccatcctactaagcaagaagttcgtttaagtaaagaaaaagatttaatggcattaattgaacaggcgattcaagaagtgttgagccaagaacagttgattcccaatgcggcagacaatttgcgttttaaaaagaaactaccgccagaacctaaagccgaacaaatggaaattcctctatcgactgaacaacctgcggtaaaacaacgaccgggcagcttaagctataatcccgcaacaggccgcttctatgcggaacatgcgacagacgaaacaccagcctcaagcgcccctgaagctgtcaaccagacagaaagagcagtggacccaatggacgacccatttgcgccgccagtgccagaatcaacgagtgtagcggaagaaacatcagcttacgaaacctcttcggcagctgttgattccgaaaatcattgggaaacagctagtaatgagcaacaggtaatagccgaagaaacgaaaataactgaagtgcctgattcagaaccttctctgcgttcatcagaggctgctgacgaggttttccaagaagaaatgaaacttcacccagaattcgatgccaatagcgctacgagtcaaagagaactgaaacaagccctgaacaagttggaagaagaacgaccgacagaacgttttcctgagctagaatacttcggtcaaatgcacggaacttatttattcgcacaaagcaaagatggcctgtttattatcgaccaacacgctgcccaagaacgaattaaatacgagtacttccgtgaaaaaattggcgaagtcagtgatgatttacaagaactattggtaccaatcgttattgattatccaaatagcgatgccttgaaaattaaagagcagaaagaaacccttgcggaagtcggcatccatttggaagactttggacaaaatagtttcattgtgcgggcgcacccaacttggtatcctgcaggcgaagaggaaagcattgttcgcgagatgattgacatgttgctaacaactggctcggtcagcgtgaaaaaattccgtgaagcaactgccattatgatgagctgtaagcgatccatcaaagccaatcattacctcaatgagcaacaagcacgcgtgctattaaaagatttagccttgtgcgaaaatccgtttaattgtccgcatggacgtccggtgctgattcattttacgaattcagatatggaacgaatgtttaaacgcattcaagacccccattaa

SEQ ID NO: 6799 - DNA, 984 bp, Enterococcus faecalis
  CDS (1)...(984)
gtggaggttctaatgtcgaaacattattttgatccaagattgaaaatcttttctttgaactctaatcgtcccttagcagaaaaaattgcggatgctgtgggtgtggagctaggaaagtgctctgtaacacaatttagtgatggcgaaattcaagtgaatattgaagaaagtattcgtggtgcacatgtttacgtcattcaatcaacaagtagccctgttaacgataacttaatggaactattaatcatgattgatgcgttaaaacgtgcgagtgctaaaacaattaacgtggttatgccttattatgggtatgcacgtcaagaccgtaaagcacgtgcccgggaaccaatcactgctaaacttgttgcaaacatgattgaaaaagctggtgcaacaagaatgttgacattggacttacatgcggtccaaattcaaggattctttgatattccagtggatcatttgatgggtgcaccattaattgccgattacttcatcgaacacggcattcaaggcgatgacgtcgttgttgtttcccctgaccatggtggtgtaacgcgtgcacgtaaattggcagaattcttaaaagcaccaattgcgatcattgacaaacgtcgtccaaaagcgaacgtagcagaagtaatgaatatcattggtcatgtggaaggcaaaacatgtgtcttaattgatgacatgattgacacagcggggacaatttctcttgctgcaaacgcattgaaagaagccggagcaaaagacgtttacgcttcttgtacacatcccgttttatcaggaccagccttacaacgtattgaagattcagcaattgaacgcttagttgtaacagactctatttacctatctgatgatcgtaaaattgctaaaattgacgaagtcagcgttggtgaattaatcggagatgcgattaaacgtatccacgaaaacaaaccagttagtccgttatttgaaacaaaaaataaataa

SEQ ID NO: 6800 - DNA, 2745 bp, Enterococcus faecalis
  CDS (1)...(2745)
atgtctatacaagttcacaaggaggcgccaaacatgactattttagaattaacattcgcaacgaaccaactaacgacgactttttttaaccataaattggaaccgcttcaccaaaaaacgttcccttttgaagctttgactatcgaagaaacggttcctgaactgtgccaattgattgtggcagaggctgcgccgattctgggggggattgtggctgatttcccagaggacttcttttcgccagaggaaacgttggcgctggttccgcaagcggtgattcaagcattcgcggaacagttaaacacgccacttttaacggcagccgaacaagtggcggcaccgaacctgctggcagcatttgaagaaaaacggcagtatttggcttggcatttggactattatggctacgtgcctgggaaaaatgaatatgcggtggagtccctattaactgtcggcaatggctttttaggcttgcgcggcacgacacctgagatgacgatttctgatgatcattatccagcgacctacattgcggggctttataatacagcggcttcggaagttgcgggtcaagtagtggaaaatgaagatttcgtcaatgctcctgacaaccaacacatcgctttaaaaattggcgatgccactgactggttaacgatttccccagacacgctacaacaattacaccgtcaattgaacttgaaaacgggattgtttgtcgcagaaatgattttgaaagatgcggacaatcagcaaattaaattaacgacgaaaaaaatcgccaatatggcacagccgaatgactatcatctgcaatatacgtttgagccgttaaacttttcggccccgattactttgaaaaccgtcacggatggcagtgtctacaactataacgtggcgcggtatcgcaacttaacagccaaacattttcaggtgacagcattaagcgcgcaggaaaacaaaaccgtgattgaggtttgtaccaatcaatccaacttgagcgtccgagaaacggccttgataactggtgatttttttgaaaaagaagcgattacgattcaagaagaagcggaaaaaatcgcccaagtggtgaccgtgatggcgcaccaaggaacacgctatacgctagaaaaacaagtctttgtgcaagccagccacgccgaacaaagttggcaggtaccgtttacgccgaaggactcttttgcggccgccgctcaggaaagcgcccgcgcttggcaaaccctttggcaacaagccaacattaccgtgacaggcgatttgatgtctcaaaaacttttacggattcacagttatcacttgctggcttcggcttcgccttttagtaaccaagcgcaagcattggacgtctcgattaccgcccgaggcttgcacggtgaagcgtatcgtggacatattttctgggatgaaatttttattttacctttttatattcaacattatcctgacacagcgaaacaattgttgctgtatcgctaccatcgattagagaaggcgaaggaaaatgcggcggccagccagtatcgtggcgcaatgtatccgtggcaatcaggtcgtgatgggcgtgaaaccacgcaaaaacttcacttaaatccgttgaatggacattggggcgaggatcatagtattctgcaacggcatgtgtccttggcgattgcttacaatgcttggttgtattggcatagtacacaggatcatgaatttatgaaacaatatggcggcgaaatgttgttagaaatcgctcaattttggaacagcgctgcgacgttagatgacgcaacaggacggttctttattgataaagtgatgggacctgatgagtttcacgagggctatccagaccaagcggaaagcggcttgaaaaacaacgcctatacgaatttgatggtggtttggctattcgaagaattaaccaacattttggcacttttctctgaggaagaacaggcacaactttttgccaaaacgcagacctcttcggctgatctagcccgcatgcagcaaattcaaaattcactggaaattgaagttaattctgacggcattattgcgcaatatgaagggtatttcggcttaaaagagattgactgggcggcgatgaaagagaaatacggcaatatttaccgcatggatcgaattttaaaagccgaaggagaatctcccgatgattacaaagtggcgaaacaagccgacacgttaatgttgttctacaacttagacaaaactcgggtggatcaaattttagaagatttagggtatcaattgcctgcggattatttggaaaaaaatcttttgtattatctaaaacggacgtctcatggttcgactttgtcacgaattgttcatgcccaattggcagaaatggcgcaattccatgagctatcttggcaactttatcaagaagcgttgtattccgattatcgtgacattcaaggtggcacgaccgctgaagggattcatacaggggtcatggctgcgacgatccacgttactttagcgacgtatgcaggcgttgacacgcgccagaacgagttatcaatttgtccaaacttacctgaacattggcaagcgctggcgttccagtttattcatcaaggcgtgacgtatcaattttcattaacacaaaccagtgtcacgattacagcagataaagacacacaattattggttcagggcgcgttgattccgttaaccgccgaacgaccaaaagaagtacattatcaataa

SEQ ID NO: 6801 - DNA, 1305 bp, Enterococcus faecalis
  CDS (1)...(1305)
atgattaaaaaagactatgcacaaattaaagaaacattgtatacagaaacactggcgaatgggttaaaggtttacctattaccgaaaaatgatttccaaaaaacgtatggcttgtttacgaccgattatggttccattgacaacacgttcgtgccaattggtcaagaggaaatgattgaagtacctgacggaatcgcccactttttagaacataaaatgtttgaaaaagaagatggcgatgtcttccaaaaatttgggcaacaaggggcttcagcgaatgcctttaccagttttacgaagacgagttatttgttttcaacgacggatcaagtgacacaaaatctagaaacgttgcttgattttgtgcaatcgccgtatttcacgaaggaaacggtcgaaaaagaaaaaggcatcattggacaagaaattcaaatgtatttagatgatcctaactggtgcttgttctttgggattttaggcaacctttatccgaaacatccattgcatattgatattgccggtacagtggcaagtattgcggagattaccgcagaggatttgtatacatgttacaatacgttttatcatccaagtaatatgaccttattcgtggtagggaaaatggaccctgaagcgttaatggccttcattcgtgaaaatcaagcggcgaaagagtttcctgccgcccaacctattcgtcggcatttccctgaagaaacagctgctgacattgtcaaagagagcgccattgaaatggcagtcacacgggcaaaagtgcttgttggcttgaaaggcttagatgaagtgccaacaacgggtcgtgacttaatgaaatatcaagtcaccgtgaacttgttgttacaattattgtttggtaatacctctcaaaactatttggctctttatgatgaaggcttgttagatgatagttttagttatgactttaatttagatcgcagtttccattttgcggatattggcggcgatagtgagcaaccagaagtcttagcagaacgaattgaagctattttattatctgccacaacaagtccagaattaacggaagaaaatttgtccttattgaagaaaaaaatgattggtaaatatttccaatccttaaactctttagagtatatcgccaaccaattttcacaatcattgtttggggaaaccacgctgtttgataagattgaagtcattgaaagcattcaattagccgacgtccgccaagtagcagagaccttgattcgtgaagaaggattgagccgtttctacatgtatcctaaaggagaaaccgagcaataa

SEQ ID NO: 6802 - DNA, 579 bp, Enterococcus faecalis
  CDS (1)...(579)
gtgaatttaccaaataaattaacagttttaagaatatttatgattccgatttttattattattgtgtcggtgccgatggactggggaacgattagttttggcgacacaacgttagccgttacccaattagtgggcgcgattatttttgcagttgctagttttacagactggttggatggcaaaattgcccgtgcacaaggcttggtgacgaacttcggaaaatttgcggacccattagcggacaaaatgctagtgatgaccgcctttatcgtcttagttggtcaaggcaaagtacctgcttggattgtagcaattattgtttgtcgtgaattggcagtaactggtttacggttgttattagtcgaacatggcgaagtaatggcagcagcttggccaggaaaagtaaaaacagctacccaaatggttgcaattattttactattcattaacaacattccattttcagcactccacctaccactagatcaaatcatgctatatgcctgcttgattttcaccatttactctggtgttgattattttgctaagaataaagatgtttttaaaggttcgatgtaa

SEQ ID NO: 6803 - DNA, 1002 bp, Enterococcus faecalis
  CDS (1)...(1002)
atgttaaaaaaacaaaaaattgccatagtgaattccagtagttttggtcaaatttttcctgaacacttgacgcgcttagaaaaaataggcaccgtaaagcattttacagtcgacagtgaaattggtggcaaagagttagcggaacgtttacaaggatatacgattattattgctagcgtgacgccatttttcaccaaagaattttttgaacataaagatgaattgttgctgatttctcgccatggcattgggtataacaacatcgatttagacgctgcaaaacagcatgacacaattgtttccatcatcccagctttagtagaacgagatgccgtggcggaaaacaatgtcacaaatttactagctgttttacggcaaaccgtggctgcagatgccagcgttaaagcagatcaatgggaaaaacgagcgaattttgtcggtcggacattatttaacaaaactgtgggtgtcattggtgttgggaacacaggaagttgtgtcgtggagacgttacgaaacggatttcgctgtgacgtgttagcgtatgatccctataaatccgctacttatctgcaaagttatggagccaaaaaagtagacttagatacgttgctagcttcagctgacatcatttgtttatgtgccaatttaactgaagaaagttatcacatgattggctcggcggaaattgccaagatgaaagacggcgtctatctttccaatagcgcacgaggcgccttgattgatgaagaagccatgattgccggtttacaatcgggcaaaattgctgggcttgggacagatgttttagaagaggaaccaggtcggaaaaatcatccttatcttgcgtttgaaaatgtagtaatgacgccgcacacctccgcttataccatggaatgcctgcaagcgatgggagaaaaatgcgtgcaagatgtggaagacgtggtgcaaggtattttacctcaacgggcagtgcaagaagtcagtcgttatgttagttaa

SEQ ID NO: 6804 - DNA, 2157 bp, Enterococcus faecalis
  CDS (1)...(2157)
atgatagaaatcggcaagaagctgaatggtcgatatcacattattggcagcatcggaagcggcggcatggccaacgtctatttagcacacgatttaattttagaccgagacgttgcagtaaaagtcttgcgctttgacttccaaaacgatcaagccgccatccgacgttttcagcgtgaagcactagccgcaactgagctggttcacccgaatatcgtcagtgtgtacgatgtaggcgaagaagatggactacaatatttagtcatggaatatgtgaaaggaatggacttaaaacgttacatccaaacgcatttcccaattccttattccacagttgtggatattacgcaacaaattttatctgctgtcgcaatggcacatgaacatagaattattcaccgggatttaaaaccgcaaaacattctgattgacgaacacggcacagtcaaaattactgactttgggattgcgattgccttgtcagaaacgtcaattacgcaaacgaacacaatgttaggttcggtgcattacttatcgccagaacaagcgcgcggaagcatggcgaccaaccaatcagatatttacgctgtgggaattattctctatgaaatgctaacagggaatgtaccttttgatggtgaatcagccgtaacgattgccttaaaacattttcaagaagaaattccctctgtcaaaatgtttgatccaggaattcctcaatcattggaaaatgtggttcgtcacgcaaccgcaaaagacccaagcgatcgctacaaaacagcgaatgagatggcagaagacttatacacgtccttgtcagccagtcgtttaaacgaacctgcgtgggaaccaacggctttattaggagaaacgaaagtattaactccgattcccgaagacatcgctgaaccggaagagacaacgcctgtcgaagtcccagaagatatcgcagatgacattttagctgaacaaccaccgaagaaaaaccgtaaaaaattgtggattggcttagcaattgcggcattaattgctttagcaataggtggcttagcctttgcaatgtcgggtggtaaagacgttgaagttcctgatgttacaaatgaaacgaaagcggccgcttcacaagcgctacaaagtgctgggctgaaagtcgatagtgaaaccaaaaaaattcccgacgataagattgaagaaggcaaggtggtcaaaacagaccccgaagcaaaatcatctgtgaaaaaagaccgatctgttactttgtacatcagctctggaacagaaaaaattgagatggccgattatacaaacgaatcgtatgaatctgctgtcgaagccttgaaaaaactagggttttcagaagaccaaattacaacgaaaaaagaatacagtgattctgtgtctacagataacattattaaacaaaaaccagctgcaggtaaaaaagttgatccgaaaaaagacaaagtcactttaacggtcagtgaaggaccagaagcggttactttgcctagttacgccggttattcttacacaaatgcagtaaatgcactggcacagttaggcatttctgaatctcaaattacgcgtgtcgaccaagcaagcgatacggtagaaccaggtttagtcattacgcaagaccccgcaccaggtggcaccgtgacacctaaaaatggccaagtgacgttatatgtaagtaaaggtagcgacaaagtgacactttctgattatagcggaatttcttacgataatgcggtaagtcgcttaattgctttaggtatcccagaatctcaaattaaacgagtggacgaagaaagcgacaaagttgaaaaagataccgtgattagtcaagaaccagcttctggtaccgctgttgatccgaaaaatgacacgattactttacatgtcagcaaaggcagcgactcagtaactgttcccgatatttcaggttattcgccaaaagctgcagaagacagcatcaataacgctggccttaaaatcaatgaacaaggattatctggctctggcgatggccaagtcgttgaacgaactagcccatccgctggcagcaaagtcaaaaaaggcgactctgttacagtttattattcaaaagcaaatgattcaaaaagcaccactagtgaaagtagtacgagtaattaa

SEQ ID NO: 6805 - DNA, 1041 bp, Enterococcus faecalis
  CDS (1)...(1041)
atgtttttgaaaggacgtaaggggtgcgtatggatgcaaggaaatgaacaattactagaggtttcaggattagaaacagcatttagaatcaaagatgattattataatgccgtcgatgatgtttcatttgaattgaagaaaaatgagattctggcaatcgtcggagaatctggttgtggaaaaagtaccttagcaacaacgattatgggcttacatgatcccaatcataccaaaattactggggaaattttatacaacaatttaaacttaactacgtttaatgaaacattgtacaacaaagtcagaggaaacgatattgggatgattttccaagatccgttgtctgcactgaatccgctcatgcgaattgaagaccaaattaaagaaagtctcacgtatcataccaaaatgaccgcacaacaaaaacaagcacgggccattgaactgttagatcaagtggggattcccaacccagagcgtgtcgggaaacagtatcctcatgaattgtctggcggcatgcgccaacgggtgattattgccattgcaatcgcgtgtaaaccaccgattttaattgcagatgaacccacaacggccttagacgttaccattcaggcacaaattctcgatttgttaaaagatttacaagaagaaacagggagcggcattattttaattacccatgacttaggtgtagttgcggaaatggctgatcgtgtagcggttatgtatgcgggtcagtttgtagaagtagccactgctgaagaattgtttagtcatccgaaacatccatatacacgttccttacttcagtccattccccaagagaattccgatgaagaagaacttcatgtgattgaagggattgttccttcgttaaccaaattacctagaaaaggttgtcggtttgccccacgaattccttggattgatgcatcggaacatgaagaaaatccaacattacatgaagttgcaccgaatcattatgttcgttgtacatgttataaacattttcattttagagacggggaaggggaagcgtaa

SEQ ID NO: 6806 - DNA, 3579 bp, Enterococcus faecalis
  CDS (1)...(3579)
gtgtatttaaaacgaattgaaattacaggatttaaatcatttgcagataaaaccattattgaatttgaagatgatgtgacagcagtggttggtccgaatggaagtgggaaaagtaatatcacggaagccgttcgctgggtattaggtgaacaatctgcgaaaaaccttcgcggtggcaaaatgaacgacattatctttgccggttcggaaggtcgtaagccgctaaatattgcggaagttaccgtgacgttagacaacaacgaccattatttagcattggattatagtgagattagtgtcacccgtcgtttaaaacgaacgggcgaaagtgacttttttattaataaacaagcgtgccgtttaaaagacattcaagatttatttatggattcagggttaggcaaagaatctttttcaattatttcacaagggaaagttgaagcgatttttaatagtaaacctgaagaccgtcgagggatttttgaagaagcagcgggcgttttaaaatacaaacaacgaaagaaaaaggctgaacaaaagctttttgaaaccgaggacaacttaagccgtgtccaagatatcatttacgagttggaagaccaattagttcctctagccgcccaagcagatgcggctaaaaagtatttagctttgaaagaagaacttaccgaaattgatgtcaatttaactgtgaccgaaattcaagaagcaaaagctatttgggaaacgaaaacgcaagaattaacagccattgaagaaaagttagctggcgcaagtaagcaagtccatgacttagaaggcaaattggtacgtttacgaagcaagcgcaatcgtttagatgaacaaattgaaacggaacaacaacaattattacaagtgacagaagcgttgaaacaagcagaaggacaaaaaaatgttttaattgaacgttccaaacacacctcccaaacggcaagcgaatacgaagagacattggcagaaacggccgaaaaaattgttcgttatcgagaagaattgcagacgctggaaacagcaatcgcagaaaaaacggcacaacgtcagacgttaaaagaagcattggctttggcaacgaaagatgtggaaaaatatagtaagtcttctaaagaattaatggaagaattgcgcagtcagtatgtggaagtcatgcaagaacaagccaatacagccaatgacttaaaatatttagaacgacaatatcaacaagaaacagctaaaaatcaacaatcgctagcaaaacacgaagcgctagaagaacagatggttgaagctcttgcaatgaaagaaacgctagaaaaagagcaaaaagtcgcaaaacaaggcttacaagaacagctggaagaatacactgcgttgaaagcaacgcttgaagccaaacgtgaacgattagcacagcgtcaaaacgatatgtaccaagcgatgaatcaagtgcaacaagcgaaggcacgccaaaaaagtttgcaagaaattcaagaaaattacgctggcttctatcaaggcgtgaaagctgtattgcgtcacaaaaaccaattaactgggattgttggcgcagtggctgagttaattgaagtgcctaaagaatatacgttggcgattgaaacggccttaggtggtgcggcgcaacatattgttgtggaaaatgagaaagatggtcgagcaggcatcaccttcttaaaacaacaacacagtggccgagcaacctttttaccattgaccaccattaagccacgctctgtatcggcgatggttcagaatcgtttggctggtgcaccgggcttcgtggggattgccagtgaattagttcgttatccagaacaagtacaaaccgttattcaaaatctcttaggcgtcacgattttagcggcagatttaacgagtgccaaccagttagcaaaattagtcaattaccaatatcgcgttgtctcattggaaggcgatgtgatgaatcctggcggttcgatgactgggggagccaataaacgtggcaaccaaggaagcctattttcacaagcgcaagaacttcaaacaattactgaacaaatgactcaattagaaacacaactaagaagtgtagaacaagaagtccaagcgctctcgcaagaagtgaaaacagccacggaacgtgcagaaatgttgcgctctgctggtgaacaaaatcgcttaaaacaacaagaaattgacaataaattagccaatcaaacagaaacgattactcgtttaacaaaagaaaaacgcttgtttgaatatgaatcacgggaattgcatcaattcttaactgaatatcaaacgaaaaaagctacattgacagagcaacaagcaagcttaacggcaacgaaagaacgtttagatgctgaaatgaaacaggtggaacaagaagctagccaaatggaaacctttaaagcccaagcgcaagaacgcttgacgacagttcaagcagaacaagcagtagcggcggaacaatgtgcccattttgctcgtcaaaagcaagacaaacaagaacaattggacgaattgttgattcgagaaacggccatccgtcaacagctacaacaattaagtagccattctagcgatcaccagttaaccgaagaaggcttagcggcacaagtcgcgcaattagcggagaaacaaacagcgttgcaaacgtctttacaaacggcacgcagtcaacgacaagcgttgcaagaagaagtagacgagttagatacaaaattagcggaagaaaacaaacgccaacaacagtatttagcagataaaacacaaatcgaagtcctaaaaaatcgtgcagaaatgcaattagatagctcgttaagttacttacaggaagaatacagcttaacctttgaagctgcctatgaagcgtatttcccaatcgatgatttagcgcaagcgcagcaaacagtgaaacgcctaaaacaagaaattgagcggttaggacctgttaacttaagtgccatcgagcaatttgaacaagtcgatgaacgccatcaatttttagtcagtcaacgtgatgatttattaaatgcgaaagaacaattattcgaaaccatggatgaaatggaccaagaagtgaaagaacggtttaaagaagtctttgaagcaattcgtggccagttcaaagtggtatttcctaatatgtttggtggcggacgggcagaactggtgctaaccaacccagaggatctcttgaatacagggattgagattgaggcgcaaccaccagggaaaaaattacaacatttaagcttgttgtctggaggcgaacgggcattaacggcgattgcgttactcttttcaattattcgtgttcgaccagttccgttctgtattttagatgaagtagaagcagctttagatgaagccaacgttgctcgttttggccattatttaagcgaatttgaagatggtacacagtttatcgtggtgacgcatcgtaaagggacaatggaagccgcagatgttttatatggcgtgactatgcaagaatctggggtttcaaaaatcgtttcagttcgcttggaagaggtcaaagaaggtggcgcaattgaaaaaagcaattag

SEQ ID NO: 6807 - DNA, 1329 bp, Enterococcus faecalis
  CDS (1)...(1329)
atgggattttttgataaaattaaaaaagctttttccgctgaaaaaaaggaagaagaaaaacaagagattgttgaagaaacagtagacgaaacacctagtgatgaatcagcgcctgctgaatcaaaagaaaccgcagcagaagaggcgcaaacaacgccagaaacggcagcggaagaagtcgcagaaacagccgatttaacagataacgctgaaatggaaaaattagctggcgtagaagaagcattagaagaagagccagaagaaatcctgacagaggaaacacaagaagttgttgtggaagcgcctgaggaagaaagtagtgtcgtaactccgttggcagaaccaacagacacgcaggtttcagaagaaattgaagagtcgaaagaagaacaagtccaagaaaaatatgaaaaaggtttggaaaaaacacgtaagacatttggtcaacggttgaacgaattgtttgctaatttccggagcgttgatgaagatttctttgaagaattagaagaaacgttaattggtgcagacgtaggctttgatacatccttaaaaattacagaagccttgcgacaagaagtgaaactgcgaaatgtgaaaaaaccagctcaagttcaaaataccatcattgaaaaaatggttgatttgtatgaagaagcaggaattaatgaaaataatgcgattaacttacagccaaatggcttaaccgtgattttatttgttggtgttaatggagttggtaaaacaaccagcattggtaaattagcccatcaatacaagttggaaggaaagaaagttttaatggccgctgccgatacgttccgagcgggcgccatcgatcaattagttgtttggggtgaacgggctagcgttgaagttgtgcgtgggaatgctggcggcgacccagcagcggtcgttttcgatgcagtggaacgtgccaaagcagagcaggccgatgttttgctagtggatacagcaggtcggttacaaaataaagtcaacttaatgaaagaattagaaaaaatcaaacgagtcatccaacgagaaattccagatgcgcctcacgaagttctcttagtcgtggacgcaactactgggcaaaatgcgatgacacaagccaaacagttcaaagaaacaaccgatgtcactggcttagttttaaccaaactagacggaacagccaaaggtggtattgtcattgctattcggaatgaattacacttgccagtgaaattagttggtctaggtgaaggcattaacgatttagaaccattcaatgccaacgatttcgcaatgggcttatttaaaggcttattaaaagatgtttag

SEQ ID NO: 6808 - DNA, 954 bp, Enterococcus faecalis
  CDS (1)...(954)
atgaaaaagaaatttttagcaatgatggcagtttcaatgatgggactgttgatgttaagtgcttgtcaaacaaataaaaaaacagcagattctgcaacaacagaaacaacagctaaaacggaagtcacagtcaaagacaccaatggtcaattaaccgttcccaaaaatcctcagaaagtcgttgtttttgacaatggttccttggatacaatggacgcactaggtgtcggtgaccgcgtggtaggtgcgccaaccaaaaatatccctgcgtatttgaaaaaataccaaaaagttgaatcagcaggcggcattaaagaaccagatttagaaaaaatcaatcaactaaaaccagacttgattattatttctggtcgtcaacaagattatcaagaacaattaaaagccattgcgccaaccatttacttagctgtagatgccaaaaatccttgggcatcaacgaaacaaaatatcgaaacgttaggcactatttttgataaagaagaggtagccaaagaaaaaataactggcttagaaaaagaaattgctgacgtgaaaaaacaagcagaagctagcgcgaataatgcgcttgtcgtgttagttaacgaaggacaactttccgcttacggaaaaggctctcgtttcggtttaattcatgatacatttggcttcaaagcagcagacgataagattgaagcttccactcatgggcaaagtgtttcttacgaatatgttttagaaaaaaatcctgggattctctttgtggtagatcgcaccaaagcaattggtggcgacgattcaaaagataacgtcgctgcaaacgaattgattcaaaaaaccgatgctggtaaaaatgataaagtcattatgcttcaaccagatgtttggtatctaagcggtggtggattagaatcaatgcatttgatgatagaagatgttaaaaaaggattagagtaa

SEQ ID NO: 6809 - DNA, 3903 bp, Enterococcus faecalis; identical to SEQ ID NO: 3848
  CDS (1)...(3903)

SEQ ID NO: 6810 - DNA, 1131 bp, Enterococcus faecalis
  CDS (1)...(1131)
atgaaattaacggtcaaacgaagtgtctttttacaagaattacaaactgttcaacgagcaatttcttctaaaacaacgattccaatcttaacaggtgttaaaattgtgttatcagaagatggcttatcacttactgggagtaacgcggatatttcaattgaaagttttttaagtaaagatgatgaaaaagctcaaatgaccattgaacgcacaggtagcatcgttttacaatctcgtttctttggcgaaattattcgtaaattaccagaagatatgttcacaatggaagttctagataacaatcaagttgcaattacttcaggaaaagctgattttacggttaatggattagatgctgacaattatccgcacttaccagtaattgatactcaaaaccaaatgaaattacctgttcatttattgacaaaaattattagtgaaacaggttttgctgtatcgatgcacgaaagtcgtccaattttaactggggttcactttattttagaaaatcaaaaattacttgccgttgcgacagattcacatcgtttaagtcaacgtgtgatcccgacagaacaagcagtagaagactttaacattgtaattccaggaaaaagtttaactgaactttctcgttcattaaccaatgaagaagaaatggttgaaatcagcattatggaaaaccaagtgctatttaaaacagaaacaatgtacttctattctcgtttgttagaaggaaattatcctgataccaaccgtttaattccaactagccataacacgcaaattgaattttatgtaccagaattgctttcagcaatcgaacgtgcctctttactttctcatgaaggacgtaacaatattgttcgcctttcaatttcaccagattctgttgttttatatggaaattcacctgaaattggaaaagtcgaagaagctttaaactatgaaaatgtttctggtgaagcgttggatatttctttcaacccagattatatgaaagatgcgttgcgagcgtttggcgatatgaatattaccgtgaaattcctttctccaattcgtccgtttacattggagccaaccgaaacagaactagatttcattcaactaattacaccggttcgtacaaattaa

SEQ ID NO: 6811 - DNA, 1344 bp, Enterococcus faecalis
  CDS (1)...(1344)
atgcccgacgtggaaagtttttggcatagccttgaagaagcctatcaagcgattttgtcggcgccaagttttgatgcttggattaaaaccacacgccctttgaaattagacaacaatcaattgtggctagaagtcccttctgcagttcatcgtgattactgggaaaaaaatctttcggcaaaaattgtcgaaactggatttaaattgaccggtgcagaagtgatgccccattttgttgttgccgatgaaaaagacgcagcactggcacaagaactcgaagaacctgccgaagaagaagttgtttttagtgaacaaagtaaaaaagcgatgcttaatcctaagtacactttcgacaccttcgttattggtaaaggaaaccaaatggcgcacgctgcagcgcttgttgttgccgaggatcctggttcgatttacaatccccttttcttctatggtggtgtagggttagggaaaacccatttgatgcatgctattggtcatcaaatgttagtgaatcaaccagatgccaaagtcaaatatgttagtagcgaaacgtttacgaatgaatttatcaactcaattcaaacaaagacatccgaacaatttcggaaagaatatcgcaatgttgacttattattagtcgatgatattcaatttttggcggaaaaagaagcaacattggaagaatttttccataccttcaacgatctttacaatgaaaataaacaaattgttttaacaagtgatcgcccgccgaatgatattccaaaattacctgaacgattagtttctcgctttgcttggggtttgtctgtcgatatcaccccgcctgatttagaaacacggattgcaattttgcgcaaaaaagcagatgccgagcgtttagaaattccggatgatacactaagttatatcgctggtcaaattgattccaacatccgtgaattagagggtgctttggtccgtgttcaagcctttgcaactattaatggagaagatattaccactagtttagcggcggacgccttgaaatctctaaaatcagttggtagtaaaaatcaattgtccattttacaaattcaagaagaagtatccaaatattatcatgtgcctcttaaagatttaaaagggaaaaaacgggtgaaaacaattgtggttcctcgtcaaatctcaatgtatcttgctagagaaatgaccgacaattccttgccaaaaattggtgccgaatttggcggcaaagatcatacaacggtgattcatgcgcacgaaaagattcagcaattattggaaaaagatccagcgattcaaaaagaagtcagtgaaattaaaaatttattgaactcttag

SEQ ID NO: 6812 - DNA, 888 bp, Enterococcus faecalis
  CDS (1)...(888)
atggaacgtttaagaagaacaatgatgtttgtccctggagcgaacgcagcaatgctaagagatgcacctttgtatggggcagattcaatcatgtttgatttagaagatgcagtttcattaaaagaaaaagactctgcccgtgttttagtccattctgctttgaaaactttcgattatggcaatattgaaattgttgttcgaatcaatgctttagatgccggtggcgcagaagatattgaagcaatggtcttagctggtgtcgatgtgattcgtttaccaaaaacagaaacagcccaagatatcattgatgtcgaggcagtcattacagaagtagaacagcaaaatgacattcccgtaggaacaacgaaaatgatggctgctatcgaatcggccgaaggtgttctaaatgcgcccgcgattgccaaaagttcaactcgcttgattggcatcgcgttaggcgccgaagactatgttaccaatatgaaaacacgccgccatccagatggccaagaactattctttgctcgtagcatgattttacatgccgctcgagcagctgggattgcagctattgatacggtctattcagatgtagacaatacggaaggctttgaagccgaagttcgtttgattaaacagctaggtttcgatgggaaatcggtgattaaccctcgtcaaatcccattggttaataatatttatgcgccaacagaaaaagaaatccagaatgctaaggaagtaatctggggcattcgggaagccgaagcaaaaggttccggtgttatctccgtaaatggaaaaatggttgataaaccaattgttgaacgagctgaacgggtcattgcgttagcattggcggctaaattaattaccgaggaggaaatatag

SEQ ID NO: 6813 - DNA, 933 bp, Enterococcus faecalis
  CDS (1)...(933)
atggggaaaaaaatggtcgttgcactaggcggaaatgccatcctttcaaatgatgctagcgcacacgcacaacagcaagcattagttcaaacatctgcctatttagttcatttaattaaacaagggcatcggttgattgtttcacatggcaatggtccacaagtcggtaatctattattgcaacaacaagcagctgattctgaaaaaaatccagcgatgccgctagatacgtgtgttgctatgacacaaggaagtatcggctactggttgtccaatgcgcttaatcaagaattaaacaaagcaggaatcaagaaacaagtggctactgttttaacacaggtggtcgtagatccagcagatgaggcattcaaaaatccaacaaaaccgatcggtccatttttaacagaagctgaagccaaagaagcaatgcaagcaggtgctatttttaaagaagatgcaggacgtggctggcgcaaagtcgttccaagtcctaagccaattgacatccacgaggctgagactattaataccttaataaaaaatgatataattaccatttcatgtggtggtggtggcatccctgtcgtaggacaagaattaaaaggtgtcgaagcagtaatcgataaagattttgcttctgaaaaactggcagaattagtggatgcggatgcactagttattttaactggcgtggattatgtgtgtattaattatggcaaaccagatgaaaaacaattaaccaatgtcactgtagcagagttggaagaatacaaacaagcgggtcattttgcaccaggtagtatgttaccgaaaattgaagccgccattcagtttgtagaaagccaacccaataaacaagcaattatcacttctttggaaaacttaggaagtatgagcggcgatgaaatcgtaggaacggttgtgacaaaataa

SEQ ID NO: 6814 - DNA, 1398 bp, Enterococcus faecalis
  CDS (1)...(1398)
atgcaatcagctacaatggaatttgatacaattgcggcgatttctacgccgccaggtgaaggtgcgattagtattgttcgtttaagtggcgagcaagcagttgctattgcaaacaaagtttatcggtcaggcactaaagatttagctaaagtccccacgcacacgattcattatggtcatattgttgatccgcaaaacgatcaattgattgatgaagtcatgctttctgtgatgcgggcaccgaaaacatttacacgagaagacgtggtagaaattaactgtcatggcggcattgtcgtggtgaaccaactactgcaattactgttacgtgaaggcgcacgaatggccgaacctggggaatttacaaaacgtgcttttctaaatggccgaatggatctttcacaagcagaagcagtgatggacttaatccgtgctaaaacagataaagcgatgaatgttgcattgaatcaattggatggtaacttgtcggcgttaattcgttcattaagacaagaaattttaaatactttagcgcaagtagaagttaatattgattatccagagtatgatgatgtcgaagaattaaccacgaaattacttttagaaaaagccgaatttgtgaaagcgcagattcaacaattattaacgaccgctaaacaagggaaaattttgcgagaaggtctaagtacagcaattattggccgaccaaatgtcgggaaatccagtttgttaaaccatctgttacgagaagaaaaagctatcgttacagatattgctggaacgacacgtgatgtcattgaagaatacgttaacgttcgcggtgttcctttaaaattaattgatacagcggggattcgcgaaacagaagacattgttgaacgaattggtgtcgaacgtagccgcaaagcgttagcagattcggatttaattttgttagtcttaaatcaaagcgaagaattgacagaggaagatcgtcaactgttggaagcaacgaaaggcttaaaacgcgttattcttttaaataaaatggacttaccgacaaaactagatcctaacgaattacaagaattagtccctgcagaagaaattttatccgtttcggtgttgtcaaacacaggcttagaccagttagaagcgaaaattgctgatcttttctttggcggccaaacaggcgaaaaagatgctacctatatttctaatacacgtcatattgctttgcttgatcaagcagcgctttcgttacaagaagtgattaacggcatcgaagcaggtatgccagtcgatttagttcaaattgatatgacccgttgttgggattatttaggggaaatcgtcggcgatagtgtccaagatgaattaattacacagttatttagtcaattttgtttaggaaaataa

SEQ ID NO: 6815 - DNA, 1899 bp, Enterococcus faecalis
  CDS (1)...(1899)
atgaatcaatatcaagcagaatcatatgatgttattgtcgtcggtgctggacatgctggctctgaagcagccttagcagccgcacgaatgggcgttaaaacgttacttttaacaattaatttagatatggttgcttttatgccatgtaacccttctgttggtggacctgccaaaggagtcgttgtccgagaaatcgatgcattaggcggtgaaatgggtaaaaacattgataaaacctacatccaaatgcggatgctaaatactggtaaaggtccagcagtgcgtgcgttgcgcgcgcaagctgacaaacatgcctatgcgacagaaatgaaacataccattgaaaaagaagaaaatttaacccttcgtcaagggattgttgaagaattaatcgtggaagatggcgtttgtcgtggtgttgtaacttcaacaggtgccgcataccgtagtcaagcagtggtgattactgccggtactgccttgcgtggcgaaattattattggtgaattaaaatattcatcaggaccaaacaattcgcaaccttccgttggtttagccaatcatttaaaagaattaggtttagaaatcgatcgctttaaaacaggaacgccgccacgagtaaaatcaagtacgattgattattctgtgacagaggaacaaccaggcgataaagaacccaaccactttagttacagcacgccagatagtgcctacaatcaaaaccaagaaccttgttggttaacttatacgaatgaaacaacgcatgaaattattcaaaaaaatctacaccgcgccccaatgtttactgggattgttgaaggtgtgggcgctcggtattgcccatccatcgaggacaaaattgttcgttttgcagacaaaccaagacaccaattgttcttggaaccagaagggttgaataccgaagaagtttacgtccaaggcttatctacttctttaccagaagatgtccaaacagaaatgcttcattctattgaaggattagaaaaagtagaaatgatgcgtacaggttacgccattgaatacgatgtggtagtccctcaccaattacgcccaacattagaaacaaaggtcattgagaatctttatacagcaggtcaaacgaacggaactagtggctacgaagaagctgctggtcaaggcttgatggcaggaattaatgctgcattgaaaattcaaggcaaagagcctcttgttttaaaacgtagtgatggctatattggcgtcatgattgacgatttagttacaaaaggcactaacgaaccttatcgcttattaacgtcacgtgcggagtatcgtttgattttacgacatgacaatgcggacttacgtttaacagaaatgggtcatgaaattggcttagtcaaagaagaacaatatgccgcctatctagtcaaaaaagcggctgttgaagcggaaattgcccgcttaggcaaacatcggattaaaccaaccaaagaagtgcaagcatttttggaaaccaaaggcgctgctggcttaaaagatggtattttagctagagattttctgaaacgcccagaaatcagttatcaagaagtcgctcaatttattcccgcacctgaagaggcgctcgatccgaaagtgattgaacaagtagaaattcaaatcaagtacgaaggctacattaaaaaagccatggaaaaagttgagaaactaaaacgcatggaagcaaaacgcattccagaaaacattgattaccaagcgattaacggcttggctacagaagcaaaacaaaaactacaaaaaatccaaccagaaacgattgcccaagcaagccgtatcagcggtgtgaaccccgctgacattagcattttgatggtctacatcgaacaaggaaaaatcgcgaaagtgcaaggataa

SEQ ID NO: 6816 - DNA, 678 bp, Enterococcus faecalis
  CDS (1)...(678)
atggaatttatgctagatacaattaatcttgaggctattcgaaagtatcagaaaattttaccactggcaggcgtaacgtctaatcctagtattgttaagcaagcaggaaaaattgacttctttgcgcagatgaaagaaatcaaaaaaacgattggacaagctagtttgcacgtccaagtggtcggtcaaacgacagaagagatgctagaagatgcccaaaccattgtacaacaattaggccaagaaacattcattaaaatcccagtcaatgaagcaggcttggcagccatcaaacaactaaagcaggcaaattatcggataacagcaaccgctatttatacagaatttcaaggctacctagcgattgcggcaggtgcagattatttagcaccgtattataataggatggagaatttaacaattgattctcaaaaggttattgagcatttagctgcagaaattaaacggacgaacgcaaagagtaagatcttagctgctagttttaaaaacgtggcacaaattaatcaagcctgtcaaatgggggcgcaagcggtcactatcgcaccagaactcgtgacacaaggcttggcaatgcccgccattcaaaaagcagtaactgattttcaggaagattgggttgctgtttttggagtagaaacggtaaacgaattagcataa

SEQ ID NO: 6817 - DNA, 876 bp, Enterococcus faecalis
  CDS (1)...(876)
gtggctagagactttttaccacataaaaaggcggatttttcttttatcattcaggcaaaaatcttccgaaaagcattgcaagaaattgctatttgcgttaaagtaggaaaagatgattgtgaaacatttttctgtttcacaaaaaaggaaggagtctttatgctacccgaagaatttagacaactattagccgcaaaaggcattgaattgacagaccaacagatgacacaatttgaccaatatttccatttactagtagaatggaatgaaaaaatgaatttaacagccattacagaagaaaaagaagtttatttgaaacatttctatgattctgtttcgttggcattctttgaagactttgccagtgacaaagccatttgtgatgttggcgcaggcgcaggatttccaagtattcctttgaaaattgtttttccttcattaaatgtcacaattgttgactctttaaataaacgaattactttcctaacagagttggtgaatcaactaggtttggctaatgtttctttgtatcatgatcgtgcagaaacatttggtcaaaaagcagaatttcgtggcgcgtttgattacgttacagcgcgagcagttgcacgattaaatgttttaagtgaactgtgtttacccttagttaaaaaagaaggctattttttagccttaaaagcatcgaaaagcgaagaagaaattaatgaagcaaaacctgcaatcgctacattaggcggtcaatttcagaaagaagttggttttactttgccgattacggcagacgaacgccacattgtcgtgattcaaaagaaaaaagaaacccctaaaaaatatcccagaaaacctggattaccaaataaacaaccgattaaataa

SEQ ID NO: 6818 - DNA, 762 bp, Enterococcus faecalis
  CDS (1)...(762)
atgacacgaattatttctgtagcgaaccaaaaaggcggcgttggtaaaacaacgaccactgtaaatttaggcgcatgtttagcaaacttaggcaaaaaagtcttactgatcgacattgatgcacaaggaaatgctaccagtggcatgggtgtccctaaaccagatgtcgcacacgatgtgtatgatgtccttgtaaatgaagaaccaatcactagcgtggttcaacataccagccgtgaaaatttagatattgtccctgcaactattcaattagcaggcgctgaaattgaattaacttcaatgatggctcgagaatcgcgcttgaaattagcaattgatgaagtaagagacatgtatgatttcgttttaattgattgcccgccttctctagggcatttaacaatcaatgcttttacagcaagtgattcgattctaattcctgttcaatgtgaatattacgcattagaaggcttgagtcaattgctaaatacgattcgcttggttcaaaaacattttaaccctgaattgaaaattgaaggggtcttgttaaccatgtacgatgctcggaccaatttaggtgccgaagtcgttgaagaagtccgtaaatatttccgtgaaaaagtctatgatacgattattccaagaaatgtccgtttatccgaagcaccaagtcatggtttaccaatcattgactatgatattcgctcaaaaggtgccgaagtgtatcaagcactagcaaaggaagtgttggagaatgaataa

SEQ ID NO: 6819 - DNA, 1116 bp, Enterococcus faecalis
  CDS (1)...(1116)
atggcactaacagctggaattgtcggcttaccaaacgttggtaaatcgaccctatttaacgcaattacaaaagcaggagcagaagctgcaaattatccctttgcaacgattgatccgaacgtcggcatggttgaagtaccagatgcccgtttacaacgcttgacagaactagtaaaaccgaaaaaaacagttcccacaacgtttgaatttacagacatcgccggaattgttaaaggtgccagcaaaggagaagggctgggaaatcagtttttaagtcacattcgtcaagtagatgcaatctgtcacgtggttcgttgttttgatgacgaaaatatcatgcgtgaacaaaatcgggatgcggatttcgttgatcctttagcagacattgatacaattaatttagagctaattttagcagatttagattcaatcaataagcgctatactcgcgtggctaaaatggcgaaagcaaaagataaagaagcggtggaagaattagctgttttagacaaaattaaaccagttttagaagaagggttatctgctcgtacgattgaatttacgccagaagaagagaaaattgttaaatctcttttcttattaaccacaaagccggtcctttatgtagcaaatgtttcagaagatgaagtggcagatccagacaacaatgagtatgtacaacaagttcgtaattttgcaaccagtgaaaatgcggaagtaatcgtagttagtgcgcgagcagaagaagaaattgctgaattggattctgaagaagacaaggctgaatttttagaagcaatgggcattgaacaatctggcttagatcaattgattcgtgcggcgtacgatttgttaggcttagctacctactttacagctggtgaacaagaagttcgtgcgtggacgttccgtaagggaatcaaggcacctcaagcagctgggattatccacagtgactttgaacgaggcttcattcgtgcggaaacagtttcttatgaagacctagataaatatggcaatatgcaagctgccaaagaagcgggccgtgttcgtttagaaggaaaagactacgtcgttcaagatggcgatgttatgttgttccgttttaacgtttaa

SEQ ID NO: 6820 - DNA, 978 bp, Enterococcus faecalis
  CDS (1)...(978)
gtgaggatccccatgaagaattatgcacgaattagttgtacaagccgttatgttccagagaattgtgtcacgaatcaccaactgagtgaaatgatggatacctctgatgaatggatacattcgcgaacaggcattagtgaacgtcgcatcgttacgcaagaaaatacgtctgatttatgtcatcaagtcgcaaaacagttattggaaaaatctggaaagcaagcaagtgagattgactttattttagtcgcaacagtgacaccagatttcaatatgccttctgttgcttgccaagtgcaaggcgcaattggcgctactgaggcttttgcttttgacatcagtgcagcgtgttctggttttgtctatgccttaagcatggcagaaaaactagtcttaagtggtcgttatcaaacaggtctagtaattggtggcgaaacattttccaaaatgttggattggaccgatcgctccacagcggtgcttttcggtgatggggctgccggcgtcttgattgaagcggctgagacaccgcattttctaaatgaaaaattacaagcagatggacaacggtgggcggctttaacgtcaggctacacgatcaacgaaagtcctttttatcaggggcataagcaggcgagtaagacgctacagatggaaggacgtagtatttttgattttgcgattaaagatgtttcacaaaatattttatcactcgtgacggacgaaaccgtggattatcttctattacatcaagcaaatgtgcgcattatcgataaaattgcacgtaagacgaagatttcccgcgagaagtttttaacgaatatggataaatatggcaatacctcagctgctagtattcctattttgttggatgaagcagttgaaaatgggaccttaattttaggttcccaacaacgcgtggtgctaacaggatttggcggcggcttaacatggggctcactgctcctaacgctgtaa

SEQ ID NO: 6821 - DNA, 228 bp, Enterococcus faecalis
  CDS (1)...(228)
atggtatttgaaaaaattcaagcaattatcgtagaagaattaggaaaagatgctgaagaggtacaattaactacaaacattcaagaagaattagatgcggatagcttagatttattccaaatcattaacgaaatcgaagatgaatttgatgtgaaaatcgaaacagaagatggcatccaaaccgttcaagatttagtaacatatgtagaaaaacaacaagcaaactaa

SEQ ID NO: 6822 - DNA, 957 bp, Enterococcus faecalis
  CDS (1)...(957)
atgaatcaacagttatgtgagttgcttggaatcaattatcccatttttcaaggcggtatggcttgggtagccgatgcttcattagcaagtgccgtgtcaaacgctggtggattagggattattgctggcggcaatgccccaaaagaagtcgtaaaaaaagaaattaaaaaagttaaagaattaacggagcaaccctttggtgtcaatatcatgttactttcaccttttgccgatgaaattgtcgatttggtttgtgaagaacaggttcctgtcgtaacgacaggtgcaggcaatccagccaaatacatggctcgttttaaagaacataacattaaagtaatcccagtagttccttctgttgctttagcaaaaagaatggaaaaaattggtgccgatgctgtcatttttgaaggaatggaagctggtggacatattggcaagttaaccactatgagtggcttaccgcaaatcgttgacgctgtgtcaattcctgtgattgcagcaggtgggattggtgatggtcgtggtatggctgcggcctttatgttaggtgctgaagcagtccagttaggcacacgttttttaattgccaaagaatgcaacgttcatccagattataaacagaaagttttaaaggcacgtgatttagatgcagtaattacctgtcaacattttggccatccagtgcgtactttaaaaaataaattaactgctcaatataatcaattagaaaagcaagaacttcaaaaagaagtacctgatttagaaatgtttgaaaagattggtcaaggcgctttgcgcaaagctgtcgttgacggggatatggattacggttccgtcatggcgggacaaattgccgggttaataaaaaaagaagaaacagcccaagaaatcattgattcactcatgtctgaatgcaaagcgattgtacataagatgaatcagcgttggggctaa

SEQ ID NO: 6823 - DNA, 942 bp, Enterococcus faecalis
  CDS (1)...(942)
atgaggtgtcgtatgaaaacagcgattttatttagtggacaaggagcccagtatcaagggatgggtgaagaattatatcaccaagaagcgattgttcgggaaactttcgatgaagcaagtcatatcttaggttatgagatggcagaactttgttttactgaaaatgaacgtttaaatgaaacagaatatacgcaacctgctattttaacagtcagtgtcgcattttaccgtcttttgcaacaaaaaggactaacgcctgatgtcgtagcgggtttaagcttaggggaatatagcgctttggttgccagcggggctttgcgcttttcagaagcagtggccttggtccaaaagcgcggtcagtacatgacagaagcagcaccacaaggaactggcaaaatggttgctgtcatgaatgctgagcgtgaagtaattgagaaagcctgccaagaagccagtgctttcggaattgtggctccagcaaattataatacaccacaacaaatcgtgattggtggtgaggttgctgctgttgatcaagcgatgacacttctcaaagaagctggtgtgaagcgaatgattccgttaaatgtgagtggccctttccatacggcgctgttacaaccagcatcaaaaaaattggctcaggatttagcaaaattgaactttcaaacgatgcaaattcctgtcattagtaatacgactgccgaaattatgccccaagaggcaattcaagcgttattggaaaagcaagtcatgtctgcggtacgttttgaagacagtatcgaaacgatgaaggctatgaacgtgggaacgatgattgaagttggtccagggaaaacattaactggttttgttaaaaaaattgacaaaacaattgaaatgcaccgtgtggaagatgttgcaacattaacagaaacgttaacagcacttactgggaggtaa

SEQ ID NO: 6824 - DNA, 738 bp, Enterococcus faecalis
  CDS (1)...(738)
atggaattaacaggaaaaaacgtatttattactggaagcactcgtgggattggcaaagcagttgcgttggcttttgcgaaagagggcgccaatattgttttaaacggtcggagtgagattacgccagaacaacgacaagaaattgaagcctttggggtaaaatgtattggcctttctggagatatttccgattttgatgcagcgggtgagatgattcaagcaaccgttgaccaattaggctcgattgatattctggtgaataacgctgggattacgaatgataaattattattacgaatgacaaaagaggattttaatgcctgtttagatattaacttggtaggaacttttaacatgacccagcaagcggttaaacgtatgatgaaacaacgaagtggccggattattaatatggctagcgtttctggtttaatgggaaatgttggtcaagcaaactacgctgcgagtaaagcgggtgttgttggttttactaaatcggtggcgcgagaagttgcgccgcgtggtattacctgcaatgcgattgcaccaggatttatccaaaccgaaatgacggatgttttatcggaaaaagttaaaacacaaatgaatgcgcaaattcccttacaaacgtttgggcaagtcgaagatgtcgcagctacagcgatattcttagctaaaagtccctatattactgggcaagtcgtgaatgttgatggcggcttagtcatgcacggataa

SEQ ID NO: 6825 - DNA, 489 bp, Enterococcus faecalis
  CDS (1)...(489)
atgcagttagaagaagtaaaagcactattaacacaatttgatcaatcaactttaaccgaatttgatttacgagaaggctcgtttgaattatatatgaataaaaatacagtttctgggcgaagtgccgtagaaccagtggtgcaaccacaagaaacaccagtagccgctagtggtgtgtcagtgcctgttgaaacagtttctgtcgttgaagaaacgccaactaatacaccgacagccaatgaaaagacagaagaaattacgtcacctattgtaggaatcgtttatttacaaccagcaccagataaagagaactttgtcaaagtaggagacactgttaaaacgggtgacgttgtgtgtatcgttgaagcgatgaaattaatgaatgaaattacggcgacagttgacggtgtgattactgaaatattagtcaacaatgaagatgtggttgaatttggtcagccgctattccgagttgctaaaggagaataa

SEQ ID NO: 6826 - DNA, 426 bp, Enterococcus faecalis
  CDS (1)...(426)
atgaaattaacaattacagaaattcaagaaattttaccacatcgctatccctttttattattagatagtgttgaagaagtcattcccggggaacgcgttgtagcgaaaaagaatgtaacggttaatgagcaagtttttcaaggtcattttcctgggaatcctgttttgccaggagttttaattattgaatcgttggctcaagcaggcgccgtggcattactttcaatgcctgaattcaaagggaaaacggcatactttggtggattagataaagcaaaatttagacaaaaggtaacaccaggcgacacattaattttagaggttgaacttttaaaagtccgcgcttctgctggaatgggtaaaggtgtggcaaaagttaatggaaaaaaagttgccgaggctgaattaacctttatgattggatag

SEQ ID NO: 6827 - DNA, 1371 bp, Enterococcus faecalis
  CDS (1)...(1371)
atgttttcgaaagtattaatcgcaaaccgcggagaaatcgctgttcgtattattcgtgcctgtcgcgaattaggcgttcaaacagttgctgtttactctgaagcggatcaagaagcgttacacacacagttagcagatgaagccatttgtattggaccggcgaaagcaactgattcttatttaaatgttcaagctgttttaagtgcagcgattgttaccaatgctgaagcgattcatccagggtttggtttcttatctgaaaatagtcaatttgcttcaatgtgcgaagaatgtaacattacttttatcggtcctaaagcagaaacgattgatgcaatgggcaataaaataaacgcacgtcaactgatgcaaaaagccaaggtacctgttattcctgggagtgatggcgtcattgattctgtcgaagaagcgttgacgattgctgaagaaattggttacccagttatgttaaaggcagctgctggtggtggcggaaaaggaatccgaaaagttctttcaaaagaagagttaccgaaacactttacttcagcgcagcaagaagccaaagccgcatttggtaatgatgatatgtatttagaaaaaattatttatccagcacgtcatatcgaagtgcaaattttaggtgatcaatatgggcatgtgattcacttaggggaacgtgattgctcactacaaagaaataatcaaaaagtgttagaagaatcaccatcgattgctatttctgaagaaaagcgtcagatgttaggcgaaacgaccgttcgagcggcacaagctgtgcattatgaaaatgccggaaccattgaatttttgatggatccagctggcgacttttatttcatggaaatgaatacccgcatccaagtcgaacatccagttacggaaatggtaacagggattgatttagtcaaagcacaattagaaattgcttcaggtgaacctttaggctatacccaagaggatgttatcctgactgggcatgcgattgagtgccgaattaacgctgaaaatcctgcctttaattttgctccttcaccaggtaaaattcaaaatctcttgttgcctagtggtggaatgggcttgcgtgtagacagcgctatgtattcagggtattcaattccgccttattatgattcaatgattgcaaaagtcatcgtacatggtgaaaatcgttttgatgccttgatgaaaatgcaaagggctttaaatgaaattgtaacagaaggtattattacgaatgccgaattccaattagatttaattacacatgacaatgttttgacaggtgactatgacacaagctttttacaagaaacatttctaccaaattgggagccagaaagcaatcattaa

SEQ ID NO: 6828 - DNA, 867 bp, Enterococcus faecalis
  CDS (1)...(867)
atggcattatttaaaaagaaaaattacattcgcattaatccaaatcgtgctgatgcaaatgatgcatcaaagaagccttctgttccagataatatgtgggcaaaatgcccttcttgtaagcgaacactgtatacaaaagaaatgggtgcagaaaaaatctgtccgcattgtggctatagttttcggattggtgcatgggaacgattagcgataaccgttgatgaaaaaagtttccacaattgggacagtgaattagtgacaaaagatccactaaattttcctggttatcttgaaaaaattgaaaaaatgcaagaaaaaactgggctagatgaagctgtcttaacgggagaagcaacaattgaaggacaagctgttgcaattggaatcatggacgctaattttatcatgggcagtatgggaacgattgttggtgaaaaaatcacacgcttgtttgagcgggcgacagaaaagcatttaccagtagtgattttcactgcatctggtggtgcccgtatgcaagaaggaattttttcattgatgcaaatggcgaaaatttcggccgctttgcaacggcataacaaagcaggcttgctgtatcttacggtattgactgatccaacgactggcggtgttaccgcaagttttgcgatggatggcgatattattttggcagagcctcagagtttaatcggttttgctggccgccgtgtaattgaacaaacgattcgtcaagagttgccagatgattttcaaaaggccgagtttcttttagaacatggttttgtagatcagattgtgccaagaaatcttttgcgtcaacgattgagcgacttgttacgtttacattctttggaagggtggcgctaa

SEQ ID NO: 6829 - DNA, 789 bp, Enterococcus faecalis
  CDS (1)...(789)
atggaaaagaaaacagccaatgatgttgttaccttggcaagagaccaagatcgtttgacaactttagaatatatagaagccatttttgaggactttttagaatttcatggggatcgttactttgccgatgatttagctgtagtcggtggtgttgctactttgcaagggaaaccagttacggtgataggtatccaaaaaggccgaaatctaccagaaaatattgaacgtaattttggttcacctaatcctgaagggtatcgcaaagcgttacgtttaatgaaacaagcggaaaaatttaaccgcccagtcattacctttgtgaacactgctggtgcctattgtgggattggtgccgaagagcggggagaaggggaagccattgcgcaaaacttgttagaaatgtctgatttgaaagtgccaatcatttcagtcatcattggtgagggcggtagtggcggtgctttggctttagcagtcgcagatgaagtttggatgttggaacacacgatttatgcggttctttcgccagaaggtttcgcctctattttgtggaaagatggcagtcgtgcgaaagaagcagcagaattgatgaaaatcacagcgacagagctgaaggaattagctattgtagataaagtaattccagaagttatgaacggtcagcctctggaacaagcaaaaattaatcgcatgttacaaaaagcgttcatttcaaaattaactgaattagctaaattagatacggaaacgttactagaaaaaagataccaacgttttcgcaaatattag

SEQ ID NO: 6830 - DNA, 915 bp, Enterococcus faecalis
  CDS (1)...(915)
atgactgaacaattcatactcacttcaaacgatcaacaaactcagctcaatgtacgtcattggccctgtccttcacccaaagccgtagttcaattgattcacggcatggcagagcatatccaacgttatgatgaatttgctcgttttttaaatcaattagggtttgccgtaattggtcatgatcatctaggtcatggcgaatctgtacaaccaagcgcaccaatctatggtttttttggagaacaagggcctgaaaatgtcgttatagatattcatcaagtgaaacaatgggctgtgaatcgctatccacaattgccctattttatgatgggtcacagcatggggtctttcgccttgcgcaactatctgcaagactatcctgtgactgtgcaaggagtcattttcatgggcactggaacaagtccgttacctttaaccgcagcattgccttttattaaaaaaatggccgagaaacagccgaaaaaaccagctccgttcattgataagctggcatttggttcttttagtaaaaaatttcctgaagcaagttcctttaattggctttctaaaaatcaagccaatgtggctgactatgaaaatgacccattaatgggcttcatatttaccaataatggttttgctacccttttttcacttgttaaacgagccaatcaaaggaattggtaccaagcgatcccaaaagaattgcctattttaatcattagtggcgctgaagacccagttggtgatttcagcaaggggccagcgaaaattcaaaagcaattaaagcatgcaggttttcagcacgtgacgttacgactatttcccacattgcgtcatgaaattttattagaaacggaaaaagctacagtttttcaagaaattgggcattggttaacggatttaacgaattaa

SEQ ID NO: 6831 - DNA, 1128 bp, Enterococcus faecalis
  CDS (1)...(1128)
atggagaggcggattagaatgacagaggcaattcattgtattggctgtggtgcgattatccaaacggaaaatcctcatgaattaggctatacaccaaaaacagctttcgaaaaaggaatggaaacaggggaagtttattgccaacgttgttttcgcttaagacattataatgacattcaagatgtccaattaacagacgatgactttttacgtttattgaatggtttaggaacagaagatgcactgattgtgaacgtagtggatatttttgactttaatggctctcttattccaggactgcatcgttttatcggagataatcctgtgttgttagttggcaataaagtggatattttgcctaaatcattaaaaaaacctaaaatggttcaatggatgagagaacgggcccatgaagcaggattacgccctgttgatgttttactaacaagtggcaagaaaccacaagaaatgcaagagttattagatacgatcgaaaaatatcgtgaaggccgagacgtttatgtcgtaggtgtgaccaatgttggaaaatcaacattaatcaatcaaatcattcaacaaacagtgggtgttcaagatgtgattacgacatcacaatttcctggaacaacgctagataaaattgaaattccattagacgatgggcacttcttaattgatacgccaggaattattcaccgtcatcaaatggcacattatctaggtaaaaaagacttgaaaattattgcaccgcaaaaagaaatcaaaccgaaagtttaccaattaaatgctgaacaaaccttgtttttaggtggcttggctcgctttgattatgtccaaggtgctaaaagttccttcattgcctacgtttccaatgacttaaatttacaccgaacaaaaacagcaaccgccgatgctttttatgaaaaacatgttggtggcttattgcagcctccacgtgccgatgaagtcgctgagtttcctgaattagtgcgctttgaattttccgtgaaagaaaaaacggatattgtgtttgctggtctaggttggattactgtcacagaacctggtgtagtcgctggttgggcgcctaaaggtgtcgatgttttacgtagaaaagcattaatttaa

SEQ ID NO: 6832 - DNA, 2001 bp, Enterococcus faecalis
  CDS (1)...(2001)
gtgaaaaacaggaacacaatgaaacgcttcaaatcaaaaaaattaaaaggagagaattttattatgtctattcacattacttttccagatggcgctgttaaaccgtttgattctggggttacaacatttgatgttgctaaaagtattagcaacagtttagccaaaaaagctttagctggtaaattcaatggtgttttaatcgatttagatcgtcctatcgcagaagatggttcgcttgaaatcgtgacacctgatcatgaagatgctttaggaattttacgtcattcatcagctcatttaatggctaatgccttacgccgtcttttccctaacattaaatttggcgtaggtcctgcgattgattctgggttctattatgatacagataatggagaatcccctgtgacagcggaagatttacctgcaattgaagccgaaatgatgaaaattgtgaaggaaaataacccaatcgttcgtaaagaaatctcacgtgcagaagcgttagaattatttgctgatgatccttacaaagttgaattaattacagatttaccagaagatgaaatcatcactgtctatgatcaaggcgattttgttgatttatgtcgtggtgttcacgtcccttcaacaggacggattcaagtctttaaactactttcagtagctggtgcttattggcgcggaaactctgacaatcatatgatgcaacggatttacggcactgccttttttgataaaaaagatttaaaagaatttatcaaaatgcgcgaggaagccaaagaacgtgaccaccgtaaattaggaaaagaattagatttatttatggtttcacaagaagttggttcagggttacctttctggttaccaaaaggcgcaaccattcgtcgtacaattgaacgttatattgtggacaaagaaattagcttaggttaccaacatgtgtatacaccaattatggcagatgtggaattatacaaaacatctggtcactgggatcattaccatgaagatatgttcccaccaatggatatgggcgatggcgaaatgctagtattacgtccaatgaactgtccacaccatatgatggtttataaaaatgacattcatagttaccgcgaattgccaattcgaatcgctgaattagggatgatgcaccgctatgaaaaatctggcgcattatcagggttacaacgcgttcgtgaaatgactttaaacgatggccatacttttgttcgtcctgaccaaattaaagacgaatttaaacgtactttggagttaatggtggcagtctatgctgactttaacattacggattatcgtttccgcttaagctatcgtgatccaaataatacagacaaatattttgatgatgatgcgatgtgggaaaaagcgcaagcgatgttaaaagctgccatggatgaattagaattagattactttgaagcagaaggcgaagctgccttttacggtccgaagttagatgttcaagtaaaaacagctttaggaatggaagaaacattatcaaccatccaattagacttcttattaccagaacgttttgacttaacttatgttggcgaagatggtgaaaatacacatcgcccagttgttatccaccgtggtattgtctcaacaatggaacgatttgtggcttacttaacagaagtttacaaaggcgctttccctacttggttagcaccaattcaagcaactattatcccagtttctgtagaagcgcattctgagtatgcttatgaaatcaaagaacgtttacaagcacaaggcttacgtgttgaagtcgatgatcgtaacgaaaaaatgggctacaaaattcgggcctctcaaacacaaaaagtaccttatcaattagtggtcggggacaaagaaatggaagatgcaacggtgaacgtccgtcgttatggaagcaaagaaacgtctgtcgaagatttatcaattttcattgacagcatggctgctgaagttcacaattacagccgttaa

SEQ ID NO: 6833 - DNA, 2139 bp, Enterococcus faecalis
  CDS (1)...(2139)
atgaagaaaaactcatttatagataaaataaaaaaaacagatgccgcagcaaagagtcaacgaggtagaaagccacatattccttttcgattgaacttattattttttgtgatattcactttatttgtttcattaattgttcgtttagggtatttacagattgtagaaggagaagagtttaacaaaaaaatcactgccaattcttcactacaaatcacgacaccatcccctcgaggacaaatttatgattcacaaggaaaagtcttggtttctaacaaagctaatttagcaatcacatacacacgaggaaaaaatattgaaggaaaagatattttaccgattgcgaataaagtcaacgaacttattaacgttccagttgatccaaacttaacggaccgtgataaaaaagattattggttagcgaatcctgaaaatttaaaagcagcccaagcccgtttaaccgatcaagataaagaagatgaaaaaggcaacaaaattacggacgaaggcacattatatgccaaagcagttgaaaaagtcacccctgaagaaattgcgtttgatgaccgaaccttacaagcagtgacgatttttaaacgaatgaatgccgcgtcacaaatgaacacggtcttcatcaagaatgaaggggtaacagaaggtgaaattgcgacaattggtgaacacacagcggaaatatctggtgtttcaacagggactgattggacgcgtgattattctcaaagtggtgcattacgtagcctgttgggtaccgtttcaactgaaaaacaaggattgccagccgaagaagtcgatgaatatttgaaaaaaggctatgcacgaaatgaccgtgttggaactagctatttagaaaaacaatatgaagacgttctacaaggtaaaaaagcaaaatcagaagtcgttttagacaataacggaaagattgtttcacaaaccccaatttccaaaggggaaaaaggctccaacttaaaattaacgattgattcaaatttccaaaacaaagttgatgaaattttacaacgaaactattcacaaatagtcaaaaccattggaccatactcagaaaatgcatatgtcgttgctatgaaccctcaaacaggtgctattttagcgatgtccggagttagtcatgatttacagacaggagaagtcacacctaatcctttagggcctattttaaactttgaggtacctggatctgttgtgaaagcaggtactttaacagctggttatgaggcgaaagtattacaaggaaatgatactctattagatgaaccaattattttagctggtacaaatccaaaagcttcttggtggaatagtggtggtcgtaatgcacaaatgcaattaactgctgagcaagcattagagtactcttctaatgcttacatgatgaaagttgtgtttaaactaatgggtgtaaattactatcctaatatggtctttccgtatgaaattggcgatgataaagttttcaaagagctaagaaatgcttatgctgaatatggaatggggattaagacaggcatcgatttacctggtgaaagtcctggatatgtaaataaagatttcaaagatcctgctgaagcgcctaaaggcggaaatctattagatttatcatttggacaatatgataactacacaccgttacaattagcacagtacgtttccactgtcgcaaataatggcatccgcgtgcaaccccatgtagtagaaggaatctatggcaatgatgaaaatggagctttaggaaaaattttaaaagaaatcgaaccgaaagttttgaataaagtgaatatttctgaagaccagataggaattcttcaacaaggtttctataatgtggtaaatggaactagtcaatttactacggcaccgggtttaaaatcagacaagttttcgattgctgctaaaacagggaccgccgaaacgcaagcaacggatgctaacggagttgttcatacaacggttaatagtaacttggtggcttatgcgccgtacgaaaaccctgaaattgcaattagcgttgttttaccacacttaaatgatgaagaatccaaaccaaaccaaacgattgccaaagaagttttagaagcgtatatggaaatgtacaaaaaataa

SEQ ID NO: 6834 - DNA, 528 bp, Enterococcus faecalis
  CDS (1)...(528)
atgataaaccaagttgtgttagttggacgtttaacgaaagatatagatttacgctacaccgcaagtggttctgcagttggaagctttactcttgctgtgaaccgtaactttacaaaccaaaacggcgaacgagaagcggattttatcaactgtgtaatttggcgtaagcctgctgaaacaatggctaattatgctcgtaaaggaacattattaggagttgttggcagaattcaaactcgtaattatgacaaccaacaaggccaacgtgtctatgtgactgaagttatttgcgagagtttccaattattagagccaaaaagcgccaatgagaatagaaatagcattcagacgtcacagaatgacggtacaagcgttcaaaacaatttcgagagtaattatgccacaaatcaaaataaaggcttaaatcagcaaaataacagccaacaaatgtcgtttggtggagatgtagatccgttcgcaggcgcaggtaattcaatcgacattagcgacgatgatctgccgttctag

SEQ ID NO: 6835 - DNA, 3096 bp, Enterococcus faecalis
  CDS (1)...(3096)
atgaaaagaggaaaacacatgaagaaaacaatacttattcttctatttggtttattgacggtggtgggtctaccaatggtgactgaagcggctgaaccagttgatgcaacagatgcaacaatttttggcgcgcaagcgatggtacctaatagcacagaggatcaaacagagaagttacagacattactgagtcagacagcaaaggaaggacgggcattatttttaccacagggaagttatgctttgtcaaaagatattacgatttcttcaaattatcaattaattggcgatacaacaggagccactattttacataatgctacaggtacaccgattcaactgaaagacactacgtacggaacgaaaaccaatgtacgacttcaaaatattgcttttgatggcatcaatgtgaccttgaaattgatgaatcaattaacgctagcaaacaatatcttctataatccattaaaaggatttgtggtcaatttaaatgcagacattggcgttaagatttcaggcaatattttcatgcgagacacagcacacatgcaacccaagattgattttaaccgagcgatttacattggtggttattcaacaccaagtcgcttccagtatatgtcagatgtagacatcgtggacaatctatttgggttaaaagtgacagaattagatgcaattaaaagtaccagtcgttcagatttagcagcgactattacacgtttgcaaacagccattgaagctggtgctatttcagtacctaatgaacaaaattatctatccaccggggttaattcttttaatatgctgaaggatgtaactgttcaacataattttttctattcaccttatgataatgaagacttgaatggtctggtgggagatcatgcaatttatttccgtggtgctcaaaacatcacggtggtggggaatcatttacgtggactacaaaatggtccagctggcggatttaaatttaaatcaggccgtaatattacgattatgaataattatttgcgaaatacaggtctcattatgtatggaacaccagagattggtttggcagaaacacaagcagagggagctatttcagaattatccaactggctagtggctaataacatttttgattggaagtattgggacaatcaatatgcaattggaatggaatacaatcgacatacaggaaataacaatgtgttcaatggcgtatttatcaacaatcagtttgttaactaccacaatattccgcaaaaccgacgtcgggaattgttaatcgctagtggcggtggtttccgaccagaaacgagttttgtgaaagacaatactcgagatgatggccttaaaaacggccaattattggtagaaaattggacagaggccgactatcgcttaatgccagcaacatgggaatcattaatttcaccaacgctttatgagcaatataaaaatacgccaattccggttagaaatactttagcaacccctgtggctacaacgattgtgcaaggacaatcaatcgatccgcagcaactggttgcaaatacaaatgacgcggatgaagcagtcccagccgctaaaatcgtcaatccagaggtcttaaatgaaatcggccaacaaaaagtgactgttcaattaacttatgaaacagggtcattggtaacagtgaacgtaccggtgacggtagaggaccctgcaaaaaagcttgatttgtcccagctacaaaccgtttatgcttcgattggtgaagcaaaccaatatacagtttactcttggcagctattcactgccattgggcctaaaacgattgttccttcctattatcagcaggcgacacaattgttagcagaaggtcaggtgagtggggacaaaactcaagaacaagtggatcagttaacaagtaatttgcaatctgcaatgaaagtattagtcaaaaaagccgatatcacgctagagcgtgcagaagcagaaaatgaactggcaagcgtccataaattagacgaatctgtatataccacagactcttggcaagccatgcaagaagccttaatagatacaacaactggcgaaggaagctctaagcagttacaacaactgcttgcttggtcagatgaagaattattagagccaatacttggtggctttaaaacgcctgcagatgcacaaaagcgtattaaccaattaacacaaaccataaaaacggcgttacttctgttagttgaaaaatcaacagagacaactagtaacacaagcgaaagcagcacctcaagcacgacaagtgaaagcagtagtaccagcgaaagcagcacctcaagcacgacaaatgaaagcagtagtaccagcgaaagcagcacctcaagcacgacaaatgaaagcagtagtaccagcgaaagcagcacgccaagcacaacaagtgaaagcagtagtaccagcgaaagcagcacgccaagcacaacaagtgaaagcagtagtaccagcgaaagcagcacctcaagcacgacaaatgaaagcagtagtaccagcgaaagcagcacgccaagcacaacaagtgaaagcagtagtaccagcgaaagcagcacgccaagcacgacaagtgagagcagtagtaccagcgaaagtagtacctcaagtacgacaagtgaaacaagcaatacaaatgaaagcaacacaccaagtacaaccagtaaaaccagtagtaccagcgaaagtagtgcttcaagtacgaccagcgcaaccaacagtacaagtgagagtagcaccccaagcactttaaacgaaaacagtcaaagcaaaggccagaattctgtcatttacgcggtagagtctaatcaagatcctaatgacgctcaaagtaattcaaagccctctgccaaggctagtcaaacaaaggaatcagtagcagaaaaccaagcaactaaacagatacagacaaataaagaatcgtcaggaacagtcaaaaaagcggataatacgactaaaattgccaagaaaaaattccccaaaacaggggaacaatcttcagcagttgggagcttcctaggcctgagctttttatcgttagccatagcaacctattgttttaaagtgaaaagataa

SEQ ID NO: 6836 - DNA, 894 bp, Enterococcus faecalis
  CDS (1)...(894)
atgacagaaccaaacttaaaagacccaagaaagttattttatagtgatggatttccgcaacaagatcaagaaactcccgcattacaggacaaaatggtccctaaaccagattgtggggaagacagctatgtcggaaatcacaaattagaaaatcgtcgggtattaattacaggcggtgattctgggattggacgagctgcggcgattgcttttgctcgcgaaggcgcagatatcgccttacattttttcccaggtgaagaaaaagacgccgaagaagtggcgcactatatacgagaagctggccgaaaagtcgttcttttgccagcagatttaagagataaacaggcacctgaagaattggttgcacaagctcgtgaatctttaggcggcttggataccctcgttttaaatgcagcccaacaaatttcctgtgctgctattgaagaattgccaatggaacaagtgatagacactttccatgtcaatattattgcgatgtttggcattgtcaaagcagcagtgcctcacttacctgccggaagtagcatcgtgacaacgacttccgtccaagcctttaatcccagtgagcatttgttggattatgcagcaacgaaggcatcaattgccaactttaccgttggtttagcaaaacaactggcaccaaaaggtattcgggtaaatggcgtggctccaggaccaatctggacaccgttacagttagatcatggacaaccaattgaagagttgccagaatttgggcaacattctttactggaacgtgcgggtcagcctgctgaattagcccctgtttatgttttcttggcgtccaatgatgcaagttatgttacggctcaagtttatggcgtaactggtggagaagcaattaatctttag

SEQ ID NO: 6837 - DNA, 966 bp, Enterococcus faecalis
  CDS (1)...(966)
atggacattatttcttatgagagggttattcaacaattgtcgttttccgaagcaattcaagtgatgaaacgttgctttgcagagttgcaaaaaggaaaaatttcgcaaagtgagcgccatgtagaggttttaccagatggggaaaatcagaatctttttgcattaatgcctgcttacttaggaaaaaatcgcttttttggagcaaaaatcattacagcttttccagaaaatccacaaaaaaatttggcctcgcatcttggtcaaattttattgtttgatagttctactggaagaccagtcgcgatgatggacgccaatgcgattacgtggcttcgcacggcagctgtttctgctttggcaaccgattatttagcagctccaaaggcaaaaagtatcgctttgattggtgcaggtcaacaagcttcatctcatctcgcagcgctacaaagcgttcgggcgattgaaaaggtttttatatatgaccgcacagcagaacgcgcacgaaaattaatcgctaagcaacagcacaattaccccgaatgtacctttattggttgttcttctgtccaagaagccgtccaggaagcggaaattatctgtacactaacttccagtcaggacgcatttttagaagaaaaagacgttttgccgaatgcccatatcaatgcgattggcacattcacgccgacttccagagaattaacaagcgaccttgttaaaaacagtcaagtgtttgtagatgagtacgcggctgcattaaaagaaagcggggatcttttaattccgatttcagaaggtgccttttcagctgaaaaaattgtaggttctctcggcgaattagtcactggcaaagttaaactaaaggcggagcagaaaggccgcacgatttttgatgcggttggcttagcagttgaggatttgtgttgcgcggaatacatttatcaaaaaatacaaggagagaaataa

SEQ ID NO: 6838 - DNA, 987 bp, Enterococcus faecalis
  CDS (1)...(987)
atgaaattaagtatcttagatcaattaacggttcctaaaaatcaatcagcaagcgacacattacaagaagccaaagagctcgctcaattagcggaaaaacttggttacacaagaatttggtatgccgaacatcacggttcagacgcctttgccagtgcaacgccagaaattttagttgcacatattgctagtgccaccgaaaaaattcgtgttggcgcgggtggcatcatgaccatgcattatgcgccatttaaagtcgcagaaacgtttaaaacattagcagctttatatcctgatcgaatcgatttaggcatgggccgctcgcctggcggcagccctttgactacgttagcgttaaataatggtcagccaccacagctagaccaatttgataaattacctgaaattttactctttttaagagaggaatttcctgaagatcatttatattctaaaatttcagctgttccgcgggaagttctattaccacaaccctggttactaggtgctagcaaagaaagcgcacgttcagctggtgaatatggcattaatttttcctttgcgcagtttattcatggacatttgcccaaagaagtattgtccgcatattacaagcatttccgaccagtaactgaacaacaagagccgcaagtgagcgctgcgtatttcactttcgccgccgacacgaaagaagaagcagaataccatgcggctagtttcgagcattatatctttgccaccgaacatgggcttccaaataaatttttatcgccagaagaagccctagctttcccttacagtgaaatggacaaactggttttagaacaaaataaacaacgctttgtcattggcagtagccaagaagttgcggagtttttccaccaacaagaagaactagggttgacagaagcaatgctaatcaccccaggttatgacaaacaaacgcgctttcaatcgtttgaacgcctagcaaaagaattattatag

SEQ ID NO: 6839 - DNA, 4002 bp, Enterococcus faecalis
  CDS (1)...(4002)
gtgaaaaagttgagctttaaaaaagtgaagtggggcatgcattttttaatggctgttgcgttgatagcgccaagcgttactagtacggcatatgcagtagaaacaacgagtcaacaaagttcagaagcagtaacaagtaccaccgattcaagtagaaaacaagaaccagtcattacacaggaaacaacagacatcaaacaagaagcaccaaatcaggctacgagtgacagtgtcaagcagtcacaagaaaccacagcaccaacagagacgacgaatttagaaacgtcaaccgctgaaaaagaagaaacgagcacgccgcaaaaaataacaattttaggtacgtcagatgttcatggtcaattatggaattggtcttatgaagatgataaagaactaccagttggtttgtcccaagtaagtacagtcgtcaaccaagtccgggcgcaaaacccagcaggcaccgttttaattgataatggcgacaatattcaaggcactattttaacagatgacttgtataataaagcgcctttagtgaatgaaaagacccatccaatgattaccgccatgaatgtgatgaagtatgatgcaatggttttgggaaatcatgagtttaattttggtttaccgttaatccaaaaaattcaacaagaagccacttttccaatcttgtctgcgaatacctacaataaggaagatggtcgtcgttttgttaaagggactaccacgaaggaacttgattttaatcaagatgggcagccagatttaaaagttgggattatcggcttaacaattccgcacattcctttgtgggatgaccctcgtgttacttcgcttaattttttacctttgaaagaagaagcagaaaaagcagttactgagttgaaaactaacgatcaggctgacattattgttgcttcgattcatgcgggacaacaaaatagtgatccggctgccagtgccgaccaagtaattgaaaatgtcgcggatattgatgcgtatattctgggtcatgaccacctttcttttaccaagcaaggagcagcgccgaatggaaaaactgtaccggtagggggacctaaagatacagggacagaagttgttaagattgatctttcagttgctaaaaatgccgataagtgggaagtgcaagaaggtacagcaacgattgtaccaacaacgaatgttccagcagatgaagcagttaaggcagcgacaaaagaataccatgaaaaaacgcgagcgtttattcaggaggagatcggcacagcaacagctgattttttaccaaaacaagaaattaaaggaattcccgaagcgcaattacaaccaacagcgatgatttctttaattaataacgttcaaaaagaagtgacaggtgcacaattaagtgcggcagcgctgtttaaatacgacagtaaattacctgcggggaagatttcctatgccacgatttttgatatctacaaatacccgaataccttagtgagtgttcctattaacggtgaaaacttactgaagtatttagaaaaacaaggggcgtactataaccaaacacagccagatgatttgaccattagttttaatccaaacattcgtgtatataactatgacatgatttctggagtggactacaagattgacatttcaaaaccagtgggtgaacgaattgtagatgcgaaaattgacggacaaccgttggatcctgccaaagaatatacgattgctatgaataattatcgttacggcggtttagctagccaagggattcaagtaggggaacctattaaaaattctgatccagaaaccttacgaggaatgattgttgattatattaagaaaaaaggaactcttgatccagaacaagaaatcgaacgaaattggtcaattattgggacaaattttgatgaaaaatggcgtgccaaagcaatcgaattagtgaatgacggcactcttcaaattccgacttctcctgatggacgtacaccaaacgccgctgctattacgaaacaagatgtccgtaatgcgggctttgatttagataatgcatataccattatgcacacaaatgacgttcatggccgactagaagcagggaaaggcgaattaggtatggcgcgtctaaaaacctttaaagaccaagaaaacccaaccttgatggtggatgcaggggatgttttccaaggattaccaatctccaatttctccaaaggcgcggatatggccaaagcaatgaatgaagttggttatgatgccatggcggtgggaaatcacgagtttgattttggtttagagattgcactaggttataaagaccaactgaattttccgattttatctagtaatacgtattacaaagatggcagtggacgggtttttgatccgtatacaatcgtagaaaaagccgggaaaaagtttgccattgtaggtgtgacgaccccagaaacagcaacgaaaacacacccgaaaaacgtggagaaggtgacatttaaagacccgattccagaagtagaagcagtgattaatgaaattaaagagaagtacgcggatattcaagctttcgtggttactgggcatttaggcgtagatgaaacgacgccgcatatctggcgtggtgatacgctagcagaaacccttagtcaaacatatcctgagttagatattaatgtgattgatggacattcgcatacagccgtcgaaagtggcaaacgttatggcaaagtgatctatgctcaaacaggtaattatttaaataatgttggaattgtcacagcaccagagaatgaaccaactaagaaaacagcaaaattgattccagcagaagagttgctaggattgccagaaaacccggcagttaaagccatcgttgatgaagcacgtacgaattttaacgctgaaaatgaaaaagtaattgtcgattatattccattcacattggatggacaacgagaaaatgtgcgcacacgagagaccaacttagggaatttgattggtgatgcgattatgtcatatggccaagacgcgtttagccaacctgctgattttgcagtaactaatggtggcggcattcgcgctgatattaaacaagggccaattaaagttggggatgtcattgctgtgttaccttttggcaatagcattgcgcaaattcaagtaaccggcgcccaagttaaagaaatgtttgaaatgtctgttcgttcgattccacaaaaagatgagaatggcacaattttactagatgatgctggccaaccaaaacttggcgcaaatggtggtttcctacatgtttcaagctccattcgtatccactatgattccacaaaaccaggtactcgcttggctagtgacgaaggcaatgaaacaggacaaacgattgtcggtagtcgcgtattaggaatagaaattaaaaatcggcaaacacaaaagtttgaaccattggatgagaagaaacaataccggatggctaccaatgatttcttagctgctggtggtgatggttacgatatgctaggtggtgaacgagaagaagggatttcactagattctgtcttaattgaatacttgaaaagtgcaaccagcttgcggttgtatcgtgcagcaacgacgattgatttagcacaatataaagaaccattcccaggcgaacgaattgtttctatttcggaagaagcttacaaagagttaatcggtggaggagagacgccaaaaccagatccaaaaccagatccaaaaccagatccaaaaccagatccaaaaccagatccaaaaccagatccaaaaccagacccgaaaccaacaccagaaacaccagtagcaaccaataaacaaaaccaagcgggagcaagacagagcaatccatccgtaacagagaagaaaaagtatggcggctttttacctaaaacgggtacagaaacagaaacgcttgcattatatggtttactgttcgttggactttcttcttctggctggtatatttataaacgacgtaacaaagctagttag

SEQ ID NO: 6840 - DNA, 1386 bp, Enterococcus faecalis
  CDS (1)...(1386)
gtggcaaacgtggaaaatagatacgcaattattttagcagctggtaaaggaacacgcatgaaatctaaactttataaagtattgcatccagttgctggtaaaccaatggtcgaacatattttagatcaagtagaacaaacagaaccaacagaaatcgtgacaatcgttggacatggggcggaaatgattaaaagccatttaggcgaacgtagtcaatatgccttacaagctgaacaattgggaactgggcatgcagtcatgcaagcacaagagttattaggtggtaaacaaggaacaacattagttattacaggggatacgccgttattaactgcggaaaccttgaaaaatttattcgattaccatcaaggtaagaatgcaagtgcgactattttaacagcgcatgcagaagacccaacaggctatggtcgaattattcgtgatcatgtgggcattgttgaacgaatcgtggaacaaaaagatgccagtgaagaagaagcacgtgttcaagaaattaatacaggaaccttctgttttgataatgaatcattgtttgaagcgttagcgaaaacagatacaaacaatacacaaggggaatactatttaacagatatcattgaaattttgaaaaaagaaggcaaagctgtcgctgcttaccaaatggcagactttgacgaagcaatgggtgtaaatgatcgtgttgctttatccactgctaataaaattatgcatcgtcgtttaaatgaaatgcatatgcgaaatggtgttacatttattgatccagacacaacgtatattgatgaaggcgtggtaattggttcagacacagtcattgaagcgggagtcactatcaaaggaaaaacagtgattggcgaagattgcttgattggcgcacattcagaaatcgttgatagtcatatcggcaatcaagtggttgttaaacagtctgtgattgaagaaagtgtggttcgcgagggggccgatgtgggtccgtatgcacatttacgtcctaaagcagatgtgggggcaaacgtacacattggtaacttcgtggaagtaaaaaatgcaacaatcgatgaaggaacaaaagtgggccatttaacatacgttggtgatgcaacattaggcaaagatattaatgtcggttgcggcgttgtttttgttaattatgatggcaaaaataaacaccaaacagtcgtgggtgatcacgcgtttattggctctgcaacgaacattgttgcgccagtcacgattggtgatcatgcggtgactgctgctggttcaaccatcacagaagatgtcccttcagaagatttggcgattgcccgggcacgtcaagtgaataaagaaggctatgctaaaaagttaccttacatgaaggattaa

SEQ ID NO: 6841 - DNA, 531 bp, Enterococcus faecalis
  CDS (1)...(531)
atgaaaaaacaattgttaatcgttgatggctataatatgattggtgcttggccagaattggtccagttgaaaaagcaagagcgtttagaggatgcgcgtgaactgcttcttagtcgtctgtccaattatgccaaatatgaagggttggaaatcattgtggtctttgatgcccaattagtcccaggtattcagcaaacgtacaaaaagtaccttttgaccgtggttttcaccaaagaagatgaaacagcagatagttatattgaacgtctagctggtgaaaaaaatgatcgtttaacgcaagtaacagtcgcaacgagtgatttggctgaacaatgggtggtcttttcacaaggtgcattgcggacttcggccaatgaactttacaaagctgtccagaaaacagaaaagacgattgccattcatgcaacggatatccatttccagcaatttcgtcgaaattctccatggaacgtggagcagttatcaaaactttctgagaagctagaagaattgtctcaaaaaaaagattaa

SEQ ID NO: 6842 - DNA, 540 bp, Enterococcus faecalis
  CDS (1)...(540)
atgagttggttgaaacgtagcgtcgcagctgttaaaagaaacgatcctgcagcgcggaccacactagaagttcttttaacgtatcctggcttgcacgccctgttttggcatcgcttgtctcatttcttatataggcatcagttgtttttgttggcgaagattcatgcacaattttggcgtttcataacgggcgtagaaattcatcctggggccacaattggtgcgggggtttttatcgatcacggcatgggcattgtgattggggaaaccgcggaaatagaagaagatgttgttttgtttcacggagtgacgttaggtgggaccggtcgtgatacgggtaaacgccatccaacagtgaaaaaaggagcgatgatttcggcacgagctcaaattttagggccagttgtgattggtgaacgttcaaaaattggggcgggtgctgttgttatttcagacatcccagcagatgctacagctgtgggtgttcctgcgaaagtcgttcgtctaaatggaagaaaggtggaaaaagggcatgattaa

SEQ ID NO: 6843 - DNA, 1476 bp, Enterococcus faecalis
  CDS (1)...(1476)
atggaaagaggaatgaacatgacgaaagttcgtgtgcgttacgcaccaagtccaactggacacttgcacattgggaatgcaagaacagcattatttaactacttatttgcccgccacaatgacggagaatttatcattcgtatcgaggataccgaccaaaaacggaacatcgaagacggcgagaaaagtcagttggaaaacttagcatggttagggatggaatgggatgaatcacctgctcatccgggagaatatggtccatatcgtcaatcagaacgtaaagaaatttaccaaccattgattgatcaattattaagtagcaatcgtgcgtataagtgttattgtacgccagaagaattagaagcagaacgtgaagcacaacaagctcgtggggaaatgcctcactacgcaggcacttgtgcgaatttaacaccttctgaacaagcagccaaagaagcggctggtctagaaccagtgattcgtttccgtgtgccacgtaatacagaatacaaatttgatgacatcgtgaaaggtgaaattacttttgagtcagataacattggtggcgattttgtcatccaaaaacgcgatgggatgccaacgtataactttgccgttgcagtagatgatcacttaatgaaaatttctcacgttttacgtggcgatgatcacattgcgaacacaccaaaacaattaatgatttacgaagcgtttgaatggacaccacctgtctttggccatatgaccttaatcattaattcagaaactggcaaaaaattgagcaaacgtgatgaaacaattttacaatttattgaacaataccgtgaattaggttacttaccagaagccatgttcaactttattgctttactaggatggtctcctgttggcgaagaagaaatcttctcacaagaagacttgattaaattgtttgatgaacaacgcttaagcaagtcaccagcggcctttgatgcgaaaaaattagaatggattaacaatcaatacatgaaacaaatggacttaggtgaactaacagatatgtgtattccttatttagtcgctgacggtcgtgttgaagaaaatccatctcctgaaaaaatcgaatggttaaaacaattagttagcttgtatcaaccacaaatgagttatgcagctgaaattgtggaactatcaaacttgttctttaatgaacatccagttttagatgatgctgcgaaagaattcttgcaaggagaaacagtgccaactgtgttacatgcgtttaaagaacaattagaagccttggacgttttcgatgtcccaagtattaaagcagcgattaaagccgtccaaaaagaaaccggcgttaaaggcaaaaacttgtttatgccaattcgaattgctgtttctggacaaatgcatggtcctgaattaggcgaaaccatcgaattattaggcaaagaaaaagcattagatcatttaaataaagtgttataa

SEQ ID NO: 6844 - DNA, 1371 bp, Enterococcus faecalis
  CDS (1)...(1371)
atggcaaaaaaagcaaaagttcaatttgaatgtcaaagctgtgggtatgtgtctccaaaatatctcggccgctgtcctaattgcggacaatggaattcgatggtggaagaggttattcaagatacttctgatcgtcgtgctagagtaagtttgactggtaaaaagacacaaccacaacggctatctgaagtcgtacctaaaaaagagccgcgtgtaaaaactgaattagtggagctgaatcgggttttaggtggtggcgttgttccaggttcgttagttttaatcggtggcgatcccggaattggtaagtcaacattgctcttacaagtatcgcaacaattagcagccacaggtggcacggttttatatgtttctggtgaagaaagtgctgagcaaattaaattacgagcggagcgtctaggcaccgtcaacgagacattttacttatacgcagaaacagatatgcacgaaatatcacgagccattgaaaaattagaaccagactatgtcattattgactcgattcaaacaatgacgcagccagatgttaccagcgttgctggtagtgtcagtcaagtccgagaaacaactgccgaattattgaaactggcaaaaacgaatgggattgccatttttattgtcggacacgtaacgaaggaagggtctatcgcagggccacggatgttggaacatatggtagacacggttctttattttgaaggagataagcatcacacctttagaatcttacgggctgtcaaaaatcggtttggctcaacgaatgagattggtatttttgaaatgcagacacatggattggttgaagttatgaatccttctcaggtctttttagaagaacgtttagaaggagccaccggatcttcaattgtggtagcaatggaaggttcacgccccattttggtggaaatccaagcgctagttaccccaacgatgtttggcaatgccaagcgaacgaccaccgggttggactttaatcgcgtttctttaatcatggcggttttagaaaaacgggcaggccttttattacaaaaccaggatgcgtatctaaaagcggctggtggagtcaaaattaatgaaccagctattgatttagcgttagcaatcagtattgcttctagctataaagaaaaaggaacctcatcttcggaatgtttcattggtgagattggtttaactggtgaaatccgccgcgtgaatagtattgaacaacgagtgcgtgaagcgcaaaaactaggctttacaaaagtctatgtccctaaaaataaccttggtggctgggaagcgcctgaagggattgaaattattggcgtttcaacaattggtgaaacgttaagaaaagtttttaaatga

SEQ ID NO: 6845 - DNA, 1575 bp, Enterococcus faecalis
  CDS (1)...(1575)
gtgaatattaaatttactcctggcaactgttacggcttaatcggcgcaaacggtgcaggaaaatcaacgtttcttaaaattttatcaggtgagattcaaccgacaactggcgtggtttcaatgggtcctaatgagcgactagcaacgctgaaacaaaatcactttgactacgaagactacactgttttagaaactgtaattatgggacataaacgtctttacgaagtaatgaaagaaaaagatgctatctatatgaaagaagatttttcagatgaagatgggattcgtgccgcagaactagaaggcgaatttgctgaacttgacggttgggaagcagaacctgaagcagctgttttactccaagggctaaacattccagaagaattacatgatcaaaaaatgagcgaattaacagctggtcaaaaagtcaaagtattattagctcaatctctttttggtaaaccagatgtcttactattagacgagccgacaaatggtttagacacccgctcaatcaattggttagaagaatttttaatcaactttgaaaataccgttatcgtggtttcccatgaccgtcatttcctaaacaaagtctgcactcacatggcagatttagactttagtaaaatcaaactttacgttggtaactatgatttctggttggaatcaagccaactagcgacaaaattgcaagcacaatctaatgccaaaaaagaagaacaaatcaaagaattacaagactttatcgctcgttttagcgccaatgcctcaaaatcaaaacaagcaacgtctcgtaaaaaaatgttagataaaattaccttagatgacattcaaccttcctctcgtcgttatccattcgttggttttacaccagaacgtgaaatcggcaatgacttattacaagttgaaaatgtctctgtaacgattgatggcaaaaaaatcttagataatatctcgttcaacttaacaaaagatgataaagtggcattcatcgctgactcagatattacaacgactacgttattcaaagtgattatgggcgaaattactcccgatacaggttctgttcgttggggcgttacaactagccaagcttatttaccaaaagacaacagcaaagactttgaagagccattaaccattttagattggttacgtcaatttgctggtaaagaagaagatgacaatacgttcttacgtagtttcttaggtcggatgttattctctggtgaagaggtactaaaaccagtcaatgttctttccggaggcgaaaaagtgcgtgtcatgctttcaaaattaatgctttccaaagccaatgtcttagttttagatgatccaacgaaccacttagacttagaatcaatcactgcattaaatgatgggttgatggctttcactggttcaattctttttgcttcacatgaccaccaatttatccaaacattagcgaaccgaattattgctgtttctgataaaggggtcattgatcgggcagaaacaacctatgatgaattcttggaaaacccagaaattcaaaaacaaatggacgttttattcagttcagattattaa

SEQ ID NO: 6846 - DNA, 1416 bp, Enterococcus faecalis
  CDS (1)...(1416)
atgttcgtatttttgacagaaacgcttttgattgtgaaagaatattcgatttttacccttgaaagggactggttttactggtacaatgattcaggacaaaaaaattatgaacgaggtgttcgaatgtcatcagtagtagttgttggaacgcaatggggcgatgaaggtaaaggaaaaattacagactttctaagtgaaaacgcagaagtgatcgctcgttaccaaggcggagataacgccggacataccattaaattcgacggcgtaacgtataaattacatttaattccttcagggattttctataaagaaaaaattagtgtaattggtaacggcgtagttgtgaatccaaaatctttagtaaaagaattagcttatttaaaagaaaataatgttgccactgataatttacgtatttcagatcgtgcccatgtcatcttgccgtatcatattaaattggatcaattgcaagaagatgcgaaaggtgaaaacaagattgggacaacgattaaaggaattggcccagcctacatggataaagcagcacgggtgggaatccgtatcgctgatttattggataaagaaatttttgcggaacgtttgcaaattaacttagaagaaaaaaatcgtcaattcgttaaaatgtttgatagcgaagccattgaatttgatgatatttttgaagaatactatgaatacggacaacaaattaaacaatatgttacagatacttcggttattttaaacgatgcattagatgctggaaaacgggttttatttgaaggggcacaaggtgtcatgttggatatcgatcaaggaacctatccatttgttacttcctctaatccagtagctggtggcgtaactatcggtagtggcgttggtccatcaaaaattaataaagtggttggtgtctgcaaagcgtacacttcacgtgtcggtgacggcccattcccaacagaattatttgatgaaacaggagaaaccattcgtcgtgtcggtaaagaatacggaacaacaacaggacgtccgcgtcgtgtcggttggtttgattcagtagtcatgcgtcattcaaaacgtgtatcagggattacaaacttgtcattaaactcgattgacgtgttaagtggtttagaaacggtgaaaatttgtacagcttatgaacttgatggtgaattaatttatcattatccagcaagcttgaaagaattaagccgctgtaaaccagtttatgaagaattaccaggttggtctgaagatatcactggttgcaaaactttagccgatttaccagctaatgctcgtaactatgtgcatcggatttcagaattagttggtgtgcgcatttcaacattctctgtaggtccagaccgtaaccaaacgaacgttttagaaagcgtttgggcacaaatttaa

SEQ ID NO: 6847 - DNA, 1017 bp, Enterococcus faecalis
  CDS (1)...(1017)
atgatgaaagccgctttaattcataaatacgaacaaaaagaattagcaatcgaggaggtgcccttacccaccattcatgacaatgatgttttggtcaaaattatcgctgccagtatcaacccgattgatttaaaaacaaaagatggcaaagtaaagatgcttttaaattatcaaatgccactgattttaggcagtgattttgctgggattgttgtctctgttggaaaaaaagttcaaaattttaggctgggcgatgcagtttacggacgagtacccaaaaatcgcgtgggaacttttgctgaatatattgctgtggatcaagcagctgtagctatgaagcctaaaaatttaacgtttgaagaagctgcggccattccgttagtcggtttgacaagttatcaagcgctacatgatattatgaatgtacagccaggccagaaagtcctgattcaagcaggttcaggagggattggaaccattgcgattcaattagcaaaactagcgggcgcttacgttgccaccacaacgagtagtaaaaataaagaatgggttcaagcgttgggagcagatgaagtgattgactatcggacacaaaattttgaagaagttttatccgactacgattatgtgtttgatacaatgggggggacaatcttagaaaaagctttttcagtggttaaacctcagggaaaagttgttacattgtcaggcattcccaacgaacgttttgctaaagagtatggcttgccgctttggaaacaatgggcctttaaaatagccacccgcaagattcatcgattggagcaagccacagatgttagttatcattttttgtttatgcatccagatggcgagcaattagctttactcactgagttcattgaacagggaaaattacagccgataattgaccgagtcataccttttagccaaattcaagaagcggtggattattcactgacaggacgagtacaagggaaaattgttgtgaaaatcgccgatgttgatcacgactaa

SEQ ID NO: 6848 - DNA, 1383 bp, Enterococcus faecalis
  CDS (1)...(1383)
gtgggagagaacaaaatgaatgaattattgcaagatagggtaccgccacaaaatattgaagcggaacaagccgttttaggttctattttcttagatgcagatgtgctaatagaagcgatggaatatgtggaacctaaagatttctatcgtcgtagtcatcagttgattttccaaacgatgatgaccttaagcgaccgaaatgaagcgattgatgtggtaacaatcaaagatcgcctagaacaagagaatttgttagaagatgttggtggactaagttatctgtcagatttagctttagctgtgccgacagctgccaatgtcatttattatgcaaaaattgttgaacaaaaatcgttgctgcgcaacttaatccaaaccgctacagagattgtaactaaaggctttgagcaaggtgaagatgttgaatctattttggatgatgcagaacgaagcattttagaagtctccgaaaagcggaatcgcagtggctttttatcaatttcagatgttctaaatacaactattgcgaatattgaccaattataccaaaatgatgaagagattactggtttacctacaggctatcaagcattggataaaatgactgctggcttgcaagcggaagagctaattattctagcggcccgtccagcggtagggaaaaccgcttttgcattaaatattgcccaaaatgtcggcaccaaaacagataaagctgtcgctatttttagtttagaaatgggggcagaatcattagtgaaccggatgctttgtgcagaaggatccattgaggccagccatttaagaacagggcaattatctgaagaagaatggcaaaacttaattattgcgatgggtagtttgtcccgtgcgaatatctatattgatgacacaccagggattaaaattaccgaaattcgtgcgaaatgtcgtaaattagcacaagaaaaaggcaacttaggtctaattttgatcgactacctacaattgattgaaggaactggaaaagagaaccgccaacaggaggtttctgatatttcacgtcaattaaaaaaattagcgaaagaattaaaagtcccggttatcgctttgtcacagctttctcgtggcgtggaacaacgtcaagataaacgtcctgtgttaagtgatattcgtgaatcaggttccattgagcaagatgccgatatcgttgcctttctttatcgtgatgattactacgatcgtggtgaaggagaagacggtgatcatgagccaccagaagttgacaatgttgtagaagtcatcattgagaaaaaccgtagtggtgcgcgtggaacggtcgaattacttttcattaaagaatataataaattttcttcgctttcgccgaggacagaattttaa

SEQ ID NO: 6849 - DNA, 462 bp, Enterococcus faecalis
  CDS (1)...(462)
gtgaaggaaatgaaagtcatttttttacaagacgttaaaggaaaaggaaaaaaaggggacgtaaaagaagtgccaactggttacgcccaaaactttttaattaaaaatggttatgcgaaagaagccaataaagggagcatgagtgcattagcgggtcaaaagaaagcccaagaaaaacatgaagcagaagttttagcacaagcaaaagaaatgcaagcctttttagaagatgaaaagactgttgtagagatcaaggcaaaagctggagaagacagccgtttatttggctcaattccttcaaaacaaattgcagaagccttaaacaaacaatacaatgtaaaattggataaacgcaaaatcgaattagccaacccaattcgttctctaggttacactaacgtaccagtcaaactacatcatgaagttacagcgaaaattaaggttcatgtcgtagcggaataa

SEQ ID NO: 6850 - DNA, 1977 bp, Enterococcus faecalis
  CDS (1)...(1977)
atgcaaaagaagagaattcaaaaaaacggtttcttaattgttgtgggtcttctcttagtagaatttctcctctatttcttactaacaaataaatggctgctattggcggtaattatcgcattagatatctttctcttagtggttattcggctgttgattagagatgtagaaattacgaacgtagaaaagattcaagaagcaagttccattgctgaacaatcgttggattatgttgtaaatgaagtacctgtgggaattattacgtataacggggaaacacgcgcggtagaatggcttaatccttatgctgcttctatttttaataaagacaatcagctaacgttaaccgctagccaagtgacgtcttatttagaattagcagaacgaaaccaagatatttttacgattgacgaaaatacctatcgctttagcgtcaataaagaacaacatacaattacttttgaagatatcactaaagaaagtaatttgtatcaagaaaaagtcgaaatgcaaacggctattggcattgtgtctgtcgataattatgatgatgtcaccgatacaatggatgagaaagaaatttcttatttgaatagtttcattacgacgatggtttctgattggatggaccaatacaaagttttttataagcgaatcaacgcagaacgttattttttcattgcccaatgggaagatattcaaaaaatgatggacgaaaaattttctattttggatacgatccgtaaggaatcagctaaccatgaagtagccattacgttaagcatggggattgcttatggggggccaaccttagatcaaaccgggaccacggctcaaacgaacctagatacagctttagtacgtggcggcgatcaagtggttgtaaaagaagccaaagatgaagcgaagccgttattttttggtggaaaaacggcagtaacgacgaaacgttcccaagtacgttctcgcgcaatgagcatggcaattaagggaattattgcggaatcagctgacatctatattatgggccatcgttatccagatatggatgcgttaggttcagcatttggtgttgctcgtttagcctcgtttaataatcgaaaagcgtggattgttttagatgaaaatgaaatcattcccgatgtcaaaagagtgttagaggcgattaaagagtacccagaattagaagagcgcattattagtcctaaagaggccatgaagcgcaagaaagaaagtagcttattagttatggtagattaccataaaccgtctctatcgatctcacaagagctctatgagcgttttgataaagtagtaatcattgatcaccatcgacgaggagacgaatttccagcaaaacccttgctttcttatattgaatcttctgcctcttctgcttcagaattagtcacagaattgatcgaataccaaagtaatagcgcaaataaactgcaggcctttgaagcaaccatgatgttggcgggaattgtggttgatacgaaaagtttcaatacacgaacgacggcgcgaacatttgatgtggctagttatttacgaacttgtggagcagactcatctttagtacaatatctattaagttctgatcttacaagctatctggaaatgaacaacttaatctctaaaggccaaaaggtcacaaaagataccgtcgttgttgcagtgagtgaagacaaagaatatgatagtgtcacagctgccaaaacagcggacacattactttctatggcagggattaatgcagcatttgtcattaccaagcggacggatcaacagattggcattagtgctcggagtaatggttcaattaatgtccaaattattatggaaaatttaggtggtggcggtcactttactaatgcggcagtacaattatcaaacgtaacagtagcagaagtaaaagagcaactacttgatgtaattcgtcaaaatattaatgaaatgtatgaacaggagtga

SEQ ID NO: 6851 - DNA, 240 bp, Enterococcus faecalis
  CDS (1)...(240)
atggcacaacaaagaagaggcggacgtaaacgtcggaaagtcgactacatcgcagcaaaccacatcgaatacatcgactataaagatactgaattgttaaaacgattcatttcagaacgtggcaaaattttaccacgtcgtgttacaggtactggcgctaaaaaccaacgtaaattaacgattgctattaaacgcgcacgtatcatgggattattaccattcgttagtgacgaacaataa

SEQ ID NO: 6852 - DNA, 567 bp, Enterococcus faecalis
  CDS (1)...(567)
atgattaataacgttgtattagtcggaagattgacaaaagatcctgacttacgttacaccgctagtggttcagctgttgcgacctttacacttgctgtaaaccgtaactttacgaatcaaaatggtgaccgtgaagcagactttatcaactgtgtgatttggcgtaaacccgcagaaacaatggctaattatgcccgtaaaggtacattattaggtgttgtcggaagaattcaaactcgtaactacgagaaccaacaaggtcaacgtgtctacgtaactgaagtggtttgtgaaaacttccaattgttagaatctcgttctgcttcagaacaaagaggaactggcggcggtagctttaataacaacgaaaatggttatcaatcacaaaatcgtagctttggtaataacaatgccggttctggatttaataacaacaacaatagtttcaatccatcatcttctcagtcgcaaaacaataacggtatgcctgatttcgataaagattctgatccatttggtggctcaggttcatctatcgacatttcagatgatgatttaccattctaa

SEQ ID NO: 6853 - DNA, 303 bp, Enterococcus faecalis
  CDS (1)...(303)
atgagtcaagatacgaagtacgaaatcatgtacattattcgtccgaacattgatgaagaagcaaaaactgctttagtagaacgtttcgacacaatcttaaaagataacggagcagaagttatcgaatctaaagattgggaaaaacgccgcttagcatatgaaatgaacggattccgtgaaggcatctatcatatcgttaatgttacttctccatcaacagctggcgcaatcaacgagtttgatcgtttagcaaaaatcaatgacgatattatccgtcatatgatcgtgaaggtagaagcataa

SEQ ID NO: 6854 - DNA, 2502 bp, Enterococcus faecalis
  CDS (1)...(2502)
atgagtgaagaaattaaagaaaacattcaagacgtcaatctgaccagcgaaatgaaagaatctttcattgactacgcaatgagtgttatcgtagcccgcgcgttacctgacgttcgtgacggtttaaaacctgttcatcgccgaatcttatatggaatgaacgaattaggggtaacccctgataaaccacacaaaaaatcagcccggattgttggggatgttatgggtaaatatcacccccatggggacagtgcgatttacgaatcaatggtgcggatggcacaaccttttagttatcgggctatgttagttgacggccacggaaacttcggttctgtcgatggtgacggcgctgccgctatgcgttataccgaagcacgtatgagtaaaattgctttagaaatgctacgagatattaacaaaaatacagtcgatttccaaggaaactatgatgattcagaacaagaaccagtagttttacctgctcgttttccaaacttactagttaacggaacaacggggattgcggtggggatggcaacaaacattccaccacacaatttaagtgaagtgattgatgcaacaagtttattgatggacaatcctgatgtaacgacgaatgaattgatggaagtgttacctggaccagattttccaacaggcggtttagtgatggggaaatcagggattcgccgagcatatgaaacagggaaaggttcgattactgttcgtgcaaaagttgaattgactgaaatgccgaatggaaaagaacgtattttagtaactgaattgccttatatggtgaataaagccaaattaatcgaacgaatttctgaattacacagagataaacgaattgaaggaattactgatttgcgggatgaatcttctcgtgaaggcatgcggattgtcatcgatgttcgtcgagatgtgagtgcctctgttgtgttaaacaacttgtacaaaatgactgccttacaaacatcttttggttttaacatgttagccatcgaaaaaggcgtaccgaaaattttaagcttgaaacgtattttagaaaattacgtcgagcaccaaaaagaagtcattactcgccggacgatttttgacaaaaacaaagcagaagcacgggcgcatattttagaaggtctacgaattgccttagatcatatcgatgaaatcattgccattatccgtggatcacaatcagatgacgaagcaaaagcaacgttaattgaacgctttgaattttcagatcgtcaagcgcaagcaattttagatatgcgtttacgccgtttaacaggcttagaacgcgacaaaattgaaaatgaatatcaagagctattgaaattcattgcggacttagaggacattttagcccgcccagaacgcgtcattgaaatcattaaaacagagttaaatgacgttcgcacaaaatttggtgatgcacgacgcacagaattattagtaggtgaagtcttaagtcttgaagatgaagatttaatcgaagaagaagaagtcgtgattacattaaccaataacggctacattaagcggatggcaaactccgaattccgggcgcaacgccgcggcggacgtggtgtccaagggatgggcgttcacgatgatgatttcgtgaaaaacctagtttcttgttcaacacacgacacgttattattctttacgaacactgggaaagtttaccgagcaaaaggttacgaaatccctgaatacggtagaacagcaaaaggaattccagtgattaacttactgggaattgattctgcagaaaaaattcaagcgattatttctgttgagggcaaagcggaagcaggtaaatacttgttcttcacaaccttaaaaggaaccgtcaaacggacagccgtaacagccttttctaatatccgtagtaatggattaatcgccattagcttaaaagaagatgatgagttagttaacgtggtaacgactaatggcaatcagaagatgattatcggaacacatgcaggatactctgtcacatttgatgaaaatactgtacgtgatatgggccggacagcatcaggcgttcggggaatccgtctccgcgaaaatgattatgtggtcggcgcagcgattctggatgaaaataaagaagtcctagtcattactgaaaatggttatggtaagcgtacaaaagcttctgaatatccagttaaaggacgtggcggtaaagggattaagacagcaaatatcactgagaaaaatggtccattagctggtttaaccacggtcaatggggatgaagatatcttattgattacgaacaaaggcgtcattatccgctttaacgttgattctgtttctcaaacaggacgcgcaacattaggggttcgtttaatgagaatggaagatggtgccaaagtggtaacaatggctgttgtagaaccagaagaagtggaagaagaaatcgttgaagttgtagaaacaacagaaaacgaaacaacatcagaaacagaagaataa

SEQ ID NO: 6855 - DNA, 1950 bp, Enterococcus faecalis
  CDS (1)...(1950)
atgacagaagaagaaaaaaacatgagagaacgtgcgcaagaatatgacgctagtcagattcaagttttggagggcttagaagctgtccggaaacgtcctggtatgtacataggttctactagtggcgaagggttacaccacttagtatgggaaatcgttgacaactctatcgacgaagccttagcaggatttgctaaatcaattcaagtaattatcgaaccagacgatagtattactgttatcgatgatggtcgtggaattccagtcgggattcaagccaaaacaggtcgcccagctgtggaaacagtgtttacagtgctacatgccggcgggaaatttggcggtggcggctataaagtatcaggtggcttgcacggtgttggttcctctgttgttaatgctttatcgactagtttagatgttcgtgtttataaagatggcaaagtgtattaccaagaatatcgtcgtggtgcggttgttgatgatctaaaagttatcgaagaaacggatcgtcacggaactactgttcactttattccagatcctgaaatttttacagaaacaaccgtttatgattttgataaattagcaacacgggttcgtgaattagcctttttaaatcgaggcttacacatttcaattgaagaccgtcgtgaaggacaagaagataaaaaagagtatcactatgaaggcgggattaagagttatgttgagcatttaaatgccaataaagacgttattttcccagagccaatcttcattgaaggagagcaacaagatattacagtggaagtgtcaatgcagtatacagatggctaccactcaaatattttaagttttgccaacaatattcatacttatgaaggcggaacgcatgaatctggttttaaaacttctttaacacgtgtgattaatgactatgcacgtaaacaaaaattgatgaaagaaaacgatgaaaaattaactggggaagatgttcgtgaaggtttaactgcagtggtttccatcaaacatccagatcctcaatttgaaggacaaaccaaaacgaaattagggaactcagaagtacggaccgttacggatcgtttattctcagaatactttacaaaattcttaatggaaaatccaacagtcggcaaacaaattgtcgaaaaaggcatgttggcttcaaaagctcgtttagccgctaaaagagctcgtgaagtcacccgtcgtaaaggcgcgttagaaattagcaacttgccagggaagctggctgattgctcaagtaaagatccggaaaaatgcgaattatttatcgtcgaaggagactcggccggcggttcagcaaaacaaggccgtagccgtgaattccaagccattttaccaattcgtgggaaaatcttgaatgttgagaaagccagcatggataaaattttagccaatgaagaaattcggtcattatttacagctatgggaacaggcttcggcgaagatttcgatgtttctaaagcacgttatcacaaactagtgattatgaccgatgccgatgtcgatggtgcgcatattcgaacgttgttattaaccttgttctatcgcttcatgcggccaattgttgaagctggttatgtgtatattgcccaaccaccactatatggtgtgaaacaagggaaaaacatcacctacgttcaaccgggcaaacatgctgaagaggaactagcaaaagtgttagaagaattacctgcttcaccaaaaccaagtgttcaacgttacaaagggttgggtgaaatggatgatcaccaactttgggaaacaacaatggacccagaaaaacgattaatggcgcgagtgagtgtcgatgatgccattgaagctgaccaaatttttgaaatgctaatgggcgatcgtgtggaaccacgtcgtgcgtttatcgaagaaaatgcccattacgtgaaaaacttggatatttaa

SEQ ID NO: 6856 - DNA, 432 bp, Haemophilus influenzae
  CDS (1)...(432)
ggccgcggtgcatcacaaaacatcattccatcttcaacaggtgcagcgaaagcagtaggtaaagtattacctgcattaaacggtaaattaactggtatggctttccgtgttccaacgccaaacgtatctgttgttgatttaacagttaatcttgaaaaaccagcttcttatgatgcaatcaaacaagcaatcaaagatgcagcggaaggtaaaacgttcaatggcgaattaaaaggcgtattaggttacactgaagatgctgttgtttctactgacttcaacggttgtgctttaacttctgtatttgatgcagacgctggtatcgcattaactgattctttcgttaaattggtatcttggtacgataacgaaacgggttactcaaacaaagtattagacttagtagctcatatctacaactacaaaggctaa

SEQ ID NO: 6857 - DNA, 789 bp, Haemophilus influenzae
  CDS (1)...(789)
atgatgtataaagcagtatttagtgattttaatggcaccttattaacctctcaacatacaatttcccctcgaactgttgtggtaattaagcgtttaacggcgaatggcattccttttgtgccaatttcggcgcgttctcctttaggtattttgccttattggaaacagcttgaaacgaataatgtacttgttgcatttagtggtgcgcttattttgaaccaaaatctcgaaccaatttatagcgtacaaattgagccaaaagatattttagagattaatactgttttggcggaacatcctttgcttggcgtgaattattatacaaataatgattgccatgcgcgcgatgtagaaaataaatgggtgatttatgaacgcagcgtgaccaaaattgagattcatccttttgatgaagtagcgacacgttcgccacataaaattcaaattattggggaagcagaagaaatcattgagattgaagttcttttaaaggaaaaatttccacatttaagtatttgtcgttcccacgctaattttttagaggtaatgcacaagagtgcaaccaaaggaagtgcggtgcgttttttggaagattattttggcgtacaaactaatgaagtgattgcatttggcgataattttaatgatctggatatgctagaacatgtggggcttggtgttgcaatgggaaatgcgccaaatgaaattaaacaagctgcaaatgtggttacggcaaccaataatgaagatggacttgcattgattttagaagaaaaatttcctgaataa

SEQ ID NO: 6858 - DNA, 909 bp, Haemophilus influenzae
  CDS (1)...(909)
atgaccgaacaattcgacaaaacctattgcggctttattgctatcgtaggtcgcccaaatgtgggtaaatcaacgctcttaaataaaattttaggacaaaaaatttcaattacatcgcgtaaagcacaaactacccgtcaccgcattgttgggattaaaactgaaggtgcgtatcaagaaatctacgtggatacaccggggcttcatattgaagaaaaacgggcgattaaccgcttaatgaaccgcgccgcaagtagtgctatcggcgatgttgatttaattatttttgtcgtagatggtacacactggaatgcagatgatgagatggtgctaaacaaactacgtaatgcaaaagcacccgttgtgcttgctatcaacaaagtagataacatcaagaataaagatgatttgttgccgtttattacagatcttagcagtaaatttaactttgctcacattgtgccaatttctgcacagcgtggtaataatgttcatgaattagagaaaattgtacgccaatctttacgtgaaggtgtgcatcattttccagaagattatgtcacagatcgttcgcaacgttttatggcctcggaaataatccgtgaaaaattaatgcgttttaccggtgaagaattgccttattctgttactgttgaaatcgaacaattcaaagtaaatgaacgtggcacttatgaaataaatggcttaattctcgttgaacgtgaaggtcagaaaaaaatggtcattggtgcgggcggtcaaaaaattaaaactattggtatggaagctagagccgatatggaacgtttatttgataacaaagtccatcttgaactttgggtaaaagtgaaatctggttgggctgatgatgaacgtgcgctgcgtagtttaggatatatggatgaataa

SEQ ID NO: 6859 - DNA, 876 bp, Haemophilus influenzae
  CDS (1)...(876)
atgaaattaagaagaagtatgttatttgtgccgggctcaaatgccgccatgttaagtaatagctttatttataaaccagattccattatgtttgacttagaagatgcggttgctctcaaagaaaaagattctgctcgtttattagtcgctcatgcacttcaacatccgctttataaagaaattgagaccgtagttcgtgttaatccgctagattctgaatttggtttattggatttgaattcggtagtgcgtgcgggtgtggatgtggtacgtatgccaaaaactgaaagcgcgcaagatgtgttggatatggatcacgccattactgagattgagaaagcttgcggtcgagaagcaggttcgactaaaatgctagccgcaatcgaatcgccattaggtatcactcaagccaaccaaatcgctttcgcttctaaacgtttaattggtatcgcattgggtgcagaggattacgtacgtaacttaaaaaccgagcgttcaccagaggggattgaactgctttttgctcgttgttctattttacaagcggcacgtgcggctggcattcaggcttttgataccgtatattctaacgcgaacaatgaagaaggcttcttaaaagaggctgcgttaattaaacagcttggttttgacggtaaatccttaatcaacccacgccaaattgaattgttacacaacttatttgcaccgacacaaaaagacgtggagcaggcaaaacgcattattgaagcggcagtagaagctgaacgacaaggggctggtgttgtttcgttaaacggtaaaatgattgacgcaccgattattgatcgcgcaaaacttgtattagaacgtgcgaaatcaggtattcgtgaagagtaa

SEQ ID NO: 6860 - DNA, 963 bp, Haemophilus influenzae
  CDS (1)...(963)
atgtctacgcctttcaaaatggaacgcggtgtaaaatatcgcgatgcggcaaaaacctcaattattcccgtaaaaaatatcgatcctaatcaagatttattaaaaaaaccagaatggatgaaaattaaacttccagcaagttcagctaaaattgaaagcattaaaaatggaatgcgccgtcacggattacattctgtttgtgaggaagcatcttgtccaaatttacacgaatgttttaatcatggcacagccacttttatgattttaggtgcaatttgtacgcgccgttgcccattctgtgatgtggctcacggtaaaccattaccgccagatcctgaagagccacaaaaattggcagaaacgattcaagatatgaaacttaaatatgtggtaatcacatcggtggatcgtgatgacttgcctgatcgtggtgctggtcatttttctgaatgtgtaaaagctgtgcgcgagcttaatcctaacattaagattgaaattttagtgcctgattttcgtggtcgcattacacaggctttagagaaattaaaagataatccgccagatgtctttaaccataatttagaaaacgtaccgcgcttatataaagaaattcgtccaggtgcggattacgaatggtcacttaaattattgcgtgaattcaaagaaatattcccaaatatcccaaccaaatctggtttaatggttgggttaggcgaaaccaacgaggaaattttgcaagtgatgcaagatttacgtgataacggtgtgactatgctcacgttgggtcaatatcttcaacctagccgccatcatttgcctgttgcccgttatgtgccgccaactgaatttgatgaattccgtgataaagccaatgaaatgggctttgaacatgcggcttgtgggccatttgttcgttcttcttatcacgctgatttacaagccagtggcggattagtgaaataa

SEQ ID NO: 6861 - DNA, 1029 bp, Haemophilus influenzae
  CDS (1)...(1029)
atgaaggagcgaatcaaagcaatatgtttagaaaaaccaaacaatgtagttgttaaagaagtgccttatcccgagaaaagtgataatgatgtacttattcaggtagaatcaatggggatttgtggttctgatattggtgcatatagaggaactaatccattagtaacttatccaagaatacttgggcatgaaattgtagggagagtaattgaaagtggaattggtatgtcagatggggtaagggttggagaccgagtaattgttgatccttatgtttgttgtggtcaatgctatccttgttcaattggtagaaccaattgttgtgaatcattaaaggtaattggtgttcatattgatggaggtatgcaagaggtaattagacatcccgctcatcttttaactaaagtcccagataacctaccgattcatcaattacctttagctgaacctttaacaatagctttacacgctttacatagaacaactttaaaatcaggggaacacatagtaattattggagctggtgcaattggattaatggctgcattagcagcggttcaatatggagcaatcccaattttagttgatatattagaacaacgtcttgagtatgcaaaatccttgggaattgaacatattgtaaatccgcataaggaggatgacattaaaagaattaaggaaattacaagtggtcgtatggctgaagttgttatggaggcatctggtgctaatatttctatcaaaaatactctgcattatgcctcctttgcaggaagaattgctttaacaggatggccaaaaacagaaactccattaccaacaaatttaattacctttaaagaattgaatatttatggttctagaacaagcaagggggaatttgaggaggcattggatatgcttgctactaataaaattaatgcatctcatatcattactaagtgtatcaaatttgaagaaattcctagttttatttctgatttatctgatcatccagaaaattatttaaaaattaatgcagttttctaa

SEQ ID NO: 6862 - DNA, 801 bp, Haemophilus influenzae
  CDS (1)...(801)
gtgagccatatcacaaaaataaaaaattggaataccaatttaaggaaaaatatggaaaatatagtaaatagaacatatacccgaataggtcaattgctaaaacaagatatttctcaaggaatttatagcattggagacaaactccctacagaacgagaaatttctgaaaaatttggtgtaagtagaactattgttagagaagcaatggttatgttagaagtagaaaagttagtagaggtaaaaaaagggtcaggcgtttatgtagtaagaacccccgaatcaatacatatggaacattcagatttaccagatgtaggtccatttgaacttttacaagctagacaactattagaaagtagtattgctgaattcgcagcgttacaagcgactaaaaaagatattttaaatttaaaacaaatactgaatcgagagaaagaattacttactcagaatcaagatgactatagtgcagacaaagattttcatttggcacttgcagaaattacacaaaatgatgtgttagtcaaattacaagaacaattgtggcaatatcgctttaatagtgcgatgtgggcacaattacattctcgtattttacaaaatgattatcatcatttatggatagaagatcatcaaacaattttatctgctattcaaaagaaaaatgctaatgaagctagaaaagctatgtggcaacacttagaaaatgtaaaagtaaaattatttgaattatctgatgtagaagatccacattttgatggatacctattcaatacaaatccagttgttgtaggtatctaa

SEQ ID NO: 6863 - DNA, 1764 bp, Haemophilus influenzae
  CDS (1)...(1764)
atgcaagagcaaaaattacaagaaaatgatttttcaaccttacaaacgtttaagcgtttgtggccaatgattaaaccttttaaagcggggcttattgtttctggcgtcgcgttagtttttaatgcattagctgactcaggcttgatttatttgttaaaaccgttgttggacgatggttttggtaaggcaaaccattcatttttgaaaatgatggcttttgtcgtcgttgggatgattattttacgcggcattaccaactttatttctaattattgcttggcgtgggtatcaggcaaagttgtcatgacaatgcgtcgccgcttgtttaaacatttaatgtttatgccagtgagtttctttgatcaaaattcaacagggcgtttactttctcggattacttatgattcccaaatgattgcaagttcttcttcaggatctttgattacaattgtgcgagaaggagcatatattatttcgctattcgcagtgatgttttataccagttgggaattaacaattgtgctttttattataggtccaatcattgctgttttaattcgtttggtatcaaaaatttttcgtagattaagtaagaacttacaagattcaatgggtgaacttacgtctgctacagaacagatgttaaaaggtcataaagttgtgctttctttcggagggcaacatgtggaagaagtgcattttaatcatgttagtaatgatatgcgtcgaaaaagcatgaaaatggtgacagcaaattccatttctgatcctgtggtgcaagttattgcatctctcgcattagctacggtgctctatttagctaccactccattgattgcagaagataatttgagtgcaggctcatttacagtggtattttcttcaatgttagctatgatgcgtccgttaaaatcattaactgcggtgaatgcacaatttcaaagtggaatggcagcatgtcaaacgctatttgccattttagatttagagccagaaaaagatgacggggcttataaagcagaacctgcgaaaggcgagttagaatttaaaaatgtgagttttgcatatcaaggaaaagatgaacttgcattaaataatatttcttttagcgttccagctggaaaaaccgtagctctagtgggacgttctggatcgggcaaatcaaccattgctaatttagtgacacgtttttacgatattgagcaaggcgaaattttactggatggcgtaaatatccaagattatcgtttatctaatttacgtgaaaactgcgctgtggtttctcaacaagtccatttatttaacgatactattgcgaataatattgcttatgcagcacaagataagtattctcgcgaagaaattatcgctgcagcaaaagcggcttatgctttagagtttatcgaaaaattaccgcaagtttttgatacggtaattggcgaaaatggcactagcctatcaggtgggcaacgtcagcgtttagcgattgctcgtgctttattgcgtaattcgccagtattaattttagatgaagctacatctgcactagatacggaatcagaacgagcaatccaatctgcattagaggaattaaagaaagatcgcacggttgttgtgattgcccatagattatctactattgaaaacgcggatgaaattcttgtgattgatcacggagaaattcgtgagcgtggcaaccataaaacattgcttgaacaaaatggtgcctataaacagttgcatagtatgcagtttactggctaa

SEQ ID NO: 6864 - DNA, 1890 bp, Haemophilus influenzae
  CDS (1)...(1890)
atgcctattaaaattctttccccacaacttgctaaccaaattgctgctggagaagtggtagaacgccctgcatcagtggtaaaagaattagtggaaaatagccttgatgcaggtgcaaataaaatccaaattgatatcgaaaatggtggggcaaatttaatccgcattcgtgacaatggctgtggtattccaaaagaagaattaagcctcgctttggcacgacatgccacgagtaaaatagccgatcttgatgatctcgaagcgattttaagtttaggttttcgtggcgaggcattagctagtatcagttccgtatcacgcctaacccttacttctcgtaccgaagaacaaactgaagcgtggcaagtttatgcgcaaggtcgtgatatggaaaccacaatcaaacccgcatcacatcctgtcggcacaacagttgaagtcgccaatctttttttcaacacaccagcccgccgaaaatttttgcgcacagataaaacagaattttcccatattgatgaagtcattcgtcgtattgctttaacgaaattcaacacagcatttacattaacgcataatggaaaaattatccgtcaataccgtcctgccgaagcaatcaatcaacaactaaaacgtgtcgccgctatttgtggggatgattttgtcaaaaatgccttacgaattgagtggaaacacgatgatttacatttatcaggttgggtggcgacaccaaattttagccgaactcaaaatgatttaagttattgctatattaatggccgaatggttcgagataaggtaatcagccatgctattcgacaagcctatgcacaatatttaccaaccgatgcttatcctgcgtttgtgttgtttattgatttaaacccgcacgatgtagatgtcaatgttcatccaaccaaacatgaagtacgctttcatcaacaacgcctcattcatgattttatttacgaaggcataagtcatgcgctaaacaatcaagaacagattaattggcatacagaccaaagtgcggtagaaaatcacgaagaaaatacggtgcgtgagccccaaccgaattacagcattcgtcctaatcgtgcaactgcggggcaaaatagctttgcgccacaatatcatgaaaaaccacagcaaaatcaaccgcacttttctaacacaccaatgtttccaaatcatgtaagtactggttatcgagattaccgttctgatgcaccgagtaaaactgagcaacgtttatatgctgaattgttacgcacgttaccgcctacagcgcaaaaggatatatcggatacagcacaacaaaatatttcagatacagctaaaatcatctcaactgaaataattgagtgttcatcacatctacgagccctttcacttattgaaaatcgtgcgttgttattacaacagaaccaagatttctttttgctttcattggaaaaattacaacgcttgcaatggcaactagcgttaaaacaaatacagattgaacaacaggctttattgattccaatcgtgttccgattaaccgaatcacaatttcaagcatggcaacaatattcagatgacttcaaaaaaattggctttgaatttatcgaaaatcaagcacaattacgcttaaccttaaataaagtgccaagtgcattacgcacacaaaatctacaaaaatgcgtgatggcaatgctgactagagatgaaaattcatcatcatttttaaccgcactttgcgcacaattagaatgcaaaacctttaacgctttagcggatgcactcaatttattgagcgagacggaacgtttactcacgcaaacaaatcgcacagcattcacccaattactcaaacctgttaattggcagcctttattagacgaaatttaa

SEQ ID NO: 6865 - DNA, 1146 bp, Haemophilus influenzae
  CDS (1)...(1146)
gtgcggtcaattttttcattatttttagaggatgttatgacacaacaatatgctatcgatactttattagctcaagcaggcaatcgcagtgatgagcgtacgggcgcggtttctgcaccaatttttctttctacggcttatggtcattgtggtatcggtgaaagtacgggatttgattacacacgtaccaaaaatccaactcgcacagtattagaagaaacgatagctaaattagagaatggagatcgtggttttgcgttttcttctggtatggctgcaattcaagttttgatgacgctttttaccgccccagatgaatggattgtttctagcgatgtgtatggtggtacttatcgattattagatttttcttataaaaataacaatagtgtaaaacctgtttatgttaatacagcatctgcttcagcaattgaggctgccattaacccaaatacgaaagcgatttttattgaaaccccatcgaatcctttaatggaagaatgtgatgtggttgaaattgcaaaacttgcgaaaaaacataacttaatgttgatcgtggataatacgtttttaacgcctgtgctttctcgtccattagatttaggtgcggatgtggtaattcacagcggaactaaatatattgctgggcataatgatgcacttgttggtttaattgttgcgaaagggcaagaactttgtgatcgcattgcttatattcaaaatggtgcaggggcggtgctttctccttttgattcttggctgactattcgtggtatgaagaccctttctttgcgtatgaaacgccatcaagaaaatgcacaagctattgcggaatttttaaaagctcaaccacaagtggaatcggtgctttatccgaataaaggtgggatgttgtctttccgtttgcaagatgaagcttgggttaatacatttttaaaatccatcaaattgattacttttgcagaaagtctaggcggcacagaaagttttattacttatcctgccactcaaactcatatggatattccagaatccgagcgtgtagctcgtgggattactaataccttgttgcgtttttcagtcggtattgaagatgtagaagatattaaagcggacttattacaagcttttgcaaacttaaaataa

SEQ ID NO: 6866 - DNA, 945 bp, Haemophilus influenzae
  CDS (1)...(945)
atgttaagaatttacgcccctgcatctagcgcgaatattagcgtaggtttcgatactttaggtgctgcgatctctcctattgatggttctttgttaggcgatgtggttcaaatagaatctatttcaactggttttgagttagaaagtgcgggctattttgttcgtaaattaccgaaagaaccgcaaaaaaatattgtttaccaagcttatgtgctatttagcgagcaattaaaattacgcggagcaaatgttaaacctttacgtttaacgctcgaaaaaaatatgcctattggctctggtttaggctctagtgcttgttctattgttgctgcattagtggcattaaatcagtttcataatgaacctttttcgaaaatggaattgcttgaaatgatgggagaattggaaggtcgtatttctggttcaatccattatgataacgtcgcaccttgctatcttggcggtgtgcaatttatggtgcaatcgctcggcaatatttgtcaaaaattgccattttttgataattggtattgggtgttagcctatccgggaattgaagtttctactgctgaagctcgagcaattttaccgaaaagctatactcgacaaaacgtgattgcccatggtcgtcatttaggtggctttgtgcatgcttgccatacccatcaggaaaatcttgccgcgattatgatgaaagatgtcattgccgagccttatcgtgaatctctgttacctaattttgctgaagtaaaacaagctactcgagacttaggcgcacttgccacaggtatttcaggctcagggccaactattttctctattgcccctgatttacaaactgcaattaaactttcaagttatttagaaagccattatttacaaaataatgaaggttttgtgcatgtatgtaaagttgataacgaaggcacaagagaaattaaataa

SEQ ID NO: 6867 - DNA, 714 bp, Haemophilus influenzae
  CDS (1)...(714)
atgaatatccagcataatctcaacctaattcagcaaaaaattgaaacggcttgtaaagaagaaaatcgcaatcaaaataccgtaaaattacttgccgtatctaagaccaaacctatttctgctattctttcggcttatcaagcgggacaaacggcttttggggaaaattacgtgcaagagggggtagaaaagatccaatattttgaatcgcaaggaattaaccttgaatggcattttatcggcccattacaatcgaataaaacccgtctcgttgcagaacattttgattggatgcaaacgcttgatcgagcaaaaattgcagatcgtttaaatgaacaacgaccgaccaacaaggctccattgaatgtattgattcagattaatatcagcgatgaagaaagtaaatcaggtattcaacctgaggaaatgctaacactagcaaaacacatcgaaaatttaccgcacttatgcctacgtggcttaatggcaatacccgcaccaaccgacaacatcgcagaacaagaaaatgcatttagaaagatgttggagctgtttgaacaacttaaacaagtcttacccaatcaacaaattgatacactttctatgggaatgacggatgatatgccgagcgcaataaaatgcggttctacaatggtacgcattggcactgcgatttttggtgcgagaaattattcaacatcacaaaataaataa

SEQ ID NO: 6868 - DNA, 1389 bp, Haemophilus influenzae
  CDS (1)...(1389)
atgtttgagaatttatcggatcgcctttccaaaaccttacgtaatatcacaggaaaaggccgtttaacggaagataatattaaagaaaccttacgcgaagtgcgtatggcattacttgaagccgatgttgccttgcctgtggtgcgtgaatttatcgcaaaagtaaaagaaagcgcgcttggggaagaagtcaataaaagtttaacgccagggcaagaattcttaaaaatcgttcagcgtgagcttgaaaaagccatgggcgaagcgaatgagagtttaaatctcgcaacccaaccaccagcagttatcttaatggcgggtttacaaggggcgggtaaaaccaccagtgtgggtaaattggcaaaattcttgcgtgaacgccataaaaagaaagtgttagtggtgtctgctgacgtatatcgccctgctgcgattaagcaacttgaaaccttggctcaatccgttggcgtggatttttttccatcggatgttaaacaaaaccccgttgatattgctaaatcggcgcttgctgatgcaaaactgaaattctacgatgtgttgattgtggatacggcaggtcgcctacacgttgatacagaaatgatggacgaaatcaagcaagtccatgctgcattaaatccaatcgaaactcttttcactgttgatgcgatgactggtcaagatgcggcaaatacagcaaaagcctttaatgaagcattgcctcttacaggggttattttgacgaaagtggacggtgatgcgcgcggtggtgcggcgttatcgattcgtcaaatcacaggtaaaccaatcaaattcttgggtgtgggcgagaaaacagaggcgcttgagccattccatcctgatcgtgtcgcttcccgtattttgggcatgggcgatgtgctttcccttatcgaagatcttgaacgttctgttgatcgtgaaaaagcggaaaaaatggcgcagaaattcaagaaaggcgatgattttactttagatgatttccgcgaacagctgatcgaaatgaaaaaaatgggcggcatgatgtctatgcttgagaaattaccaggtgcaaaaaatttgtctgagcacgttaaaaatcaagtagatgacaaaatgtttgtcaaaatggaagcgatcattaactccatgaccctaaaagaacgtgccaacccagatattatcaaaggatctcgccgtcgtcgtattgcattaggctctggcactcaagtgcaagatgtcaataaattacttaaacaattcgatgaaatgcaacgtatgatgaagaaaatgcgtaaaggcggcatggctaaaatgatgcgtggaatgcaaggcttaatgggcggaggcttaggcggtcttggcggtttaggcggaatgtttaaacgataa

SEQ ID NO: 6869 - DNA, 1638 bp, Haemophilus influenzae
  CDS (1)...(1638)
atgcaggtcaagcgcctttacgtgaaactctcgcggcggcaattgttaatgcgttcaggttggcaagtgggttctccattagtagatccaatgtgtggttcaggtacgcttttaattgaagcggcacaaatggaagccaaaattgcgccgcaactttatcgtttacattggggatttgatttttggaaagcgcataatcaatcggcttgggaaaaagtaaaaaatgaagcgattgaattagcagaagaaaaacaacgtgaaattcaaccgcacttttatggatttgacctcgatcaccgcgtattaaaaaaggcgcagaaaaatgcacaaaatgcaggtgtttcacatttaattaaatggcagcaagctgatgtggcagcgttaaaaaatcctcgtttaaatgaagtcggtacggttatctgtaatccaccttatggcgaacgtttaggaacaacaccagctttaatcgcgctctattctgtatttgggcaaagacttaaaaaagaattttgcggttggaatgtttctgtttttagtagcgaatccacattgcttgattgtttgagaatgcgtgccagccgacagtttaaagcaaaaaatggcccactagattgtgtgcaaaagaattatcaagtttcagaacgaaaatctgacgcaattacagatgaaaaggaactagaatttaaccgcacttcggaggtcgcccccgattttgctaatcgattacaaaaaaatattaagaaaattagcaaatgggcaaagcaacaagaattagacgcttatcgtttatatgatgctgatttgccagaatataatttagctgttgatcgttatgcagattacattgttgtgcaagagtatgcagcgccgaaaaatattgatgaaaataaagctcgtcagcgtttgttagatgccgttactgcaactttgcaagtgacaggtgtggaaacgaataagttgatcctcaaagttcgtcagaaacaaaaaggtacaaatcaatatgagaagttagccaataaaggcgaatacttttatgtgaatgaatatggcacgcaactttgggtaaatttgacagattatttagacactggattattcttagatcaccgtttaacaagaaaaatgattggtgagttggcaaagggtaaagatttcttgaacttatttgcttatacaggttctgccactgttcatgcagcacttggtggcgctaaatcgacaactacagttgatatgtcaaatacttatcttaattgggcggagcaaaatcttattttgaatgatattgaaggtaaacaacataaattaattcaagcagattgccttcaatggttagaaaaatgtgatcgtcaatttgatttgatatttgcggatccaccgacgttttcgaattctaaacgtatggaagagagttgggatgtgcaacgagatcatgtgaaattaatgcgcaatttaaaacgagttttgtcgaataatggcacaattgttttttcgaataataaacgtggattcaaaatgaatttagttgcgttggaagaattaggcttaagtgcaatagaaatttcgcataaaacgttaccgctagattttgaacgtaataaacaaattcataattgttggatgattcaacatatataa

SEQ ID NO: 6870 - DNA, 558 bp, Haemophilus influenzae
  CDS (1)...(558)
atgaaattcaatatcccaattttcctaacgatctttcgagtcattttgattccttttttcgtgattgcattttatttacccattgaatcatctcctttcatcacaacgctcattttttttattgcaggtgtcactgactggctagatggctatctagctcgtaaatggaaacagaccacgcgctttggtgcatttcttgatcctgttgctgataaagtaatggtagtggctgcactagttttaattgtcgaacatcaacatacattttggataaccattcctgccattattatgatttctcgtgaaattatcatctccgcattacgtgaatggatggcagagcttggggaacgtagcaaaatcgcagtctcttggtggggaaaatggaaaaccacagcgcaaatgttagcactaggcggattattatggcgttataacaactatatggaaatagcagcaattatcttactttatatcgccgctattttaactatatggtcaatgatccaatatttacaagtagcaaaaggaagcttgctagataatattcaattataa

SEQ ID NO: 6871 - DNA, 1191 bp, Haemophilus influenzae
  CDS (1)...(1191)
atgtcgttatatttaaaagctgaaaaaatccaatcatggcgcgtgcttattatggcttgcgcaggatttatttttaatactacagaatttgtacccgttgcaatgttaagcgatattgcacaaagttttgatatgcaaaccgccgatactggtttaatgatgacagtttatgcttggacggtgctaattatgtctttgcctgcgatgcttgccacgggcaatatggaacgtaaaagtctgcttattaagcttttcattatatttattgttgggcatattttatcggtcattgcatggaatttctggatattacttctcgctcgaatgtgtattgcattagcacattcggtgttttggtcaattactgcctcacttgtgatgcgcatctcacctaaacacaagaaaactcaagcattaggaatgctcgctattggcaccgcacttgccacaatcttaggcttaccgattggacgaattgtcggacagctcgtcggttggcgggtcacttttggcattattgcggtactggcattatccatcatgtttttaattattcgattattgccaaatttacccagtaaaaatgctggctctattgcaagtttacccttgcttgctaaacgtccattattactttggctttacgtaacaacggcaatcgtcatttcagcacactttactgcttatacttatatcgaaccatttatgattgatgtagggcatttagatccaaattttgccacggctgtattattagtttttggtttctcaggcattgcagcaagcctattatttaacagattataccgatttgctcccacaaaatttattgttgtttcgatgagtttattgatgttctccctcttgctactcctcttttcgaccaaaacaataatagcaatgttcagccttgtgtttatttgggggattggcatttcttgtatcggactatctctacaaatgcgcgtactaaaacttgcgccagatgcaaccgatgttgccacagctatttactcgggcattttcaatgcaggaattggcgcaggcgcattatttggaaaccttgcgacaacctatttaggattaaatgaaattggttatacaggcgcagcattaggtttaatcggtttcatcatttttattacaacgcacttaaaatatcgccatacatttcttctgcaaaacaaataa

SEQ ID NO: 6872 - DNA, 1515 bp, Haemophilus influenzae
  CDS (1)...(1515)
atggcaactccagtcgtcgcccttgttggtcgcccaaatgtgggaaaatccacattatttaatcgccttactcgtacgagagatgcgttagtcgctgattttcccggtttaactcgtgatagaaaatatggtcacgcacatattgctggctatgattttattgttattgatactggcggtattgatggaacggaagagggtgtagaagaaaaaatggcggagcaatctttgcttgctattgatgaagcggatattgttcttttccttgtggatgctagagcgggtttaacggcagctgatattggtattgctaattatttacgccaacgtcaaaacaaaattactgtggtggtggcaaataaaactgatggtattgatgcggattcccattgtgctgaattttatcagttaggtttaggggaaattgagcaaatcgcagcctcacaaggccgtggtgttactcaattaatggaacaagtacttgcgccttttgcggaaaaaatggaaaacgccgatgaaaatgaccgcacttctgaggaagaacaagacgaatgggaacaagaattcgattttgattcagaagaagatacggcattaattgatgatgcgttagacgaagaacttgaagaagaacaagataaaaatattaagattgccattgttggtcgtccaaatgtgggtaaatctactttaaccaatcgtattttaggcgaagatcgtgtcgtggtttttgatatgccaggtacgacacgtgacagtatttatattccaatggagcgtgatgggcagcaatataccttgattgatacggctggtgtgcgtaagcgtggtaaagtgcatttggcagtggaaaaattctctgtgattaaaaccttacaagcgattcaagatgctaatgttgtattgctgactattgatgcgagagagaacatttctgatcaggatttatctttgctcggctttattttaaatgcagggcgttctttggtgatcgtcgtgaataaatgggatggtttagatcaagatgtgaaagatcgtgtgaaatctgaacttgatcgtcgtttagattttattgattttgctcgggtgcattttatttcagccttgcacggaagtggtgtaggtaatctttttgattcgattaaagaagcctatgcttgtgccactcaaaaaatgacgacttcgcttttaactcgtattttgcaaatggcaacggatgagcaccaaccgccgatgattggcggtcgtcgcattaaattaaaatatgctcacccaggtggttataatccgccgattatagtggttcacggtaaccaaatggataaactaccagattcttataaacgttatttatctaattattatcgtaagagcttaaaaattattggttcaccgattcgtctgcttttccaagaaggctcaaacccatttgcaggacgcaaaaataaactcactccgaaccaattgcgtaaacgtaaacgtttgatgaaatttattaagaaagcgaaacgttaa

SEQ ID NO: 6873 - DNA, 1146 bp, Haemophilus influenzae
  CDS (1)...(1146)
atgaaatacgcattaattaattgtgtaatttacacaaaatatgatgttttacgtgattttgctgtaattattaacggtgaaattattgaagcagtgatcccccaagctgaattagaaacaggtatcaaaaccattgatttacaaggtaataatttaacggctggttttattgatctgcaattaaatggctgtggtggcgtgatgtttaacgaccaaactagcgttgaaaccttggaaattatgcaggaaactaacttaaaatcaggttgtacaagtttccttcccacttttattaccgcgcctgatgaaaatataaaaagtgcggtaaaaattatgcgtgaatatttaaacaagcataaaaaccaagcacttggtttacatattgaaggaccttatctcagcattgagaaaaaaggcgtacaccgtcccgaatatattcgtgaaattacgcctgaaatgaaagattttctctgcgaaaatggtgatgtgattacaaaaatgaccattgccgcagaaaacccaaccattaactatacgcctgattttgtgaaagcgggcattattgtctctgtaggccattctaatgccacttatgaagtggctaaagccgcattccacaaaggcgcaacttttgcgactcacttgcataatgcgatgtcgccaattagttctggacgtgaaatgggcgtagtgggtgcagtattagattctgatgtttacactggcattatcgtcgatggtgtgcatatcaattacggcaatgttcgcattgataaaaaaatcaaaggcgacaaactttgtattgtgactgactctattgcagctgcaggcgcaccgccagaactagaaagttttacctttgtgggaaaaacaatttatatcaaagaagggcgttgctatgatgcgaatgacacaattgcaggggcatcaatcacaatgatggaatccattaaaaatgcggtagaatatgtcgaaattcctcttgcggaagccattagaatgagtaacctttatcctgcacgagcaattggtatagatgatcgtttaggttcggtagaaaaaggtaagatagcaaacttagccgtgtttacgccaaattaccaagtaatcggcacagtagtaaacggaaagtggaaagagaattaa

SEQ ID NO: 6874 - DNA, 867 bp, Haemophilus influenzae
  CDS (1)...(867)
atggctaaatcgggaaatgtgttaaacaaaattggctcactttaccagagtttaactaaatcagagaaaaaaattgccgatacgattttgcgttcgcctgatttagtctctcaatgctccctttcagaaatcgctaaacatttgcaagttggagaagctacgctcgtccgtttttgtcgaaccattggttttaaaggtttcagcgagttcaaactagagctttctattgaacttgcgacgaaagataatcaagatgaaagcatacttgaaacagaaattatgccaagtgatgattcgctcactattgcacaaaaattgcaaacggcggttgctaatgtaatggaagaaacgattaatttacttgatttaaaacagcttgaagaagtcgttaaagtacttaaaaaagcacgccgtatttttttatttggggtgggttcatctggcgtaacggctgaagatgctaaaaataagctgatgcgtattggttttcaagtggatgcttcaggtaataatcattttatgtatatgcaggcggcattattgacctcttctgatgtggcaattggtttaagccattctggttattctgctgaaacggcgcataccatcaaaatcgcaaaacaaaatggtgcaacaacagtggcattgacgcatagtttgcgttcccccgtgacagaatatgctgattatgttttggtaaatggtaataaacaaggcaagttacaaggcgattctattggcaccaaaattgcacagctttttgtattagatttaatttatgctttgttagtgcagggcgaagaagatattgccgctcaaactaaacaaaaaactctcaatgtaattcttgaacaacgtataaaatag

SEQ ID NO: 6875 - DNA, 1233 bp, Haemophilus influenzae
  CDS (1)...(1233)
atggagaatgaaatgtcacagaacggttcagatcgcgatccttggagtaaaccagggcaaagcaacgaccaacagccgggaaattcatccaataataatggatggaataacaatcaaaatcgtggaaatcaagagcaatctccaccagatattgaggagatttttaataatctgcttaaaaaattaggtggtggaaataaaaagagcggtcaaaataatggcagttctcaaggcaatacgccatttcattttggtaaagttattccacttgctgtagcgattggtgcgattatttggggcgtaaacggtttttacaccattaaagaggctgaacgcggtgtggtgcttcgttttggcgagttacattctattgttcaacctggtttgaactggaaaccaacatttgtagataaagtattgccagtaaatgtggagcaagtaaaagagttgcgtacacaaggtgcaatgctgactcaagatgaaaatatggtaaaagtggaaatgaccgtgcaatatcgtgtgcaagatcctgcaaaatatctttttagcgtaacaaatgcagatgatagtttgaatcaagcgacagatagtgcattacgttatgttattgggcatatgtctatgaatgatattttaaccacaggtcgctctgtcgtgcgtgaaaatacttggaaagctttgaatgaaattatcaaatcctatgatatgggacttgaggttattgatgtgaacttccaatctgcgcgcccacctgaagaagtaaaagatgcgtttgatgatgcaattaaagcgcaggaagatgaacaacgttttattcgtgaagcggaagcctatgcgcgtgagaaagaaccgattgcacgtggtgatgcgcaacgtattcttgaagaagcaacagcttataaagatcgtatcgtgttagatgcaaaaggtgaagtggaacgtttgcaacgcttgttgccagaatttaaggctgcgccagatttactgcgtgagcgtttatatattcagacgatggaaaaagtgatggcaaataccccaaaagtaatgcttgatggcaataatggtaataatttaactgtgttaccgctagagcaaattatgggcaaaaaatcggtaacaagtgcgccaagtgcggtcaattcttcgcctgcttttactgcaccagaacgtcaaaattcttatcagcctcagccgactaccgttgcgccgattcgtcaagggagatttaactaa

SEQ ID NO: 6876 - DNA, 231 bp, Haemophilus influenzae
  CDS (1)...(231)
atgagtattgaagaacgcgtgaaaaaaatcatcgttgaacaattaggtgttaaagaagaagatgttaaacctgaagcttcttttgttgaagatttaggtgcagattcattagacacagttgaattagtaatggctttagaagaagaatttgatattgaaattcctgatgaagaagctgaaaaaattaccactgttcaatctgcgattgattacgtgcaaaacaatcaataa

SEQ ID NO: 6877 - DNA, 729 bp, Haemophilus influenzae
  CDS (1)...(729)
atgcaaggtaaaattgctttagtgacaggatctacccgtggtatcggtcgtgcgattgcagaagaacttagttcaaaaggtgcatttgtaattggtacagcaacctctgaaaagggtgcagaggcgatctcggcttatttaggggataaaggtaaaggtttagttttaaacgtaacggataaagaatctatcgaaaccttacttgaacaaattaaaaatgattttggcgatattgatattctcgtgaataacgcaggtattactcgcgataatttattgatgcgtatgaaagatgaggaatggtttgatattatgcaaactaacttaacttcggtgtatcatctttctaaagccatgttacgttcaatgatgaaaaaacgttttggtcgtatcatcaatattggttcagtggttggttcaacgggtaatccaggacaaactaactattgtgcggcaaaagcgggtgtggttggtttttctaaatctttagcgaaagaagtagctgcacgtggtattactgtaaatgtggttgctcctggttttattgcaacagatatgacagaagtgcttacggatgaacaaaaagcggggatcttatctaatgttccagctggacgtttaggcgaagcaaaagacatagctaaagccgttgctttcttagcttctgatgatgcaggttatatcacgggaacaacgttacacgtgaatggtggcttatacttaagctaa

SEQ ID NO: 6878 - DNA, 939 bp, Haemophilus influenzae
  CDS (1)...(939)
atgaaaaaattcgcaatggtcttcccaggtcaaggctcccaaactgtcggtatgcttgctgatcttgcaactgaatatccaatcgttattgaaacatttaaacaagcatctgatgcgcttggttatgatttatggtatcttgttcaacaaggtccagctgaagaacttaataaaacttggcaaactcagcccgcacttttagctgcttcagtcgctatttatcgcgtatggaaagaaaaatttcctcaattaaaaccagaagtgatggcaggtcatagcttaggtgagtattctgcgttagtttgtgctggcgtgttggatttccaagatgcgattaaattagtggaattgcgcggaaaattaatgcaacaagctgtgcctgaaggcactggcgcaatgtatgcaatcattggtttagataatgaagcaattattaatgcttgcaaacaagcagaggaaggcgaagtcgtatctgcggtgaactttaactcaccgggtcaagtagttattgcgggtgcgaaagctgcagttgagcgtgcggctgcattatgtaaagaagcaggggcgaaacgtgcattgccgttagctgtgagcgtaccttctcactgtgcattaatgaaacctgcagccgagcaattagcggtaacacttgagaatattcaaattaatacaccaacaatatcggtattaaataacgttgatgtgaaagctgaaactgaaggcaccgaaattcgtaccgcacttgtgcgtcagttatatagtccagttcgttggactgaaacagttgaaaaaatggcgcaagatggcgttctagtgcttgctgaagtggggccaggtaaagtattaaatggtttaaccaaacgcattgtgggtgatttacaagcaatatctgtaaatgatgttgcatcattcaatgcggtagaagaatttttagtgtaa

SEQ ID NO: 6879 - DNA, 951 bp, Haemophilus influenzae
  CDS (1)...(951)
atgaatagtagaattttatccaccggtagctatctgccgagccatattcgcacaaatgcggatttagaaaaaatggttgatacatcagatgaatggattgtcactcgttctggtatccgtgaacgtcgtatcgcagcggaagatgaaactgttgcaacaatgggatttgaagcggcaaaaaatgcgatcgaagctgctcaaattaatcctcaagatattgaactgattattgttgcaactacaagtcactcacatgcttatccaagtgcggcttgccaagtgcaaggtttattaaatattgatgatgcgatttcttttgatttggcggcagcttgcacaggctttgtctatgctttgagcgtagctgatcaatttattcgtgcaggcaaagtgaaaaaagccttagtgataggctcagatctcaattctcgtaaattagatgaaacagatcgcagcactgttgtgctatttggtgatggtgcgggtgctgtaattttagaagcgagtgaacaagaaggaattatctccacccatttacacgcttcagcagataaaaataatgcccttgttttagctcagccagaacgtggtatagaaaaatctggctatatcgagatgcaaggtaacgaaacgttcaaattggcagttcgtgaactttcaaatgtggtggaagaaacacttttagccaataatttagataaaaaagatttagactggcttgtgccacaccaagcaaatttacgtattattacagcaacagctaaaaaattagaaatggatatgtcgcaagtggtggtaacgttagataaatacgctaataacagtgcagcaactgttcctgttgctttagatgaggctattcgagatggccgtattcaacgtgggcagttactattattagaagcctttggcggtggttggacttggggttcagcgttagtgagattttag

SEQ ID NO: 6880 - DNA, 1257 bp, Haemophilus influenzae
  CDS (1)...(1257)
atgaccgcactttatgtgcaaaataaaattaacggcaaaattattttgccgttttctcattcaatgaccaatgtgcttcgccttaaccgaagttacgggagaactatgttaatttcaaatacttataatcaacactttcctcaattgacgcaagagcagcttgcgagaaatgcgacaaaaaaagtcatttgtggtatgtctggtggcgtggattcttctgtgtcagcgtttattcttcaacagcaaggctatcaggtggaaggcctgtttatgaaaaactgggaagaagatgatgatacggattattgtactgccgcagctgatcttgcagatgctcaggctgtatgtgataagttggggatcaaactacataaaattaattttgcggcagaatattgggataatgtctttgagcattttttaaccgaatataaagcagggcgcacgccgaacccagatattttgtgtaataaagaaattaaatttaaagcatttttagaatatgcagctgaagatctcggtgcagattatattgcaacagggcattatgtacgtagagcgggagataatgaaaatgcaaaactattacgtggtttagatcccaataaagatcaaagttattttctttatactttaagccataaacaagtggggcaaagtttattccccgttggtgaaatcgagaagcccattgttcgtgctattgctgaagatcttggcttaattacggcgaagaaaaaagattctacagggatttgttttattggtgagcgtaaatttaaggatttcttagcacgctatttaccagctcaaccaggtaatattcgcactgtagatgatgaaattattggtcgccatgatggattaatgtatcacacattgggacaacgcaaaggattaggcattggtggtctaaaaaatgcgggagatgaagcttggtatgtagtagataaagatgtagaaaataatgaacttattgtcgcacaaggtcacgatcatcctcgtttattttcaaaaggattgattgccagccaattacattgggttgatcgcgaaccaattcgagagtcattacgttgcacggtgaaaacgcgttatcgccaacaagatattccttgtgtgattgaaccaattgatgatgaaaccattcgagttatttttgatgaacctcaatcagcagtaaccccagggcaatctgccgtattttaccttggcgaagtttgtttgggtggcggtattatcgcagaaagaatataa

SEQ ID NO: 6881 - DNA, 975 bp, Haemophilus influenzae
  CDS (1)...(975)
atgccacaaattaccctttcggctgaagtgcagccagaacaaatgggacaacgtttagaccaaacacttgcagagttgttccctgaatattctcgttcccgattaaaaacatggattgaagccgatctcgtaaaacttaacgaccgcattactaatattccgcgtgagaaagtgcttggaggagagagaatagagattattgttgaagtggaagatgaaacacgttttgaagcagaaaatattccattgaatatcgtgtatgaagatgatgatattattgtgattaacaaaccaaaagatcttgtggtacaccctggtgctggcaatccaaatggaaccgtgctcaatgcgttactctatcattatccgccgattgtagaagtaccgagagcaggaattgtgcatcgattagataaagatacaacaggtctaatggttgttgctaaaaccattcctgctcaaactaagttagtacgtgacctacaaaaacgtaaaattacgcgcgaatatgaagcagtcgcttcaggcattatgactaaaggtggcacagtagatcaacctatggctcgtcatgcaaccaaacgtactttaatggcggttcatccaatgggaaaacccgctgttacccactatcgtattatggaaaattaccgtaactacacccgtttacgtttacgtttagaaacggggcgcacccatcaaatccgcgttcatatggcacatattgcccatccactgctaggcgatcaaacctatggcggacgccctcgtccaccaaaaaatgcgagtgaagactttatggaagtattgcgtaatttcaaacgccaagctttacatgcggtcatgttacgcttagctcatccaatcacaggggagatgatggaatggtatgcaccattaccagatgatttcgttgaattgcttaatgccctcaaagccgactatctcgaacatcaagatgagttagattattaa

SEQ ID NO: 6882 - DNA, 1446 bp, Haemophilus influenzae
  CDS (1)...(1446)
atgattatggaatttgaattttcaaaaatgttagaagaagtgctaacttggatagtcgcacaccttgatggacctttatgggatgccaccattattattttgcttgggactggtctattttttaccattacaacaggatttgtgcagttccgtttattcccagcaagccttcgtgaaatgtggtttggtcgttcggtggaggggagttcattaacacctttccaagcgtttacaacaggtcttgcgagccgcgttggtgtgggtaacattggtggggttgcaacggcaatcgccttagggggcgaaggcgcagtgttttggatgtgggtaacggcatttattggtatgtcgagtgctttcgctgaatctacccttgctcaattatttaaaattcaagataaagatggatcattccgtggcggccctgcttattatattgtgcaaggtttaaaatcacgttgtatggcagtggcttttgcgcttgcattaatttttacatttggttttgcctttaattctgtgcaggcaaactctattgttgaagcaaccagcaatgcgtggaattggaaaggggaatatgtcggtatttcattagtaatttttaccgcacttattattttcggtggcgttaagcgtattgcgattatttcgagcaaccttgtaccaatgatggcacttttctatttgattatggcggtaattattcttggcatgcatattgatatgatcccttccgtgattcatcgtattgttcaaagtgcatttagttttgatgctgccgctggcggaatgtttggtgcattggtatcgaaagcaatgatgatggggattaaacgtggtttattctcaaacgaagcagggatgggatctgcgcctaattcggctgcagcagctcacgttaagcatccagttagccaaggtttagtgcaaatgctcggggtgtttgttgatacaatgatcgtttgtacttgtactgccgttattattttgctttcgaataattatggtagcgaaacgctcaaaagtatctctcttacgcaaaatgctttgcaataccacataggtgaatttggggcgcatttcctggcgtttatcttattgttattcgcttattcttctattattggtaactatgcttatgcggaaagcaacatccgttttatcaagaataaaccttggttggtcttgttgttccgtttaatggtgctatttttcgtgtatttcggtgcggttcgctctggtaatgtggtgtggaatttcgcagatacggtgatggctgtcatggcaatcattaacttgatcgcaattttgatgttgtcgccaatcgtatggaaattaatgaaagattatcaacgccagcttaaagaaggaaaaacgccagagtttaaaattgatgaataccctgaattacgtaagaaaatatttgattcccgcatttggaaataa

SEQ ID NO: 6883 - DNA, 441 bp, Haemophilus influenzae
  CDS (1)...(441)
atgtctgaaggaaatattaaattactcaaaaaagtgggattaaaaattacagagcctcgcttaactattctcgctttaatgcaaaatcataaaaatgaacatttttctgcagaagatgtttataaaattttcctggaacaaggttgtgaaattggattagccacagtttatcgtgtgcttaatcaatttgatgaagcgcatattgtaatccgtcataattttgagggaaataaatccgtttttgagcttgctccaacagaacatcacgatcatattatttgtgaagattgcggtaaagtatttgaatttacggataatattattgaacaacgtcagcgtgaaatcagtgaaaaatacggcataaaattaaaaacgcataacgtgtatctttacggcaaatgcagtgatattaatcattgtgacgaaaacaattcaaaataa

SEQ ID NO: 6884 - DNA, 1074 bp, Haemophilus influenzae
  CDS (1)...(1074)
atggctggtaatacaattggacaacttttccgtgtgacaacctttggagagtcacatggtattgcattaggctgtatcgttgatggcgtgccaccaaatctcgaattatccgagaaagatattcagccagatttagatcgtcgtaaaccaggaacatctcgatatacgacgcctcgtcgtgaagatgacgaagttcaaattttatctggtgtgtttgaaggaaaaaccacaggcacaagtattgggatgatcattaaaaatggagatcagcgttcgcaagattatggtgacattaaagatcgtttccgcccaggtcatgcggattttacctatcagcaaaagtatggaatccgtgattatcgtggcggtgggcgttcgtcagcacgtgaaacagcgatgcgggttgctgcaggggctattgcgaaaaaatatttacgcgaacattttggcattgaggtgcgaggttttttaagccaaatcggtaatataaaaattgctccgcagaaagtgggacaaattgattgggaaaaggtaaacagtaatccattcttttgtcctgatgaaagtgcggtagaaaaattcgatgaattgatccgtgaacttaaaaaagaaggagattctattggcgcaaaacttactgttattgcagaaaatgtacctgtaggattgggcgagccagtatttgaccgtttagatgccgatcttgctcacgcattaatgggaattaatgcagtaaaaggtgtagaaattggcgatggctttgctgtggttgaacaacgaggttcggaacatcgtgatgaaatgacacctaatggctttgaaagtaatcatgcaggcggtattttaggcggaattagttcaggacaaccaattatcgccactattgcactaaaaccaacttcaagcattacgattcctggtcgttcaatcaatcttaatggtgaagccgtagaagttgtaacaaaaggtcgtcacgatccttgtgtggggattcgtgctgtgccaattgcggaagctatggtggcgattgtcttattagatcatctcttacgttttaaggcacagtgtaaataa

SEQ ID NO: 6885 - DNA, 351 bp, Haemophilus influenzae
  CDS (1)...(351)
atgtctaacattatcaaacaacttgaacaagaacaattaaaacaaaacgtacctagcttccgcccaggtgatactttagaagttaaagtatgggtggttgaaggtagcaaacgtcgtttgcaagcattcgaaggcgtggttattgcaattcgtaaccgtggcttgcactcagcatttactttacgtaaagtatctaacggcgtaggcgttgagcgtgtattccaaactcactctccagctgtagattctatcgcagttaaacgtaaaggtgcggtacgtaaagctaaactttactacttacgtgaacgttcaggtaaatcagctcgtattaaagagcgtttaggcgcataa

SEQ ID NO: 6886 - DNA, 741 bp, Haemophilus influenzae
  CDS (1)...(741)
atgtggataggggtaatttcattattccccgaaatgtttaaagcaattacggaatttggggttacaggtagagccgtaaaacataatcttctgaaagttgaatgttggaatccaagagattttacattcgacaagcataaaaccgtggacgatcgcccttatggtggtggcccaggaatgctaatgatggtgcaacctttacgggatgcgattcatactgcaaaagctgcggcaggagaaggcgcaaaggtgatttacctttcgccacaaggacgtaaactcgatcaaggcggcgtaaccgagcttgctcaaaatcagaaattgattttagtatgtggacgttacgaagggattgatgaacggttgattcaaactgaaattgatgaagaatggtcaatcggcgattacgttctgaccggtggggaattgccggcaatgacattaattgatgctgttgcacgttttattcccggtgtattaggcaaacaagcctcggcagaagaagattcttttgcagatggtttattagattgcccgcattacactagaccagaagtgttagaaggattaactgtaccacccgtgctgatgtcgggacatcacgaagaaattcggaaatggcgattaaaacaatcgctacagagaacgtggctccgacgccctgagctcttagaaggcctagctctgactgacgaacaacgtaagctgttaaaagaggcgcaagccgagcataacagttag

SEQ ID NO: 6887 - DNA, 249 bp, Haemophilus influenzae
  CDS (1)...(249)
atggtaaccattcgtttatctcgtggcggagctaaaaaacgcccattttatcaaatcgtagtcgctgacagtcgttcacctcgtgacggtcgcttcattgaacgtgtaggtttcttcaatccaattgcacaaggtaatgcagaacgtcttcgcattaatcttgagcgtgtaaatcactgggttgctcaaggtgcttcactttctgatcgtgttgcgagcttggtaaaagaagcacaaaaagcagcataa

SEQ ID NO: 6888 - DNA, 726 bp, Haemophilus influenzae
  CDS (1)...(726)
atgttcaaaaggctgtcattatatacgttattactttgtcttgtaccattttttatttggggtatttcctatcagtggcatggtaatagccaattaactcaagctgattattggctttatttgctcactgaaacgggtagcgtaccttatgcgttgatcacctgtgtgttgtttacgcttttgtttgcgtttttatttaaaaatccaaaacaatggatattaggcgtaattgtgatggggatttcagttattgcaactcaagccgcaaaaacaggggcaaaagcattatttgaagaacctcgtccattcaccgtttatctagctgagcaaactcattcaacgcctgaaaacttttataaaaatgaccgcactttgcgtgctgaaatagctaagaatttttattcgatggatgccattacaccagcttggttagttcatcattatgaaaatgaaacggggtattcgttcccttctggacatacgatttttgcagcaacttggctaatgcttgctgttggctttacccaattattgggtaaccgttcttttaaagcaaaattgctggtggtgggtattgcagtgtggggcttattgatgttgattagccgtgtgcgattaggcatgcattacccaatagatttgttggtggcgacattactggcatggttgattaatagcattatttttgcctttttaaagaaaaaggcgatcttcgtcatgaaatag

SEQ ID NO: 6889 - DNA, 1467 bp, Haemophilus influenzae
  CDS (1)...(1467)
atgtcattacgcattaaacaagaagcccttacttttgacgatgttctactcgtcccagctcactcaactgtgcttccaaatactgccaacctttcaactcaacttactaaagaaattcgtttaaatatcccaatgctttcagcagcaatggataccgtaactgaaaccaaacttgcgatctctttagcacaagaaggcggtattggctttattcataaaaatatgacgatcgaacgccaagcagatcgcgtgcgtaaagtaaaaaaattcgaaagtggtatcgtttctgaaccagtaactgttttaccaaatttaacgcttgccgaacttgctgaaatggtgaagaaaaacggatttgcgggctaccctgttgtagatggggaaaataatttaatcggtatcattactggccgtgatacacgtttcgtaaaagatttaagcaaaacagtttcacaagtaatgacgaaaaaagaagacttggtgaccgtaaaagaaggggcgagtcgcgaagaaattttggaattaatgcatcaacaccgtgttgaaaaagtattagtggttaatgatagtttcaaacttaaaggtatgattaccgttaaagacttccaaaaagcagaacaaaaaccaaatgcatgtaaagatgaattcggtcgtttacgtgtcggtgcggctgtaggtgcaggtgctggcaacgaagaacgtattgatgccttagtgaaagcaggcgtagatgtactattaattgattcttctcacggtcactcagaaggcgtattacaacgcgttcgtgaaactcgtgcaaaatatccaaatttgcctatcgttgcaggtaacgtagcaacggctgaaggcgcaattgcattagcagacgcaggtgcaagtgctgtaaaagtaggtattggtcctggttcaatttgtacaactcgtattgtaactggcgtaggtgttccacaaattaccgctatcgcagatgcagctgctgcattaaaagatcgtggtattcctgtaattgctgacggtggtatccgtttctctggcgatattgcaaaagctatcgctgctggtgcaagctgtgtaatggttggctcgatgtttgcgggtacagaagaggctccaggtgaaatcgaactttatcaaggtcgtgcatttaaatcttaccgtggtatgggctcattaggtgccatggcgaaaggctcatcagaccgttatttccaatcggataacgcggcagataaactcgtaccggaaggtattgaaggccgtattccatataaaggttacttaaaagaaatcatccaccaacaaatgggtggcttacgttcttgtatgggcttaacgggctgtgcaactattgatgaactacgcaccaaagcggaatttgttcgcattagcggtgcaggcattaaagaaagccacgttcacgatgttgctattactaaagaagcacctaactatcgtatgggctaa

SEQ ID NO: 6890 - DNA, 1572 bp, Haemophilus influenzae
  CDS (1)...(1572)
atgacaaatatccactatcacaaaatcctaatcctcgactttggttcacaatacactcaactgattgcgcgtcgtgtgcgtgaaatcggtgtgtactgcgaactttgggcttgggatgtaaccgaacaacaaatccgtgaatttgctccaacgggtatcattctttctggcagtcctgaaagcacaactgaagaaaatagccctcgtgcaccggaatatgtatttaatgctggtgtaccagtattaggcatttgctatggaatgcaaacgatggcgatgcaacttggcggcttaaccgaaacgtctgatcacagagagttcggctatgcttccgtttctcttgaaaattccaccgcactttttgcaaatcttaacgataatttaaccgcttctgagccaaaattagacgtttggatgagccacggcgataaggtaacgcgcttaccagaaaacttcaaagtaactggcacaacgctaacctgcccaattgctgcgatgtctgatgaaagccgtcgtttctacggtgtgcagttccaccctgaagtaacgcatactaaaaaaggcttggaattattaaccaacttcgtagtaaacatctgtggttgcgaaaccaaatggacagcagaaaacattatcgaagatgccgttgctcgcattaaagagcaagtgggcgatgatgaagtgattttaggcttatctggtggtgtggactcttctgtggttgcattacttttacaccgtgctatcggcaaaaacttacactgcgtatttgtggataacggtttactccgcttacacgaaggcgaccaagtcatggaaatgtttggcgataaattcggtttaaacatcactcgtgttgatgctgaaagtcgtttcttaggtgaacttgcaggcgtatctgatcctgaagcgaaacgtaaaattatcggtaaagtgttcgtggatgtattcgatgatgaatcgaaaaaactcactaatgtgaaatggttggcacaaggtacgatttaccctgacgtaatcgaatctgcagcaagcaaaactggtaaagcacatgtgattaaatcacaccacaacgtaggtggcttaccagactatatgaaacttggtttagttgaacctttacgtgaattatttaaagatgaagtacgtaaaatcggtttagcattaggcttaccagctgaaatgatcaaccgccacccattccctggcccaggcttaggtgtgcgtgtattaggcgaagtgaaaaaagaatactgcgatttattacgccgtgcggatgcgatctttatcgaagaattacgcaacagcggttggtatgaaaaaaccagccaagccttcagcgtattcttaccagtgaaatctgtaggtgtgatgggcgatggccgtaaatacgattgggttatttccctacgcgcggtagaaacaatcgattttatgaccgcacattgggcacatttgccttatgatttattaggcaaagtgtctaaccgtatcatcaacgaagtgaatggaatttcccgcgtcgtatacgacatcagcggaaaaccacccgcaacaatcgagtgggaataa

SEQ ID NO: 6891 - DNA, 1311 bp, Haemophilus influenzae
  CDS (1)...(1311)
atgttttcacgcaaagatattatcgttttaggaatgatgatcttcgccttatttttaggtgcgggtaatatcatttttccgcctatggaaggattttcctcaggacaacattggacgagtgcttccttaggctttgttttaactggcgttttaatgccatttattacgcttgtggtggtagcgattttaggtcgtggcgaagaacttactaaagatttaccaaaatgggctggcacaggtttcctcgttatactttatttaaccattggctctacctttgcaatgccccgcatcactaatgttgcttatgaaatggcgtggttgcctttaggcttaacagaaaataatgcgaatgttcgttttgtattctcactcatttttaacttaatcgcgatgggctttatgattagcccaaatacgatcatttcaagcgtgggtaaatttatgacaccagctttattagtgttacttattgctgtagcaattaccgtatttatttcgcctttatctgaaattcaagcgccaagtaatgcttatgaaaatagccattctttattaatcggtttaactagcggctatcaaacgatggatgtacttgcagccatcgctttcggtggaattgtcgcccgagcattatcagcgaaaaatgtgacaaaaaccaaagatattgtgaaatacaccatttcagcaggatttgtttcagtcatcttacttgcgggtttatatttttcgcttttctatctaggcgcaactagtgctgcagttgcagaaggggcaacgaatggtggacaaattttctctcgttatgtaaatgtcttattcggttcagctgggacttggattatggcaggtattattgtgttagcgagcttaacaacacttgttggtgtaactagcgcatctgctgattatttttcaaaattctctgtgcgtttttcttatccattctgggccgcactttttaccgcaatgacaatcactgtttcacaatatggtttaacggatctacttcgcataacgatcccagccttgttattaatttacccagtagccattgtgcttgttttattgcaattcttacgaaaaaaacttccatcaataaaatttacatacaatagtacattgctcgttacagtttgttttagtttatgtgacagcttaaataacgttaaaatgttaccagaaagcatcaattcattattgaaacacttccctctttcatctgaaggaatggcttggttggttccgactttagtaatgttagttgcaagcatttttattggaaaagcattgcataaaacccattcttaa

SEQ ID NO: 6892 - DNA, 2130 bp, Haemophilus influenzae
  CDS (1)...(2130)
gtgaatccaattgttaaacaatttaaatacggtcagcataccgttactctagaaactggtgcgattgcacgtcaagcaacggctgcggttatggcaagcatggacgataccacggtattcgtgactgttgttgctaaaaaagatgtgaaagaaggtcaagacttcttcccattaaccgtaaactaccaagagcgtacttatgcggcgggtaaaatcccgggtggtttcttcaaacgtgaaggtcgtccatctgaaggcgaaactttaattgcacgtttaattgaccgtccaattcgtccattattcccagaaggtttcttcaatgaaatccaagttgtggcaactgtggtttctgtaaacccacaaatcagcccagacttagtggcaatgatcggtgcttctgcagcattaaccttatctggtgtgcctttcaacggccctatcggtgcagcgcgtgttggttttatcgacaaccaattcgtattaaacccaactatggcagaacaaaaacaaagccgtttggacttagtggttgcaggcactgacaaagccgtattaatggttgaatctgaagctgatattttaactgaagaacaaatgttagcagcggtcgtattcggtcatcaacaacaacaagttgtagttgaagcaatcaaagaatttgcaaaagaagcgggcaaaccacgttgggattgggttgcaccacaaccaaacacagatttaatcaacaaagtaaaagcgattgctgaagcacgtttaggcgatgcataccgcattactgaaaaacaattacgttacgaacagatcgatgcgattaaagcggatgtaattgcgcaaatcacagctgaagatgaagaaaycagcgaaggtaaaatcgtggatattttcaccgcacttgaaagccaaatcgttcgtggtcgtatcattgcaggcgaaccacgtattgacggtcgtaccgttgatactgttcgtgcattagatatttgcactggtgtattaccacgtactcacggttctgcgatttttactcgtggcgaaacgcaagcattagctgttgcaaccttaggtaccgaacgtgatgcacaaatcattgatgaattaacgggtgaacgtcaagatcacttcttattccattataatttccctccatattctgtaggcgaaacaggtatgatcggctcgccaaaacgtcgtgagatcggtcacggtcgtttagcaaaacgtggtgtagcggctgttatgccaagccttgcagaattcccgtatgttgtgcgtgtagtatctgaaatcactgaatctaacggttcttcttctatggcgtctgtatgtggtgcgtctttagcattaatggatgcgggcgttccaatcaaagctgctgttgcaggtatcgcaatgggcttagtgaaagaagaagaaaaatttgtggtgctttcagatattttaggcgatgaagaccatttaggcgatatggactttaaagtggctggtacacgtgaaggtgtaaccgcccttcaaatggacatcaaaattgaaggtatcacccctgaaattatgcaaattgcattaaaccaagcgaaaagtgcacgtatgcacattcttggtgtaatggaacaagcaattcctgctccacgtgctgatatttctgactacgcaccgcgcatctatacaatgaaaatcgatcctaagaaaatcaaagatgtgattggtaaaggtggtgcaacaatccgttcactaactgaagaaactggtacatcaattgacattgatgacgatggtacagtgaaaattgccgcagtagacagcaatgcagcgaaaaacgtaatgggacgtattgaagaaatcgttgcagaagttgaagctggcgtaatttacaaaggtaaagtcactcgtcttgctgattttggtgcattcgtcgcaatcgttggaaataaagaaggtttagttcatatttctcaaattgctgaagagcgtgtagaaaaagttagcgattaccttcaagtgggtcaagaagtaaacgtaaaagttgttgaaatcgatcgtcaaggtcgtattcgtttaacaatgaaagacttggctccaaaacaagaaactgaaattaaccaagaagattctgtcgaagaacaggaataa

SEQ ID NO: 6893 - DNA, 1842 bp, Haemophilus influenzae
  CDS (1)...(1842)
atgactgacaaaattactttcaatgacttaggcttacctgagttcatcttaaaagctgtttctgacttaggttttgaaacaccttctccaattcaacaatcttgtatcccgcatttgctcaatggcaatgatgtgctaggtatggcacaaacaggtagtggtaaaaccgctgcctttgcactgcctttactcgcgcaaattgatccaagtgaaaaacatccacaaatgttagtaatggcacctacacgcgaacttgctattcaagttgccgatgcgtgcgaactatttgttaaatatgcacagggcactcgcattgttaccttatatggtggccaacgttatgacatccaacttcgtgcattaaaacaaggcgcacaagtggttgtgggtacaccaggccgtattcttgaccatattcgtcgcggaacattaaatctttctgaacttcgttttatcgtattagatgaagccgatgaaatgctacgcatgggtttcattgatgatgtagaaaccgtcatggcagaattaccagaaaatcatcaaactgcgttattctctgcaacaatgcctgaaccgatccgtcgtattacgaaacgttttatgaatgatccacaagaagtgaagatcaaagtgaataacgaaaatgccccagatatcgaccaaagttgttggtatgtacacggcgtgcgtaaaaacgaagcccttcttcgtttcttagaagtggaagattttgatgcagcgattatctttgctcgcactaaaactggtactttagacattacagaactacttgaaaaaaatggtttccgttctgccgcacttaatggtgatatgacacaacaattacgcgaacaaaccctcgatcgcttacgtaacggcagtttagatattgttgtggcaaccgatgtggctgcacgcggtattgatattgaacgtatcagccttgtggtgaactacgacattccgcttgatgcagaatcttatgtacaccgaattgggcgtactggtcgtgcaggtcgttctggccgtgctttattatttgttgaacctcgcgagcgtcgtttacttcgtaatattgaacacctaatgaaaaaaggtatcaatgaagtagaattgccaaatcatcttgtgttacaagaatgccgccgcaaaaaatttgtcgccaaaattacgaaacaactcgagcatcacgatttagaacaatatcgtagtttattagaagacttattcacagccgatcaggatcaagaaaatattgctgcagcaatgttgatgctgcttcaaggcaaacaaaaactcattcttccacctgatccaccaatggaaaaacgtcgtcgtgaacgtaatgatcgcggtgatcgccgtgaaaatccacgttcagctgaacgtcgtggcgaacgtaaaggctatggaaatccacaaccaatggatttatatcgtatcgaagtcggtcgtgcagatggtgtagaagttcgccatatcgttggtgcgattgctaacgaaggcgatattaacagccgttatattggtcatattaaactttatgatgattacactaccgttgaattgccacaaggtatgccgaaagaattattgcaacaattcgctaaaacacgcgtattgaataaacaaatgcaaatgtctttcttaggtgcagtaaaatccgataattcccgtggcagcgatgattttaacggtaaacgtaaaggtcgtggtggcgatttccgtggagagcgcggacgtgaacgcggcaatgataatcgtggaaatcgtaaatttaatgaaaaaagtaaccgcacttttagcgacaaaccacgccgtgatcgtagatcatcattctaa

SEQ ID NO: 6894 - DNA, 1389 bp, Haemophilus influenzae
  CDS (1)...(1389)
atggtgttcccatggcaatttttacgtcatactgaagaaaatcattatactgcaattcaagctaggggatcactttatgtaggaacaataaataaccagatttcttattttattaataaagatagcgaacgaggctttgaatatgaattagccaaagcatttgctgatactttaggcgtagaactcgaaatgaaaattttcgataatcaagagcagttatttgatgaacttgataaacacaatattgatttagctgccgcccaccttttataccatcctaaaaatgcggaacgtttccaaataggtcctgcatatcattctgcttcatggcaattagcttatcgaaaaaatgaaaatcgtcctaaaaatttaggtaacgtaaagaaagatatttatatctcaaataatttagcattagaagaaacgctaaaagaattacaaaaacaatatccacaattaatttggaaaagaaatcaagcacttactcaagaagaactattactacaactggctgaaggcaaaattccttacgttattgcaaattctattgatattgctgcaattcaacaaatcaaaccagagttagccattgcctttgatattactgatgaagcaaacgttcactggtatttacccaataacccctaccgcgatctacaaacggctttactcaattttatgaataatgccgaagaaacgggacttttagataatttaaaagaaaaatatttaggacatatttcacaatttgattacgtggatacgcgctcttatatgaacgcaattgaaaataccctgccacaattctcaccgctctttgaaaaatacaaaggtgaattagattggcgactactcgcagcagtggcttatcaagaatctcattggaatcctgacgcaacatcgccaactggagtacgtggcataatgatgctcaccaaaaataccgcacaacatatgaaaatcagtgatagaacagatcctgaacaaagtattaaagctggttcagagtatttacactggttgattagtcagcttcctgaaagcattgaaaaggaagaaagaatttggtttgccttagttgcctataacataggactcggtcacttaattgatgcacgccgtttaactcaaaatcttggaggaaatccagataattggttcgatgtgaaaaaaaatctgcctttattagcagaaaaacgctattattcccaactgaaatacggctatgcgcgaggctatgaagcccatcaatatgtagaaaatattcgccgctatatgaatagcatagtgaattatcatcgagtccaagaaaatcaaacaacgaatgataatgccaacaacgaaagtgcggttaaaaatttagaagaaataaaagaaaataaggattaa

SEQ ID NO: 6895 - DNA, 1149 bp, Haemophilus influenzae
  CDS (1)...(1149)
atgaagtatgaattagataaaacaagcggcaatgctcgtcgtggtcgcttggtatttgaacgtccacagggcacgttcagtgtagaaacccctgcatttatgccagtgggtacttatggcacggtaaaaggcatgacgccagaagaagtgcgtgcgacaggtgcagaaattttactgggtaacacgttccatttatggcttcgaccaggacaagaagtcatgcgtaaacacggtgatttgcacgactttatgcaatggcatcgtccgattttgactgacagtggcggtttccaagtattcagtttaggtaaattacgtaaaattaccgaagaaggcgtaaaattccaaaacccaattaatggtgagcgtattttcctttcgcctgaaaaatccatggaaattcaatatgatttaggttctgatatcgtgatgatttttgatgaatgtactccttacccagcgactttcgattatgcgaaaaaatctatggaaatgtcacttcgttgggcaaaacgcagccgcgatcgctttgatgaattaggcaataaaaatgcgttattcggtattatccaaggcggtgtatttgaagaattacgtaaagtatcattagaaggcttagtcaatattggttttgacggttatgcggtgggcggtttagcggtaggcgaaccaaaagaagatatgcaccgaattttagaatatatttgcccacaaatcccagctgacaaaccacgttatttaatgggcgtgggtaaaccagaagatttagtggaaggcgtgcgtcgtggcattgatatgtttgactgcgtaatgccaacccgtaacgcacgtaatggccatttatttgttacagacggcattgtcaaaatccgtaatgcaaaatatcgtgatgataccagcccgttagatcctgaatgtgattgctacacctgtaaaaactacaccaaagcttatttatatcatttagataaatgcggtgaaattttaggtgcgcgcttaaataccattcacaatttacgctattatcaacgtttaatggcggaaattcgtcaagcgattgaagatgatcgttttgatgattttgtggtggaattctatgctcgcatgggcaaacctgttccgccattacaattagcggataaatcataa

SEQ ID NO: 6896 - DNA, 1092 bp, Haemophilus influenzae
  CDS (1)...(1092)
atgcgtgtttcagactttaactttgatttacccgatgaattaattgctcgttatcctaaaactgatcgtgtttcttgtcgtttattacagttaaatggcgaaaacggagaaatttttcaccgcactttttctgatgtattagatttaattgatgaaggcgatttgttgatttttaataatacacgcgttattcctgcaagaatgtttgggcgtaaagccagcggtgggaaaattgaagttttagttgaacggatgttagatgaacatcgtttcttagcgcatattcgttcatcgaaatcccctaaagaaggggctgaattatttttaggggaagataaattaggcgaaaataatggcattaaagcggtaatgaaagcgcgtcatggtgcattgtttgaagtggaattaagtgataaatcaaccgctcttttagatgtgttgcaaaccattgggcatatgccattgccgccttatattgaccgcccagatgaagaagccgatcaagaatgttatcaaacggtttatagtaaagtaccaggtgcggtagcagcaccaacagcaggcttacattttgatgaaaatttacttgaaaaactcaaagcaaagggtgtgaattttgaatttgttacattacatgtaggcgcaggaacattccagcctgttcgtgtggaaaatattgaagatcacgtaatgcatgcggagtatgtggaagtttctcaagaagtctgtaatgcgattatcgcaacaaaaaaagcgggcaaacgtgtaattgcagtgggaactacttctgttcgttctattgaaagtgcggcactttctgcggaagaatttggcaatccagatttaattgagccttatttttctgatacctctatttttatttatccagggaaaaaattccgagtggtggattgcttaattactaatttccacttacctgaaagcactttgattatgttagtttcagcttttgctggttataaaaataccatgaatgcatataagcatgcagtaaaagaaaaatatcgtttctttagttatggcgatgcgatgtttattaataaaaattctaatgtgagaggattggaataa

SEQ ID NO: 6897 - DNA, 2832 bp, Haemophilus influenzae
  CDS (1)...(2832)
atggaaaatatcgatattcgcggggctagaacccataacctgaaaaatattaatttaactattccacgcaataaacttgtggtgattactgggctttcaggttcgggaaaatcctctttagcctttgatacactttatgcggaagggcaacgccgctatgttgaatctctttcggcgtatgcacgccagtttttatctttaatggaaaagcctgatgtggattctattgagggactttcccctgcaatttcgattgaacaaaaatctacctcacacaatccacgttctacggtgggaacaattacggaaatttatgattatttacgtttattgtttgcacgagtaggggagccacgttgtcccgatcataatgttccattaacggcacaaacaattagtcaaatggtggataaagtattaagtttgccagaagacagcaagatgatgttacttgcgccagttgtcaaaaatcgaaaaggtgaacacgttaagattttagaaaatattgctgcgcaaggttatattcgtgcgcgtattgatggcgaaatttgcgatttatctgatccgccaaaattagccttacagaaaaaacatactattgaagtagtggttgatcgttttaaagtgcggtcagatttagcaacacgtttagcagagtcttttgaaaccgcattagagctttcaggtggcactgcaattgtggcagaaatggataatccgaaagcagaagaattagttttttcggcaaattttgcttgtccgcattgtggttattctgtgccagaattagagcctcgtttgttttcctttaacaatcctgcaggtgcttgcccaacttgtgatggcttgggtgtgcagcaatattttgatgaagatcgtgtggtgcaaaatccaactatttctcttgctggtggtgcggtaaaaggttgggatcgtcgtaatttctattattatcaaatgcttacatcattggcgaaacattatcattttgatgttgaagccccttatgaatctttgccaaagaaaattcaacacatcattatgcatggctcaggcaaagaggaaattgaattccaatatatgaatgatcgtggcgatgtggttattcgcaagcacccttttgaagggattttgaataatatggctcgccgatataaagaaacggaatcaatgtcggtgcgtgaagaattagcgaaaaatattagcaatcgaccttgtatagattgtggcggttctcgtttgcgacccgaagcgcgtaatgtgtatattggaagaaccaatttgccgataattgcggaaaaaagcattggcgaaaccctcgaattttttaccgcactttctctcactggtcaaaaagcacaaattgcggaaaaaattcttaaagaaatccgcgagcgtttgcagtttttagtcaatgttggtttgaattatctttctctttctcgttctgctgaaactctttcaggtggggaggcgcaacgtattcgccttgcgagtcaaattggtgcgggacttgttggcgtaatgtatgtattagatgaaccctctattggcttgcaccaacgtgataatgaacgcttacttaatacgttaattcatttgcgtaatcttggtaatacggtaattgtcgtggaacacgatgaagacgcgattcgtgcagctgaccatattattgatattgggcctggtgctggcgtgcatggcggacaagttattgcgcaaggaaatgccgatgaaattatgctcaatccaaattccatcacgggaaaatttttatcgggcgcagataaaatcgaaattcctaaaaaacgcaccgcacttgataagaaaaaatggctcaaacttaaaggcgcatcaggtaataacttaaaaaatgtgaatttagatattcccgttggtttgtttacttgcgtaactggcgtgtctggttcaggaaaatccacacttattaatgatactttatttccacttgcgcaaaatgcgttaaatagagcggaaaagacggattacgcaccttatcaatctatcgagggattagaacatttcgataaagttattgatattaaccaaagcccgattgggcgcacgccacgttcaaatccagccacttatacaggcttatttaccccaattcgtgaactttttgcaggtgtgccagaggcacgtgcgcgtggttataatccggggcgttttagctttaacgtacgaggtggacgctgtgaagcctgtcagggcgacggtgtactcaaagttgaaatgcattttttacccgatgtttatgttccttgcgaccaatgtaaaggtaaacgctataatcgcgaaaccttagaaattcgttacaaaggtaaaaccatccatcaagttttggacatgacggtggaagaagcacgcgagttttttgatgcgattccaatgattgcaagaaaattacaaaccttgatggatgtgggattatcctatattcgattaggtcaatcttctacaacactttcaggcggcgaagcacaacgcgttaagctagcgactgagctttctaaacgtgatacaggtaaaaccttatatattttagatgaaccgacgactggtttgcatttcgctgacattaagcaattacttgaagtattgcatcgattacgcgatcaaggaaatactatcgtcgtcattgaacacaatcttgatgtgattaaaaccgcagactggattgtcgatcttggcccagagggaggcagtggcggcggacaaattattgcgacgggtacaccagaacaagttgctaaagtaacaagttcccacaccgctcgcttccttaaaccgattttagaaaaaccttag

SEQ ID NO: 6898 - DNA, 507 bp, Haemophilus influenzae
  CDS (1)...(507)
atggctggaattaataaagtcattattgtaggtcatttaggtaatgatcctgaaattcgtactatgccaaacggcgatgccgttgcaaatatcagcgtagcaaccagtgaaagctggaacgatcgtaatactggcgaacgccgtgaagtaacagaatggcaccgcattgtattctatcgtcgtcaagcagagatttgcggcgaatatttacgcaaaggctctcaagtgtatgtggaggggcgtttaaaaacgcgtaaatggcaagatcaaaacggtcaagatcgttacaccacagaaattcaaggcgatgtaatgcaaatgcttggtggacgtaatcaaaacgcaggtggttatggtaatgatatgggcggtgcgccacaatcttcttaccaagctcgtcaaactaacaatggtaatagttatcaatcatctcgcccagctccacaacaagctgcaccacaggctgagccaccaatggatggatttgatgacgatattccgttctaa

SEQ ID NO: 6899 - DNA, 588 bp, Haemophilus influenzae
  CDS (1)...(588)
atgaaacaaaaaatcgtacttgctacaggcaataaaggaaaagtaaaagaaatggctgatgtcctatctgattttggctttgaagtgattgcacaaacagatttaggcattgaaagcccagaagagacaggcttaacttttgtagagaatgccttattaaaagcccgttatgcctcagagaaatcaggtttacctgctattgcagatgattctggcttagtagtttccgcacttaatggcgcaccaggtctgtattctgcccgttatgctggtgaagagggcaatgatgctaaaaaccgtgagaaattattggcagagcttgctcatattgcacaagaacaacgccaagccaaatttgtgagctgtatcgtgtttttacagcatccaacggatccatcgccaattatcgccgaaggtgagtgttgtggcgtgattggttttgaagaaaaaggcgaaaatggctttggttatgacagtttattctttagtccagaacaaggttgcacatttgctgaattagaaacagctgagaagaaaaaaatttctcatcgagcaaaggcattgagtgttttaaaaagtaaattataa

SEQ ID NO: 6900 - DNA, 600 bp, Haemophilus influenzae
  CDS (1)...(600)
atgagccttttcgcccttttttatatgctttttgcctatcttttaggctcaatttccagtgcgattttaatttgtcgcattgcaggcttgccagatcctcgtcaaaatggttcacacaaccctggggcgacaaatgtgttgcgcattggaaatcgtaagtctgccttggcggtgcttatttttgatatgttaaaagggatgattcctgtatgggcagggtattatttaggtttaacccaatttgaattgggaatggtcgcacttggtgcttgtttagggcatattttcccaattttctttcaatttaaaggtggcaaaggtgttgcaactgcctttggggcaatcgcaccgatttcttgggctgttgcaggttcaatgtttggtacgtggatctttgtttttcttgttagtggctattcttcattaagtgcagttatttctgcattacttgtgcctttttatgtgtggtggtttaaacctgaatttacttttcctgttgcactggtatgttgcctattaatttatcgtcatcacgataacattcaacgcttatggcgtggtcaagaagataaagtttgggctaaatttaaaaagaaataa

SEQ ID NO: 6901 - DNA, 1026 bp, Haemophilus influenzae
  CDS (1)...(1026)
atgcaaaatttacaaccttttcacactttccacattcagtctaatgctcgtgaaattattgaagcacatagtatcgaacagctacaacaagtgtgggcgaattctaaatcagaaaatttacccactctttttttaggtcaaggaagtaatgttctatttctagatgattttaatggcatcgtgatccttaatcgtttaatggggattacgcacgaacaagatgcaaattttcactatcttcacgtcaatggcggggaaaattggcataaattggtggagtggtctattaataatggtatttatggcttagaaaatctggctctgattcccggttgtgcaggctctgcccccattcaaaatatcggtgcttatggcgttgaatttaaagatgtatgtgattatgtggaggtacttaatttaaatacgaacgaaacctttagactcgacacagaacaatgtgaatttggttatcgtgagagtatttttaaacatcgttatcagcaaggttatgtgattacagcggttggattaaagctaaaaaaagattggcagcctattctaaaatatggttcgcttgtagagttcgatccgaaaacggtcaccgctaaacaaatttttgatgaagtctgtcatatccgtcaaagcaaattacctgacccaaatgaagtgggtaatgcagggagtttctttaaaaatcccgttgtcagttcagaacattttgaagaaatcaaaaaacatcacgaaaatctaccgcactttccacaggcagatggctcagtgaaattagcggcaggctggctgattgatcaatgcaatcttaaaggttttcaaattggtggggctgcggttcataaaaaacaagcattagtattaattaacaaaaacggggcaacagggcaagacgtggtcaaactcgcccatcacgttcgccaaactgttgcagaaaaatttggtgtatatttacaacctgaagtacgatttatcagtgcaactggcgaagtaaatagtgagcaaattatcacgtaa

SEQ ID NO: 6902 - DNA, 1443 bp, Haemophilus influenzae
  CDS (1)...(1443)
atgaaactagatgctccttttaatttagatccaaatgtaaaagtgcgtactcgttttgctcctagccctacaggttatttacatgtaggtggcgcacgtaccgcactttattcttggttatacgcaaaacataataacggcgaatttgtattacgaattgaagacactgatttagagcgttcaacacctgaagccactgctgccattattgaaggcatggaatggttaaatcttccgtgggagcatggcccttattaccaaactaaacgctttgatcgttataaccaagtgatcgatgaaatgattgaacaaggcctagcatatcgttgttattgtactaaagaacacttagaagaacttcgtcatactcaagaacaaaataaagaaaaaccacgttatgaccgtcactgcttacacgatcacaaccattcacctgatgaaccccacgttgtacgttttaaaaatccaactgaaggctcggtggtatttgatgatgccgtacgtggccgtattgaaatcagcaacagtgagcttgatgatcttattattcgccgcacagacggttctccaacttataacttctgtgtagttgtagatgactgggacatgggtatcacacatgttgtgcgtggggaagatcatatcaacaacacgcctcgtcaaattaacattttaaaagcgattggtgccccaattccaacctatgcacacgtttctatgattaatggcgatgatggtcaaaaactctctaaacgacatggcgcagtaagcgtaatgcaatatcgtgatgatggttacttaccagaagctttaattaactatcttgttcgtttaggctggggacatggcgaccaagaaatttttagtcgcgaagaaatgatcaactatttcgaattagatcatgttagcaaatcagctagcgcatttaataccgaaaaattacaatggttgaatcaacattatatccgtgaattaccgccagaatatgtggctaaacaccttgaatggcattacaaagatcaaggcattgatacaagcaatggccctgcattaactgaaatagtcaccatgcttgcggaacgttgcaaaaccttaaaagaaatggcaaggtcaagccgctacttctttgaagagtttgaaacctttgatgaagccgcagcgaaaaaacatttcaaaggcaatgctgctgaagcgcttgcaaaagtgaaagaaaaattaaccgcactttctagctgggatttacattctattcacgaagccattgagcaaacagctgctgaactagaagtgggcatgggtaaagttggcatgccattacgtgtcgcggtgacaggttctggtcaatcgccatcaatggatgttaccctagtcggtatcggcagagatcgcgtacttgcgcgtattcagcgtgctattgattttattcatgcacaaaacgcttaa

SEQ ID NO: 6903 - DNA, 2169 bp, Haemophilus influenzae
  CDS (1)...(2169)
atgctggatttgacgccacagagtaaaaaaatttcaattcagattggtgggatgacctgccaatcttgtgccaatcgcattgaaaaagttttaaataaaaaaccatttgtgcaacaagcaggcgtaaattttgctgccgaagaagcacaagttgtatttgacgctacgcaagcaagcgaagctcaaattatagagattatccataaaacaggtttctctgcccatatcaaacaagccaacgaattaccaatagaagaaaatacatcaatcccttggcgattaatcgtactttggataatcaatattccatttctgattggaatgcttggtatgataggtggctcccataacttaatgttaccgccgatttggcaatttgcattagcgagcattgtgcaactttggttagccattccattttatcgcggagcaatcggtagtattcgtggtggacttaccaatatggatgtactggtcagcacaggaacgctcactatttatctttattctgctttcatgttgttttaccacgccaatcatgcaatgggacatgtgtactttgaagcttctgttatggtaattggttttgtcagtcttggaaaatttcttgaagatcgcactaaaaagcacagcctaaatagcttaagtatgctcttgcaactgacaccgaaaaaagtcactgttttacgtaatgaaaaatggattgaaattgctcttgaccaagtcaatatcggcgaaatcattcgtgcgaatcaaggcgagcgtattgcggcagatggcgtaattgaaagtggaaatggttggtgtgatgaaagccatttaacgggggaatctcgcccagaagaaaaacagaaaggtggaaaagtattagcgggggcgatggtaacagaaggttctattatctatcgagcaaatcagcttggtagccaaaccttacttggcgatatgatgaatgcattatcagatgcacaaggttcaaaagcacccattgctcgatttgctgacaaagttacttccgtgtttgtgcctgtcgttttagtgatttcacttgttactttcgcactcacttatattctgacgaatgatagtgtgtcttcactaattcacgcggtatccgtgcttgtgattgcttgcccttgtgccttgggattagccacaccagcagccataatggttggtttaggtaaagcagtcaatgctggcgtatggtttaaagatgcggctgcaatggaggaaaccgcccacgtggataccgttgtacttgataaaactggcacattaacaaaaggagagcttgaaatctctgctttatggcagccacaaagtgcggtgtattctgaagacgatttgtatcgttttgcagcagcagttgaacgacaagctaaccacccaattgcaaaagctattgtgcaagcagcagaacmaaaaatgttagaaattcccaccgcacttttttcaaagatggaagtgggtcaaggcattcaagccgaattagaacaagtgggaacaataaaagtcggtaaacctgattattgcggtttaatcttgcctaaaaatttagaggatatttggcaaattgcgagcattgtcgcagtatccataaatgatgaacccatcggtgcatttgcactgacggatactttaaaaaacgatagcttgcacgccattcaacgcttacaacagcaaaatattgatgtcgtaattatgagtggcgatcaacaatctgtcgtggattacatagcgaaacaactcggcattaagaaagcctttgggaaactaactccaagagataaagcggaacaaatccaaaagctgaaagatctaggtcatattgtcgcaatggtaggcgatggaataaatgatgcgcctgctttagcttctgcaaacgtcagttttgcgatgaaatcaagttcagatattgcagaacaaacagcctctgcaacgcttatgcaacattcggtgaatcaacttgtggatgcgctttttattgcaagagcaaccttgaaaaatatcaaacaaaatctattttttgctttgatttacaatattctcggcataccccttgccgctttcggttttcttagccctataatcgctggtgctgctatggcgttgagctcaatttccgtattgatgaacgccttaagattgaaaaaagtgcggttctaa

SEQ ID NO: 6904 - DNA, 1263 bp, Haemophilus influenzae
  CDS (1)...(1263)
atgcatttaacagaacttaaaaatacgcctgtttctgatcttgtgaaactcggcgaggagcaaatgggcttagaaaatttagctcgtttgcgtaaacaagatattgtctttgcaatcttaaaacagcacgccaaaagtggcgaagatattttcggcggtggtgtgttagaaattttaccagatggttttggtttccttcgttctgccgacagttcctatcttgcaggccctgatgatatttatgtttccccaagtcaaattcgtcgttttaatcttcaaactggggataaaatcgaaggtaaaattcgtccaccaaaagaaggcgaacgctattttgcacttttaaaagttgatcaagttaatgatgacaaacctgaagtttcccgtagcaaaatcttatttgaaaacttaacaccattgcacgctaattcgcgtttaagaatggaacgtggcaatggctcaacagaagatttgactgcccgtattttggatttagcatccccaattggtaaaggccaacgtggtttgattgttgctccgccaaaagcaggtaaaaccatgttgctgcaaaatattgcgcaaagtatcacacataattatcctgatgtagagcttatcgtgttattgattgatgaacgcccagaagaagtgacagaaatgcaacgttccgtaaaaggcgaagtcattgcgtctacttttgatgaacccgcaactcgtcacgttcaagtggctgaaatggtaatcgaaaaagcgaaacgttctgtagaacataaaaaagatgtggtcattttgcttgattctattactcgtttagcgcgcgcttacaatacagtcactccagcttcaggtaaaattttgtctggtggtgtggatgctaatgcgttgcatcgtccaaaacgtttctttggtgctgcgcgtaacgtggaagaaggcggcagtttaacgattattgcaacagcactagttgatacgggttcgaaaatggatgaagttattttcgaagaatttaaaggtacgggtaatatggaattacacctttctcgtaaaattgcagaaagacgcgtattcccagccattgactttaaacgctctggtactcgtaaagaagacttactcacaacagcggacgaattacaaaaaatgtggattcttcgtaagattcttaatccaatggatgaagtggatgcaatggaattcttgattgataagctgatgatggcgaaaaccaacgaagagttttttgaagtgatgaaacgttcgtaa

SEQ ID NO: 6905 - DNA, 1569 bp, Haemophilus influenzae
  CDS (1)...(1569)
atgaaaaatctgaataggattttattatcaattaaatttatgaataaatattttacttatcttattgcgattatatcaggtttactcggcgtttttgccttttcgccatttgattattggcctttagcctatgtttctttactcggtttactttatgtcgctaaaaatcctaaaaaatccaccgcacttttatccactttcttgtgggcgatgggatttttctgctttggagtaagttggcttaatgtcagcatccatcaatttggtggtgcatcgttaggggtaagttatttccttgtcggtttacttgcggcttatcttgcactatacccgatgctatttacctatttagttcatcatttcaaagtgcaaagtgcggtaatttttgccgtgatttggacattgacagaatttttacgaggttggatttttaccggttttccttggcttcaatttggttatacgcaaattgacagcccattttatggcattgcccccatttttggcgtaacaggattaacgttctttactgtttgggcaagtgcggtcatttttaatctcgtttcctctttgtttaaaacgaaaaaccttaaattagttttagcgaatgctttgttattgatcatcgtggggggattaagtgcttattcatcccgaattcactttgtaaaatctgttgaagataaggcaatttcagtcacgcttgcacaaggtaatattgaacaaaatcttaaatgggatcctaattatttctattctactttggcgatttatcaaaaattaatcacagaaaatcttggtaaaaccgatttaattattttgcctgaatcagccttgccaacgcttgaaaatgcgattacgccattttttgagggattagagcgtgcagctaaagaaacgaaaacggaaattatggttggaactgtattccaagatacaaaatctggtaagttattaaattcaattatgactgctggaaacccagattttccttatcaaccaaatacgcaaaatcgttataataaacatcatcttgtgcctttcggggaatatgttccgctagaaagtattttgcgaccacttaattcagtgtttaatttaccaatgtcagcatttcaaagtggggaggcagttcaaccctctttaatcgcaaaaaaacgtgctttttcgccagcaatttgttatgaaattattttcggtgagcaagtgcgacaaaatttgaaacaagatacggattatttgctcacgttatctaatgatgcgtggtttggcgattctatcgggccttggcaacatttacagatggcaagaatgcgtgctttagagttaggcaaaccgcttattcgtgcaacaaatacggggatttcagtttttgttgatgcgcaaggtaaggtattagcacaagccccgcaatttattgaaacaactttgacttataaaattgcacctgcggaaggcaaaaccccttattctgtgttaggaaatatgcctttgtatgctttatctttattgtttttactcttgcacagtatgatggcgtttattcgtcgtaagatgaatatcttataa

SEQ ID NO: 6906 - DNA, 738 bp, Haemophilus influenzae
  CDS (1)...(738)
atgcgcataccaagaatttatcatccaatatcccttgaaaatcaaactcaatgttatctttcagaagacgcggcaaatcacgttgctcgagtgttaagaatgacagaaggcgaacagcttgaactctttgatggttctaatcatatttatccagcaaaaattattgagtcaaataaaaagtccgtaaaagtagagattttggggcgtgagcttgcggataaagaatcccatttaaaaatccatttaggacaagtgatttctcgcggagaacgaatggaatttactattcaaaaatccgtagaattaggggtaaatgtgattacgccattatggtcagaacgctgtggcgtaaaacttgacgcagagcggatggataaaaaaatccaacaatggcaaaaaattgcgattgcagcttgtgagcaatgcggtcgtaatattgtgccagagattcgtccactgatgaaattacaagattggtgtgcagaaaatgatggtgcattgaaattgaatttacatccacgtgcgcactattctattaaaaccttaccgactattcctgctgggggtgttcgcttattaattggctcggaaggtggattatcagcacaagaaattgcccaaactgaacagcaaggatttactgaaattttattaggaaaacgtgttttacgcactgaaactgcatcacttgcagcgataagtgcattgcaaatttgttttggggatttaggcgaatga

SEQ ID NO: 6907 - DNA, 894 bp, Haemophilus influenzae
  CDS (1)...(894)
atgaaaaatcttgcgctcattgatttgtttcttaacgaatattggattgaaaaagggctttcagaaaataccgttcaatcttatcgtttggatttaaccgcactttgtgattggttggataaaaacgacttgtctttggaaactttagatgctgttgatttgcaaggttttctaggagagcgtttggagaaaggttacaaagccacgagcactgcgcgaatgttaagtgcaatgcgtaaacttttccaatatttatatcgggaaaaatatcgagtggatgatccaagtgcggtgctaagttcgcctaaattacccagtcgcttgccaaaatatttaaccgagcagcaagtgtcagatttgctcaatacgccaaatgttgaagtgcctttggagttgcgtgataaagcaatgttagagttgctttatgcaacggggcttcgtgtaacggagttagtttcgcttacgattgaaaacatgagcgtgcaacaaggcgtggtgcgagtgattggtaaagggaacaaggaacgtattgtgccaatgggggaagaagctgcctattgggttcgtcaatttatgctttatggtcgccctgtgctattaaatgggcagagttctgatgttgtgtttccaagtcagcgcgcacagcaaatgactcgtcaaactttctggcatcgtgtaaaacattatgccattctcgcggatattgatgctgatgcactttctcctcacgttcttcgccatgcttttgccacccatttagtaaatcacggtgcggatttacgcgtggtgcaaatgttgttgggtcatacagatttatctacaacacagatttatactcacgtggcaaaagaaagattgaaacgattgcatgaaagatttcatcctagaggataa

SEQ ID NO: 6908 - DNA, 1767 bp, Haemophilus influenzae
  CDS (1)...(1767)
atgatgcgtacacattattgcggagcattaaaccgtaacaatatcggacaagacgtaacattaagcggttgggttcatcgccgtcgtgatttaggtggcttgatttttattgatatgcgcgatcgtgatggtattgtgcaagtttgttttgatcctaaatatcaagatgcattgacagcggctgctgggttacgtaatgaattctgtattcaaattaaaggcgaggtgatcgctcgtcctgataatcaaattaataaaaatatggcaacaggcgaagtggaagtgttagcgaaagaattacgcatctacaatgcttctgacgttttaccattagacttcaaccaaaataacaccgaagaacaacgtttaaaataccgttatttagatttacgtcgtcctgaaatggcgcagcgtttgaaaacccgtgcaaaaatcaccagctttgtgcgtcgctttatggatgataatggttttcttgatattgaaaccccaatgctaaccaaagcaacgccagaaggcgcgcgcgactatttagtgccaagccgtgtgcataaaggcaaattctatgcattgccgcaatcaccacagcttttcaaacagcttttaatgatgtctggttttgaccgctattatcaaatcgtaaaatgtttccgtgatgaagatttacgagcagatcgtcagcctgagtttactcaaatcgatgtggaaacttctttcctaactgcgccagaagtccgcgaaattatggaacgcatggtgcacggcttatggcttgataccattggtgtggacttaggtaaattcccagtgatgacttggcaagaagcaatgcgtcgttttggttctgataagccagatttgcgtaatccattagaaatggtagatgtagcagatattgtcaaagatgttgaatttaaagtatttaatgagccagcaaacaatccaaatggccgtgttgcagtcattcgagtaccaaatggtgcagaaattactcgtaaacaaattgatgaatatacacaatttgtaggcatctacggtgcgaaaggtttggcttgggcaaaagtaaacgatattaatgctggtcttgaaggcgtgcaaagtccgattgcgaaattcttaaatgaagatgtatggaaagggttagcagaacgtgtgaatgcacaaactggcgatattttattctttggtgcagacaaatggcaaactaccactgatgcaatgggtgcgttacgtttgaaattaggtcgtgatcttggcttaactcgtttagacgaatggcaaccgctttgggtcattgatttcccaatgtttgaacgtgatgaagaaggtaatcttgcagcaatgcaccatccattcacttcaccaaaagatttcagcccagagcaattagaggctgatccaacaagtgcggtagccaatgcttacgatatggtcatcaacggctacgaagtgggtggtggttctgtgcgtatttttgatccgaaaatgcaacaaactgtgttccgtattcttggtattgacgaagaacaacaacgagagaaattcggtttcttattagatgcgttaaaatttggtactccaccacatgctggtttagcattcggtttagaccgcttaaccatgcttttaacaggcacggaaaacattcgtgatgtgattgcctttccgaaaaccacggcagcagcgtgcttaatgacggaagccccgagttttgcaaatccgcaagcattggaagagttggcaatttctgtcgttaaagcagaataa

SEQ ID NO: 6909 - DNA, 2232 bp, Haemophilus influenzae
  CDS (1)...(2232)
atggttgctgttcgtggttctcatttgttaaatccgcaggattttgtgattgaacaatggtgcactggcttaaaactagcagaacaaacagaaaaaagtttgatcgatgcgtggtattacgcacgtgatttaatgaatgcctaccccgatgaaatgaagaatgcgaccttgatgctgcagtctggcgtggaaatggtagaaattttgcacgaacttaatatggatgcggaaacattgcttactgccatgttgtttcctattgttgcaaataaattaacagactgggaaagtctaaaagaaaaatttggtgcgaaaattactaaattacttaaaggcgtgttggagatggataatattcgccaacttaatgccagtcattccgctaacgctctgcaagtggataatgttcgccgtatgttgttggcgatggtggacgatttccgctgcgtgatcattaaacttgccgaacgtattactttcttgcgtgatgcagagcatcgttgtgcagaggaagacaaagtccttgccgtcaaagaatgttcttatatttatgcccctcttgccaatcgtcttggaattggtcagctgaaatgggagttagaagattactgcttccgttatcttcatcctgaacaatatcgcgctattgctaaattattgcaggaacgtcgtcttgatcgtgaacattacattgctgatttcgtcagtgagttgagcggttatttacgtgaaaatatcgagcaagtggaagtctatggtcgtccgaaacatatttacagcatttggcgtaaaatgcagaaaaagcatcttgaattcagcggtttatatgacgtaagagcggtcagaattatcgtgcaaaaattacaagattgttacaccgcacttgggattgttcatactcaatttaaacacttacccaaagaatttgacgattatgtggcgaacccgaaaccgaacggttatcaatctattcatactgttgttttaggtaaaggtggcaagccaattgaagtgcaaattcgaacccaacaaatgcatgatgatgcagagttaggtatggcggcacactggaaatataaagaaggcaatacaggcagtatgtctgcctatgaagaaaaaattgcgtggttgcgtaaattgttagcttggcaagatgatattacggattcaggcgaagtgctggcagagttgcgtagccaagtgtttgatgatcgtgtatatgtgtttacgccaaagggcgaagtggtggatttgccaacgggatctacaccattagattttgcttatgccattcatagtgaaattggtcatcgctgtatcggggcaaaagtggcggggcgtattgtgccatttacctatcagctacaaatgggcgatcaaattgatattattacccagaaaaatccgaacccgagccgtgactggctaaacccaaatttaggatttactcacaccgcaaaatctcgagccaaaattcaagcgtggtttaaaaaacaagatcgcgataaaaatattccagcgggtaaagaattactcgataatgaactcgcgcttttgaatttaagtattaagcaagtggaaccttatgcgttaccacgctataacttgaaaaatttggacgatctttatgcgggcattggcagtggtgatattcgtttaaataacttaatccatttcttgcaaagtaaattgattaaagtgactgctgaagaggctgatcaagaaattttacgtcatgttgctaacaaaagtgcggtcaattctcagcagaaatctgaaaagaacaatggctgtgtgattgtggagggtgtggacaatcttatgcatcatattgcgcgttgctgccagccgataccaggcgatgcgattgttggctatattacaatgggacgtggtatttctattcaccgagcggattgtgaacaattcttagatttgcaagcggctcatccagaacgcgtagtggaatcaatttggggcgaaaattacgcaagtggtttccatattaatatccgtattgtggcaggcgatcgcaatggcttattgcgtgatattacaacggttctagcaaatgaaaaaattagcgtattaggggtctcaagccgtgctgataccaaaaaacagcttgctactattgatatggaaattgaacttcataatgttgaaagtttgagtaaaatattggctcgattagcaaaattagatgatgttatcgaagcgaagcgtttataa

SEQ ID NO: 6910 - DNA, 594 bp, Haemophilus influenzae
  CDS (1)...(594)
atgaccgcacttttaaaaattggtctggtgtctgtttctgatcgcgcatcagcaggcgtgtatcaagatcaaggtatcccagaattacaggcttggttagaacaagcgttagtagatcctttccatttagaaacaagattaatccccgatgaacagccagttattgaacaaaccttaaaagagctggtggatgaacaaggttgccatttagtgctgacaactggtggaactgggccagcaaaacgcgatgtaacgcctgatgcaacccttgcggtagcggatcgagaaatgccaggttttggcgaacaaatgcgtcaagtgagtttgcattttgtgcctaccgcaattttatctcgccaagtgggtgtaattcgtaaggaaagcctgattttaaatcttcctgggcaacctaaagcgattaaagaaaccttagagggcgtaaaagataaagaaggaaatgtgcttgtaaaaggcatttttagcgcagtgccttattgtttgcaactgattaacggcttatatattgataccaagcctgaaatcatcgaaagtttccgtcctaaatctgcaagacgcgaaaatctggagaaatag

SEQ ID NO: 6911 - DNA, 645 bp, Haemophilus influenzae
  CDS (1)...(645)
atgaaaattattcttttaggtgcaccgggtgcaggtaaaggcactcaagcacaatttattatgaacaaatttggtatcccgcaaatttcaactggtgatatgttccgtgctgcaatcaaagcggggactgaacttggcaaacaagctaaagcattaatggatgaaggtaaattagtgccagatgaattaaccgttgcccttgtaaaagatcgtattgctcaagctgactgcacaaatggtttcttgttagatggtttccctcgtactattccacaagcggatgcactgaaagattcaggtgttaaaattgactttgttttagaatttgatgtgccagacgaagtgattgttgaacgtatgagtggccgtcgcgtacaccaagcgtctggtcgttcttaccatatcgtttataatccaccaaaagtggaaggtaaggatgatgtaacaggcgaagatttaattattcgtgcagacgataaaccagaaactgtattagatcgtttagccgtatatcataaacaaactagcccattaattgattattaccaagcagaagcgaaagcggggaatactcaatatttccgtttagacggtacacaaaaagtggaagaagttagccaagagttagataaaatcttaggctaa

SEQ ID NO: 6912 - DNA, 921 bp, Haemophilus influenzae
  CDS (1)...(921)
atggactctttctcgacatcaatttgggttaatgatgtaactgttcgttacaacaatggtcatactgctattcacaatatgacgttctcactcaatagtggaactatttgtgcgttagttggcgtgaatggaagtggcaagtccacattatttaaaagcataatggggcttgtaaagccacaacaaggcgaaattaaactttgtgatttgccaatttcccaagcactgaaacgtaatttggttgcttatgtgccacaatcagaagaagtggactggcaatttccggtgtcagtgtatgatgtcgtgatgatgggacgttatgggtatatgaattttcttcgtatccccaaagcgattgataaacaaaaagttcaagaggcgatgcagcgagtaaatattgagcatcttgcgcatcgtcaaattggcgagttatctggcgggcagaaaaaacgcgtgtttttggcccgcgctttagcacaacaaagtccaattattttattggatgaacctttcactggcgttgatgtgaaaactgaaaatgccattgttgatcttcttcaacagcttcgagaagaaggtcatctgattcttgtttcaacccataacttaggttctgttcctgatttttgtgatcaagtggtcatgattaatcgcacagtcatcgccgcaggaaaaacagaagacacctttaaccaacataatttggaaattgtatttggtggggtgttgcgtcatattaaattattgggcgaaaatttacataatgatgaagataaacgttctgttaccgtcttaacagatgatgaaaaagccgttgtattctatggcgaaactaagcaagatccacctgcgccaacaacacaaaattgtcattttgaagattgcccttataaaagtgcagttaaaaataagagggattag

SEQ ID NO: 6913 - DNA, 1272 bp, Haemophilus influenzae
  CDS (1)...(1272)
gtggcaaaaacaattcaagcaattcgtggtatgaacgattgtgccccaacagaatctccattatggcaatggattgaagcacaagtacgcaatgtattaaatagttatggctattcggaagtgcgtatgccaattgtagaaagtacgccattgtttgcgcgtgcaatcggcgaagtaactgatgttgtctcaaaagaaatgtacacattttgggataacgatgaacaattaaccttacgccctgaaggcacagcaggttgtgtgcgagcagccattgaacacggttggatctataataatgaacaacgcttatggtatatcgggccaatgttccgtcatgaacgtccacaaaaagggcgttaccgtcaattccatcaagtaggtgttgaggtattcggtattgcaaatccagaaatcgatgccgaattaatcatgcttacctatcgtttatggaaagcattaggtatcgatcaacatgttacacttcaacttaactcaattggttctttagaagctcgagcaaattatcgttcagctttagttggattcttagaaaaccatcaagatttaatgagcgatgaagaaaaagagcgtttagtaagaaatccgcttcgtattttggatacaaaaaatccagaattacaaaaagtattagataacgcgcctaaattgcttgattatttagatgatgaaagccgtacgcattttgaacaattatgttcattattagatgcagtgggtattcaatatgaaattaatcctaaactcgttcgtggcttagattattacaacaaaactgtatttgaatgggtaacctctgctcttggcgcacaaggtaccgtgtgtggcggcggtcgttatgacggtttagtggaacaacttggcggacacgcaacgccaagtatcggatttgcgatgggattagagcgtttagtcttgttggtgcaagaagttaatccaaatgttcctgcgaaaagtgcggtggatatttatgttgtttatcaaggcgaaggcgcaacattagccgcttttgaattagcggaaaaagtacgctcggaattaccgcacttaaataccatgttgcactgctctagcggtaattttaaaaaacaatttaaacgtgcagataaatctggtgcaacattggcattagttatcggcgaaagcgaagtacaaaataaacaagtcgttgttaaacacttacaaggtggcacagatcagcaaaccttagatttagtgaatataatcgactatcttcaaactcaattttaa

SEQ ID NO: 6914 - DNA, 1092 bp, Haemophilus influenzae
  CDS (1)...(1092)
atgggattcaaatgtggtattgtgggattgccaaatgtcggcaaatctactctttttaacgcactcactaaagctggcattgaagccgcaaactatccattctgtactatcgaaccaaatacgggtgtcgtgccaatgccagatccacgtttagacgcattggcagaaatcgttaagcctgaacgcatattacctactacgatggaattcgtggacatcgcaggcttagttgcaggtgctagcaaaggcgaaggcttgggtaataaattcttagcaaatattcgtgaaaccgatgcaattggtcacgtagtgcgttgttttgaaaacgatgacattgtacacgttgcagggaaaattgacccacttgatgatattgacactatcaacactgaattagccttagcagacttagacagttgtgaacgagcaatccaacgtttacaaaaacgtgcaaaaggtggcgataaagaagctaaatttgaactttccgttatggaaaaaatccttcctgtgctggaaaatgcaggaatgattcgttctgttgggttagataaagaagaattgcaagcaatcaagagttacaacttcttaacgttaaaaccaacaatgtatatcgcaaacgtaaatgaagatggctttgaaaataacccatatttagatcgcgttcgtgaaattgctgcaaaagaaggggcggtagttgttccagtatgtgcggcgattgaatctgaaattgcagaacttgatgatgaagaaaaagtcgagtttttacaagatttaggcattgaagaaccaggattgaaccgagtaattcgtgctggttacgcacttttaaatcttcaaacttatttcactgctggcgtaaaagaagtacgagcttggacagtttcagtcggcgcaaccgcaccaaaagcagcagctgtaatccacactgactttgaaaaaggctttatccgagcagaagttatcgcttatgaagactttatccaattcaacggtgaaaacggtgcaaaagaagcaggtaaatggcgtttagaaggcaaagattatatcgtacaagatggcgatgtaatgcatttccgattcaacgtataa

SEQ ID NO: 6915 - DNA, 1320 bp, Haemophilus influenzae
  CDS (1)...(1320)
atgtcagacaatatttattccgtctctcaactgaattctgccgcgcgtcagatgcttgagggtaatttttgccaaatttggctaacgggggaaatttccaattttacccaacctgtgtctggacattggtatttaacgctgaaagatgaaaatgcacaggtgcgttgtgcaatgtttcgtatgaaaaatttgcgtgtagcttttcgtccacaaaatggaatgcaagtgcttgtgcgtgccaatgtgagtttatatgagcctcgcggcgattatcagcttattattgattctatgcacccagcaggcgagggattattgcaacagcaatttgaagcgttaaaaatgaagttggctgcggaaggattgtttgctcaaaatcttaagaaaactctaccgcactttagtaaagcagtggggattataacttcttctacaggtgcggcattgcaagatattttgcatattctggcacgccgtgatccaagtttaaaagtcgtcatttatcccactgcggttcaaggcaaagaggcaactgcagaaattgtgcaaatgattgaacttgctaatgcgcgacaagaagtagatgtattaattgtggggcgtggtggtggttcattagaagatctttggtgttttaatgaagaagaagtggcgcgagcgatttttcgttcaaccttacctattatcagtgcggtgggacacgaaacagatgtgacgattgccgatttcgttgcagatcttcgtgcgccaaccccctctgctgcggctgagttagttagtcgtaatcaagatgaattattgcaacaacttcgccatcaacagcaacgtttagatatggcatttgatcgtttatttacgcgaaaaagccagcgtttgaaacagcttgccttacgattgcaaaatcaacatccacagaatcagctacgtgctcaacaagcgaaaaatgaacagcttacacatcgcttgcaacttgcaatattgcgtcagtttgaaaatacacaacaaaaattcaccgcactttctgttcgtttaaaacaaaatccattgccatatcgcatacaacgttatcaacaaggcttagagcagttaaaagtgcggttaaatttttgcgtaaatcgccaagtgacggaacgtcaaaataaactggcaacattatgcggaaaactggatggcttaagcccattaaaagtcttggcgagaggttattccattgcggaaaatccgcaaggtaaagccattgttagcgtgaaagatgtcaatcaaggggacttcattacaactcaagtggctgatggaaaaattgtgagtaaggttttgtaa

SEQ ID NO: 6916 - DNA, 573 bp, Haemophilus influenzae
  CDS (1)...(573)
gtgtgcttttctttttataaaacaaggcgaaaaatgaccgcactttattacacttattacccctcgccagtcggacggcttttgattttatctgacggcgagagcattacacatattgattttgaaaaagagcaatatgcgcctaatccaaaatggcacaagcaagatgaattgcctgtttttcaaaaagtgcggttagcttttgaacgatattttaatggcgaagttgagtgtttttcaaacattcccttaaaaccagaaggcaccgcatttcaacaagccatttggcaagccttgcgagaaattgattatggcgagctttcaacttatggagagctggcgttacggattaataatcctaaagctgttcgtgccgtgggaggcgcggtagggagtaatccgattagtattattattccttgtcaccgcattttaggcaaagatcgtactttaactggttttggtggtggcttagaggcaaaacgttttttattgcagttagagaaaattccctatattgataaaggcactgaaaacacgaagcctcgcttttttaagaaatatcacgaatga

SEQ ID NO: 6917 - DNA, 948 bp, Haemophilus influenzae
  CDS (1)...(948)
atgaaccaagaatatttagattttgaattgccgattgctgaattagaagcaaaaattgaagcattacgagcagcatcagatgataaagttgatttaactgatgaaatcaaacgcttacaaaagaaaagtaacgaactcactaaaaaaacctttgccaacctcgatgcttggcaagtttcacgtatggcgcgtcatccaaaccgcccctatacattagattatatcgaacatatttttacggaatttgaagaacttgcaggggatcgcgcttttgctgatgataaagcgattgttggtggcttggcgcgtttagatggtcgtccagtgatggttatcggtcatcaaaaaggtcgttctgtaaaagaaaaagtacaacgcaattttggtatgccagcacctgaaggctatcgtaaagcgttacgtttaatggaaatggctgaacgttttaaattgccaattatcacatttattgacacaccaggagcttatcctggtatcggcgcagaagaacgtggtcaagcggaagctatcgctcgcaacttacgcgaaatggcacagcttaccgttcctgttatttgtaccgttatcggcgaaggcggttcgggcggtgcgttagctattggcgtgggcgataaagttaatatgttgcagtattccacttattcagtgatctcgcctgaaggctgcgcttctattctttggaaaagtgcggaaaaggcatcaacagcagcagaagtaatgggattaaccgcaagccgtttaaaagaattaaatctcatcgacagcattgtgcaagaacctttaggtggtgcacatcgtagttatctagaaatagctgaaaacttaaaacttcgtttaaaagaagatttagctgaactcgatgaactaagcaaagaagaattattaaatagacgctatgaacgtttaatgtcttacggttattgctaa

SEQ ID NO: 6918 - DNA, 798 bp, Haemophilus influenzae
  CDS (1)...(798)
atgcttatgcaatcaatttatctctccaaaatccgtgagcagaatccgctcattcataacattaccaatattgtagcagcgaattttagtgccaatggcttgttggcattaggagcctcgcctttgatgtcggcgaatgttgaagaaatgcaggaagtaccgaaaatcagtcaagcattggtcattaatattggtacgctgattggtaaagatcgggaggcgatgttgcaggcaggaaaaacagcaaatgaggttggaattcctgtagtgttagatcctgttggtgtgggggcgaccagttatcgccgtgagaccattcgtgagcttttagccgaggtaaaattcgcacttattcgtggtaatgcaggtgaactggctgccattgcaggcgagacgtggcaggcaaaaggtgtagatgcagggcaaggcgaagtggatttaaaagccgttgccgagaaagtggctcaacgctatggctgtacggtgttgattagcggggcggtggatattgtcagcgatggcacacaaactgcgaccgttcacaacggcacgtcattgttcccgaaagttacggcttcgggctgtttattgagtgctgtgtgtgcggcatttttagcagtaagtgaagggaattatttttctgcgacattagaagcctgtgtagcatacaccattgcaggcgagtgtgcggcgcaaggcttaaccacacaagtgggacagttccaaatccgtttgttggacgagcttgctgccctttcccctgaaaccattggacaaagagggcgcatcaatgagtaa

SEQ ID NO: 6919 - DNA, 681 bp, Haemophilus influenzae
  CDS (1)...(681)
atgaaaaatattcaaaaaatcttaccgctttactttgtggcaggcacgcaagattgccgtcatttgggcgagaacttgtcggaaaatttattattcgtgcttaaacaagcgttagaaggcggaattacctgctttcaatttcgggataaaggcaaattttcgttagaacatacgccctcagcacagaaggcactggcgattaattgtcgtgatttgtgccgtgaatatggcgtaccgtttattgtagacgacaacgttgatttggcgttggaaatcgaggcggatggcattcacgttgggcaaagcgatatgcctgtgcaagagattcgcgctaaaacagataaaccgctaattattggttggtcggtgaatcgtttagacgaggcaaaaattggggaaaatttagcagaaattgattattttggaattggtccgattttcccaacgcaatcaaaagaaaatcccaaaccaacactaggaatggcatttattcaaactttgcgaaatgcgggcataactaaaccgcttgtggcaattggtggggtgaaattagctcacgttaaaaccttacgagaatttggggcggatggtgtggcagtgattactgcaattacgcacgccgataatgtgcaagccgcaacaaaagcattacgggaggcaagtgatgaatacgcaaaatag

SEQ ID NO: 6920 - DNA, 1383 bp, Haemophilus influenzae
  CDS (1)...(1383)
atgacaacccaattcaaaccagaattactttcccctgcaggctctcttaaaaatatgcgctatgcgtttgcttatggtgcagatgcggtttatgcaggccaacctcgttatagcttacgtgtacgcaataatgaatttaatcacgccaatttgaaaatcgggatcgatgaagcccattcccttggcaaaaaattctatgtagtggtaaacatagcgccccataattccaaactcaaaacttttattaaagatttacaacctgtcatcgatatgaaaccagatgctttaattatgtctgatccaggcttaattatgttggtgcgtgaaaatttccctaatattgatattcacctttctgtacaagccaatgcggtaaactgggcaacggtaaaattctggaaacaaatgggattaactcgtgtgattttatcgcgcgaactttcaatagatgaaattgctgaaattcgccaacaagtgccagatattgaactcgaaattttcgtacatggtgcattatgtatggcgtattctggccgttgcttactttctggctatatcaacaaacgcgatccaaatcaaggcacttgcaccaatgcttgccgttgggaatacaaaatggaagaaggcaccacggatgacgtgggcaacatcgtgccgaaaatcgatcctgctcaacaaattgaagtgaaaaatgtagcaccaaccttaggcgagggtgcggtaacggataaagtcttcctttataccgaatcacaaaagcctgacgaacaaatgacagcgtttgaagataaacacggcacctactttatgaattcaaaagatctgcgtgccgtacaacatgtagaaaaattgaccgcacttggtgtgcattctttaaaaatcgaaggtcgtactaaatcattttattattgtgcaagaacggctcaagtttaccgcaaagcaattgatgatgcagccgcaggcaaaccatttgatgaaagtttaatggatacgttagaatcccttgcacaccgtggttataccgagggtttcttacgccgtcatacgcatgatgaataccaaaactacgaatatggctattctatttctgatcgtcagcaatttgtcggtgaatttacgggcaaacgtaacgaacaaggtatggcagaagtagcagtaaaaaacaaattcttacttggcgacaatgtagaaatgatgacaccacaaggcaatattaatttcaaaattgaaaaaatgctaaatcgtaaaaatgaaacggttgatgccgcactaggtgatgggcattttgtattcttaaatgtgccacaagatattaacttaaattacgccttattaatgcgtaatttagttaataccaatacaagaaatccacattctaattaa

SEQ ID NO: 6921 - DNA, 1833 bp, Haemophilus influenzae
  CDS (1)...(1833)
atgtgtggtattgtcggcgcagtagcacaacgagatgtagcggaaatcttaattaatggtttacatcgtttagaatatcgtggttatgattcagctggtgttgcagtaatcaataaacaaaatgaattacaacgtattcgttgtttaggcaaagttaaagctttagatgaagccgtatcagaaaaaccattaattggtggaacgggaattgcacatacccgctgggcaactcacggcgaaccatcagaaactaatgcgcatccgcattcatcaggtacttttgctgtagtacataacggtattattgaaaatcacgaagaacttcgcgaattattaaaatctcgtggttatgtctttttatcacaaaccgatactgaagtgatcgcgcatttagttgaatgggaaatgcgtacgacggattcacttttagacgctgtgaaaaaagcagtaaaacaactcactggtgcatacggtatggtggtaatggacagccgtcatcctgaacatttagtggcagctcgttctggtagtccacttgtgattggcttaggtatcggtgaaaatttcttagcttcagatcaacttgcgcttttaagtgttacccgccgttttatctttttagaagaaggagatattgcagaaattacacgtcgtacagttgatatttatgatactcacggtaataaggctaaacgtgaaattcacgagtctaatcttgaaaatgacgcggcagagaaaggcaaattccgtcattttatgcagaaagaaatttacgaacagccaaccgcacttattaatacaatggaagggcgtatcaatcacgaaaatgtgattgttgattcaatcggtaatggtgcaaaaggcattttagaaaaagttgagcatattcaaattgttgcttgtggtacatcttataatgcaggtatggtggcgcgttattggtttgaatctttagctggagtgagctgtgatgttgaaattgcatcagaatttcgttatcgcaaatttgttacccgtccaaatagcttattgattaccctttctcaatctggcgaaacagccgatactttagctgcacttcgtttagcgaaagaaaagggctatatggcggcattaacaatttgtaatgttgctggctcttcgctcgtacgcgaatcagatcttgcatttatgacgcgtgccggtgttgaagttggggtagcatcaacaaaagcatttacgacacagctcgctgcgttattaatgttggtgacggcacttggtaaagttaaaggtcatatttctgtagaaaaagaacgtgaaattattaaagcaatgcaatctttacctgctgaaattgaaaaagcgttagcttttgatacagaaattgaagctttagcagaggattttgctgaaaaacatcatgcacttttcttaggtcgtggtgcgttttatccaattgccgtagaggcctctttgaaattgaaagagatttcttatattcacgctgaggcctatgcggcgggagaattgaaacacgggccattagcgttaattgatgctgatatgccagtgattgtcgttgcaccaaataatgaattattagaaaaagtaaaatcgaacattgaggaagtgcgagctcgtggcggtcaattatacgtatttgccgataaagaagcaggatttacgccaagtgaaggaatgaaaatcatcacgatgccaaaagtcaatgatattgttgcaccgattttttataccattccaatgcaattactttcttattatgtggctttaattaaaggtactgatgtagatcaacctcgtaacttagcaaaatcagttaccgttgaataa

SEQ ID NO: 6922 - DNA, 411 bp, Haemophilus influenzae
  CDS (1)...(411)
gtgagatttgtcacaatttttagaaatcctgcttttaattcatctcaagttagattatcctttgcacagtttttgcgacaaattcgcaaagatacttttaaagaatcaaactttttatttaacagaaggtacaaatttatgaacaaaacagatttaattgatgcaattgcaaacgctgcagagttaaacaaaaaacaagctaaagcagcgttagaagcgactttagatgcaattactgcaagcctaaaagaaggtgagcctgtacaattaatcggtttcggtacatttaaagtaaatgaacgtgctgctcgtactggtcgtaacccacaaactggtgctgaaatccaaatcgcagcatctaaagtgccagcatttgtatctggtaaagcattaaaagatgcaatcaaataa

SEQ ID NO: 6923 - DNA, 366 bp, Haemophilus influenzae
  CDS (1)...(366)
atgcacgcaatttttgacttaataaaggataacattatgtttggaaaaggcggtttaggcggcttaatgaaacaagcccaacaaatgcaagaaaaaatgcaaaaaatgcaggaagaaatcgcgcaactagaagtaacgggtgaatctggtgcaggtttagtgaaaatcacaattaatggtgcacataactgccgtcgcattgacattgatccgtctttaatggaagacgataaagaaatgttagaagatttaatcgccgccgcttttaacgatgcggtacgtcgtgcagaagaattacaaaaagaaaaaatggcatcagttaccgctggaatgccattaccaccaggaatgaagtttccgttttaa

SEQ ID NO: 6924 - DNA, 603 bp, Haemophilus influenzae
  CDS (1)...(603)
atgcaaagcagtccacttttagaacaccttattgaaaacttacgttgtcttccaggcgtagggcctaaatctgcgcaacgtatggcttatcatcttttacagcgtaatcgtagcggtggaatgaatttagctcgagcactcacagaagccatgtctaaaattggtcattgttcacagtgtcgagactttacggaagaagacacttgcaacatttgcaataatccacgccgtcaaaattcaggtttgctttgtgtcgttgaaatgccagcagatattcaagcgattgagcaaacggggcaattttcaggacgttattttgttttaatgggacatttgtctccacttgatggtattggacctcgtgaaattggcttagatttactgcaaaaacgcttagtagaagaatctttccacgaagtgattcttgcaacaaatccaacggtggaaggcgatgcgacggcaaactacattgctgaaatgtgccgccaacataatatcaaagtgagtcgtatcgctcacggtatccctgtcggtggtgaactggaaactgtggacggcacaacgcttactcactcttttcttggtcgtcgtcaaatcgactaa

SEQ ID NO: 6925 - DNA, 1956 bp, Haemophilus influenzae
  CDS (1)...(1956)
atgcgtttatttatcgccgaaaaaccaagcttagctcgcgctattgctgatgtgctcccgaaaccccatcaacgtggggatggttttattaaatgcggcgataatgatgtggtaacttggtgtgtagggcatttgctcgagcaagcagaacccgatgcctatgatcctaaattcaaacaatggcgtttagaacatctccctatcattcctgaaaaatggcaacttttaccgcgaaaagaagtaaaaaaacaactttctgtggtagaaaaactgatccatcaagcggatacacttgttaatgcaggagaccctgatagagaaggacaattacttgtagatgaagtgttcagttatgccaatttatctgccgaaaaacgcgataaaattttacgctgtttgattagcgacctaaatccaagtgcggtagaaaaagcggttaaaaaattacaacccaaccgtaattttattcctcttgccacatccgctctcgcacgagctcgcgccgattggctttatggcattaatatgaccagagcttataccattcgaggtagacaaactggctatgatggcgtgctttctgttggacgagtgcaaacccctgtgctaggtttaattgtacgtcgagatttagaaattgagcatttccagcccaaagacttctttgaagtacaggcttgggttaatccagagagcaaagaagaaaaaactccagaaaaatcaaccgcacttttcagtgccttatggcaacctagcaaagcttgcgaggattaccaagatgatgacggcagggtgctctctaaaggattagcagaaaaagttgtaaaacgtattacaaatcaacctgcagaagtcaccgaatacaaagacgttcgtgaaaaagaaacggcgcccttgccttattcactttctgcgttacaaattgatgcagcaaagcgatttggtatgtccgctcaagccgtattagatacgtgccaacgcctatatgaaactcatcgtttgattacttatccgcgttctgattgtcgctatttgcccgaagaacattttgccgaacgccataatgtattaaatgcaatttcaacccattgtgaagcttatcaagtcttaccaaatgttattttaactgaacagagaaatcgctgttggaatgataaaaaagtagaggctcaccatgcaatcattcctactgccaaaaatcgtccagtaaatctaacacaagaagaacgtaatatttacagccttatcgctcgccaatatttaatgcaattttgccctgacgcagaatatcgtaaaagtaaaatcacattaaatatcgctggcggtacttttatagctcaagcacgaaatttacaaacggctgggtggaaagaattgttaggcaaagaagacgacacagaaaatcaagaacccttattaccaatagtaaagaaaggacaaattttgcattgtgaacgcggagaagtgatgagtaaaaaaactcagccaccaaagcccttcactgatgcaaccttgctttcagcaatgacgggcattgcgcgatttgtgcaggataaagaactcaaaaaaattctgcgagaaaccgatggattgggtacagaggctactcgcgctggcatcattgaattactttttaaacgcggttttttaactaaaaaagggcgaaatattcatagcacagaaacaggaagaattttaattcaggcattaccaaatattgccacccaaccagatatgacggctcattgggaatcgcaactcacagacattagtcaaaaacaagcaacctatcaacaatttatgcataacttgaatcaaatattgcctgatttagtccgttttgtagatcttaatgcattaagacaattaagccgcattaaaatgattaaatccgatagagcgaaacctaaaagtgcggtaaaaaaatcgagtaaatcaaacggtgagactgattaa

SEQ ID NO: 6926 - DNA, 1671 bp, Haemophilus influenzae
  CDS (1)...(1671)
atgaagttatttttaacccaatcagctaatgtaggcgatgtgaaagcctatttattacatgaagtttttcgagcagctgcacaaaaagcaaatgtctctattgtaggaacaccagccgaagcagatcttgttctcgtatttggttctgtattaccaaataaccccgatttagttggtaaaaaagtctttattatcggcgaagctatcgccatgatttctcctgaagtcacgctggcaaatgctttagccaatggggctgattatgttgcaccgaaaagtgcggtgagttttacaggtgtttctggtgtaaaaaatattgttgcggtaactgcttgtccaactggcgttgcacatacgtttatgtcggctgaagcgattgaagcctatgcgaaaaagcaaggttggaatgtaaaagttgaaacccgtggtcaagttggggctggcaatgaaattactgtggaagaagtcgcagcggctgatttggtatttgttgcagcagatattgacgtgcctttagataaatttaaaggtaaaccaatgtaccgcacttcaacaggcttagccttaaagaaaactgagcaagaatttgataaagcatttaaagaagccaaaatttttgatggtggaaataatgcgggaacgaaagaagaaagccgtgagaaaaaaggtgtgtacaaacacttaatgactggtgtttctcatatgttaccgttagtggttgctggtggattgttgatcgcgatttcctttatgttcagttttaatgtaattgaaaatacaggagtttttcaagatcttccaaatatgttgataaatatcggtagtggtgtggcgttcaagttaatgattgccgtgtttgctggctacgttgcattttctatcgctgatcgtccaggacttgcagttggtttgattgcagggatgctggcaagtgaagcgggtgcagggattcttggcggtattattgctggtttcttagcgggctatgtggtgaaagggctaaatgtgattattcgattgccagcgagtctgacttcattaaaaccgattttaattttaccgctcttaggttcgatgattgttggtttgacgatgatttacctcatcaatccaccagtggctgaaattatgaaagagctaagtaattggcttacttcaatgggcgaagtgaatgcgattgtgttaggcgcaattatcggcgcaatgatgtgtattgatatgggcgggccagtaaataaagcagcgtacactttttcggttggattgattgcttcccaagtttatacaccaatggctgcggcaatggccgcaggtatggttcctccaattggtatgactgttgcgacttggattgctcgcaataaatttaccgttagccaatgcgatgcggggaaagcatcatttgttcttggtttatgttttatttctgaaggagcattaccatttgtggcagcagatccaattcgagtcattattagctctgtgattggtggtgcggtggctggtgcgatttcaatgggattaaatattaccttacaagctccgcacggcggattatttgtcattccatttgtgtctgagccgttgaaatatcttggtgcaattgcgattggtgctttatcaacaggtgtggtttacgccattattaaatcgaaaaacaatgcggaataa

SEQ ID NO: 6927 - DNA, 942 bp, Haemophilus influenzae
  CDS (1)...(942)
atggcaagcgtcgtaaccattaccttaaatgccgcctatgatttagttgggcgtttaaatcgtattcaacttggcgaagtaaatacggtagaaacattgggcttattccctgctggaaaaggcattaatgtcgcaaaagtactaaaagatttaggcgttaatgttgcagtaggcggtttcttgggcaaggataattcagctgattttgagcaaatgtttaatcagcacggtttggaagataaattccaccgtgttgatggcaaaacgcgtatcaatgtaaaaattaccgagactgaagcggatgtgacagatttaaatttcttggggtatcaaataagcccacaagtttggcaacaatttgtgacggattctttggcttattgtttaaattatgacattgtcgcagtttgtggcagtttacctcgaggtgtgtctcctgaattgtttgctgattggttgaatcagcttcatcaagctggcgttaaagtggtgcttgatagtagcaatgctgcgcttaccgctggattaaaagcgaaaccttggctagtaaaacccaatcatcgagaacttgaggcttgggttggtcatccattaaatagtcttgaagaaattattgccgctgcacagcaactcaaagcggaaggcattgaaaacgtgattatttcaatgggcgcaaaaggttctttatggattaataatgaaggcgtgctcaaagccgaaccagcacaatgtgaaaatgtcgtgagtaccgttggagcaggggattcaatggtagcaggcttaatctatggttttgaaaaaggtttatcgaaaacagaaactttagcttttgctacggctgtgtccgcttttgctgtatctcagagtaacgtcggtgtgagtgatttgagtttacttgaccctattttagaaaaagtacaaataacgatgattgaaggatag

SEQ ID NO: 6928 - DNA, 1500 bp, Haemophilus influenzae
  CDS (1)...(1500)
atgttagaactttcggaaagcaacattcatttaaatgctaatgcaattgataaacaacaagcgatcgaaatggcagtgtccgcattggttcaagcaggcaatgttgaaaatggttacttgcaaggaatgttagcgcgcgagctgcaaacctcgacctttttaggcaatggcatcgctattcctcacggcaccttggatactcgtttgatggtaaagaaaacgggcgtgcaagtgtttcaatttcctcaaggcatagaatggggcgaaggaaatattgcttatgtcgtgattggtattgcggcgcgatctgatgagcatttgtccttattacgtcaacttacccacgttttgagtgatgaagataccgcagcaaaattagcaaaaataactgatgtggctgaattttgcgcgattttaatgggcgagacaattgatccatttgaaattcctgctgccaatatcagtttagatgtaaatacccaaagtttattaactttagttgcgattaatgcggggcaattacaggtgcaaagtgcggtagaaaatcgctttatttctgaagtgataaataatgcggcattaccgcttggcaaagggttatgggtaacggactctgtcgtaggaaatgtgaaaaatgccttagcatttagtcgtgctaaaacaatttttagccacaatggcaaggccgtaaaaggcgtgataaccgtttcagccgtcggtgatcaaattaatccaactttggtgcgtttattagatgacgatgtccaaacaaccttgctcaatggaaattcaacagaaattttgaccgcacttttgggttcatcgagtgatgttgaaactcaatctgtagaaggtgctgttgtaggaacttttacaattcgtaatgaacacggcttacatgcacgcccaagtgcaaatttggttaatgaagtgaaaaaattcacttctaaaataaccatgcaaaatcttactcgtgaaagtgaagtcgtcagcgcaaaaagtttgatgaagattgttgcgcttggtgtaacacaaggacatcgtttacgttttgtggcagagggggaagatgcaaaacaagcaattgaatcattgggcaaagcgatagccaatggcttgggagagaatgtttcggcagtgccaccgtctgaacccgataccattgagattatgggcgatcaaattcacacacctgcggtaacagaagatgataatttgccagcaaatgccattgaagccgtatttgtgattaaaaacgagcaaggtttgcacgctcgcccaagtgcaatattggtaaacgaagtgaagaaatataatgcttccgtagcagttcaaaaccttgatcgtaattctcaattagtcagtgctaaaagtttgatgaaaattgtggcattaggcgtagtcaaagggactcgtttacgttttgttgcgacgggcgaagaagcgcaacaagctattgacggaatcggtgctgtgatcgaatcgggtttaggggaatag

SEQ ID NO: 6929 - DNA, 783 bp, Haemophilus influenzae
  CDS (1)...(783)
atgttcattgttgactcccactgccatttagatgcgttggattatgaaaatttacataaaaatatctcggatgtggtggaaaaagcgcacgcacgtgatgtgaaacatttgctcgcgattggtgtaaccttaagccgttttgagcaggcttatgactctttacgggaatttaataatgtctcgcttgcttgtggtgttcacccacttgattttgaagaagaaccttatgacgcagaacgtttattgcgtttagcgcaagatcctaaagtgattgctattggcgaaattggcttagattattattacagtgcggacaataaagcggcgcaacaagcggtgtttggtagccaaatcgatattgcaaaccaattagataagcctgtgattattcatacacgttctgcaggcgatgacaccattgcaatgttacgccaacaccgtgctgaaaagtgcggtggcgttattcattgttttacggaaactatggaatttscgaaaaaagcgttggatttaggattttacatttcttgttctggcattgtcacctttaaaaatgctgaagcgattcgtgaggttattcgttatgtaccaatggaacgcttattggtggaaacggattcgccttatcttgcgccagtgccttacagaggaaaagaaaatcaaccagcgtatacgagagaagtatgtgaatacgtggcaaccttaaagggcgtttctgcagaggcgtttgctcaaatcactacacaaaatttcgagcgtttatttaaaattcgtgtagaataa

SEQ ID NO: 6930 - DNA, 633 bp, Haemophilus influenzae
  CDS (1)...(633)
atgaaaggaaagtttattgtcattgagggcttagaaggtgcggggaaaagctccgctcatcagtctgtagtgcgagttttgcatgaacttggtattcaagatgttgtgtttacgcgcgagcctggtggaacgccactggctgagaaattacgtcatctcatcaaacatgaaaccgaagaacccgtgacagataaagcagagttattaatgctttatgcggctcgtattcagttggtggaaaatgtgattaaacctgctttaatgcaagggaaatgggtagtgggcgatcgtcacgatatgtcatctcaggcgtatcagggtggtggacgtcaattagacccgcattttatgctcaccttgaaagaaaccgtattaggtaattttgagccagatctcacaatttatttggatatagatccgagcgtcggtttagcgcgagctcgtggacgtggcgagttagatcgtattgagcaaatggatttagattttttccatcgtactcgagcacgctatttagaattagtaaaagataatcccaaagcagtggtgattaatgcagagcagagtattgaacttgttcaagctgatattgaaagtgcggtaaaaaattggtggaaatcaaacgaaaaatga

SEQ ID NO: 6931 - DNA, 1233 bp, Haemophilus influenzae
  CDS (1)...(1233)
atgacaaacaaagtctctctagacaaatcaaaaatcaaatttgtattgtttgaaggtgtgcatcaaagcgcacttgatacgctccatgcggcaggctataccaatattgattactataaaaaagcactagatggcgatgaattaaaagaagccattaaagatgtacactttatcggcttgcgttctcgcacccatttaacggcagaaatgattgaggccgcacccaaattaatcgctgtgggatgtttctgtattggcaccaaccaagtggatttaaatgcagcaaaagcgcgtggaattcctgtatttaatgccccattctcaaacactcgctccgtcgcagaacttgtattaggcgagattttattacttatgcgcaatgtgccacaggctaatgccgaagtacatcgtggtgtctggaataaatccgcgactggctctcatgaagtgcgggggaaaaaattaggcattattggttacggtcacattggttcacaattaagtattattgctgaatcattagggatggatgtgtatttctacgatattgaaaacaaacttccactcggtaatgccaaacaggttcgtagccttgaagaattactcagttcttgcgatgtggtttcattacatgtgccagaactgccatctaccaaaaacttaatgaacgtagcacgtatcgcacaattaaaacaaggggcaattttgatcaatgctgcgcgtggcacagtggtagatattgacgctctcgctcaagccttaaaagatgggaaacttcagggtgccgcaattgatgtattccccgttgagcccgcttcaattaatgaagaatttatctcgccgttacgtgaatttgataatgtgattttaacgccacatatcggcggctcaacagcggaagcacaagaaaatatcggttttgaagtggcaggcaaatttgtcaaatattcagacaacggatcaaccctttcttcggtaaacttcccagaggtctctttaccagaacacgagggaacaaaacgcttattgcatattcacgaaaatcgtcctggtatattgaacaaactgaaccaaattttcgtcgaagctaacctcaatattgcagcgcaatatttacaaactgacccgaaaattggttatgttgtcgtagatgtagaaacgaatgatgcatcgccattactgacgaaattgaaggaaatagatggcacaattcgtgctcgtgtactatactaa

SEQ ID NO: 6932 - DNA, 1542 bp, Haemophilus influenzae
  CDS (1)...(1542)
atgcaactaaattcaactgaaattagtgaattgattaaaaaacgcatcgctcaattcgacgtggtcagtgaagcgcgtaatacagggacaattgtttctgtaagcgatggtattattcgcatccacggtttaagcgatgtgatgcaaggtgaaatgatcgccttaccaggtaatcgttatgcgatggcacttaaccttgaacgcgattctgttggtgctgtagttatgggaccttacgcagatttagcggaaggtatggaagttcaatgtacaggtcgtattcttgaagtaccagttggtcgtggtttattaggtcgtgtagttaatacgcttggtcagccaatcgatggtaaaggcgaaattgaaaatgatggtttctcaccagtagaagtgattgcgccaggtgttatcgatcgtcgttctgttgatcaacctgttcaaactggttataaagctgtcgattctatggtaccgattggtcgtggtcagcgtgagttaatcatcggtgaccgtcaaacgggtaaaactgcgttagcaattgacgctattattaatcaacgtaattcaggtattaaatgtatctatgttgcgattggtcaaaaagcctctactattgcaaatgtcgtgcgtaaattagaagaacatggtgcgcttgcaaatactatcgtggtagctgcatctgcatctgaatcagcagcgttacaatatttagccccttatgctggttgtgcgatgggggaatatttccgtgatcgcggcgaagatgcgttaattgtttatgatgatttatcaaaacaagccgtagcttatcgtcaaatttcattattattacgtcgtccaccaggtcgtgaagcctatccaggtgatgtgttctatttacattctcgtttactagaacgtgcttctcgtgtaaatgaagattatgtagaaaaattcactaaaggcgaagtaaaaggaaaaacaggttctttaaccgcacttccgattattgaaacccaagctggtgacgtatctgcgtttgttccaaccaacgtaatttctattaccgatggtcagatcttcttagaatctaacttgtttaactcaggtattcgtcctgcggtaaacccaggtatttcggtatctcgtgttggtggttcagcgcaaactaaagttattaagaaattagcgggtggtattcgtaccgcgctagctcaatatcgtgaattagcagcgtttgcacagtttgcatcagatctagatgatgcgactcgtaagcaactttctcacggtgaaaaagtaactgaattattaaaacaaaaacaattcacgccattatctgttgcagaacaagcggttatattgtttgctgttgaatttggttatttggatgacgtggaattatcaaaaattgcaagttttgagaccgcacttttagattattctaaccgtaatcacgctgaatttatgcaagagcttaataaaaccggtaactataatgatgaaatcaaagatactttaaaaagtattttagatggttttaaagcgaatagtgcttggtag

SEQ ID NO: 6933 - DNA, 789 bp, Haemophilus influenzae
  CDS (1)...(789)
atgtctggacaaacaacatcggaatacattagccaccatttatcctttctcaaaacaggggatggattttggaatgttcatatagatacgttgttcttttctattcttgctgcggttattttcctatttgttttttctcgagtagggaaaaaagcaacaactggcgttccaggaaaaatgcaatgcttagttgaaattgttgtggaatgggttaatggaatcgtgaaagaaaattttcatggtccacgtaacgtagttgcgccacttgcattaacaattttctgttgggtattcatcatgaatgctatcgacttaattcctgttgatttcttacctcaatttgcaggtttgttcggtattcattatcttcgtgcagtgccgacagcagatattagcgcaactttgggtatgtccatttgtgttttctttttaattcttttttatacaataaaatctaaaggattcaaaggtttagttaaagaatatacgcttcatccattcaatcattgggcgtttattcctgttaattttattcttgaaacggtgactttattggctaaaccaatttcacttgccttccgtttattcggtaacatgtatgcaggggagttgatctttattcttatcgctgtaatgtattccgctaatatggccattgcagcattagggattccgttacatcttgcttgggctattttccatattttggttattaccttgcaggctttcatctttatgatgttgacggttgtttatttaagtattgcttataacaaagcagatcattaa

SEQ ID NO: 6934 - DNA, 612 bp, Haemophilus influenzae
  CDS (1)...(612)
atgaaagccaaattagtcagtttacttgcgcaagcaaatataaaaataagtgatcaacaaattcagcagttgattaatctggtcaatttactcaataaatggaataaagcttataatttgacgtcagttcgtgatccgcaagaaatgttagttaaacatattttagatagtcttgttgtaagtccttatttacaaggtgatcgttttattgatgtcggtacagggcctggtttgcctggtttacctttggcaattattaatccttccaaacaattcgtcctccttgatagcttaggtaagcgtattagttttattcgaaatgctatacgtgagcttagactaactaatgtaacccccgttttaagtcgagtagaagaatatcaacctgaagataaatttgatggtgtattaagccgtgcttttgcttcactaaaagatatgacagattggtgccatcatttaccaaaagaaaatggatatttttatgcattaaaagggatttatcaggaagatgaaattaatgaattgaataaaaaatatactattcaaaaagtgattgaattatctgtacctgaacttataggcgaacgacatttaatcgttttacgttaa

SEQ ID NO: 6935 - DNA, 528 bp, Haemophilus influenzae
  CDS (1)...(528)
atgacaacgattgtaagcgtacgtcgcaatgggcaagtcgtcgtaggcggtgatggacaagtttctttaggcaataccgtaatgaaaggtaatgctcgtaaagtacgccgtttatataatggcaaagtgcttgctggttttgcgggtggaacggcagatgcatttacactttttgaattatttgaacgtaaacttgaaatgcatcaagggcatttgctaaaaagtgcggtggaattagcgaaagattggcgtacagatcgcgcacttcgtaaattagaagcgatgctaattgttgcggatgaaaaagaaagtttaatcatcacgggtattggcgatgtggttcagcccgaagaagatcaaattttagcaatcggatcgggtggtaactatgcgttatctgcggcacgtgcgttagtggaaaatactgaactttctgcacatgaaattgttgaaaaatctttaagaattgctggtgatatttgcgtgttcacaaataccaatttcactattgaagaattaccgaattaa

SEQ ID NO: 6936 - DNA, 1296 bp, Haemophilus influenzae
  CDS (1)...(1296)
atgcttaattttgcctatcaagaacacgttcgctcttattatttcgactctcgtaaccaagattttcaattcccgccgctcactcaaattgaacatgctgatgtatgtgtgatcggggctggattttttggtttatctgcggcattagaactggcggagaaaggaaaaaaagtcattgtcttagagggtgcaagagtaggctttggtgcttctggtcgcagtggtgggcaggcaattaatggctttgaagaaggcattgatgaatacattaaacaagttggcgaagataaagcacataaactttggaatatgtcattagagaccattgatattattgatgaacgtattgaaaaatatagcattcaatgcgactggaaaaaaggctatgccacattagcattaaatgaacgccgaatggatgacttaattgaaatggaaaaagaaagtcataaaaattttggctatcagaatatgcaactttgggataaaactaaattaaaacagcacttaggcagtgatatttatgtgggggggctatttgatagtaattcagggcatttgcatccacttaattattgcttaggtttagcgaaagcttgtgtcgatctgggtgttcagatttttgaacaatctcctgtcgtggatatggttgagaaaaatggttgcgttgaggttaaaacagctaaaagtgcggttatttctcaagacgttattttagccaccaatgcttatattgatgtgctcccgaaatctattcatcacggcattaatcgtaaaatattacctgtggaaagttttattatcgccacagagccgttaagccaagcggttgctgattctgtcattaataatggcatgtcggtgtgtgataacaatttattattagactattatcgtttaagtgctgacaatcgcttgctttttggtagtgattcgagctcagaaaaagatatggtcgcgattatgcggaaaaatatgttgtgtgtattcccgcaacttgaaaatgtaaaaatcgattatggctgggctggcccgattgatatgaccttaaattcaacgccacattttggtcgtatttctccgcatatttattttgctcatggttattctggtcacggtgttgctttgactggtcttgcggggcgaattgtagcggaggcgattttgggtgacgatgaacgtttatctatttttgaaggactgaaagtcccttctgtttatggtggtcgaattatcaaagatcttgcgacaaagattggtgtgcagtattacaagtttttagataaataccgttaa

SEQ ID NO: 6937 - DNA, 972 bp, Haemophilus influenzae
  CDS (1)...(972)
atgatgaaaaatgaaacatctaattttcaaataggaagatttttgattgaacagcgttcttttattgcattgattattcttatcgcgattgtatcaatgattaatcctgatttttttagcgtagataatattttgaatattttacgccaaacttcggttaatgcgattattgcagtgggtatgactttcgttattttaattgcaggtatagatctttctgttggatctgtattggcattgacaggtgcaatcgccgcttcaatggtgagtattgaattgcctatttttttagtcattcctgtggttttattgattggaacacttcttggtggcataagtggtgtaattgtggcaaagggaaaagttcaggcttttattgctaccttggttaccatgaccttactgcgtggtataacaatggtttatacagatggtcgtcctattacgacaggtttttcggataatgctgatctatttgctagcattggtacaggctatgttttaggtatcccagtaccaatttggattatgagtatcgtgtttgcggttgcttggtatattttaaaagacacaccaatcggtcgctatatttatgctttaggtggaaatgaggcagcgacccaactttctggtattaacgtcaataaaatcaaagtatttgtttttgcggtgagtggatttctttctgcgctggcgggtttaattgtaacttcacgtttatcttccgctcaacccactgctggcgtatcttatgaattagatgcaattgccgccgtggtagtcggtggaaccagtttgatgggggggaaaggtcgtgtaatgggaactctcatcggtgcattaatcatcggatttttaaacaatgcattaaatttattagatatttcatcttactatcaaatgatagcaaaagcgttggttattttggttgctgttttagccgataactatcttggtacaaaaaaactgtaa

SEQ ID NO: 6938 - DNA, 921 bp, Haemophilus influenzae
  CDS (1)...(921)
atgagaaaaaccctcacggttctcggtagtatcaatgctgatcacgttatttctgtgccttactttactaaacccggtgaaacgctaacaggtcaaaattatcaaattgcctatggtggcaaaggtgccaatcaagcagtggcagccgctcgtttaggggcaaaggtagcgttcattagttgcattggatcagatagcataggcaaaacaatgaaaaatgcgtttgcacaagaaggaattgatacaacccatattaataccgtttcacaggaaatgacaggaatggcatttattcaagtcgccaagtctagtgagaacagtattgtgttggctagcggtgcaaattcacatttgagtgagatggttgttcgtcaaagtgaggcgcaaattgcacaatcagattgcttgttaatgcaattagaaaccccactttctggtgtggagctggctgctcaaatcgctaagaaaaatggtgtcaaggttgtgctaaatcctgctccagcgcagattttatcggacgaattattgagtttgattgatattattacaccaaatgaaactgaagctgaaatcctgactggggtagaggtagccgacgagcaaagtgcggtgaaagctgcgagtgtttttcacgataaaggcattgaaaccgtaatgattacccttggcgcgaaaggtgtgtttgtcagtcgaaaaggtaaaagccgtatcattaagggcttttgtgtgcaagcaatagatactaccgcagctggtgatacatttaatggcggttttgttacggctttattggaagaaaaatcctttgatgaagccattcgttttggtcaagctgccgctgcgattagtgtgacgaaaaaaggggctcaatcctctattccaacgcggcaagaaactttggaatttcttgaacacgcttaa

SEQ ID NO: 6939 - DNA, 4248 bp, Haemophilus influenzae
  CDS (1)...(4248)
gtgaaagacttagttaagtttttaaaagcacaatcaaaaaccagtgaagattttgatgtgattaaaattgggttagcttccccagatatgatccgttcttggtcatttggtgaagtgaagaaacctgaaaccattaactaccgtacgttcaaacctgaacgtgatggtcttttctgtgcgcgtatcttcgggcctgtaaaagattacgaatgtttatgtggtaaatataaacgtttaaaacaccgtggtgtgatttgtgaaaaatgtggtgttgaagtcactcaaactaaagttcgtcgtgaacgtatgggtcatattgaacttgcatcgccagttgcacatatttggttcttaaaatcattgccgtctcgtatcggtttacttttagatatgccattgcgcgacatcgaacgtgtactttattttgaaatgtacatcgtgaccgaaccaggtatgacggacttagagcgcggtcaattattaacagaagaacaataccttgacgctgaagatcgctggcaagatgaatttgaagcgaaaatgggtgccgaagcgattcaagatctcttaaaaggtatggatcttgaagctgaatgtgaaaaattacgtgaagaattacaagaaactaactctgaaactaaacgtaaaaaaatcactaaacgcttaaaattattagaagcatttgttcaatctggtaataaaccagaatggatggtgatgacggtattgccagttcttccaccagatttacgcccattagtaccacttgatggcggtcgttttgcgacttcagatctgaacgatttatatcgtcgtgtaatcaaccgtaacaatcgtttaaaacgtttattagatttaattgcgccagatattattgtgcgcaacgaaaaacgtatgttacaagaatctgttgatgccttattagataatggtcgccgcggtcgtgcaattacgggttctaaccgtcgtccattaaaatcattagcggatatgatcaaaggtaaacaaggtcgtttccgtcaaaacttattaggtaaacgtgttgattactctggtcgttctgtaatcactgttggcccatacttgcacttacaccaatgtggtttaccgaagaaaatggcattggaattattccgtccgtttatctatgcgaaattagaaagccgtggttatgctacgacaatcaaagcggctaagaaaatggttgagcgtgaagatgcgatcgtttgggatattcttgcagaagttattcgtgaacacccaattctattgaaccgtgcgccaacacttcaccgtttgggtatccaagcgtttgaaccgatcttaatcgaaggtaaagctattcaattacacccgctcgtttgtgcggcgttcaacgcagacttcgatggtgaccaaatggcggtacacgttccattaacccttgaagcgcaattagaagctcgtgcgttgatgatgtccaccaataacgtgctttctccagcaaacggtgatccgattatcgttccatcacaagacgtggtattaggtctttactatatgacccgcgaaaaagtgaacggtaaaggcgaaggtatgttattgcaagatcctcgcgaagctgaaaaagcatatcgtacaggcgaagcggaattacattctcgcgtgaaagtgcgtattactgaatatgtgaaaaatgaagcgggcgaatttgatgcgaaaaccacgctgactgatacaactatcggtcgtgcaatcttatggatgatcgcgccgaaaggcatgccttattcattgttcaaccaaacattaggtaaaaaagctatttctaaactgattaacgaagcatatcgtcgtttaggtttaaaagaagcggtaatgtttgctgaccaaattatgtataccggttttgcgtatgcggcacgttctggttcatcagttggtattgatgatatggaaattccagcgaagaaatacgaaattatttctgcagcggaagaagaagtagctgagatccaagaacaattccaatcaggtcttgtgacggcaggcgaacgctataataaagtaatcgatatttgggctgccgcgaatgagcgcgtagcgaaagcgatgatggaaaacttatctcaagaagaagtcatcaatcgtgaaggtaatcctgaaaaacaagcgtcctttaacagtatctttatgatggctgattctggtgcgcgtggttctgcagctcagattcgtcagttagcaggtatgcgtggtttgatggctcgtccagatggctcgatcattgaaaccccaattacagcaaacttccgtgaaggtttgaacgtattacagtactttatttcaacccacggtgctcgtaaaggtttggcggataccgcattaaaaacagcgaactcaggttacttaactcgtcgtttagttgatgtggcacaagacttagtgattgtagaagatgactgtggtacgcacgaaggcttagtcatgaccccattaattgaaggtggagatgaaaaagtgccacttcgtgaattagtattaggtcgtgttgctgcagaagatattttaaaaccaggtacagaagaagtattaattccgcgtaacaccttattagatgaaaaactctgtgatgtgttggatgcaaactctgtagatagcgtaaaagtacgttctgttgtaacttgtgatactgattttggtgtatgtgcgaaatgttatggacgtgatcttgctcgtggtcatttaatcaaccaaggcgaagcggtgggcgttattgccgctcaatctatcggtgagccgggtacacagctaacaatgcgtacgttccatattggtggtgcggcatctgcggcagcgaaagaatctagtgtgcaagttaaaaacactggtacagtgcatttaatgaatgcaaaattcgtgactaacgatgaaagcaaactagtattaacttctcgtaacacggaattaactattactgatgcatttggtcgtactaaagaacattataaagtgccttatggtgcggtattaagcaaaggtgacggtcaagaagtcactgcaggcgaaactatcgcaaattgggatccacatacaatgccagttgtctctgaagtatctggttttgtgaaatttgtagatattattgatggtttaactgtgacgcgtcaaacagatgaattaacaggtttatcatcaatcgtggttcaagatgtgggtgaacgtgcaactgcgggtaaagatttacgtccaactattaaattagttgatgcaaatggcaacgatattttcttacctgaaactgatgttcttgcacaatacttcttacctggtaaagcaatcgtaagtttagacgatggcacagcagtaaaagtgggtgaaccattagcacgtattccgcaagaatccgtgggtactaaagatattactggtggtctaccacgcgttgcggatttatttgaagcacgtaaaccaaaagaacccgctatcttggctgaaatttctggtatcgtgtctttcggtaaagaaaccaaaggtaaacgccgtttattaattactcctgcggaaggcgaaacttacgaagaaatgattccaaaatggcgtcagctcaacgtatttgaaggcgaaatggtacaacgtggcgatgtaatttctgatggtgctgaaacaccacacgacattttacgtttacgtggcgtgcgtgcagtaactgaatacatcgtgaacgaagtgcaagatgtttaccgcttacaaggggtaaaaatcaacgataaacatatcgaagtaattgttcgccaaatgttacgtaaagcggtaattactaaagcttacgactcagaattccttgagggagaacaagtcgaagtggctcgcgtgaaaattgttaatcgccaacgtgaagcagaaggtaaaccaccagttgaatttgaacgtgaattattgggtatcaccaaagcgtctcttgcgactgaatccttcatctctgccgcatcgttccaagaaactactcgtgttcttaccgaagcagcagtggcaggtaaacgtgatgaattacgtggcttgaaagagaacgtaatagtaggtcgattaattcctgcgggtacaggttttgcgtatcatcaaaatcgtcataaacatcgcttagttgatgatgtcgtagcgaaattatctgaagaagatgaagccgctatcgctgatgagtttgtcataacggcagatgatgcaacgcaaaatcttgcaacattgttaaattctgaaatagaagattaa

SEQ ID NO: 6940 - DNA, 4032 bp, Haemophilus influenzae
  CDS (1)...(4032)
atgggttactcctattctgaaaaaaaacgaattcgtaaagatttcggtaaacgtccgcaagttttaaatgttccttatttattaaccattcagttggattcttttgataaatttattcaaaaagatcctgaaggtcagcaaggtttagaagcggcattccgttctgtatttcctattgtaagcaataatggctatacagaattacaatatgtagattatcgtttagaagagccagagtttgatgtacgtgagtgccaaattcgtggctcaacttatgcagcaggcttacgtgtaaaattacgtttagtgagctacgataaagaatcttcttcacgcgcagttaaagatattaaagaaaatgaagtttatatgggggaaatcccattaatgactgataacggtacttttgtaattaatggtaccgagcgtgttatcgtttcacaattacaccgtagtccaggtgtattctttgattctgacaaaggtaaaacccattcttcaggtaaagtgctttataacgcacgcattattccttaccgtggttcttggttagattttgaattcgatccaaaagataacttatttgcgcgcattgaccgtcgccgtaaattaccggcaacaatcattcttcgtgcattaggctacaccactgaagaaatcttaaacttattctttgataaaattacctttgaaatcgctggcgataaattgttaatgactttagtgccagaacgtttacgtggtgaaacggcttcttttgatattgaagcaaatggcaaagtgtatgttgaacgtggtcgtcgcatcactgctcgtcacattaaagcattagaaaaagataatatctcacaagtggttgtgccttctgaatatattttaggtaaagttgcgtcgaaagattatgttgatttagagtctggcgaaattatttgtcctgcaaatggcgaaatttcgttagaaaccctcgcaaaattagcacaagctggttacaccacgatcgaaactttatttactaatgatttagattacggtccatatatttctgaaacgctacgtgtcgatccaacttatgacaaaactagtgcgctttacgaaatttatcgtatgatgcgtccgggcgagccaccaacaccagaatcttcagaagcgttattcaataatttattcttctctgcagaacgttatgatttatctacagtaggtcgtatgaagttcaaccgttctttagcttttccagaaggggaaggtgcgggtattttaagcaatgaagatattattgcggtaatgcgtaaattgatcgacatccgtaatggtcgtggcgaagtagacgatattgaccatttgggtaaccgtcgtatccgtagcgtgggcgaaatggctgaaaaccaattccgtatcggtttagtgcgtgttgaaagagcggtcaaagaacgtctatctttaggcgatttagatgcgatcacgccacaagacttaattaacccgaaaccgatttctgcggcagtaaaagaattctttggttcttcacagctttcgcaatttatggatcaaaacaacccattgtcagaagtgacacacaaacgtcgtatttctgcattaggtccaggcggtttaacgcgtgagcgtgcaggctttgaagtgcgtgacgtacataatactcactatggtcgtttatgtccgattgaaacccctgaaggtccaaacatcggtttgatcaactcactttctgcttttgcacgtactaatgattatggtttcttagaaacaccatatcgtaaagtggttgatggtcaagttactgaagaaattgaatacttatctgtaattgatgaagcaaactacatcattgcacaggcaaactcaaacttagacgaaaataaccgttttactgatgctttcgttactgctcgtggtgaacgtggtgaatctggtttatataaacctgaagatattcactatatggatgtttcgacacaacaagtggtatctgttgcggctgcattaattccattccttgagcatgacgatgcgaaccgtgcgttgatgggtgcgaacatgcaacgtcaagcagttccaacattacgtgcggataaaccattagttggtacaggtatggaaaaaccaatcgcacttgactcaggtgttgcggttgttgcaaaacgtggtggtaccgttcagtacgttgatgcgtctcgtattgtgattaaagtaaatgaagatgaaaccattgcaggtgaagctggtattgatatttataatttaattaaatacacccgctctaaccaaaatacttgtattaaccaaattccttgtgtgaatttaggcgatccaattaatcgtggcgaagtattagcagatggtccttcaactgatttaggggaacttgcattaggtcaaaatattcgcgtagcgttcatgccttggaacggctataactttgaagactcaatgttagtttctgaacgtgttgttcaacaagaccgtttcactaccatccatattcaagaattatcttgtgttgcgcgtgatactaagttaggtgcagaagaaattactgcggatattccaaacgtaggtgaatcagcgttaagcaaacttgatgaatctggtatcgtttatgtcggcgctgaggttaaaggtggcgacatcttagtaggtaaagtaacccctaaaggcgaaactcaattaaccccagaagaaaaattgttacgtgcaatctttggggaaaaagcttccgatgtgaaagattcttcattacgcgtgccaaatggtacatcaggtacggttattgatgttcaagtcttcactcgtgacggcgtagaaaaagataaacgtgcattagaaatcgaagaaatgcaacttcgtgaagcgaaaaaagatttaactgaagagttagagattttagaagctggtttatttgctcgtgtgcgtaatcttcttatttctagtggtgcggatgcggcgcaattagataaattagatcgcactaaatggttagaacaaaccattgcagatgaagaaaaacaaaaccaattagaacagcttgctgagcaatacgaagaacttcgtaaagagtttgaacataaacttgaagtgaaacgtaagaaaatcattaaaggcgatgatcttgcaccgggcgtattaaaagttgtgaaagtttaccttgcagtgaaacgtcaaatccagccgggggataaaatggcgggtcgtcacggtaacaaaggtgttatctcgaaaattaacccagttgaagatatgccatacgatgaaaatggtcagccagttgaaatcgtattaaacccactgggcgtaccgtctcgtatgaacatcggtcagatccttgaaactcacttaggtttagcggcaaaaggtattggtgatcaaatcaatgcaatgcttaaacaaaaacaagaagtggaaaaattacgtagctatatccaaaaagcatacgatttattaggtaatggttcacaaaaagtggatttaagcacctttactgatgaagaagtattgcgtttagcgggaaatttacgtaaaggcttaccagttgcaacgccagtgttcgatggtgcagacgaagcggaaatcaaagagctattaaaactgggtggattaccaacttcaggtcaaataaccctttacgatggtcgtactggcgagaaatttgaacgtccagtaaccgtgggttatatgtacatgctaaaattgaaccacttagttgatgataaaatgcacgctcgttcaacaggttcttatagccttgttacacaacagccattgggtggtaaggcacaatttggtggtcagcgtttcggtgagatggaggtatgggcacttgaagcatatggtgcagcctacaccttacaagaaatgctaactgtgaaatccgatgatgtgaatggtcgtacgaagatgtataaaaatatcgtaagtggcaaccaacatatggagccaggcacaccggaatctttcaacgtaattatgaaagaaatccgctcacttggtttaaatatcgagttagacgaagagtaa

SEQ ID NO: 6941 - DNA, 690 bp, Haemophilus influenzae
  CDS (1)...(690)
atggctaaattgactaaaaaaatgaaagcaatcaaagctggcgtagattctactaaagcatacgaaattaacgaagcgattgcggtattaaaacaattcgcaacggctaaattcgttgaaagtgttgatgttgcagtaaacttaggtatcgatcctcgtaaatctgaccaaaacgttcgtggtgcaactgtattaccacacggtactggtcgtgaagtacgtgtagctgtgttcactcaaggtgctaacgcagatgcagctaaagaagctggtgctgatttagtaggtatggaagatttagcagagcaaatcaaaaaaggcgaaatgaactttgatgttgttatcgcttctcctgatgcaatgcgtgttgttggtcaattaggtcaagtattaggcccacgtggtttaatgccaaaccctaaagttggtactgtaacaccaaacgttgctgaagcagttaaaaatgctaaatctggtcagatccgttatcgtaatgataaaaacggtatcatccacaccactatcggtaaagcaaacttctctgaagttcaattaaaagaaaatcttcaagcattattggctgctttaaataaagcaaaaccaactactgctaaaggtattttcatcaagaaagtaagcatctctaccactatgggtgcaggtgttgctgttgatcaagcttctttataa

SEQ ID NO: 6942 - DNA, 429 bp, Haemophilus influenzae
  CDS (1)...(429)
atggcaaaaaaagtccaagcctatgttaagttgcaagttgcagctggtatggctaacccatcaccaccagttggtcctgcattaggtcagcaaggtgtgaacattatggaattctgtaaagcattcaacgctcgtactgagagcttagaaaaaggtttaccaattccagttgttatcactgtatatgcagaccgttcatttactttcgtcactaaaactccaccagcagcagtattattgaaaaaagctgcaggtatcaaatctggttctggtaaaccgaacaaagataaagtgggtaaagtaactttagatcaagttcgtcaaatcgctgaaactaaagcagcagatatgactggtgcgactatcgaaacgaaaatgaaatcaatcgctggtactgctcgttcaatgggcttagtggtggaggaataa

SEQ ID NO: 6943 - DNA, 1080 bp, Haemophilus influenzae
  CDS (1)...(1080)
atggctaaattattagatattgtgaaacccggtgttgtaacaggcgaagatgtgcaaaaagtttttgcttatgctaaagagcataactttgctattcctgccgtaaactgtgtgggttcagactccgttaatgccgtgttagaaactgctgcacgcgtaaaagcaccagtgattatccaattttcaaatggtggcgcagcgttctacgcaggtaaaggtatcaaaccaacgagtggtactcgtcctgatgtgcttggtgcgattgctggagcgaaacaggttcatactttagcgaaagaatacggtgtgcctgttattcttcatactgatcacgcagcgaaaaaattattaccttggatcgacggtttattagatgcaggcgaaaaacattttgccgaaacgggtcgtccacttttctcttcacatatgatcgatttatctgaagagtcaatggaagaaaatatggcaatctgtcgtgaatacctcgctcgtatggataaaatggggatgacccttgaaatcgaaattggcattactggtggcgaagaagacggcgttgataactctgatgttgatgaatcacgtttatatacacaaccttctgatgtgctttatgtttacgatcaattgcatccagtaagccctaactttaccgttgctgctgcattcggtaacgtacacggtgtttacaaaccaggtaatgtaaaattaaaaccatctattttaggtgaatcacaagagttcgtttctaaagaacgcaatcttcctgcaaaaccaattaatttcgtattccacggtggttcaggttctagccgcgaagaaatccgcgaagcaattggctacggtgcaatcaaaatgaacattgatactgatacgcaatgggcatcttggaatggtattttgaatttctataaagcaaatgaagcatatcttcaaggtcaattaggtaaccctgaaggcccagatgcaccaaacaaaaaatactacgacccacgtgtttggttacgtaaaatggaagaatctatgtctaaacgcttagagcaatctttcgaagacttaaattgtgttgatgttttataa

SEQ ID NO: 6944 - DNA, 1161 bp, Haemophilus influenzae
  CDS (1)...(1161)
atgtcagtaatcaaaatgaccgatttagatttagccggtaaacgtgtatttatccgtgcagatcttaatgtgccagtaaaagatggcaaagtgacctcagatgcgcgtattcgtgcgaccattcctactttaaaattagccttagaaaaaggtgcgaaagtgatggtaacttctcacttaggtcgtccaactgaaggagaattcaaaccagaagattctttacaaccagttgttgattacttaaaaaacgcaggctttaatgtgcgtttagaacaagattatttaaatggtgtggatgttaaagatggcgaaatcgttgttttagaaaacgtacgcgtaaacaaaggcgaaaagaaaaatgatccagaattaggtaaaaaatatgccgcactttgcgacgtatttgtaatggatgcctttggtacagcgcaccgcgcgcaagcatcaacttatggcgttgcagaatttgcgccgatcgcttgtgcaggcccattattagccgctgagttagatgcattaggtaaagcattaaaagaacctgctcgtccaatggtggctattgttggtggttctaaagtttccactaaattagaagtattaaattctctttcaaaaatcgctgaccaaattattgtgggcggtggcattgcgaatactttcatcgcggcagctggtcacaatgtaggtaaatctttatatgaagctgatttaattccagttgcgaaagaattagccgcaaatacagatattccagttccagttgatgtgcgtgtaggtttagagttctctgaaacggcagctgcaacagaaaaagtggtaaatgaagtgaaagatgatgaatctatttttgatattggcgataaatcagcagaacaattggctgaaattatcaaaaatgcaaaaaccgttttatggaatggcccagttggcgtgtttgagttccctcacttccgtaaagggactgaaatcatttctcacgccattgcaaacagcgatgcattctctatcgctggtggcggcgataccttagcggctatcgatttatttggtattgctgataagatttcttacatttcaacgggtggtggtgcattcttagagtttgtagaaggcaaagtattacctgcagtagaaattcttgaaaaacgtgcgaaaaactaa

SEQ ID NO: 6945 - DNA, 582 bp, Haemophilus influenzae
  CDS (1)...(582)
atggcgaaactctacttctattactccacaatgaacgctggaaaatcaacgacgttgctacaatcttcctataactatcgtgagcgtgatatgaacacattagtttatacggctgcgattgatgatcgttttggcgtgggaaaagtcacatcgcgtattggcatttcgcaagatgcctttttatttcgctcggaaaccaatttgtttgatgaaattaatgagcatttaaaaaaagaaaaagtgcattgcgtgttggtggatgaagctcaatttcttagcaaacaacaagtttaccagttgagtgatgttgttgataaactcaaaatccctgtgctttgttatggcttgcgtacagatttccaagcggaactttttgaaggaagtaaatatttactggcttgggcggatcaactcgaagaattaaaaacaatttgttattgtggccgcaaggctaattttgttttgcgtttaaatgatcagggcgaggtcattaaagaaggtgcacaaattcaaattggaggcaatgattcttatctttctgtttgccgtttacactataaagaaaagtgcggtcaaatttaa

SEQ ID NO: 6946 - DNA, 1029 bp, Haemophilus influenzae
  CDS (1)...(1029)
atgaaaatcttaggcattgaaacttcctgtgatgaaacgggcgtggcgatttatgatgaagaaaaaggattaattgctaatcaactttatactcaaattgccctgcatgcagattatggtggtgtggttcctgaattagcatcacgtgatcatattcggaaaacagcacctcttattaaagcggcattagaggaagccaatttaaccgcgagcgatattgatggtattgcttatacgagtggccctgggcttgttggcgcattgcttgtcggtgctacgattgcacgttctttagcctatgcttggaatgttcctgcgattggtgttcatcatatggaagggcatttacttgcgccaatgcttgatgacaattcaccgcactttccttttgttgctctgttggtatcgggtggccacactcaattagtgcgtgtcgatggtgtaggaaaatatgaagtgataggagaatctattgatgatgctgctggcgaagcctttgataaaacagcaaaattacttggactagattatccaggtggcgcggcactttctcgtttagcggaaaaaggtacgccaaatcgtttcacatttccacgtccaatgacagatcgtgcaggccttgattttagtttttctggtttaaaaacatttgccgcaaatacagttaatcaagcaattaaaaacgagggcgaactgatagagcaaactaaagcagatattgcttatgctttccaagatgcggtggtggatactcttgccattaaatgtaagcgtgcattgaaagaaacaggctataaacgtttagtgattgcgggaggggtgagcgcaaataaaaaactccgagaaacgcttgcgcacttaatgcaaaatttaggtggcgaagtgttttatcctcaacctcaattttgtacagataatggtgcgatgattgcttacacaggttttttacgtttaaaacaaggtcagcatagcgatctggctattgatgttaaacctcgttgggcaatggcggaattaccggcaatttag

SEQ ID NO: 6947 - DNA, 216 bp, Haemophilus influenzae
  CDS (1)...(216)
atgcctgtaattaaagtacgtgaaaacgaatcatttgacgtagctttacgtcgtttcaaacgctcttgcgaaaaagcgggaatcttagctgaagtacgcgctcgcgaattttacgaaaaaccaactacaattcgtaaacgtgaaaatgcaacacttgcaaaacgtcacgcaaaacgcaacgctcgcgaaaacgcgcgcaatacccgtttatactaa

SEQ ID NO: 6948 - DNA, 678 bp, Haemophilus influenzae
  CDS (1)...(678)
atgagcaacacagttgctacgatgataaacaaaaggaacattatgcgtaactacattaaaattggcgtggctggccctgttggggcgggtaaaacggcgttaattgaaaaactcactcgtgaaatagcgtcaaaatatagcgtagcagtcattactaacgatatttacacccaagaagatgcggaatttttaacgaaaaatagtttgcttccaccagagcgaattatgggcgtggaaacgggcggttgcccgcacacagcaattcgtgaagatgcctcgatgaatttagaagccgtggacgaaatggtgactcgtttccctgatgtggaaatcgtgttcattgaatcaggtggcgataacctttcagcgacttttagccctgatttggcagacgtgacgatttttgtgatcgatgtggctcaaggggaaaaaatccctcgtaaaggtgggccaggtatcactcgttcagatttacttgtgatcaacaaaactgatcttgctccattcgttggtgctgacttaagcgtcatggaacgtgatgctcgtcgtatgcgtaacggtcagccgtttattttcaccaacctgatgaaaaaagaaaatctggatggcgtgatcggttggatcgaaaaatatgcgttgttgaagaatgtggaagaacctgcatctttggttcgttaa

SEQ ID NO: 6949 - DNA, 306 bp, Haemophilus influenzae
  CDS (1)...(306)
atgatcccaggcgaataccaattagccgaaggcgatattctcgctaatgtcggcagaaaaaccgtaaaaatcgaagtaacaaattcaggcgaccgcccaattcaagttggctcgcattaccatttttttgaaaccaataatgcccttaaatttgaccgcactttggcacgtggaatgcgcttaaatgttccatctggcaatgcggtgcgttttgaacccggtgaagtgaaatcagtggaattagttgcttttggtggtaaccaaatcatttatggtttccataatcaaattgatggcaaattataa

SEQ ID NO: 6950 - DNA, 303 bp, Haemophilus influenzae
  CDS (1)...(303)
atgcacttaacttccagagaacaagaaaaactgatgcttttcctcgcgggcgaacttgcggcaaaacgcaaagcacgcggcgttaaattaaactatccagaaactattgcttatattgctagtcatttacaagaggcagcaagagaaggaatgagtgtagcggaagtcatgcaatatggcgcaacacttttaaccgttgatgatgtcatggaaggtgtggcggaaatggttcatgaagtccagattgaagctactttccccgatggcacgaaacttgttaccgtgcataatccaatcagataa

SEQ ID NO: 6951 - DNA, 291 bp, Haemophilus influenzae
  CDS (1)...(291)
atgaatattcgtcctttacacgatcgtgtaattattaaacgtgaagaagtcgaaacccgttcagctggcggtatcgtattaaccggttcagcagcgactaaatcaacccgcgcgaaagtattagctgtgggtaaaggtcgtattttagaaaatggcaccgttcaacctttagatgttaaagttggcgatatcgtaattttcaacgacggttacggcgtgaaaagcgaaaaaatcgatggtgaagaagtgttaatcatttctgaaaacgacatcctagcaattgtagaataa

SEQ ID NO: 6952 - DNA, 450 bp, Haemophilus influenzae
  CDS (1)...(450)
atgcaagtaattcttttagataaaattgttcacttaggtcaagtgggcgatcaagtaaatgttaaatcaggttttgcacgtaacttcttaatcccacaaggtaaagctgttatggcaactaaagctaacattgaacactttgaagcacgtcgtgcagaattagaagcgacagcagcagcaaatcttgcagcagctcaagctcgtgcagcagaagttactgcattaggttctgtgactatcgcatctaaagcaggtgatgaaggtcgtttattcggcgcaatcactactcgtgatgtggcagaggcagtaactgcagcaggcgttaaaattgcgaaaagtgaagttcgtttaccaaacggtccaatccgtactcttggtgaccacgatgttcgtttccaacttcacggtgaagtatttgcggcattagatgtaatcgttgttgcagaataa

SEQ ID NO: 6953 - DNA, 228 bp, Haemophilus influenzae
  CDS (1)...(228)
atggcacgttatttccgtcgtcgtaagttctgccgtttcacagcggaaaatgttgttgaaatcgattacaaagatatcgctacattaaagaactatatttcagaaagcggcaaaattgtacctagccgtattaccggtactcgtgcgaagtaccaacgtcaattagctcgtgcaatcaaacgcgctcgctatttagcgttacttccatacactgacaatcatcagtaa

SEQ ID NO: 6954 - DNA, 378 bp, Haemophilus influenzae
  CDS (1)...(378)
atgcgtcactacgaaatcgtgtttatggttcatccggaccaaagcgagcaagtaccaggtatgatcgaacgttacaccggttctgtaaaagaagctggtggtcaagttcatcgcctagaagattggggtcgtcgccaattagcgtacccaattaataaattacacaaagcacattatgtgcttatgaatgtagaagcgcctcaacaagtcatcgacgagctagaaacgactttccgttataacgatgctgtattacgcagtcttgttatccatactaagcacgccgtaaccgaagcgtccccaatgaaagcggctaaagaagaacgtaaacctttagctgaagttgaaaacaacgattttgaggatgctgaagagtaa

SEQ ID NO: 6955 - DNA, 255 bp, Haemophilus influenzae
  CDS (1)...(255)
gtgcggataaaaaatcgattatttttagaggatacaatggcgaaagaagattgcattgagatgcaaggcacaattttagagactttaccgaatactatgttccgcgtggagttggaaaacggtcacgtggttactgcacatatttctggaaaaatgcgtaaaaactatatccgtattttgactggggataaagtgactgtagaaatgacgccttatgatttaagtaaaggacgtattattttccgtagtcgttaa

SEQ ID NO: 6956 - DNA, 864 bp, Haemophilus influenzae
  CDS (1)...(864)
atgaactcaaaaaaacacttaggccatacggcgcgtaaacgctttggtcaaaactttttacatgatacttctgtcattcaaggtatcgtggcggcgatttacccacaacctaatcaattcttagtggaaattggcccagggcttggtgcattaacagagcctgttggtgaacttgtcgatcatctgactgtggtagagcttgaccgagaccttgcagaacgtttacgtcaccatccatttttacatcaaaagctcaccgttattgaaacggatgcgatgcaatttgattttggtgcgctttacacaaaagaaaatttagcagaaaaagggcaaaaattacgtgtgtttggtaacttaccttacaacatttctacgccattgatgttccacttgtttaaatatcatgatgtgattcaagatatgcactttatgctgcaaaaagaagtggtaaaacgcctatgtgccgcaccaaatagcaaagcttatggtcgtttaacgattatggcgcaatatttctgccaagtgatgcctgtgcttgaagtaccgccttcggcattcaaacctgcaccgaaagtagattcagccgttgtgcgtttaattccgcataaggaattgccgcaccctgtaaaagatttatattggttgaaccgtgtttgctcccaagcgttcaatcaacgtcgtaaaacattacgcaatgcactctcaactctattttcacctgaaaatctgaccgcacttggtattgatttaaatgcacgtgcagaaaatttggctatcgcagattatgcacgtttagcgaactggttagcggataatccaccagcagatgtcaataaagatgaaatcttagattcagaagagtaa

SEQ ID NO: 6957 - DNA, 1455 bp, Haemophilus influenzae
  CDS (1)...(1455)
atgtcagtaaaaggcgacatcggtgttatcggcttagccgtaatggggcaaaacctcattttaaatatgaacgaccacgggtttaaagtcgtggcatataaccgtaccacttcaaaagtggatgagtttttacaaggtgcggcaaaaggcaccaatattatcggcgcatactctttagaagatttagctgctaaattagaaaaaccacgtaaagtgatgttaatggtgcgcgctggtgatgtggtggatcaattcattgaagcattattaccacatttagaagagggcgacatcattattgatggcggtaactcaaactatccagatacgaaccgtcgagtgaaagccttggcggagaaaggtattcgctttatcggttcgggtgtgtctggtggcgaagaaggggcgcgtcacgggccttcaattatgccgggcggtaatcaagaagcgtggcagtatgtgaaacctatcttccaagcaatttcagctaaaacagaacaaggcgaaccttgttgtgactgggtcggcggcgaaggtgctggtcattttgtgaaaatggttcacaatggtattgaatatggcgatatgcagttaatttgcgaagcataccaattcttaaaagaaggtttaggcttaagctatgaagaaatgcaagccatcttcgcagaatggaaaaatactgaacttgatagctatttaatcgatatcaccactgacattcttggttataaagatgcaagtggagaacctttagtcgaaaaaatcttggatactgcgggtcaaaaagggacaggtaaatggacaggtatcaatgcgttagattttggtattccattaactttaatcactgaatccgtttttgcacgctgcgtgtcttcctttaaagatcaacgtgttgcggctaatcaattattcggcaaaactattacaccagttgaaggcgacaaaaaagtatggattgaagcggtacgtaaagcattattagcgtcaaaaattatttcttacgcacaaggctttatgctgattcgtgaagcctctgaacaatttggttgggatattaactatggtgcaacggcgttgttatggcgtgaaggttgtatcattcgtagccgtttcttaggtaatattcgcgatgcttatgaagcaaatccaaatcttgttttcttaggttcagatagctacttcaaaggcattttagaaaacgcattaagtgactggcgtaaagtggtggcaaaatctatcgaagtgggtatcccaatgccttgtatggcgtctgcgattactttcttagatggctatacttcagcacgtttaccagcaaacttattgcaagcacaacgcgactacttcggtgctcatacttatgaacgcacagataaacctcgtggcgagtttttccacactaactggactggtcgtggcggtaatacagcatcaactacttatgatgtgtag

SEQ ID NO: 6958 - DNA, 1485 bp, Haemophilus influenzae
  CDS (1)...(1485)
atgcaaactgataataattgtatcgtcatttttggcgcgtctggtgacttaactcatcgtaaactcattccagccctttataatctctacaaaatcgggcgtttgagtgaaaacttttccgttcttggtgttgcacgttctgacttgaacgatgaaactttccgcgaaaaaatgcgtgaggcgttaattcataatgaagaaacaacaccagaaaccttagatgctttctgctctcatctttattaccaagcagtgaatacttcggatgctcaagattacggcaaacttgttccacgcttagacgatcttcacgataaatatcaaacctgtggtaacaccttttactatatgtccactccaccaagtctttatggcgtgattcctgagtgtttggctgcacatggtttaaatacggaagaatatggctggaaacgtattatcgttgaaaaaccttttggttacgatgaaaaaacagcgcaaacattagacgtacaaatccaccgtttctttgaagaacaccaaatttatcgtatcgatcattatttaggtaaagaaaccgttcaaaacttgctcgtattacgtttttcaaatggttggtttgaaccgctttggaaccgtaatttcattgattatgtagaaattactggtgcagaatctattggcgtggaagagcgcgggggctattatgatggttctggcgcaatgcgagatatgttccaaaaccatttattgcaagtgttagcgatggtggcaatggagccgccagcgattattaacgcgaattcaatgcgtgatgaagtagcaaaagtgatgcatagtttgcgtccattaacttcggaggatatggagaataaccttgttttgggtcaatacacagcggctgaaattaacggcaaaatggaaaaaggctatctagaagaaaaaggcgtaccggcaaattctcgtactgaaacctacatcgcattacgttgtgaaattgaaaactggcgttgggctggtgtgccgttctatgttcgtacgggtaaacgcttaccagctcgtgtgactgaaattgtgatccattttaaaactacgccacatcctgtattcagccaaaatgcaccagagaataaattaattattcgtattcaacctgatgaagcgatttcaatgcgttttggtttgaaaaaaccaggtgcaggttttgaggcgaaagaagtatcaatggatttccgttatgcagatttagcaggtgcgcaagtattaaccgcttatgaacgtttattgttggatgcgatgaaaggcgatgcaaccttgtttgctcgtactgatgctgtgcatgccgcatggaaatttgtgcaaccgattttagattacaaagccaatggtggtcgtattcacgaatatgaagctggcacttgggggcctgttgcagctgataaattaatcgcaaaacaaggcaaagtgtggcgtaaaccaagtggattgatgaagaaaaaagtttaa

SEQ ID NO: 6959 - DNA, 396 bp, Haemophilus influenzae
  CDS (1)...(396)
atggcagaaaaagaagtcagattagataaatggttgtgggctgcccgattttacaaaacacggagcattgctaaagcgatgattgaaagtggtaaagtgcattacaacaatcaacgtgcgaaagtaagtaaaattgtggaagtgggcgcaatgttaaaacttcgccagggaaacgaagaaaaagaaataaaaattatcgccttaagcgatcaacgccgaggtgcgccagaagcacaattactctatcaagaaaccgaaagtagcgtgaaaaaaagagaagaaatcgcatgggcaagaaaaaataattccctttcaatgccccatcctgatcgtcgcccaaataaaaaagagcggagagatttattgaaatttaaacaccaagataaatttgaataa

SEQ ID NO: 6960 - DNA, 2421 bp, Haemophilus influenzae
  CDS (1)...(2421)
atgtcagaaacgaccaatgataactatggtgcatcgagcattaaagtattaaaaggccttgatgcggtgcgtaagcgtcctggtatgtatatcggcgataccgatgacggtactggtttgcaccatatggtatttgaagtggtggataatgccattgatgaagccctcgctggccattgttccgatattatcgtgacaattcacgatgataattctgtatcggtgcaagatgatgggggcgggattcctgtggatattcatcctgaagaaggcgtttctgcagcagaagttattatgactgtgcttcacgcaggcggtaaatttgacgataactcttataaagtatcgggcggtttacacggcgtgggcgtatctgtagtgaatgcgctttctgataagttacaattaaccattcgtcgtcaaggtcacgttcacgagcagttttatcatttaggggagcctcaatcgccattaacagtgattggcgaaacagaggcaacggggacaacggttcgtttctggccaagctcagatatttttgctatcacaacctttgattacaaaatcttagcaaaacgcttacgtgagctttctttcttgaattctggcgtatctattcgtttaatcgataaacgtgatggatctgaagatcatttccattatgaaggcggtattcaagcattcgtagaatatttgaacaaaaataaaaacccaattcatccaaagccattttattttaccgctgagaaagatggcatcggcgtagaagtcgccttgcaatggaatgatggtgtaaatgaaaacgtgtactgctttaccaataacattcctcaacgtgatggcggtactcacttagctggttttcgtggagctttaacccgtagcttaaatagctatatggaaaacgaaggcatgctgaaaaaagaaaaagtggcgacttcaggcgatgatgcacgtgaaggtttggtggcgattatttccgttaaagtgcctgatccaaaattctcatcgcaaacgaaagacaaactcgtgtcttcagaagttaaaagcgcggtggaatctgcgatgaatgaaaaaatgcaggaatatttattggaaaatcctgcagatgcaaaaatcattgtaaatcaaattattatggcagcgcgtgcgcgtgaagcagcacgtaaagcgcgtgaaatgacgcgccgtaaaggggcattagatattgcaggtttaccaggtaaactagcagactgccaagaaaaagatcctgctctttctgaactttacttggtggagggggactccgcgggtggttctgcaaaagttggtcgtgatcgtaaaactcaagcaattttgccattgaaaggtaaaatcttaaacgtagaaaaagcacgtttcgacaaaatgttgtcttcccaagaagtgggcacattaattactgctttaggctgcggtattggtcgtgatgaatataatccagataaattacgttatcatcatatcattattatgaccgatgctgatgtggatggttctcacatccgtacgttgcttttaaccttcttctatcgtcaaatgcctgagctgattgagcgtggttatgtttacattgctcagccgccactttacaaagtgaaaaaaggaaaacaagaacgctacattaaagatgcggatgaaatggagcaatatgaattaacccttgcgttagatggcgcagaattacatatcagcacaaatgcaccagcaatgaatgcccttgtatttgagaaattggtggcagaatataacagcgtacaaaaacttatcggtcgtttaaaccgtcattacccagcccctgtattgcaaggattaatttatcagtcgccaatttctattgaaatgatgaaagaggaaagtgcggtggaaaattggggtaaatcttttgttgaacaactgactgcaaaagaaactgaagcacatcaatattcagtgcgtacacaatttaatgcggaacgccaagtgtatgaagcggtgattactgttcgcaaacacggtattgataccgattatttcttgaattttgattttgttcacggcaatgaatacgcaaaaattgtttctcttaataaacaactcaatggtttattagaagagggtgcttatgttattcgtggcgaaaaagtacaaccagtgcgtagttttgaacaagccgttgaatggttagtgaaagaatctcgtaaaggtcttgaagtacaacgttataaagggcttggggaaatgaatgcagatcaactttgggaaaccacaatggatccaaattcacgtcgtatgttgaaagtttctattaaagatgctgttgcagcagatcaattattcactaccttaatgggagatgaagttgagccacgtcgtgagttcattgagctgaatgcgttaagagcaaatttggacgtgtaa

SEQ ID NO: 6961 - DNA, 2289 bp, Haemophilus influenzae
  CDS (1)...(2289)
atgttaaatcaacaaattagccaaattattgcggcagaattaaccgttcaaccccaacaaatctttgcagctattcaattattagatgatggcaacaccattccatttattgcacgttatcgtaaagaagctacaggtggcttagatgacacccaacttcgtcattttgaaacccgtttaatttatttgcgtgaattagaagatcgtcgtcaaactattttgaaatctattgaagagcaagggaaattgaccgatgaattgcgtgacaaaatccatgcgacacaaagcaaaaccgaattagaggatttatatttaccgtacaaacctaaacgtcgcaccaaagggcaaattgccattgaagccggtcttgagccattggctaatttactttggaatgagccaaaaaatgatccagaatcaaccgcactttcctttgttgatgctgaaaaaggcgtagctgatagcaaagctgcgttagacggtgctcgcattattttaatggaacgttttgctgaagatgcgggcttattagcgaaagtccgtgattatttagcgaaaaatgcggttatcgtatcaaaagtgatcgaaggcaaagaaacggaaggtgcaaaattccaagattatttcgaccaccaagaattattgaaaaatgtgccttctcaccgagcattggctatgttccgtggacgtaatgagggcattttacaattaagtttaaatgctgatcctgatgcggaagagggaagtcgtcaaagttattgtgaagaaattattcgtgattatttagatgtacgtttcacgggacagccagcagataaatggcgtgagcaagtgattgcgtggacgtggaaaatcaaagtttcgttgcatttagaaacggaattaatggcaagtttacgtgaaaaagcggaagaagaagccatagatgttttcgcccgaaatctgaccgcacttttaatggctgcaccggctggtgcgaagagcacaatgggcttggacccaggcttacgtacaggtgttaaagtcgcgatggttgataacacaggtaaattattagataccaccaccatttatccacacacgggtcgtgaagctgaagctcaagtggcgattttcagcttaatccgcaaacataacgtggaattaattgccattggtaatggtacggcttctcgtgaaactgaacgttttgcgaaagacgtgattaaagaaattaaagaaaataaaccacaaaccgttgtagtaagcgaagctggcgcgtccgtttattcagcttctgaatttgccgcaaatgaattcccgaatttagatgtatctttacgtggtgcggtctctattgcacgtcgtttacaagatccattggcagaattagtgaaaatcgaaccgaaagccattggtgtagggcaatatcagcacgatgtaaaccaaacccaacttgcgcgtaaactcgatgcagtagtggaagactgtgtaaacgcagtaggtgtggatttgaatacggcatccgcaccattgctcgctcgcgtggctggaatgacgaaaaccttagcgcaaaacattgtggaatatcgtgatgaaaatgggcgttttgaaagtcgtagcgaattgaaaaaagtgccacgtttagggccaaaagcctttgagcaatgtgcaggctttatgcgtattgcaaacgggaaaaatccacttgatgcttcaggtgttcacccagaagcttatcctgtggtcgaaaaaattttgcaagctaccgcgcaatctattcaagatttaatgagtaatgccggtgtggtacgtcagcttgatgcaaaacaattcattgatgagcaatttggtttaccgaccgtccaagatattttcaaagagttagaaaaaccagggcgcgatccgcgtggcgagttcaaaaccgctgtatttgctgagggcgtggaagaaataacggatttaaaatctggaatgattttagaaggaacagtgactaatgtaactaattttggcgcatttgtggatattggtgttcatcaagatggtttagtgcatatttcatcattaagcgataaattcgtggaagatccccatcaagtggtaaaaacaggcaacattgtaaaagtcaaagtgttagaagtggatgtgccacgtaaacgcattgcattgacgatgcgattagatgaaagtgcggtcaaaaatgatagcaaatctgaccgcactttatccacaagacctcgtggaaatatgcagcgagaggcgcgtaattcaagaggtaataatgtgataggcaatgcctttgcctga

SEQ ID NO: 6962 - DNA, 1185 bp, Haemophilus influenzae
  CDS (1)...(1185)
atgtctaaagaaaaatttgaacgtacaaaaccgcacgtaaacgtgggtacaatcggccacgttgaccacggtaaaacaactttaacagcagcaatcacaaccgtattagcaaaacactacggtggtgcagcgcgtgcatttgaccaaattgataacgcgccagaagaaaaagcgcgtggtattaccatcaacacttcacacgttgaatacgatacaccgactcgccactacgcacacgtagactgtccgggacacgccgactatgttaaaaatatgattactggtgcggcacaaatggatggtgctattttagtagtagcagcaacagatggtcctatgccacaaactcgtgaacacatcttattaggtcgccaagtaggtgttccatacatcatcgtattcttaaacaaatgcgacatggtagatgacgaagagttattagaattagtcgaaatggaagttcgtgaacttctatctcaatatgacttcccaggtgacgatacaccaatcgtacgtggttcagcattacaagcgttaaacggcgtagcagaatgggaagaaaaaatccttgagttagcaaaccacttagatacttacatcccagaaccagaacgtgcgattgaccaaccgttccttcttccaatcgaagatgtgttctcaatctcaggtcgtggtactgtagtaacaggtcgtgtagaacgaggtattatccgtacaggtgatgaagtagaaatcgtcggtatcaaagatacagcgaaaactactgtaacgggtgttgaaatgttccgtaaattacttgacgaaggtcgtgcaggtgaaaacatcggtgcattattacgtggtaccaaacgtgaagaaatcgaacgtggtcaagtattagcgaaaccaggttcaatcacaccacacactgacttcgaatcagaagtgtacgtattatcaaaagatgaaggtggtcgtcatactccattcttcaaaggttaccgtccacaattctatttccgtacaacagacgtgactggtacaatcgaattaccagaaggcgtggaaatggtaatgccaggcgataacatcaagatgacagtaagcttaatccacccaattgcgatggatcaaggtttacgtttcgcaatccgtgaaggtggccgtacagtaggtgcaggcgttgttgcgaaaatcatcaaataa

SEQ ID NO: 6963 - DNA, 2103 bp, Haemophilus influenzae
  CDS (1)...(2103)
atggctcgtacaacccctattgaaagatatcgtaatatcggtatcagtgcgcatattgatgcgggtaaaactactactactgagcgtatcttattctatactggtgttagccacaaaatcggtgaagtgcacgatggtgcagcaacgatggactggatggaacaagaacaagagcgtggtatcaccattacctctgcggcaacaactgcattctggtctggtatgtcacaacaattcccacaacatcgtatcaatgttattgatactccgggacacgtggactttactgttgaagtagaacgttctatgcgtgttcttgatggtgcggtaatggtttactgtgcggttggtggtgttcaaccacaatctgaaaccgtatggcgtcaagctaataaatatgaagttccgcgtattgcgtttgtaaataaaatggaccgtactggtgctaacttcttacgtgttgttgaacaattaaaaactcgcttaggtgctaatgctattcctcttcaactccctgttggtgcagaagaaaacttcacaggtgtagttgatttgatcaaaatgaaagcgatcaattggaatgaagcagaccaaggtatgactttcacttatgaagaagtgcctgctaatatgcaagcagactgtgaagaatggcgtcaaaaccttgttgaagcggcagctgaagcgtcagaagaattaatggaaaaatacttaggtggtgaagacttaactgaagaagaaattaagtcagcattacgtcagcgtgtattagcaaatgaaattattttggtaacctgtggttctgcgttcaaaaacaaaggtgttcaagcaatgcttgatgcagttgttgaatacctaccagcaccaactgatattcctgctattaaaggtatcaatccagatgaaactgaaggtgagcgtcacgcaagtgatgaagaaccattctcttcattagcatttaaaattgcaactgacccattcgtaggtaacttaacattcttccgtgtatattctggagtgattaattctggagatacagtattgaattctgtacgtcaaaaacgtgaacgttttggccgtatcgtacagatgcacgctaataaacgtgaagaaattaaagaagttcgtgcaggtgacatcgcagctgctatcggattaaaagatgtaactactggtgatacattatgtgcaattgatgcaccaattatccttgagcgtatggaattcccagagccagtaatctctgttgcggtagaaccaaaaactaaagctgaccaagaaaaaatgggcttagcattaggtcgtttagcacaagaagacccttcattccgtgttcacacagatgaggaatctggtgaaaccattatttctggtatgggtgagttgcacttagatatcattgttgatcgtatgaaacgtgagttcaaagtggaagccaatattggtaaaccacaagtatcataccgtgaaactatccgtactcgtgttaatgatgtagaaggtaaacacgctaaacaatctggtggtcgcggtcaatatggtcatgttgttatcgacttatacccattagatccagaaggccctggttatgaatttgtaaacgaaatcaaaggtggtgtaattcctggtgaatacattccagccgttgataaaggtattcaagaacaacttaaatctggtccattagctggttacccagtagttgatcttggtgtacgtttacacttcggttcataccatgatgtggattcatctgagttagcatttaaacttgctgcgtctttagcatttaaagcagcattctcaaaagcaaacccagtattacttgagccaattatgaaagttgaagttgaaactccacctgaatatgttggtgatgtaattggtgatttaagccgtcgtcgtgctatggttaacggtcaagaagcgaacgagtttgttgttaaaatctatgcagaagttccactttctgagatgttcggttatgcaacagacttacgttcacaaactcaaggtcgtgcatcatactcaatggaaccgttaaaatatgctgaagctccaacaagtgtggcagctgcagtaattgaagcgcgtaaaaaataa

SEQ ID NO: 6964 - DNA, 471 bp, Haemophilus influenzae
  CDS (1)...(471)
atgccacgtcgtcgtagtgttgaagcacgcaagattcttccagatccgaagttcggttcagaattacttgcaaaatttattaatgtaatcatggtagacggtaaaaaatccgttgctgaatcaatcgtttatggtgctttagaaactttagcacaacgcacaggtaaagagcctttagaagcgtttgaagttgcacttgaaaatgtacgtccaactgttgaggttaaatctcgtcgcgttggtggttctacttaccaagtaccagttgaagtgcgccctgtacgtcgtaacgcattaggtatgcgttggatcgttgaagcagcacgtaaacgtggtgataaatcaatggctttacgccttgcgaacgaattatctgatgcttcagataataaaggtgcagcagtgaaaaaacgtgaagacgttcaccgcatggctgaagctaacaaagcatttgctcactaccgttggtaa

SEQ ID NO: 6965 - DNA, 375 bp, Haemophilus influenzae
  CDS (1)...(375)
atggcaactatcaaccagctagtacgcaaaccgcgtgtgaaaaaggttgtaaaaagcaacgttcctgcattagaggcttgcccgcagaaacgtggtgtatgtactcgtgtatatactacaactcctaaaaaaccaaactctgcgttacgtaaagtatgtcgtatccgcttaactaacggttttgaagtaacttcttatatcggtggtgaaggtcataaccttcaagagcacagtgttgtattaatccgtggtggtcgtgttaaagacttaccgggtgtgcgttaccacacagtacgcggtgcattagactgcgcaggcgttaaagatcgtaaacaaggtcgttctaaatacggcgttaaacgtcctaaagcttaa

SEQ ID NO: 6966 - DNA, 1890 bp, Haemophilus influenzae
  CDS (1)...(1890)
atgttttacactgaaacttatgatgtgattgtgatcggtggtggtcatgcgggtacagaagccgcacttgcaccagctcgtatgggatttaaaacccttttattaacacataatgtagatactttagggcaaatgtcttgtaaccctgcaattggtgggatcggtaaaggtcatttagtaaaagaagtagatgcaatgggcggtttaatggcgcatgctgcagataaagcagggatccaatttcgtactttaaatagcagtaaaggcccagcagtgcgtgctactcgagctcaatctgacagagttctatatcgtcaagctgttcgtactgcattagaaaatcaacctaatttagatattttccaacaagaagcgacagatattctgattgagcaagatcgagttacaggcgttagcacaaaaatgggattaaccttccgtgcaaaatcagtgatcttaacggccggtactttcttagctggtaaaattcatattggtttggaaaattatgaaggtggccgtgcaggagattctgcttctgtaaatctttcacatcgattaagagatctcggattacgtgtagatcgccttaaaacaggtacaccgccgcgtattgatgcgcgtacgatcaattttgatattttagctaaacaacatggtgatgaggtgttgcccgtgttctcttttatgggatctgttgatgatcaccctcaacaaattccttgttatataacccataccaatgaacaaacccatgaagtgatccgtaataacttggatcgcagtccaatgtataccggtgtgattgaagggattggtccacgttattgcccatccattgaagataaagtgatgcgtttcgcggatcgtaattcacatcaaatttatttagaaccagaaggcttaaccagtaatgaagtgtatccaaacgggatctctaccagtttaccgtttgacgtgcaaatgggcattgtgaattctatgaaaggtttagaaaacgcacgtattgtgaaaccaggttatgctattgaatacgattattttgatccacgtgacttaaaaccaaccttagaaactaaatcaatttctggtctatttttcgcaggtcaaattaacggtacaactggttatgaagaagcagcggcacaaggtttattggctgggattaacgcaggtctttatgttcaagagaaggatgcatggtatccacgccgtgatcaatcttatactggcgtattggtggatgacctttgcacacttggtaccaaagaaccgtatcgcgtatttacttctcgtgcagaataccgtttgttactacgtgaagacaatgcagacattcgtttaacaccaattgcccatgaattaggtttgattgatgaggctcgctgggcacgtttcaatcaaaaaatggaaaatattgaacaggaacgccaacgtttacgcagcatttggttgcatcctcgttcggaatatttagaagaagcgaataaagtgcttggtagtccacttgtacgtgaggctagcggtgaagatttattgcgtcgtcctgaaatgacctacgatattttgacttctttaacgccatataaaccggcaatggaagataaggaagctgttgagcaagtagaaattgctattaaatatcaaggctatatcgagcatcaacaagaagaaatcgaaaaacaaaaacgccatgaaaatacggctattccagctaactttgattatagtaaagtttccggtttatctaatgaagtacgtgcgaaattggaacaacatcgtccggtttccattggtcaagcgagccgaatttcaggtatcacccctgcagcaatttcaattattttggtaaatttgaaaaaacaaggaatgctaaaacgtggggaataa

SEQ ID NO: 6967 - DNA, 933 bp, Haemophilus influenzae
  CDS (1)...(933)
atgagaatagtgattgcattaggcggtaatgcgttattacgacgcggagaaccaatgacagccgaaaatcaacgacaaaatgttcgcattgcttgtgagcaaattgctaagatttggccaaataatgaattagtgatagcacacggtaatggcccacaagtgggtttgctcgccttacaaggtgctgcctatactgatgtgccaacctatcctttagatgtattgggagcagaaacagctggaatgattggttatatgattcaacaagaactcggtaatttagttccatttgaagtgccatttgcaacgttattatctcaagtagaagttgatatcaacgacccagctttcaaaaatccaactaagccaataggccctgtttatacgaaagaagaagctgaacgtttggcaaaagaaaaaaattggtctatagcacaagatggtgataaatatcgtcgcgttgtgccaagcccattaccaaaacgtatttttgaaattcgtccggtcaaatggttgcttgaaaaaggcagtatcgtaatttgtgcggggggcggtggcattccaacctattatgatgaacaccataatttacaaggtgttgaagccgttatcgacaaagatttatgttcagctttacttgcagaaaatcttgacgctgatttattcatcatcgcaactgatgtttccgcaactttcgtagattggggtaaacctaatcaaaaagcaatttcagttgcctcacctgaagctatttcagaacttggtttcgcttcaggttccatggggccgaaagtacaagccgcgatcaactttgcgaaacaaacaggaaaagatgcagtaataggatctttatctgatattgtggacattgtgaaaggcaaagctggtactcgtattacgaaaaaaactgaaggcatatcctattatgcttaa

SEQ ID NO: 6968 - DNA, 1008 bp, Haemophilus influenzae
  CDS (1)...(1008)
atgataacttcgcaaacaccaatcactgtgctaggtgcgggatcttatggaactgcgctggcaattaccttttctcgcaatggttctcccactcacttatgggggcacaatcccgcccatatcgcacaaatgcagacagaacgacaaaattatcgttttttgccggatgtcatctttcctgaggatcttcatttagaaagtaatcttgcacaagcaatggaatattctcaagatattttaatcgtggtgccaagccatgctttcggtgaaattcttataaaaatcaaaccgcacttaaaagcccatcaccgattaatttgggcaacaaaaggtttggaacgtaacacagggcgtttactacaaaccgtagttgaagaacaactcggaacgcaatatccactagctgtactttctggcccaacttttgcaaaagaattagcgcaaggtctaccatcagctattacgcttgctgccaataacgagcaattcgcacgggaatttcagtctcgtattcattgtagtaaaggtttccgagtttatataaattcggatatgactggcgttcaacttggtggagcaattaaaaatgtgatcgcaattggtgcgggtatttcagacggtatgggatttggcgcaaatgctcgcacagcactgattactcgaggtattgcagaaattacccgcttaggtatctcgctcggtgcaaataccaatacatttatgggaatgtctggattgggcgatttagtgctaacttgcaccgataatcaatcgcgcaatcgacgttttggattaatgctaggtaaaggattagatgcccaaatggctatggaaaatatcgggcaagtcgtagaaggtttttataatacaaaagaagcctatttgcttgcacaaagacaaggtgtggaaatgccgattacagaacaaatttatcaaatgctgttttgtggcaaaagcgcacaagatgtagcaatcagccttttggggcgagcatgtaaaggcgaataa

SEQ ID NO: 6969 - DNA, 804 bp, Haemophilus influenzae
  CDS (1)...(804)
atgacattagatgtgtggcaacatattcgccaagaagccaaagaacttgctgaaaacgaacctatgcttgctagtttttttcactctacaattttaaagcatcaaaatctgggcggtgcgctaagttatttattggctaacaaattagccaatcctattatgccagctatttctctccgtgaaattattgaggaagcctatcaatctaatccttcgattattgattgcgctgcttgcgatatccaagctgtccgccaccgagatcccgctgtagaattgtggtccactccattgctttatttaaaaggtttccatgcgattcaaagttatcgaattacccattatttatggaatcaaaatcgtaaatcccttgccctttatttacaaaaccaaatttcagtagctttcgatgtagatattcacccagcggcgaaaattggccacggaattatgttcgaccatgcaacaggtattgttgtgggtgaaacatctgtaatcgaaaatgatgtttcaattttgcaaggggtaacgcttggcggtacgggaaaagaatcaggcgatcgtcatcccaaagtacgcgagggtgttatgattggggcgggtgcaaaaattctcggtaatattgaagtaggtaaatacgccaaaattggggcaaactctgttgtgcttaaccctgtgccggaatatgccacagcggctggcgtgcctgctcgtattgtgagtcaagataaagcagcaaaacctgctttcgatatgaaccaatattttatcggcattgatgatggaatgaatttaaatatataa

SEQ ID NO: 6970 - DNA, 822 bp, Haemophilus influenzae
  CDS (1)...(822)
atgaaattaaaacaactttttgcaatcactgcaatcgcatcagctctcgttttaacaggctgtaaagaagacaaaaaacctgaagctgcagcagcaccgcttaaaatcaaagtaggcgtgatgtctggcccagagcatcaagttgcagaaattgcagcaaaagtcgctaaagaaaaatatggtttagacgttcaattcgttgaattcaatgactacgcattaccaaatgaagctgtatctaaaggtgatttagatgcaaacgcaatgcaacataaaccttatttagatgaagatgcaaaagcgaaaaatttaaataacttagttatcgtgggtaatactttcgtctatccattagcgggttattctaaaaaaatcaaaaatgtgaatgaattacaagacggtgctaaagttgttgttcctaacgatccaacaaaccgtggtcgtgcattaattcttcttgaaaaacaaggtttaatcaaattaaaagatgcaaataaccttctttcaactgtattagatattgttgaaaatccgaaaaaattaaacatcactgaagtagatacttctgttgcggcacgcgcattagacgacgttgatttagctgtagtaaacaatacttatgcgggtcaagtaggcttaaatgctcaagatgacggtgtatttgtagaagataaagattctccatatgtgaacattatcgtttctcgtaccgataacaaagacagcaaagctgttcaagatttcataaaatcttaccaaacagaagaagtttaccaagaagctcaaaaacactttaaagatggcgttgtaaaaggttggtaa

SEQ ID NO: 6971 - DNA, 1038 bp, Haemophilus influenzae
  CDS (1)...(1038)
  misc_feature (1)...(1038): n = A,T,C or G
atgattaagctaaataatattncgaaaatttttgagctaccgancaaaaaattgactgcncttgataatgtttcgttgaatatcgaaaaaggtcaaatctgtggcgtaattggtgcatctggtgcaggaaaaagtacattaattcgctgtgtgaacttattagaaaaaccgacaagcggttccgttattgttgatggcgtagaattaacaaaactttctgatcgcgaattagtacttgctcgtcgtcaaattggaatgatttttcagcatttcaatttactaagttctcgcaccgtctttgaaaacgtggcattacccttagaattggaaagtgagtcaaaagcaaaaatccaagaaaaaattaccgcacttttagatcttgttggtttaagtgaaaaacgtgatgcttacccaagcaatctttctggcgggcaaaaacaacgcgtagccattgcacgtgccttagcgagcgatcctaaagtcttattatgtgatgaagcaacgagcgcattagatcctgcaacgacgcaatctattctgaaattattaaaggaaattaaccgcactttaggtattacgattttattgattactcatgaaatggaagttgttaaacagatttgtgatcaagttgctgtcattgatcaaggtcgcctagttgaacaaggtactgtcggtgaaatttttgcaaaccctaaaacagaattagcacaagagtttattcgttcgaccttccacatcagtctacctgatgaatatttggaaaatcttactgatacaccgaaacatagtaaagcctatccaatcatcaaatttgagtttacgggtcgctcagtcgatgcaccgttactttctcaagcatcaaaaaaatttggcgtggagctcagtatcttaacctcacaaattgattatgctggaggcgtgaaatttggttataccattgctgaagtagaaggcgatgaagatgccattacgcaaaccaaagtttatttaatggaaaacaacgtgcgcgtggaggtgcttggttatgttcaatga

SEQ ID NO: 6972 - DNA, 1185 bp, Haemophilus influenzae
  CDS (1)...(1185)
atgtctaaagaaaaatttgaacgtacaaaaccgcacgtaaacgtgggtacaatcggccacgttgaccacggtaaaacaactttaacagcagcaatcacaaccgtattggcaaaacattacggtggtgcagcgcgtgcattcgaccaaattgataacgcgccagaagaaaaagcgcgtggtattaccatcaacacttcacacgttgaatacgatacaccgactcgccactatgcacacgtagactgtccgggacacgccgactatgttaaaaatatgattactggtgcggcacaaatggatggtgctattttagtagtagcagcaacagatggtcctatgccgcaaactcgtgaacacatcttattaggtcgccaagtaggtgttccatacatcatcgtattcttaaacaaatgcgacatggtagatgacgaagagttattagaattagtcgaaatggaagttcgtgaacttctatctcaatatgacttcccaggtgacgatacaccaatcgtacgtggttcagcattacaagcgttaaacggcgtagcagaatgggaagaaaaaatccttgagttagcaaaccacttagatacttacatcccagaaccagaacgtgcgattgaccaaccgttccttcttccaatcgaagatgtgttctcaatctcaggtcgtggtactgtagtaacaggtcgtgtagaacgaggtattatccgtacaggtgatgaagtagaaatcgtcggtatcaaagatacagcgaaaactactgtaacgggtgttgaaatgttccgtaaattacttgacgaaggtcgtgcaggtgaaaacatcggtgcattattacgtggtaccaaacgtgaagaaatcgaacgtggtcaagtattagcgaaaccaggttcaatcacaccacacactgacttcgaatcagaagtgtacgtattatcaaaagatgaaggtggtcgtcatactccattcttcaaaggttaccgtccacaattctatttccgtacaacagacgtgactggtacaatcgaattaccagaaggcgtggaaatggtaatgccaggcgataacatcaagatgacagtaagcttaatccacccaattgcgatggaccaaggtttacgtttcgcaatccgtgaaggtggccgtacagtaggtgcgggcgttgttgcaaaaatcatcaaataa

SEQ ID NO: 6973 - DNA, 1005 bp, Haemophilus influenzae
  CDS (1)...(1005)
atggcaaaaccaattgtttttagtggcgtgcagccttctggtgaattaactatcggaaattatttgggagcgttgcgtaactgggtgaaaatgcaagaagattatgaatgtattttttgcgtagttgatttacatgcgatcactgttcgtcaagatcctgttgcccttcgcaaagcaacccttgatgtgcttgcactttatttagcgtgcggaattgatccaaataaaagtactatttttgttcaatctcacgttccagaacacacgcaattaagctgggtgttaaactgttacacctatttcggtgaaatgagccgaatgacgcaatttaaagataaatcagcgcgttatgcagaaaatattaacgtgggtttgtttgattaccctgtgttaatggcggcggatattttactttatcaagcaaaaagcgtgcctgttggcgatgaccaaaaacaacacttagaaattacgcgtgatattgcaaaccgctttaatgcactttatggcaatattttcaccattcctgaaattttcattggaaaagcaggtgcgcgtattatgtcattgcaagatcctgaaaagaaaatgtcaaaatcagatgataaccgcaacaacgtggtgacacttttagaagatccaaaatctgtggcgaagaaaattaaacgtgccgtaacagattcagatgagccgcctgttgttcgttatgatgtgcaaaataaagcgggggtatctaatcttttagatattctttctgcggttacggataagccaattgctgatcttgaaaaagaatttgaaggtaaaatgtacggacatttaaaaactgcagtagcggatgaagtctcaaccctacttgctagtttacaagaacgtttccatcaatatcgtaatgatgaaactttattagataatatcttacgacaaggtgcggaaaaagctcgtgcaaaagcacaagaaaccttggcgaaagtgtatgaagcagtgggttttgtcgctgcaaaataa

SEQ ID NO: 6974 - DNA, 492 bp, Haemophilus influenzae
  CDS (1)...(492)
atggcattaaatcttcaagacaaacaagcaattgttgctgaagtaaatgaagcagccaaaggtgcactttcagcagtaatcgcggattctcgcggtgtaactgttgagaaaatgactgaattacgtaaatcagcacgtgaagctggtgttacaatgcgtgtagttcgtaatactttattacgtcgcgcagttgaaggcacagattacgaatgcttaaaagatacgtttgtaggtccaacacttatcgcgttctctaacgaacacccgggcgcacgtgctcgtttgttcaaagagtttgctaaagcaaacgataagtttgaaattaaaggtgcagcctttgaaggtaaaatccaagatgttgaattcttggcaacattaccaacttacgaagaagcgattgcacgtttaatgggcacaatgaaagaagctgcagcaggcaaacttgctcgcaccttcgcggcattacgcgacaaattacaagaagcagcttaa

SEQ ID NO: 6975 - DNA, 372 bp, Haemophilus influenzae
  CDS (1)...(372)
atgtcattaactaacgaacaaatcattgaagcgattgcttcaaaaactgtaactgaaatcgttgaattaatcgcagcgatggaagaaaaattcggtgtttcagcagcggcagcagtagcagcagctccagcagcaggcggtgcagcggcagcagaagaaaaaactgaattcgacgttgtacttaaatctgcaggtgcgaacaaagtagcagtaattaaagcagtacgtggtgcaactggtttaggcttaaaagaagctaaagatttagttgaatctgctccagctaacttaaaagaaggcgtttctaaagaagaagctgaagcacttaagaaagaattagaagaagcgggtgcagaagtagaagttaaataa

SEQ ID NO: 6976 - DNA, 1371 bp, Haemophilus influenzae
  CDS (1)...(1371)
atgacaaaaaaagcattaagtgcggtaattttagcagctggaaaaggaacgcgtatgtattctgatttacccaaagttctacatacaatcgcgggtaaaccaatggtaaaacacgtgattgatactgcccatcaattaggctcagaaaatattcatttaatctatggtcacggtggggacttaatgcgtacccatcttgcgaatgaacaagtaaattgggtattacaaacagaacaacttggcacagcacatgcagttcaacaagcagcacctttctttaaagataacgaaaacattgttgtgctttacggcgatgcaccattaattactaaagaaacattagaaaaattaattgaagcgaaaccagaaaatggcattgcattgcttaccgtaaatttagataacccaacaggctatggacgaattatccgtgaaaatgggaacgttgtagccattgtagaacaaaaagatgcgaatgctgagcaactaaatattaaagaagtcaatactggcgttatggtatctgatggtgcaagtttcaaaaaatggctagctcgtgtaggcaataataatgctcaaggcgaatattacttaacggatcttattgctctcgcaaaccaagataattgtcaagttgttgctgtacaagcaacagatgtcatggaagttgaaggcgcaaataatcgcttacaattagccgcacttgaacgttatttccaaaataaacaagcctccaaattattacttgaaggcgtaatgatctacgatcccgctcgttttgacctacgtggaacattagagcatggaaaagatgtggaaatcgatgttaatgttattatcgaaggtaatgttaaactcggtgatcgcgtaaaaattggcacaggttgcgtattgaaaaatgttgttattggcaatgatgtagaaataaaaccctattcagtgctagaggattctatagtaggagaaaaagccgcaattggcccattttctcgtttacgcccaggtgcagaacttgcagctgaaacgcatgtcggtaactttgtagaaattaaaaaatctaccgttggtaaaggttctaaagtaaatcacctgacctatgttggcgattcagaaattggctcaaattgtaatattggagcgggtgtcataacctgcaactacgatggtgcaaataaatttaaaacgatcatcggtgatgatgtgtttgtgggatctgatacacaattagtcgcgccagtgaaagtcgcaaatggcgcaactattggtgctgggactacaattacacgtgatgttggcgaaaatgaattagtgattacaagagttgctcaacgacatattcaaggttggcaacgaccaataaagaaaaaataa

SEQ ID NO: 6977 - DNA, 819 bp, Haemophilus influenzae
  CDS (1)...(819)
atggatctttatgctgtgtggggcaatccgattgcgcaaagtaaatcgccgttaattcaaaataagttagccgcacaaacccatcaaactatggaatacattgcaaaattaggcgatcttgatgcttttgaacaacagcttttggcattttttgaggagggtgcgaaaggttgcaatattacttcgccttttaaagaacgcgcttatcagctggcagacgaatatagccaacgagcaaaactggcggaagcctgtaatacgctaaaaaaactcgatgatggaaaactttatgcggataacactgatgggattggcttagtgacggatttacaacgtttaaattggcttcgtccaaatcagcacgtattaatcttgggggcgggcggagcaacaaaaggcgtattattgccacttttacaagctcaacaaaacattgtgcttgctaaccgcactttttcgaaaaccaaagaattagctgaaagatttcagccttacggcaatattcaagctgtctctatggattcgattccgctacaaacttatgatttggtgattaatgcaacttccgctggattaagtggtggaacggcttcagttgatgctgaaattttaaaattgggctcggctttttatgatatgcaatatgcgaaaggcacagacacgccatttattgcattatgcaaaagtttaggtttaaccaatgttagcgatggctttggaatgttagtcgcacaagcagcacattctttccatttatggcgaggcgtaatgccagattttgtctcggtttatgaacagcttaaaaaggcgatgttatga

SEQ ID NO: 6978 - DNA, 1917 bp, Haemophilus influenzae
  CDS (1)...(1917)
atgattatatttagtaacttatccttaaaacgagggcaaacggaacttctcgaaaatgcgtctgctacgattaatcccaagcaaaaagtcggtttggtggggaaaaatggttgtggaaaatcttcgctttttgccttattaaaaaaagaattaatgccagagggcggtgaggtgaattatccagcaaattggcgggtatcttgggtaaatcaagaaacgcctgcattggatatttctgcgattgattatgtgattcaaggggatcgtgaatattgccgtttgcaacaaaagcttgaacgtgcaaatgaacgcaatgacggtaacgccattgcacgcattcacgggcaattagaaaccttggatgcgtggacaattcaatcgcgtgccgcgtctttattgcatggtttaggatttagccaagaagaaacaatacagccagtgaaagccttttcgggcggttggcggatgcgtttgaatttggcacaggcattgctttgtccgtcagatttattattactggatgaaccgacgaaccatttggatttggatgcggttatttggttggaacgatggttagtgcaatatcaaggcactttagtattaatttctcacgatcgtgattttcttgatccaattgtgacaaaaatcctccatatcgaaaatcagaagctcaacgaatacacgggcgattattcttcctttgaagtgcaacgagccactaaactggctcaacaaacagcgatgtatcgtcagcaacaacaaaagatttcccatttacaaaaatatattgatcgctttaaagccaaagccactaaagccaaacaggcacaaagccgtatgaaagcactagaaagaatggagctgattgcacctgcttatgtggataatccttttacttttgaatttcgtccaccgcaatccttgccgaatcccttagtgatgattgagcaagcgagtgcaggttatggcatcggcgaaagtgcggtagaaattttaagtaaaattaaactgaatttagtgccaggttcgcgcattggtttactcgggaaaaatggtgcaggaaaatcaacactgattaaacttttagcgggagaactgaccgcactttcaggcacggtacaattagctaaaggtgttcaacttggttattttgctcagcatcaattagatactttacgcgcagacgaatctgctctgtggcatatgcaaaaactcgcgcctgagcaaacggagcaacaagttcgggattatttaggcagttttgcgtttcacggcgataaagtaaatcaagcagtgaaatctttttctggaggagaaaaagctcgtttggtgttggctttgattgtttggcaacgcccgaatttgttactacttgatgaaccgactaaccatttggatttggatatgcgtcaagcattaacggaagcattggtggattacgaaggttctttggtggtggtgtcgcacgatcgtcatttattacgcaataccgtggaagaattttatttagttcacgataaaaaagtggaagaatttaaaggcgatttagaagactatcaaaaatggctgagtgaacaaaacagtacgtctgaaaataaagtttcggaaaaagtgggcgataatgaaaattcggttcaaaatcgcaaggaacaaaaacgccgtgaagcagagttacgccaacaaactgcaccattacgtaaaaaaatcacgcaattagaagaaaaaatgaataaattttcttctgagcttgcgaacatagaaaatcaactggcagataccgaattatataatgccgaaaataaagaaaaattgaccgcacttttggctcaacaagtggatgtgaagaaagcattagatgatgtagaaacggaatggatgactgcacaggaagaattggaagaaatgcttcaagcataa

SEQ ID NO: 6979 - DNA, 678 bp, Haemophilus influenzae
  CDS (1)...(678)
atggctcgttcaattattgcggtcttgccagctgctggtgttggttcacgaatgcaagcggataaaccgaaacaatatttaacgctgcttggcaaaacactgcttgaacatacactcgatgtgatgctttcttatcctgccgtatctaaaattatcttggcggtaagcaaagatgatccttatatttctacactatcgctcgatcctaaaattcagttagtggaaggtggcacaacgcgagctgaatcggtcttaaatggtttaaatgcaattgcggaaaaaaatgcctgggtgcttgttcatgatgctgctcgcccttgtttacaacatgctgatattgataaattgttagctattgaagataaacaaggtgcgattttggcaatcccagtaacagatacgattaaacgagcggacaatcagcaatgtattgtaaaaacagaagatcgtagccagctttggcaagcaatgacaccgcagtttttcccagtagatatattaagagatgcgctttccacaggaattcaacaaggtgcgaatataacagatgaagcatcagcaatagaacttgctggatttcgaccgcacttagtggctggacgtagcgataatttaaaagtcactcgtcctgaagatttagcattagcagaattttatttaacaaggaataaattatga

SEQ ID NO: 6980 - DNA, 888 bp, Haemophilus influenzae
  CDS (1)...(888)
atgctaacagcgttaaatcgttattgggattatttgcggattgaacgccaaatgagtcctcacacaatcactaattatcaacatcagcttgatgccaccatcaaaatcttagcgcaacaagatattcattcttggacacaagtgacgcctagcgtggtgcgctttattttagcggaaagcaaaaaacaaggcttaaaagaaaaaagcttggctttgcgtttatctgcattgcgtcgatttctcagttttttagtgcaacaaggcgaattaaaagtaaatcctgccacaggcatttctgcaccgaaacaaggcaggcatttaccgaaaaatatggatggcgagcaagttcaacaattgcttgccaacgatagcaaagagccaattgatattcgtgatcgtgctattttggaattaatgtatagttcaggtttgcgtttatctgaattacaaggcttagatttaaacagcattaatacccgtgtgcgggaagtacgcgttattggaaaaggtaacaaagaacgagttgtgccgtttgggcgttacgcttcgcatgccattcaagaatggttaaaagtgcgggcattatttaacccaaaagatgaggcattatttgttagccagcttggaaatcgcatttctcatcgagctattcaaaaacgtttagaaacttggggtattcgtcaaggcttaaatagccatcttaatccgcacaaattacgtcattcttttgcgacgcatatgttggaagccagttctgatttacgcgccgtgcaagaattgcttgggcatagcaacctttccaccacacaaatttatactcacttaaatttccaacatctggcagaagtgtacgatcaggcgcacccaagagcgaaacgaaaaaaataa

SEQ ID NO: 6981 - DNA, 792 bp, Haemophilus influenzae
  CDS (1)...(792)
atggcacgtcgtcctttagttatgggtaactggaaattaaacggtagcaaagcattcacgaaagaattaatcgagggattaaaagcggaattacatgatgtaacaggttgtgatgtagcaattgcccctcccgttatgtatttaggtacggctgaagcagcactttctggttgtggttgcagctgtggcggtaaaagtgtgattcaattaggtgcacaaaacgtagatatcaatgtgaaaggtgcatttactggtgatatttcaactgaaatgttaaaagatttcggcgcaaaatatatcattattggtcactctgaacgccgcacttatcataaagaaagcgacgaatttgtggcgaaaaaatttggtgcattaaaagaagcaggtttagtgccagtattatgtatcggagaatctgaagcagaaaacgaagcaggcaaaacagaagaagtatgtgcgcgtcaaattgatgcagtcatcaatgcattaggcgtagaagcattcaacggtgcagtgatcgcatatgaaccaatctgggcaattggcacgggtaaatctgcaactccagcacaagcgcaagcagttcacgcatttatccgtggtcacatcgcagcgaaatcacaagccgtggcagagcaagtaattattcaatacggcggttctgtaaatgatgcaaatgccgctgaattatttactcagccagacatcgatggcgcattagtgggtggcgcatcattaaaagcccctgcatttgcagtaattgttaaagcagcagctgcagcgaaaaactaa

SEQ ID NO: 6982 - DNA, 1479 bp, Haemophilus influenzae
  CDS (1)...(1479)
atggctaactatttcaacacattaaatttacgtcaaaaattagaccaattaggtcgttgtcgttttatggatcgcgaagaatttgcagatgaagcaaacttcttaaaaggcaaaaaaatcgttatcgtaggctgtggtgcgcaaggtttaaaccaaggtttgaatatgcgtgattctggcttagatattagctatgccttacgccctgaagcgattgcagaaaaacgtgcgtcattccaacgtgcaaccgaaaatggttttaaagtgggtacttatgaagaattaattccaactgcagatttagtcgtaaacttaacaccagacaaacaacactctaaagtagttgccgatgtcatgcctttaatgaaaaaagactctgcatttggttattcacacggtttcaatattgttgaagttggcgaagaaatccgtaaagatattacggttgtgatggttgcgccaaaatgtccaggtactgaagttcgtgaagaatacaaacgtggtttcggtgtgccaacattaatcgcggttcatcctgaaaatgacccgaaaggcgaaggcatggcgatcgcaaaagcatgggctgctgcaactggcggtcataaagcgggtgttttagaatcttcattcgtggcagaagtaaaatctgacttaatgggtgagcaaactatcctttgcggtatgttacaagcaggttctatcgtatgttatgacaaattagtggcagatggtaaagatccagcatacgcaggtaaattaatccaatacggttgggaaaccattaccgaggcattaaaacaaggcggcatcacattaatgatggatcgcctatcaaacagtgcaaaattacgtgcatttgaactagctgaacaaatcaaagaaagccttggtttcttatattacaaacatatggatgacatcattagcggtcacttctctgcaacaatgatggcagactgggcaaatggcgacaaagatttattcgcatggcgtgaagcaacaggtaaaacagcctttgaaaatgcgccaaaatatgatggcaaaattagcgaacaagaatattttgataacggcgtattaatgatcgcaatggttaaagctggtgtagaattagcctttgatgcgatggttgcaagcggtatttatgaagaatcagcttactacgaatcacttcacgaattgccattaattgcgaacactatcgcacgtaaacgcttatacgaaatgaacgtggtaatttctgataccgcagaatatggtaactacttattctctaacgtagcgaccccaattcttgcaaaagaaattatccctaaccttcaaaaaggcgatttgggcgagccaactccagcagtggaagtcgataacattaccttacgtgatgtaaacgatgcaattcgcaaccaccctgttgaattaatcggtcaagaattacgtggttatatgacagatatgaaacgtatcgcagtcgcaggttaa

SEQ ID NO: 6983 - DNA, 1512 bp, Haemophilus influenzae
  CDS (1)...(1512)
atgacagacaaaaaatacatcattgcattagaccaaggcacaacaagctctcgcgcagtattattagatcataatgcgaatgtggttgaaattgcacaacgtgaatttacccaaatctaccctcgagctggttgggtagaacataacccaatggaaatttgggcaactcaaagctcaaccttaaacgaagtcgttgcaaaagcgggcattacatctgatgaaatcgctgctatcggtatcaccaaccaacgtgaaaccaccattgtatgggaaaaatcaaccggtacacctgtttacaacgcgatcgtttggcaatgccgccgtactgcagacattaccgataaattaaaagccgatggccatgaagaatatattcgtaataccacaggcttagtggttgacccttacttctctggtacaaaagtaaaatggattttggataacgttgaaggagcacgagaaaaagctgaacgaggcgaattattatttggtaccgttgatacttggcttgtatggaaattgactcaaggccgagtgcacgtaaccgattataccaacgcatctcgtaccatgttatttaacatccatactaaacaatgggatgacaagatgcttgaaatcttgaatattcctcgttcaatgttacctgaagtacgtaattcttctgaaatttacggccaaaccaatatcggtggtaaaggtggtgtgcgtattcctgttgcagggattgctggtgaccaacaagccgctctttacggacatctttgcgtacatgcaggccaagccaaaaacacttacggcacaggttgttttatgttactccacacgggtaacaaagctattacatccaaaaatggactactcacaaccattgcttgtaatgcaaaaggcgaaccagaatatgccttagaaggttctgtatttatcgcgggtgcatcaatccaatggctccgtgatgaactcaaaattgttcacgatagttttgactctgaatactttgcacaaaaagtgactgatagtaatggcgtatatgttgttccagctttcacaggcttaggtgcaccatattgggatccatatgcacgcggtgcgatttttggtctttctcgcggcgcaaaccgtaatcatattgttcgagcaaccttagaatctattgcttaccaaacccgtgatgtcttagaggctatgcaatcagattcgggtgaacgattacaatatctccgtgtagatggtggcgcgacaaacaataacttcttaatgcaattccaagctgacattttagatgtaaatgtagagcgtccagttgtgaaagaagtaacagcgctaggcgcagcttatcttgctggtttagcaacgggcttctggaaagatttagacgagcttcgcgataaagctcgtgtagaacgcaccttcagtccagacagcgacaatgaaaaacgtgaacgtcgctacaaaggctggaaaaaagcagttaaacgctcattagaatgggcaaaagaagatgaagaataa

SEQ ID NO: 6984 - DNA, 2586 bp, Haemophilus influenzae
  CDS (1)...(2586)
atgatttccgaagaaaatttccaacaacatacgccaatgatgcagcaatatctaaaactcaaagcggagaatccagatattttgttgttttatcgcatgggggatttttacgagttgttttatgacgatgcgaaaaaagcggcggcattgttggatatttctttgacgaaacgaggtcaatctgcaggacagcccattccgatggcaggaatgccttatcatgcagtggaaggttatttagcaaaattagtgcagttaggcgaatctgtggcgatttgcgaacagattggcgatccaacgacgagtaaaggaccagtggaacgtcaaattgtgcgaattgttacacctgggacagtaagcgatgaagcgcttttgcctgaacgccaagacaatctgattgctgcggtatatcaagagaaagaaaaatttggattagccactttagatatgacctctggccgttttcagctttgtgaacctgcggacaaagaaactttgcgtgcggaattgcaacgtattgcacctgtggaattgctttattgtgaagaatttaatgaaatggctgcgattgaacattgtaagggattacgccgtcgcccgatttgggaatttgaacttagcaccgccattacgttattaaatcgtcaatttggcacaaaagatttacgtgcctttggtgtggaaaaatcccctctaggcttaagtgcggctggttgtttattgcaatatgcaaaagaaacgcaacgtaccgcattaccccatattcaaagcattagcttgattcaaaatcaagactgcattcagttagatgccgccacgcgcagaaatcttgaattaacacaaaatcttgcaggtggcacagaaaatacgctagcgtctgtattggataaatgcgtcacgccaatgggcagtcgcttattgaaacgttggattcatcagcctgttcgtgatgtggaaaaattaaaacaacgccaacaatcgattgcggaaattctgaattttgatttagtcgatgaacttcagccttatttgcaattagtcggtgatatggagcgtattttggcacgtgttgcgctacgttcagcacgtcctcgcgatctcactcgcttacgcacggcgttagaacaaattccagcattacgcgcgattgtgcaacaaaaaacaccgccatttttaaccgcacttttcagccaaattgctgatttcagcgagcagtgcgatttattgcaacgtgcattgattgaaacgcctccgcttttaatccgtgatggtggcgtgattgctgaaggatacaatgcagagttagacgaatggcgtatgctctctgatggtgcaactcaatatttggaaaacctagaaaaacgtgagcgtgaaagcacaggcattgatacgctaaaaatcggttttaatgcagtgcatggttattacattcaaattagccaaggccaagcacataaagcacctattcattatgttcgccgtcaaaccttgaaaaatgcagagcgttatattattcccgaactcaaagaatatgaagacaaagtgctgaaatcaaaaggcgcagcgttagcattagaaaagcaactttacgatgaattatttgatttattattaccgcacttaggttcattgcaactggcgagcctcgcactttctgaattggatgtattggtcaatcttgccgagcgcgcagacaccctcaattacgtgatgccaacattctgtgatgaagtgagtgtgaaaattaaaaatggtcgccatcctgttgtggaacaagtattgaaagatcctttcatcgccaacccagtggaactcaatcacaatcgtcatttattagttatcactgggccaaatatgggcggtaaaagcacttatatgcgccagaccgcattaattacattgctggcgtatatcggcagttttgtgccagcagacagcgcgcgaattgggccgattgatcgtattttcactcgaattggtgcgtctgatgatttagcctcggggcgttcaacctttatggtggaaatgacggaaatggcaaatattcttcatcaagctacagcgcaaagtctcgtgcttattgatgaaattggtcgtggtacatccacttatgatggcttatccttagcttgggcttgtgcggaatggttatccaaaaaaatccgctcgcttacattatttgccacccattattttgaattaaccgcattgccagaacagctagaaggcattgccaatattcatttagatgcccttgagcataacaacaccatcgcctttatgcacgccgtacaaaatggcgcagcaagtaaaagttatggtttggcagtcgcggctttggcaggcgtgccacaatccgtcattaaactagcaaagcagaaattgacacaattagaaaaaaactcaagctattcagccgaacagcaaattcaagcgttgcgtgaagccaatcacaatcagggcgaattattctttgaacaagaaacggatgcactaagagaggctattgaaaagctggatcctgatgatttaagccctaaacaagccttggcgtatttgtatcagttaaagaaaatggtggggtaa

SEQ ID NO: 6985 - DNA, 321 bp, Haemophilus influenzae
  CDS (1)...(321)
gtgatcttttttgctgctgcggcaattgggaatatttatttccaacaaatctattctttaccgattcgtgttattggtatggctattgcattagtcattgcatttattttagcggcaattactaatcaaggaacaaaagcacgtgcgttctttaatgactctcgtacagaagcgcgtaaagtcgtatggccaacccgtgctgaagcgcgtcaaacaacattgatcgttatcggggtaacaatgattgcttctctcttcttttgggcagtagattcgattattgtgacagtgattaatttcttaactgatttgagattctaa

SEQ ID NO: 6986 - DNA, 558 bp, Haemophilus influenzae
  CDS (1)...(558)
atgactgaagaaacaacagtatcaaaaaaacgttggtatgtattacaagcgttttctggctttgaaagtcgtgtagctctaactttacgtgaatacatcaaacaacaacaaatggaagatcaatttggtgaagttttagtaccaactgaagaagtagtggaaaatgtagcaggtaaacgtcgcaaaagtgaacgtaaattttttccaggttatgtacttgtagaaatggaaatgaatgatgaaacttggcatttagtaaaaagtgtgccaagagtgatgggttttatcggtggtacaccagataaacctgcacctatttccaaacgtgaagcggatactattttaaatcgtcttgaacaaaatactgataaacctcgtcatcgtaatgaatatcatccgggagaggaagttcgtgtgactgaagggccatttgctgattttaatggtacagtagaagaagtggattatgaaaaaggccgcttaaaagtgtctgtatcaatgtttggccgtgctacaccagttgagcttgaatttggtcaagttgaaaaaatacactaa

SEQ ID NO: 6987 - DNA, 1248 bp, Haemophilus influenzae
  CDS (1)...(1248)
atgaatttcttccaatataaacataacaaactttatgccgaagatatgccagttcaacaacttgctgaacaatttggcacgcctctctatgtatattctcgcgcgacacttgaacgtcattggcacgcttttgactctgctttcggtaatcgtcctcacttaatttgttttgccgtgaaatcttgctcaaatattggcgtgttaaatattatggcaaaacttggttcaggtttcgatattgtctcgcaaggcgaacttgagcgtgtactggcagcaggtggcgatgcgtcaaaagtggtcttttctggcgttgcgaaatctcgagaagaaattatgcgtgcattagaagttagaatccgttgctttaatgtggaatcagtttctgaactcaagcacattaaccaaatcgcgggagaaatgggtaaaatcgcacctatttctttacgtgtaaatccagatgttgatgctcatacacacccttatatttcaacaggattaaaagaaaataaatttggtgtaagcgtaaatgaagctcgagaggtatataaattagcctcaacgctaccaaacataaaaataacagggatggattgccacataggctcacagctcaccgaattacaaccattcttagatgcaacagatcgattaattgtcctaatggaacaattaaaagaagatggaattacattaaaacatctcgatctgggcggtggtttaggcgtgacttatacggatgaaacaccaccgcatccaagcgattacgcaaatgcgttattagaaaaactaaaaaattatcccgaacttgaaattattcttgaacccggcagagcaatttctgcaaatgcaggaattctagtagcaaaagtacaatacttaaaaagtaatgaaagccgtaatttcgccattaccgatacaggaatgaacgatatgatccgaccagcattgtatgaggcttacatgaacatcgtcgaaattgaccgcactttagaaagagaaaaagccatttatgatgttgtagggcctgtttgcgaaacgtctgatttcttaggcaaacaacgggaactttcaattgctgaaggggattatattgctcaatgttctgctggtgcctatggagcaagtatgtcatcaaactataattcaagagcccgcactgcagaagttttagtagatggcgatcaatcctatctaattcgtcgtcgagaaaccttacaggaactttgggcattagaatcgaccatttaa

SEQ ID NO: 6988 - DNA, 1860 bp, Haemophilus influenzae
  CDS (1)...(1860)
atgctggattctcctttactatcaaaaataatagaaaaaccgaccgcactttctgttttgaaatcggttttcggttatcaatctttccgtaaagggcaggaagaagttattaatgctgctttaaatggacaagatgcgttggtggtaatggcaacggggaatggcaaatcgctttgttaccaaattcccgcactttgttttgatggtttaactttagtgatttctccgctgatttccttgatgaaagatcaagtggatcagctgcaagctaatggaattgaggcggattttcttaattctagtcagactttagaacagcagcaacaagtacaaaataagcttatttctgggcaacttaaactactttatgtgtcgccagaaaaagtgatgacgaacagtttctttcaacttatttcttatagcaaagtctgctttattgcgattgatgaagcacattgtatttctcaatgggggcatgactttcgccctgaatatacccagcttggcggtttaaaagccagtttccctgatgcgccgattatggcacttacggcaacggcagattatgcgactcaacaagatattctgcggcatcttaatctgaaaaatctgcacaaatacattggtagttttgatcgaccaaacattcgttataccttggaagaaaaatacaaacctatggagcaactgacacgttttgttttggctcaaaagggtaagagtgggattatttattgcaacagccgaaacaaggttgaacgaattgcggaaagtttacgcaataaaggtgtctctgctgctgcttaccacgcaggaatggaaacggcaattcgtgaacgtgtgcaacaggattttcagcgtgataatgttcaagtagtagtcgcaaccattgcttttggaatggggattaataaatccaatgtgcgctttgttgcccattttgatttaccacgtagcattgaatcttactatcaagaaacaggtcgagcaggacgcgatgatttacccgcagaggcggttttgttttatgaaccagctgattatgcttggttacaaaaaattctcttagaaaaaccagaaacgccacagcgtcagattgagcaacataaattagaagctattggtgaatttgcagaaagccagacttgtcgccgtttagttcttctcaattattttggcgagcatcgacaaacaccatgcaataactgtgatatttgccttgatcctcctaaaaaatatgatggtttagtcgatgcgcaaaaagtaatgtctactatttatcgagtgggacaatgttttggtgcacattatgtgattgcggtgttgcgtggcatgcacaatcagaaaattattgaacgccaacaccataaactttcagtgtatggcattggaaaagataaaagtaaagagcattggcagtccgtcattcgtcagcttattcatttgggttttgtgcaacaggttattagtgaattaaatccaacgttgcaacttactgaaagtgcgaaagtgattttgaaaggcgaagaaccgttagaattggcaatgcctcgtatttctgcaatcagtaaaattgctcataatccacaacgtcaaggtgttgcaaattacgataaggatttatttgcacgcttgcgtttcttacgcaaacaaattgccgataaagaaaatattccgccgtacattgtctttaatgatgcgactttgcaagaaatggcacaatatatgccaacaagcaatattgaaatgctgcaaattaatggcgtgggctctatcaaattagagcggtttgggcagccgtttatggcattgattcaagaacataaggcaattttggcgaatgcgcaaaataatgactaa

SEQ ID NO: 6989 - DNA, 1719 bp, Haemophilus influenzae
  CDS (1)...(1719)
atgcgtacaagtcaatatttattttccaccctaaaagaaacgccaaatgatgctcaggttgtgagccaccaattaatgttgcgtgcaggtatgattcgcccaatggcatcaggtttatataactggctaccgacgggtattcgcgtattgaaaaaagtggaaaaagttgttcgcgaagagatgaacaaaggtggtgccattgaggtattaatgccagttgtgcaacctgcggaattatgggaagagtctggtcgttgggatcaatatggccctgaattgcttcgttttgaagaccgcggaaaccgtaactttgtacttggaccaactcacgaggaagtgattacagatttagtccgccgagaagtttcttcatacaaacaacttccacttaatttatatcaaattcaaacgaaattccgtgatgaagtgcgccctcgttttggtgtaatgcgttcgcgtgaatttattatgaaagatgcgtattctttccacactacccaagaaagtttgcaagcaacctatgatgtgatgtatcaagtatacagtaacatttttaaccgtttaggcttagatttccgtgcggtgcaagcggatacaggttcaatcgggggttcagcttctcacgaattccaagtgttagcttcaagcggggaagatgatgttgtgttctcaacggaatcggattttgccgcgaatattgagcttgcagaagcaattgctataggcgaacgccaagctccaacggctgaaatgtgtttagttgatacaccaaatgcgaaaactattgcggagttggtggagcaattcaatttaccaatcgagaaaaccgtaaaaactttgattgtgaaaggtgcagacgaaaatcaaccgcttgttgcgttgattattcgcggcgaccatgaattaaacgaaatcaaagcacaaaaacacccgttagtggcagatcctcttgagtttgcggacgaaactgaaatcaaagcgaaaattggttcgggcgtgggatcgttaggcgcggtaaatcttaatattcctgcaattattgaccgcactgtggcgttaatgtctgattttagttgtggtgcgaatatcgacggcaaacactacttcaacgtgaactgggagcgtgatgtagcaataccaaaagtatttgatttacgtaacgtagtagaaggcgatcctagtccagatggcaaaggcacgcttcaaatcaaacgtggtattgaagtggggcatattttccaactgggtaaaaaatactctgaagcgatgaaagcgaccgttcaaggcgaagatggtaaaccacttgtgatgacgatgggttgctacggtattggtgtaactcgtgtggtggcttcagccattgagcaacaccatgatgaacgcggtatcatctggccatcagacgaaatcgccccattcactgtggcgattgtgccaatgaacatgcacaaatctgaagccgtgcaaaaatacgctgaagaactttaccgcactttacaatcgcaaggcgtagatgtgatttttgatgatcgtaaagaacgcccaggtgtgatgtttgcagacatggaacttatcggtgtaccgcatatggtggtaatcggtgagaaaaacctagacaacggtgaaattgaatataagaatcgtcgtaccggtgaaaaagaaatgattagtaaagataaattgctcagtgttttaaacgaaaagttaggtaatctctaa

SEQ ID NO: 6990 - DNA, 723 bp, Haemophilus influenzae
  CDS (1)...(723)
atgttaaaactacttcgaattttcctcgtattaatctgctgtattctaatttgtgtactgggtacgatttattcttttatccgctttaaaaatccaagcaacgtaggcattgttgcacgttggtttggacgcttatatccactttttggcttaaaggtagaacatcgtattcctcaagatcagaagcaaattagccgcgccatttatatcggtaatcatcaaaataattatgatatggtaacaatctcttatatggtgcaacctcgtacagtaagcgtgggtaaaaaaagcttaatttggatacccttcttcggaattttatattgggtaacgggtaatattttcttggatagagaaaaccgcacaaaagcacataatacgatgtcacagcttgcacgacgaattaatgaagataatttatcaatttggatgttcccagaaggcactcgcaatcgcggtcgcggtttattaccctttaaaacgggtgcattccatgcagcgatttcagcaggtgtaccaattattccagtggtgtgttcaagcacgcataacaaaattaatttaaatcgttgggataatggcaaagtgatttgcgaaataatggatccaatcgatgtttcaggctataccaaagacaatgttcgcgatcttgcggcttattgtcatgatctaatggaaaaacgcattgccgaacttgatgaagagatagcaaaaggaaactaa

SEQ ID NO: 6991 - DNA, 1839 bp, Haemophilus influenzae
  CDS (1)...(1839)
atgcccaaactacgttcagcgaccagcacacaaggtcgtaatatggcaggcgcacgtgccttatggcgtgcaacaggaatgaaagaaaatgactttggtaaaccgattattgcggtggtgaactctttcacgcaattcgtaccagggcatgtgcatttaaaagatatgggacagcttgttgccgcagaaatagaaaaagcgggcggcgtagcaaaagaatttaacaccattgcggtggatgatggtatcgcaatgggtcacggtggaatgctttattctttaccaagccgtgatttaatcgctgatagcgtggaatatatggtcaatgcacactgtgctgatgcgatggtgtgtatttctaactgtgacaaaatcaccccgggaatgttaatggcggcaatgcgcttaaacattccgacaatttttgtttcaggcggcccaatggaagcgggcaaaacaaaactttctgatcaattaatccgcttagatttggttgatgcgatgattgaggcagccgatccgaatgtatcagatgaacgtattgatgccatcgaacgcagtgcgtgtccaacttgtggttcatgttctggtatgtttaccgctaactcaatgaactgcttaactgaagccttaggtttatctttacctggtaatggttctatgttagccactcacgcagaccgtaaagaattattcttaaaagcaggtcgtcaaattgtcgagctttgcaaacgctattatgaacaagatgatgcaagcgtattgcctcgttcaatcggtacttttgatgcctttgaaaatgcaatgagcctcgatatcgcaatgggtggttcaagtaacactgttttacacttattagcggcagcacaagaagcaggcgtggattttaaaatggaagatattgaccgtttatcgcgcaaagtgccttgtttaagcaaaattgcaccaaacaccaataaatatcatatggaagacgtacaccgtgcaggcggtattatgggattgttgggtgaattagatcgtgctggattaattcataaaaatacacacaccgtgcttggaatgagcatgggagagcaactagaccaatacgatattattcgcaatcaagatgaagaattacataaattcttccgtgcaggccctgcaggtatccgcacaactcaagcattctcacaagattgccgctgggataccgttgataatgatcgtgtaaacggttgtattcgcaataaagaaaatgcgatttcacaagaaggtggcttagccgtattattcggtaatctcgctgaagacggatgtatcgttaaaaccgctggtgtagatgaatctatttggaaattcactggcacggcaatcgtatttgaaagccaagaagatgcggttgcaggcattttaggtggcaaagtcaaagaaggtcatgttgttgttatccgttacgaagggcctaaaggcggaccaggtatgcaagaaatgttatacccaaccagttacttaaaatcgatgggcttgggcaaaaaatgcgctttattaacggatggtcgcttctctggcggtacatcaggcttgtctattggacatgtttcaccagaagctgcttctggcggtgcaatcggcttagtacgcaatggcgatattatcaacattgatattccaaaccgtgcaattaacttagaaatcagtaatgaagaactcgcaacacgcagagccgaacaagatcaaaaaggttggcagccagctaaccgtgaacgtgaagtatctttcgctttaaaagtattcggtcactttgcgacctcagcggacaaaggtgcggtacgcgataaaacattattaaaataa

SEQ ID NO: 6992 - DNA, 3480 bp, Haemophilus influenzae
  CDS (1)...(3480)
atgtcatcccaacctcgcttcatccatcttcgcacacacacagatttttcgatgattgacagtatcgtcaaagtgaaacctcttgtgaaagcttgtgctgccaatgaaatggttgctatgggattaacggattttactaatttttgtggtgtggttagtttttatagcgaaatgctttcttcgggtatgaagcccattatcggggcagatgtaaaagtaaaaagcccattatgtggcgatgaatactttgatcttactttgctagctaaaaataatgaaggctatagaaatattactttattgttatcaaaggcttatcaacgcggttataacgatttaccttatattgatcaagattggttaattgaacatcgcgacggcgtgattattttatcagggggaacgcaaggcgatgtgggtaaaaaattgttgaaagaaaacgtagccgaaattgaaagtgcggtcgctttttaccaagaattttttgccgatcatttttatttagcattaagtcgtacaggtcgcccaaatgaagaacgttacattcaagcagcgttgaaattagcagaacgttgtgatttaccattggtcgcaactaatgatgtgatgtttttgaatacagaggattttgaagcccacgaaattcgcgtagcgattcacgatggctatactttagacgatcctaaacgtccgaaatgttatacctcacagcaatattttcgtagtgaagaagatatgtgtaagctgtttgcagacattccttccgctctcgaaaataccttattaattgcgcaacgttgtagtgtgactttgcgccttggtcaatatttcttacctcaatttccaactggcgatttaagtacagaagatttcttagtgcaaaaatccaaagagggcttggaagaacgtttagtttttttattccctgatgaaaaagtgcggttagaaaaacgaccaaaatatgatgaacgcttgcaagttgagctagatgtaattaaccaaatggggttcccaggttatttcttgatcgtaatggaatttattcaatggtctaaggataacgatattccagtagggccaggtcgtggttctggtgcgggttcattagtggcttatgcattaaaaatcactgatttagatccgttagagtttgatttgctatttgaacgtttcttaaatccagaacgtgtgtctatgcccgatttcgacgtggatttctgtatggacggtcgcgatcgcgtgattgagcacgttgcagaaacctatggtcgtggcgcggtatcacaaattattacctttggtacaatggcggcgaaagcggttattcgagatgtagggcgagtgctggggcatccttatggtttcgttgatcgtatttctaaattgattccgccagatccaggtatgacgcttgccaaagcgtttgagaccgagccgcaattacagactgcctacgatagcgatgaagaagtgcgagcattgattaacatggcgcgcaagctggaaggtgtgacacgtaatgcaggtaaacatgcaggtggcgtggtcatttcgccaaccttaattactgattttgcaccactctattgtgataatgaaggcttacatccagttactcactttgataaaaatgatgtggaatatgcagggcttgtgaaatttgacttcctaggcttgcgtactcttactatcattaaatgggcattggatataattaatgttcgtatggtgcgtgaaggcaagcctcgagtagatattgccgccattccacttgatgatcctgaatcttttgaattacttaaacgttccgaaaccaccgccgtgttccagttggaatcacgaggtatgaaagatttgatcaaacgcctgcaacctgactgttttgaagatattatcgcattggtagcattgttccgtccggggccgttacaatcgggtatggtagataactttatcgaccgtaaacacgggagagaagaagtatcttaccctgacgcagaatatcaacatgcaagtttgaaacctattcttgagccgacttacggcattattttgtatcaagaacaagtgatgcaaattgcgcaggtgttggctggctatacgctgggtggggctgacttattgcgtcgagcaatgggtaaaaagaaaccagaagaaatggcaaaacagcgtttagtgtttaaagagggggctgagaaaaacggtattgatggcgagctatctatgaagattttcgacttggtggaaaaatttgctggctatggttttaataaatctcactctgctgcttatgccttggtgtcttaccaaactctttggcttaaaactcatttccctgcagaatttatggctgcagtgatgacatcagaaatggataatacggataaaatcgtaggtttatacgacgaatgtttgcgtatgggcttaaaagtgacgccaccagatattaatatcggaaaacaccattttagtgtcaatgaacaaggcgaaattgtgtatgggattggcgcgattaaaggcgtgggggaaggcccgattgaagcacttgtggcggcaagaaatgaaggggggattttcaaagatttattcgatttatgcgctcgtgtagatttgaaaaaaattaaccgccgtacttttgaaagcctaattatgtcgggtgcctttgataaattaggcccacatcgcgccgcactttctaagaatttggaagatgcacttagagcttccgatcagcatgcgaaagatgaagcaatgggacaaacggatatgttcggtgtgctgactgaaacccatgaagacgtggaaaatgcctatgctaatacaccgccttataccgaaaaacaaatccttgatggcgaacgagaaaccttggggctttatttaagtagccatcctgttagccgttatttgaaagaactttcccattacacatcgacgcggttgaaagatctcgcaccaaatcgccgtggacaaattagcactgtggcggggctcgttgtggcatcgagaattgcgatgacgaaaaaaggcaatcgtctaggtattgcaacattggatgaccgttcaggtcgcttagatttaacattatttggtgaaagcctagaacaatttggtgagaaattacaaaaagatacagtgattgttgcttcagggcaggtgagctttgatgatttctctggtggcttgaaaatgacggtgcgcgagttaatgaccttagatgaggctcgttctcgttatgtcaaatccttggctattagtctttctgagcatcaaattacaccaagtttcattaaacaatttaaagcattacttgagccagtgagtggtggaacattgcctattaacgtgtattatcaaagtccgaaaggtcgtgcgttgttacgtttaggcgtgcaatggtcgatcattccaacagatgaaattctgacggaattggtgaatttactcggcgaaagtgcggtggaattagagtttgaataa

SEQ ID NO: 6993 - DNA, 1458 bp, Haemophilus influenzae
  CDS (1)...(1458)
atggggatgaaccgagttttagtttctcaagctgctggtggtttagcggaatatttaaaaggttacgataaagaaccctcaatcgtcattggttacgatggtcgtaaaaactctgatgtttttgcccgtgacaccgctgaaattatggcgggtgcaggcgtaaaagcttatttattaccacgcaaattaccgactccagttttagcctatgctatccaatattttgataccactgcaggtgtaatggtaacagcaagccataacccaccagaagataatggctacaaagtgtatttaggtaaagcaaatggtggcggtcaaatcgtttcaccagcagataaagacatcgcagcattaattgataaagttgcggctggcaatatccaagatttaccacgtagcgataattatgtggtgttaaatgatgaagtggtagatgcgtacattacaaaaactgcatcattagctaaagaacccgcttgcgacattaactatgtttataccgctatgcatggtgttggctatgaagttttaagtaaaacactggcaaaagcaggcttaccacaaccccacgtagtcgcagatcaagtttggccagatggcacattcccaacggtgaatttcccaaatccagaagaaaaaggcgcattggatttagcaattaaagtggcaaaagaaaagaacgctgaatttatcattgctaatgacccagatgcagaccgtttagccgttgctgtgcctgatgcgcaaggcaactggaaatcactacacggtaacgtggttggctgtttcttaggttggtacttagcaaaacaatatcaaggtaaacaaggcacattggcttgctcacttgtttcttctcctgcgctcgctgaaattgcgaaaaaatacagtttccaatcagaagaaaccttaactggtttcaaatacatcggtaaagtatctggcttattgttcggttttgaagaggcattgggctatctagtggacccagacaaagtacgcgataaagacggtatttctgcagcaatcgtgttcttagatcttgtgcgtaacttgaaaaaacaaggcaaaactttagcagattatgctgatgaatttaccaaagaatttggtgcttatgtgagtggacaaatctctattcgagtcagcgatctttcagaaattggaaaattaatgaccgcacttcgtaacaatccaccagcagaaatcgctggcgtgaaagtggcacaatttatcgaccacattaaaacagatcgtcaaagcgatatccttgtatttaacttggaaaatggcggacgcttaattgctcgtccttcaggtactgaaccaaaaattaaattctacttagatgcgcgcggtaaagatccaaaagatgcagatcgcgtactagcagaatttgatgaaggtgttcgtcacattcttcgccaagatgcttatggcaaacaagactgctaa

SEQ ID NO: 6994 - DNA, 1335 bp, Haemophilus influenzae
  CDS (1)...(1335)
atgaaaaacgtcgtgatcgttggtgggggtgctggcggtattgaattagcaacatttttgggtaataaattaggtcgtcaaaaacaagctaaagtaacgctggttgatcgcaatgccacccatttatggaaacccttattgcatgaaattgcaacaggcgtaatggatgatggcgttgattctttaagttatcgtgcgcacggtaaaaatcattttttcagttttgagcaaggttcaattatacgtattaatcgcgagcaaaaatatgttgaacttgcacctgtttatggacaagagggcgatatgcttgtcattgctcgtcgaattccttacgattatttagtgattgccattggcagtaaatctaatgatttcaacacaaaaggggtggctgataattgtatttttttagatagttcaaaacaggctttacgttttcaacataaactgttggaattatttttaaaattttcagaaaaccgcgcattagatgacattggcgaagaagaatttaaacaaaagttagtggatgaaaataaagtaaatattgctattgtgggaggtggagcaactggtgtggaattaaccgcagaactttatcatgccgctgaagatttgtcttcttacggttatggtaaaattgatagttcttgcttacaagttactttagtcgaagcaggaacacgtttattgccagcattacctgaaaatttatctgctgcagtgttagatgaattaaaggaaatgggcaccaatgtgcaattaaacacaatgattactgaggcgcagccaaatacacttattaccaaagatggcggggagattaaggctgatcttattgtttgggcagcaggggttcgcgcctcaacagtaacgcagcaatttgatggattagaaattaatcgtatcaatcaattagtggttaaagatacacttcaaactaccgttgatgatagtatttttgcgattggcgattgtgctgcattaatacaatcaaatggtaaattggttccgccaagagcgcaagctgcacatcaaatggcaaaggcttgtgcaaaaaatatttttgcattgtttgaaaataaaccactgaaatcttttaaatataacgataaaggtactttagtttctttgtcaaattttaccgcacttggtagtctaaccaataagtttggtaaaaatccacttaccgttcaaggtaaatttgcgcagtttgcttatgtgtctttgtatcgaatgcaccaacatgctttgcacggttgtattaaaattggtttgattattctcgttgataaattgaatcgttatttaaaaccaagattaaaattgcattga

SEQ ID NO: 6995 - DNA, 912 bp, Haemophilus influenzae
  CDS (1)...(912)
atgaatgacattatattaaaaagtttatccacattaattacggaacaaagaaatccgaattcagttgatattgatcgtcaaagtacattagaaattgttcgattaatgaatgaagaagataaacttgtgccacttgcgattgaaagctgtttaccgcagatttcgttggcggtagagcaaattgtgcaggcttttcaacaaggcgggcgtttaatttatattggtgcaggcaccagtggtcgtcttggtgtattggatgcgtcagaatgccctccaacatttggcgtgtctacggaaatggttaaaggaataattgcaggtggtgagtgtgctattcgtcatcctgttgagggtgctgaagataatacgaaagcggtgcttaatgatttacaaagcatacatttttcaaaaaatgatgtattagttggtatcgctgcaagtggtcgcacaccttatgttattgcaggtcttcagtatgcaaaatcgcttggtgcattgacaatttctattgcgagtaatccaaaatctgagatggctgagatagccgatattgcgatagagactattgttggccctgaaatattgacgggttctagccgcttaaaatctggcacagcacaaaaaatggtgctgaatatgctgactacggcaagtatgattttattgggtaaatgttacgaaaatttgatggtcgatgtacaagccagtaatgaaaagcttaaagcccgtgcggtgcggattgtgatgcaagcgaccgattgcaataaaacattagcagaacagacattacttgaagcagatcaaaatgccaaactggcgattatgatgattttaagcactttatcaaaatcagaagcgaaagtattgttagaaagacatcaaggtaaattgagaaatgcgctttctaaataa

SEQ ID NO: 6996 - DNA, 213 bp, Haemophilus influenzae
  CDS (1)...(213)
atgaaacaaggtattcatccagaatataaagaaattactgcgacttgttcttgcggtaatgtgatcaaaacacgttcaactttaggcaaagacatcaatcttgatgtgtgtggtaactgccacccattctatactggtaaacaacgtgttgttgatactggtggtcgtgtcgagcgtttcaacagccgtttcaaaattccaagcacaaaataa

SEQ ID NO: 6997 - DNA, 1245 bp, Haemophilus influenzae
  CDS (1)...(1245)
atgaacgacatttttatcggattacagttaagagagcattttatggctgaagaaaataaaaaaggcggattttgggcatcgttatttgggcgtaataaaaagcaagatgaacctaaaattgagccgataattgaagaagaaaagataaaagatatcgagccgtctattgaaaaatttgaagctaatgatttagtcgaagaagaaaaaatacaggaaatttcaaccgcacttgagccgattgaagaaatcatcgaagcgaaaaatttagaagatgagtttcagcctgttgttgaaattgaaactcgcgaaaaaccaagtgaagggggcttttttagtcgtttagttaagggattactgaaaactaaacaaaatattggcgcgggttttcgtggttttttcttaggaaagaaaattgatgatgagttgtttgaagaattagaagaacaacttttaattgcggatattggtgtgccgacaacaagtaaaatcatcaaaaatttgactgaacacgcaagccgcaaagaattacaagatgccgagcttttatatcaacaattaaaagtagaaatggcggatattcttgagccagtagcacaaccgttagagattgatagcacgaaaaaaccttatgtgattttaatggtgggcgtaaatggcgtgggtaaaacaacgacaattggtaagctcgcacgtaaatttcaggctgaaggaaaatcagtgatgcttgcagcgggcgatactttccgagcggcggctgttgagcagcttcaagtttggggagaacgcaatcatattccagttgttgcgcaaagcacgggttctgattctgcgtctgtgatttttgatgcgatgcaatcagcggctgcacgcaatattgatattcttattgcggatacggcgggtcgtttacaaaataaaaataacttaatggacgaactgaaaaaaattgttcgtgttatgaaaaaatatgatgaaactgcgccacatgaaattatgcttacgctggatgctggcacgggacaaaatgctattagccaagcgaagttatttaatgaggctgtgggtttaacaggaatctctctaactaaattagatggcacggcaaaaggcggcgtgatttttgccatagccgatcagtttaagttgcctattcgctatatcggtgtaggcgagaaaattgaagatttacgtgagtttaatgcgaaagaatttattgaggcattattcgttcatgaagaagaataa

SEQ ID NO: 6998 - DNA, 1182 bp, Haemophilus influenzae
  CDS (1)...(1182)
atggaaaatgttgttattgttagtgcagttagaacaccgatcggcagctttaatggtgcattatcttccgtaagtgcggttgatttaggtgcaattgtgatacaagaagccatcaaacgtgccaacattgaaagtgcattagttaatgaagtcatcatggggaacgtattacaagcaggactagggcaaaatccagcccgtcaagcagcattaaaagcaggaatagagaaagaaatcccttctttaacaatcaataaagtatgtggatctggtctaaaaagtgtcgcattaggtgcacagtctattatcagtggtgatgctgatattgttgttgtgggtggcatggaaaatatgagccaagcaccttatcttttagatagcaaagtacgacaaggcgtcaaaatgggtaatctcacattaagggacacaatgattgaagacggactaacttgcgctagcaatcactatcatatggggattactgccgaaaatattgcagaacaatatggtattagccgccaagcacaagatgaactcgcattacgttcacaaaccttagcatctcaagccgtgcaattaggtgtatttgataaggaaattgtccctgttatggtaaaaactcgcaaaggtgacattattgtttcacgagacgagtatcctaaagcagatactacagctgaaggtttagctaaattaaaacctgctttcaaaaaagagggtactgtcaccgcaggtaacgcttctggcattaatgatggtgctgcagcacttattttagttagcgaaagcaaagctcatgcacttggattaaaagccattgcaaaaattagaagctatgccagcggtggggtagatccatctgttatgggattaggtccagttccagcaacgcaaaaagcattgaaaaaagcaggaataaatcttgatgatatcgatctgatagaagcaaatgaagcctttgcctcacagttcttaggtgttggcaaagatctcaatttggatatgaataaaaccaatattcatggtggagcgatcgcacttgggcatccaatcggcgcgagtggtgcaaggattttagtaacgttattgcacaatcttatcgaaaaagataaaaaacttggacttgctacactttgtattggcggtggtcaagggatttctatgattgtagaacgcttataa

SEQ ID NO: 6999 - DNA, 357 bp, Haemophilus influenzae
  CDS (1)...(357)
gtgttagtttttttattagctaaattttattggagctctggtctaatgcagaaccaaagaatccgtatccgcttaaaagctttcgatcaccgtttgatcgatcaatctactgcggagatcgtagaaacagctaaacgtactggcgcacaagttcgtggtccaattcctttaccaactcgtaaagagcgtttcaccgtgttgatttctccacacgtaaacaaagacgcacgtgaccaatacgaaattcgtactcacaaacgtttagtagatatcgtagagccaacagaaaaaactgttgatgcattaatgcgtttagatttggctgccggcgtggacgtgcagatcagcctaggttaa

SEQ ID NO: 7000 - DNA, 627 bp, Haemophilus influenzae
  CDS (1)...(627)
atgattggtttagtcggtcgtaaagttggtatgacccgtatcttcaatgaagacggcgtgtcagtaccagttaccgttatcgaaattgaagccaaccgcgtaactcaagttaaaactcttgaaaacgatggctatactgcagttcaagttactactggttctaaaaaagcgaatcgtgtaactaaacctgaagcaggtcatttcgtgaaagcaggtgttgaagctggtcgcggtttatgggaatttcgtactgaaggtgaagaattcactttaggtcaagaaatcaatgtagacatctttgcagatgttaaaaaagtagatgttactggtacttctaaaggtaaaggtttccaaggtggtgttaaacgttggaacttccgtactcaagatgctacacacggtaactctttatcacatcgtgtacttggttctattggtcaaaaccaaacaccaggtcgtgtgtttaaaggtaaaaaaatggcaggacatttaggtgctgaacgtgtaactgttcaatcacttgaagttgttcgtgtagatgctgagcgtaaattgctattagtaaaaggttctgtacctggtgctatcaatggcgatgttatcgttaagccggcagttaaagcataa

SEQ ID NO: 7001 - DNA, 603 bp, Haemophilus influenzae
  CDS (1)...(603)
atggaattacaagttgtaggtgcaaacgcactcactgtttctgaaactaccttcggacgtgagtttaacgaagcgttgatccaccaagttgttgttgcttatgcagcaggtgcgcgtcaaggtactcgtgcacaaaaaactcgtgctgaagtgtctggttcaggtaaaaaaccttggcgtcaaaaaggtacaggtcgtgctcgtgctggtgatatcaaatcaccaatctggcgttctggtggtacaaccttcgcggctaaaccacaagatcacagccaaaaagtgaacaagaaaatgtaccgtggtgctatcaaaagcattctttctgaattagttcgtcaagaccgtttggttgtggtggaaaaatttgaattagatgcaccaaagactaaagttttagtacaaaaattaaaagatttagccgttgaagatgcgttaattatcacagcaagtttagatgaaaatctattcttagcagcacgtaacttatataaagttgatgtccgtgatgttcaaggtatcgatccagttagcttgatcgctttcgataaggtgattgttactgttgatgctgtgaaacaaattgaggagatcctagcatga

SEQ ID NO: 7002 - DNA, 300 bp, Haemophilus influenzae
  CDS (1)...(300)
atgagtcaagaacgtttgctaagtgtgctacgtgcaccgcacatctctgaaaaagcaactaacaatgctgaaaaatctaacactgttgtacttaaagttgctttagatgcgaacaaagctgaaattgctgctgcggttgctcaattatttgaagtaaaagtagattcagttcgtactgtggttgttaaaggtaaaactaaacgccgtggtaacaaaatgggtcgtcgcagcgactggaaaaaagcttatgtaactttagccgaaggccaaaacttggacttcgtggacagtgcagagtaa

SEQ ID NO: 7003 - DNA, 822 bp, Haemophilus influenzae
  CDS (1)...(822)
atggctatcgttaaatgtaagccgacctccgctggtcgtcgtcacgttgttaaaatcgtgaaccctgaattacacaagggtaaaccttacgcacctcttctagatactaaatctaaaactggtggtcgtaacaactatggtcgtattactactcgtcacattggtggcggtcacaaacaacactaccgtttaatagatttcaaacgtaacaagttagacattccagcggttgttgagcgtttagaatatgatccaaaccgttctgctaacattgctttagtgctttataaagacggtgaacgccgttatattttagcacctaaaggtttgtcagtaggcgatcaaatccaagctggcataaactcaccaattaaagtgggtaactcattaccaatgcgtaatatcccagttggttcaacagtacataacgttgaattaaaaccaggtaaaggcggtcaaatcgctcgttctgctggtgcttatgtacaaatcatcgcacgtgaaggcaactatgtaactttacgtttacgttctggtgaaatgcgtaaagtattagctgaatgtgttgctacaatcggtgaagttggtaactcagaacatatgcttcgcgtattgggtaaagctggtgctaaccgctggagaggtattcgccctacagttcgtggtactgcaatgaacccagtagatcacccacacggtggtggtgaaggtcgtaactttggtaaacacccagtaactccttggggcgttcaaactaaaggtaagaaaactcgtcacaacaaacgtactgataaatatatcgtacgtcgtcgtggcaaataa

SEQ ID NO: 7004 - DNA, 276 bp, Haemophilus influenzae
  CDS (1)...(276)
atgccacgttctctcaagaagggtcctttccttgacctacacttgttgaagaaggtagagaaggcggtggaaagcggggataaaaaaccaattaaaacttggtcccgtcgttcaatgatcattccatcaatgatcggattgaccatcgcagtccataatggtcgtcagcacgttcctgtttatgtatctgatgaaatgatcggtcataagcttggtgaatttgcaccgactcgtacataccgcggtcacgcggcagataagaaagctaagaaataa

SEQ ID NO: 7005 - DNA, 333 bp, Haemophilus influenzae
  CDS (1)...(333)
atggaaactatcgcaaaacatcgttacgctcgcacttctgcccaaaaagctcgcttagttgccgatttaattcgtggtaaaaaagttgcgcaagcattagaaattttaactttcactaacaaaaaagcagcagctttagtgaagaaagttttagaatcagctattgcaaatgcagagcacaatgacggtgcagatattgatgatcttaaagttgctaaaatcttcgttgatgaaggtcctagcatgaaacgtgttatgccacgtgctaaaggtcgtgcagatcgtattttaaaacgtactagccacattactgtggttgtgtcagatcgttaa

SEQ ID NO: 7006 - DNA, 708 bp, Haemophilus influenzae
  CDS (1)...(708)
atgggtcaaaaagtacatccacatggtattcgcctaggtattgttaaaccttggagctctacttggttcgcgaatacacaagacttcgctgacaatcttgaaggcgatttcaaagtacgcaaattcttaaataaagaattagcaagtgcttcagtttcacgtattactattgagcgtccagctaaaagtattcgtgtaactattcacacagctcgtcctggtatcgtaatcggtaaaaaaggcgaagatgttgaaaaattacgtaacgcagtgtctaaaatcgctggcgttcctgctcaaatcaacattgctgaagtgaaaaaacctgaattagatgcgaaattagttgcagatagcatcgcttctcaattagaacgtcgtgtaatgttccgtcgtgcaatgaaacgtgcggtacaaagtgctatgcgtttaggtgctaaaggtatcaaagttgaggttagcggtcgtttaggtggtgcagaaatcgcacgttcagaatggtatcgtgaaggtcgcgtacctctacatactcttcgtgcggacatcgattataacactgcagaagctcacacaacttacggcgtaatcggcgttaaagtgtggatcttcaaaggtgaaattcttggtggaatggctgccgttgcgcaatcagaacaacaacctgccgacaagcctaaaaaggctcctcgcggtaaaggtcgtaagtaa

SEQ ID NO: 7007 - DNA, 411 bp, Haemophilus influenzae
  CDS (1)...(411)
atgttgcaaccaaaacgtacaaaattccgtaaagttcacaaaggccgcaaccgtggtatcgcgagcggtactgaagttagtttcggtacttacggtttaaaagcagttggtcgttgtcgtttaaccgctcgtcaaatcgaagcggcacgtcgtgcaatgtcacgtgcagtaaaacgtcaaggtaaaatctggattcgtgtattcccagataaaccaattactgaaaaaccattagaagtccgtatgggtaaaggtaaaggtaacgttgagtactgggtagccttaatccaaccgggtaaagtgctttatgaaatggatggtgtgtctgaagaagtagcaagaaacgcatttgcattagcagctgctaaattgccagttaagaccactttcgtaactaagacggtgatgtaa

SEQ ID NO: 7008 - DNA, 192 bp, Haemophilus influenzae
  CDS (1)...(192)
atgaaagctcaagatttacgtacaaaaagtgttgaagagctgaatgctgaattagtaaaccttttaggtgaacaattcaagttgcgtatgcagacagccaccggtcagcttcaacaaacccatcaggctaagcaagtgcgtcgtgatattgcacgtgtaaaaactgtattaaccgaaaaggcgggtgagtaa

SEQ ID NO: 7009 - DNA, 258 bp, Haemophilus influenzae
  CDS (1)...(258)
atgactgataaaattcgtagcgtacaaggtaaagttgttagcgacaaaatggaaaaatctttcgttgttgctattgaacgtaaggtaaaacaccctttatatggtaaatttatccgtcgtacaactaaattacacgtacacgatgagaacaatgaagccaaagttggtgataccgtagagattcgcgaatgtcgccctctatcaaaaaccaaatcttggactttagttcgtgttgttgagaaagcagttattgcttaa

SEQ ID NO: 7010 - DNA, 372 bp, Haemophilus influenzae
  CDS (1)...(372)
atgatccaagaacagactatgctggatgttgctgataattcaggcgctcgcagcgtaatgtgtatcaaggttctaggtggatcgcaccgtcgttatgctgcgattggcgacatcatcaaaattactgtaaaagaagcaattccacgcggtaaagtaaaaaaaggtgatgtattaaaagcagttgttgtgcgcaccaagaagggtgttcgtcgcccagatggctcagttattcgtttcgatggtaacgcttgtgtaattttaaataataacactgagcaaccaatcggtactcgtatttttggaccagtgactcgtgaacttcgttctgagaaattcatgaagatcatttctttagctccagaagtactgtaa

SEQ ID NO: 7011 - DNA, 312 bp, Haemophilus influenzae
  CDS (1)...(312)
atgcctgctaaaatccgtcaaaatgatgaagtaattgtccttactggtaaagataagggcaagcgtggcaaggtaactaaagtgttaccaaacggtaaagtgtttgttgaaggtatcaacatcattactaaacatgaaaaaccagttcctgcattaggaaaggctggtggtttggtgaaaaaagaagctgcaattgacgcttcaaatgttgcgattttcaatcctaaaacaaataaagctgaccgtgtaggttttagattcgaagacggcaaaaaagtacgtttcttcaaatctaacaatgaaattatctaa

SEQ ID NO: 7012 - DNA, 540 bp, Haemophilus influenzae
  CDS (1)...(540)
atggcgaaactgcatgattactacagagatcaagtagtaagcgaattaaaaaataaattcggctacaaatctgtcatgcaagtcccacgaatcgaaaagattaccctgaatatgggtgtgggtgaagcattgaccgacaaaaaattgctagacaacgcagtagcggacttagcagcaatcagcggtcaaaaacctttagtaactaaagctcgtaaatctgttgctggctttaaaatccgtcagggatatccaatcggttgtaaagtaacactacgcggtgagcgtatgtgggagttctttgaacgtttaattacaattgctgttccacgtattcgtgacttccgcggtttaagtgcgaaatcattcgatggtcgtggtaactatagcatgggtgtgcgtgaacaaatcatcttccctgaaattgattacgataaagtagatcgtgtacgtggtttagatatcactatcacaactactgctaagaatgatgaagaaggtcaagcactacttgctgcctttaatttcccattccgtaaataa

SEQ ID NO: 7013 - DNA, 306 bp, Haemophilus influenzae
  CDS (1)...(306)
atggctaaacaatcaatgaaagcacgcgatgtaaaacgcgttaaattggctgaaaaattctacgcaaaacgtgttgaattaaagaaaatcatttctgatgtcaatgcctctgatgaagatcgttgggatgcagtgttaaagttacaaactttaccacgtgattctagcccatctcgtcaacgtaaccgttgccgccaaactggacgtcctcatggcgttttacgtaagtttggtttaagccgaattaaggttcgtgaagctgcaatgcgcggtgaaatcccaggccttaaaaaagcgagctggtaa

SEQ ID NO: 7014 - DNA, 393 bp, Haemophilus influenzae
  CDS (1)...(393)
atgagtatgcaagatccaatcgcagatatgctgacccgtattcgtaacggtcaagctgcgaacaaagttgcaatcaatatgccttcttccaagctaaaagtggcaattgccaacgtattagctgctgaaggttatatcgaaagcgtaaaagttttagaaggtgctaaacctgaattggaaattactttaaaatatttccaaggcaaaccagttgtagaaagcatccaacgtgtaagtcgtcctggtcttcgtatttacaaacgtaaagatgaattaccaaaagttatgggcggtttaggtgttgcagttatttctacatctaaaggtgttatgactgaccgcgctgctcgtcaagcaggtttaggcggtgagatcatctgttatgtagcttaa

SEQ ID NO: 7015 - DNA, 534 bp, Haemophilus influenzae
  CDS (1)...(534)
atgtctcgtgttgcaaaggcacctgttaatattcctgccggcgttgaagttaaactcgacggtcagctattaacagtaaaaggtaaaaatggcgagttatctcgcaaaattcatgaatcagttgaagtaaaacaagataacggacaatttacgttcactccacgtgaaggttttgttgaagcaaatgctcaatcgggtactgcacgtgcattagttaatgcaatggttatcggtgttactgaaggtttcactaaaaaattagtattggtgggtgtaggttacagagctcaacttaaaggtaacgcaattgcattaagtttaggctattctcacccagtagagcacactttgccggtaggtattactgcagaatgtccatctcaaaccgaaatcgtgttgaaaggtgcagacaaacagttgatcggtcaagttgcagcagatattcgtgcttatcgccgtcctgaaccttataaaggtaaaggggtacgttacgctgatgaagtggtacgtatcaaagaggctaagaagaaataa

SEQ ID NO: 7016 - DNA, 354 bp, Haemophilus influenzae
  CDS (1)...(354)
atggataagaaatcagctcgtatccgtcgtgcagctcgtgcacgtcatatgatgagagagcaaggtgtaactcgtttagttattcaccgcactccacgtcatatttatgcacaagttattgcaccaaacggttcagaagtgcttgccgctgcttcaactgttgagaaagcaattcgtgagcaagtaaaatacaccggtaataaagatgctgctgcagcagtaggtaaagctgttgcagaacgcgcattagcaaaaggcgttcaagctgttgcttttgatcgttccggttttaaatatcatggacgtgtccaaactttagcggacgctgcacgtgaagctggtctacagttctaa

SEQ ID NO: 7017 - DNA, 501 bp, Haemophilus influenzae
  CDS (1)...(501)
atgtcaaacatcgaaaaacaagttggtgaactgcaagagaagctaatcgcagtaaaccgtgtatcaaaaactgtaaaaggtggtcgtattatgagtttcactgcattaacagtggtgggcgatggtaatggccgagtaggttttggttatggtaaagctcgcgaagttccagcagcgatccaaaaagcgatggaaaaagcacgtcgcaatatgattaatgtcgctttaaatgaaggtacattacaacatccagttaaaggtgttcatactggttcacgtgtatttatgcagccagcaagtgaaggtacaggtatcatcgctggtggtgcaatgcgtgcggtattggaagttgcaggtgtacgtaacgttctttctaaagcgtatggttctaccaacccaattaacgttgttcgtgcaactattgatgcattagcaaatatgaaatcaccagaaatggttgctgcaaaacgcggtaaaactgttgatgaaatcttggggtaa

SEQ ID NO: 7018 - DNA, 180 bp, Haemophilus influenzae
  CDS (1)...(180)
atggctaaaactattaaagtaacacaagttcgtagctcaattgctcgtttaccgaagcataaagctaccttgcgtggtcttggtcttcgccatatacaccacactgttgagttaattgatacgcctgcagtacgtggtatgattaaccaagtttcatacatggttaaagtggaggagtaa

SEQ ID NO: 7019 - DNA, 435 bp, Haemophilus influenzae
  CDS (1)...(435)
atgcgtttaaatactctatctccggctgaaggtgcaaagcatagtgctaaacgcctcggtcgtggtattggttcaggtttaggcaagactggtggccgcggtcataaaggtcaaaaatctcgtactggtggcggtgttcgtcgcggtttcgaaggtggtcaaatgccgttataccgtcgtttaccaaaatttggttttacttcaatgaaatctgcagtgactgcagaagttcgtttaaatgaattaaccaaagttgaaggtaatgtagtaactttagaaacattaaaagcagcaaatatcttaactaaagatatccaattcgctaaagtaattttagctggagaagtgaaatctgcagtaacggtacgcggtttacgtgtaactaaaggtgcaaaagcagcaattgaagctgctggcggttcaattgaggaataa

SEQ ID NO: 7020 - DNA, 114 bp, Haemophilus influenzae
  CDS (1)...(114)
atgaaagttcgtgcttccgtaaagaaaatgtgtcgtaactgtaagattgttaaacgtgagggtgttgtacgcgtattgtgtagcgaccctaaacacaaacaacgtcaaggttaa

SEQ ID NO: 7021 - DNA, 1326 bp, Haemophilus influenzae
  CDS (1)...(1326)
atggctaaacaaccaggttatcaagcaagaagtactaatagcggtaaaggtgaattaaaaagccgattacttttcgttttaggtgcacttatcgtttatcgaattggttcattcattccggttcctggtattgatgcggctgttctagctcaattagttgaacaacaaaaaggcactatcattgacatgtttaacatgttctctggtggtgctctaagccgtgcatccattttagcattaggaatcatgccatatatatcggcatctattgtaattcaattgcttgcaacggtttctcctgctttagcagaattaaagaaagaaggtgctgctggtcagcgtaaaatttctaaatatactcgttatgcgacagttgtttttgcaacgattcaggcagtagctatttcaacaggcttaccaaatatgttgtctggcttagtgccaaatgttggatttagtttttacttcacttcagttgttagtttagtcactgggacaatgttccttatgtggttgggtgagcaaataactgaaagaggtattggtaacggtatttcaattcttgtttttggcggtattgtagctggtttaccatcggctattcttcaaactattgagcaggctcgtcaaggacagatgcatccattagttcttcttctgatcgcagctattgtatttgcagtaacttattttgttgtttttgttgaaagaggacaacgtagaattcgcgttgaatatgcgaagcgtcagcaaggtcgtcaaattttaggtggtcattcaacacatttaccattgaaagtgaatatggcaaatgtaatgccagcaatttttgcttcaagtattattttattcccagctacattaacacaatggtttgggcaaaatgataaatttgaatggttaaataatttatcaatgttattgaatcctggtcaaccactttatttgcttgtttatgctgttgcaattattttcttcagctttttctatacagcaatgcaatataatcctcgtgatacagcagataatctaaaaaaatctggtgcatttattccaggaattagacccggtgaacaaacatcacgttatattgataaagtgatgactcgtcttacattaattggcggtctctatgtaacgtttgtatgtttagttccttatattatgacatcggcttgggatgttaaattttacttcggtggaacatctcttttaattgtagtcgttgtaattatggatttcatcgttcaggttcaaagtcatttaatgtcttctcaatatgaatctgcgttgaaaaaagcaaaccttaaaggttttggacaataa

SEQ ID NO: 7022 - DNA, 369 bp, Haemophilus influenzae
  CDS (1)...(369)
gtggcccgtattgcaggcattaacattcctgatcataaacacgctgtaatcgctttaactgccatttacggtattggtaaaactcgttcacaagctatttgtgcagcagcgggtattgctgaagatgttaagatcagagaattgtctgaagagcagattgacaaactgcgtgacgaagttggtaaatttaccgttgaaggtgacttacgtcgtgaagtaacactaaacatcaaacgtcttttagacttaggatgctatcgtggtttacgtcatcgtcgtagtttaccagtacgtggtcaacgtactaaaactaatgcgcgtacccgtaaggtccacgtaagccgatcaaaaaatagtcggggtaaataa

SEQ ID NO: 7023 - DNA, 390 bp, Haemophilus influenzae
  CDS (1)...(390)
atggctaaaacaccagttcgtgcacgtaaacgtgtaaaaaaacaagttgtagatggcgtacgacatattcacgcatctttcaataatacaatcgttactattactgaccgtcaaggtaatgctctagcttgggcaactgcaggtggttcaggtttccgtggttctcgtaaatcaactccgttcgcagcgcaagttgcggcagagcgttgtgctgaaatcgttaaagaatttggcttaaagaacttggaagttatggttaaaggtccgggtccaggtcgtgaatctacaattcgtgcgttaaacgcagcgggtttccgtatcacgaatattactgatgtgactccgattcctcataacggttgtcgtccaccgaaaaaacgtcgtgtttaa

SEQ ID NO: 7024 - DNA, 621 bp, Haemophilus influenzae
  CDS (1)...(621)
atggcaagatatttgggtcctaaactcaagctcagccgtcgtgaaggcactgatttattccttaaatcaggcgtgcgtgcgattgattcaaaatgtaaaattgatacagcaccaggtcagcacggtgctcgtaaaccgcgtttgtctgactatggtagtcagttacgtgaaaaacaaaaagttcgtcgtatctatggtattttagaacgtcaattccgtaactactataaagaagcaaaccgtttgaaaggtaacactggtgaaaatttattagtgttattagaaggtagattggataacgttgtttatcgcatgggatttgctacaactcgcgcagaggctcgtcaattagtgagtcataaagcaattgttgtgaatggtcgtgttgttaatattccatctttccaagtttctgtaaatgatgtagttgctattcgtgaaaaatcgaaaaaacaagctcgtattaaagcatcattagaattagcagagcaaagagaaaaaccaacatggttagaagttgattctgcaaaaatggaaggtgtattcaaacgtgttcctgaacgttctgatttatcagcagacattaacgaacatctgatcgttgagctttactctaaataa

SEQ ID NO: 7025 - DNA, 987 bp, Haemophilus influenzae
  CDS (1)...(987)
atgcagggttctgttacagaatttttaaaaccacgtttagtagatattgaacaaattagttcaacacatgctaaagtgatcttagaaccgttagagcgtggttttggtcatactctaggtaatgcattgcgtcgtatccttctgtcttcaatgccaggttgtgctgtaactgaagtagaaattgatggcgtattgcatgaatatagtagtaaggaaggtgttcaagaagatattcttgaagtacttttgaaccttaaaggtctagcggttaaagtacagaataaagatgacgttattctgacattaaataaatctggaattggccctgttgttgcagcggacattacctatgatggtgatgttgaaattgtaaatccagatcatgtgatttgtcatttaactgatgaaaacgcttcaattagtatgcgtatacgtgttcagcgtggtagaggatatgttcctgcttcatctcgtacacatacgcaagaagaacgtccaattggtcgtttgcttgttgatgcttgttatagtccggttgaacgaattgcgtataatgtagaggcagctcgtgttgagcagcgtacagatttggataagctcgttattgagttagaaactaatggtgcacttgagccagaagaagcaattcgtcgtgcagcaacaatcttggcggagcaacttgatgcattcgttgatttacgtgatgttcgtcagcctgagattaaggaagaaaaaccggaatttgawccgattttattacgtcctgtagatgatttagagctgacagttcgttctgctaactgtttgaaagcagaaacaattcattatatcggtgatttagtgcaacgtactgaagtagaattattaaaaacccctaatcttggtaagaaatctcttactgaaattaaggatgttcttgcttctcgtggcttgtcacttggtatgcgccttgaaaattggccgccagcaagtattgctgaagactag

SEQ ID NO: 7026 - DNA, 387 bp, Haemophilus influenzae
  CDS (1)...(387)
atgcgccatcgtaagagtggtcgtcaactaaaccgtaatagtagtcatcgtcaagcgatgttccgtaacttagcaagtgctttagttagtcatgaaatcattaagactactttgcctaaagctaaagaattacgccgtgtagttgaaccgttaattacattagcaaaagtagatagcgttgctaaccgtcgtttagcattcgctcgtactcgcaacgttgaaactgttgcaaaattatttaatgaattaggtccacgttttgctcaacgtgcaggtggttacactcgcattttgaaatgtggttttcgtgcaggcgataatgcaccaatggcatacattgagttagttgatcgtccagaagttgctgaggcaacaactgaggaataa

SEQ ID NO: 7027 - DNA, 558 bp, Haemophilus influenzae
  CDS (1)...(558)
atgcttaaccaaattaaaaaagatgctcaagatcgtatggaaaaaagccttgaagcattaaaaggtcatatttcaaaaattcgtactggtcgtgctcaaccgagtttacttgatgcaattcaagttgaatattacggtgcggcgaccccacttcgccaattagcaaacgtagtggcagaagatgcgcgtactttagccgtaactgtgtttgatcgttctttaatctctgcggtagaaaaagcaattttaacctcagatttaggtttaaacccatcttcagcgggtaccacaatccgtgttccgcttccgccattaacagaagaacgtcgtcgcgatttaatcaaaattgtaaaaggcgaaggtgaacaaggtaaagttgcggttcgtaatgtgcgtcgtgatgcgaatgataaaatcaaagcattattaaaagacaaagaaatcagcgaaaacgaacaacataaagcagaagaagaaatccaaaaaatcacagatatttacattaaaaaagtagatgaagtattagcggataaagaaaaagaattaatggatttctaa

SEQ ID NO: 7028 - DNA, 1617 bp, Haemophilus influenzae
  CDS (1)...(1617)
atgacagacttaaataaagtggtaaaagaacttgaagctcttggcatttatgacgtaaaagaagttgtttacaatccaagctacgagcaattgttcgaagaagaaactaaaccaggcttagaaggctttgaaaaaggtactttaactacgactggtgcagtggcagtagatacaggtatcttcacaggtcgttctccaaaagataaatatatcgtgttagatgaaaaaacaaaagatactgtttggtggacatctgaaacagcaaaaaacgacaacaagccaatgaaccaagctacatggcaaagcttaaaagacttggtgactaaccaactttctcgtaaacgcttatttgtagttgatggtttctgtggtgcgagcgaacacgaccgtattgcagtacgtattgtcactgaagtagcgtggcaagcacattttgtaaaaaatatgtttattcgcccaactgaagaacaactcaaaaattttgaaccagatttcgttgtaatgaacggttctaaagtaaccaatccaaactggaaagaacaaggtttaaattcagaaaactttgttgctttcaacttgactgaacgcattcaattaatcggcggtacttggtacggcggcgaaatgaaaaaaggtatgtcctcaatgatgaactacttcctacctctcaaaggtgttggtgcaatgcactgctcagctaacgttggtaaagatggtgatgtagcaatcttcttcggcttatctggcacaggtaaaacaaccctttcaacggatccaaaacgtgaattaatcggtgacgatgaacacggctgggatgatgtgggtatctttaactttgaaggtggttgttatgcgaaaaccattcatctttcagaagaaaatgaaccagatatttaccgcgctatccgtcgcgacgcattattagaaaacgtggttgttcgttcagatggttctgttgatttcgatgatggttcaaaaacagaaaatactcgcgtgtcttacccaatttatcacatcgataacattgtaaaaccagtttctcgtgcaggtcacgcaactaaagtgattttcttaactgcagatgcatttggcgtattaccaccagtatctaaattgacaccagaacaaactaaatactacttcttatctggtttcactgcaaaattagcagggactgaacgtggtattactgaaccaactccaactttctcagcatgtttcggtgctgcgttcttaacccttcacccaactcaatatgctgaagtgttagtaaaacgtatgcaagcagcgggtgctgaagcttacttagtaaatactggttggaatggcacaggcaaacgtatctcaatcaaagatactcgtggaatcattgatgcaatcttagatggctcaattgaaaaagctgaaatgggcgaattgccaatcttcaacttagcaattcctaaagcattaccaggtgtagattctgcaatcttagatcctcgcgatacttacgcagataaagcacaatggcaatcaaaagctgaagacttagcaggtcgttttgtgaaaaactttgttaaatatgcaactaacgaagaaggcaaagctttaattgcagctggtcctaaagcttaa

SEQ ID NO: 7029 - DNA, 882 bp, Haemophilus influenzae
  CDS (1)...(882)
atgaccaatcaacaagactatactcaagacaatgacaaactttaccgttatcttttccaacatcgtgcagttcgtggagaatgggttcgcttaaataaaacatttactgatacattaaatacccatcagtatcctaaagcagtacaggatttattgggagaaatgatggtagcgactaatttactcactgccacactaaaatttgccggcaatattaccgtacaaattcaaggcgatggcccattacgcttagcattagtaaatggtaatgatcaacaacaaatccgcgcccttgctcgagtggatggcaacatcactgaaaatatgagtctgcataatatgattggtaaaggcgtattggtcattactattgcaccaaaagaaggcgaacgctatcaaggtgtaattagcttggataaacccacgatcacagaatgcttagaagattattttgtacgctcagaacagcttcaaactcaattaattattcgtactggagaatatgaaggcaagccagtggcagcaggtatgttattacaaattatgcctgatggttctggtacaccagaagattttgagcatttaactacgctcgcagcaacagtaaaagatgaagaattatttggtctccctgcagaagagttactctatcgtttatatcacgaagaaaccgttaatctttatccagcacaagatgtacaatttttctgtggctgctctgctgagcgttctagttctgcattactgctcatctctgatgaagaaattgacgaaatattagccgaacataaaggccgtattgatatgcaatgtgagtgttgtggcacacactacttctttaataaagaagcgattgaaaaattaaaatcaacaagagtttaa

SEQ ID NO: 7030 - DNA, 2625 bp, Haemophilus influenzae
  CDS (1)...(2625)
atgaaaacaacagcagaaataagacaatcattccttgattttttccatagcaaaggtcaccaagtagttgagagtagctcacttgtgccggaaaatgatccgactttgcttttcacgaacgctgggatgaaccaatttaaggatgtgttccttggaatggataaacgcccttattctcgagccaccaccgcgcaacgttgcgtacgtcctggtggtaagcataacgacttagaaaatgttggttataccgcacgtcaccatactttctttgaaatgctcggtaacttcagttttggtgattactttaaacaggatgccattaattttgcttgggaatatttaacttctccacaatggcttggtttacctaaagaaaaactctgggtaaccgtgtatgaaactgacgacgaagcctataatatttggaataaagatgttggtgttcctgctgaacgcattattcgcattggtgacaataaaggctcaccttacgcatcagacaacttctgggcaatgggcgacacaggtccttgcggtccttgtactgaaattttctacgatcacggcgatcatatttggggcgggcctccaggctcaccagaagaagatggcgaccgttatattgaaatctggaacgttgtgtttatgcagttcaaccgtttagcagatggcacaatggaaaaattacctcgtccgtctgttgatacaggtatgggtttagagcgtatttctgctgtgttgcaacatgtgaactcaaactacgagattgatattttcaaaacattaatcgcaaaaacggcggaaattgtaggcgcaacagatttaactaacaaatcactacgtgttattgctgaccatattcgttcttgtgcatatttaatcgccgatggcgttatcccatcaaatgaagggcgtggttatgtcttacgtcgtattattcgccgcgcagttcgtcacggtcacctattaggtgctaaagaatcttttttctataaactcgtgccaactctaattgatgtaatggctgaagctggaaaagatgtaaaagcaaaacaaacaaatgttgaaaaactattacgtctagaagaagaacaatttgctcgcactctagaacgtgggttgagcttattagatgaagccctttctcaagtgaaagatggcattctttcaggtgaagttgcattcaaactttatgatacttatggtttcccattggatttaacggctgatgtatgtcgtgagcgcaatattactattgatgaacaagcgtttgaccgtaaaatggaagcgcaacgtactcgtgctcaagcagcgagccagtttggtgtggactacaacagcgttattcgtgtagatggcgaaactaagtttgaaggctatactgaagtagaatctcaggcaaaaattaccgcacttttctatgatggtaaatcagtggaaagtatcgaagcaggtcaaagtgcggtcgttattttagaaaatacgccattttatgcagaatcaggtggtcagattggcgatagcggatatttaagcacacaaagtgtaacctttaatgtgaaagatacccaaaaatatgggcaagtatttggacacattggagaattaacgcaaggaagtttgaaagttggacaatcagtgaatgcgattgtggatgctaaacgtcgccacaacacatcactcaatcactcagcgacacacttattgcacgctgccttacgtcaaattctaggtttacacgttgtgcaaaaaggttcgcttgtttcagataaagccttacgttttgactttgcgcaaccagaagccattaccaaagagcaattgagtgaaattgaaacattagtaaaccaaaaaatccgcgctaactttccagttcaaacagatattatggatattgattccgcaaaagcgaaaggagcaatggctctctttggcgaaaaatatggcgataaggttcgtgtattaaccatgggcgatttctcaattgagctgtgtggcggtattcacgcaaaacgcacaggcgatattggtttatttaaaattattactgaaaacgcagtggctgcaggcattcgtcgtattgaagctgtaacaggtcaaaatgccattgactggttacataatcaacaacgcattctgacccaaagcgcagacttattaaaatcagacgtaaataccttagcggaaaaaatccagcaacttcaagacaaagcgaagaaagtggaaaaagaattgcaaggtctaaaagaaaaagccgcaatgcaggcaggttcttattttgtaaaaagtgcggtaaaaatcaatggtgtttctgttatcgcacaacaattagatggtatagaaacaaaatcattacgcgtaatggtcgatgatttaaaaaatcaactcggatcaggcgtaattgcatttgcatcaatattagatgaaaaagttaatctcgtcgttggagtgacaaatgatctaaccgccaaaataaaagctggagaacttgttaatttaatggctcaacaagttggaggaaaaggcggtggtcgtccagatatggcaatggcaggaggttcccaactagaaaatgtgacacaagcaattaaagtagcacaagactggttaaacaaaaatctgtag

SEQ ID NO: 7031 - DNA, 1293 bp, Haemophilus influenzae
  CDS (1)...(1293)
atggaattggcttatatggctaaattgcctaaagaagaatttgaggaacgtcgcacacgagtattcgctcaaatgcaacctaattcggcattattgcttttttctgaaatcgaaaaacgccgtaataatgattgtacctatcctttccgtcaagatagctatttttggtatttaacaggctttaatgaaccgaatgcagcactgttattactgaaaacagaacaagtagaaaaagccattatttttcttcgtccacgcgatccgttacttgaaacttggaatggtcgccgattaggtgttgagcgtgcgccacagcaacttaatgtaaatgaagcctattctattgaagaattcgctaccgtactgccaaaaatactgaaaaatttgaccgcactttaccatgtgccagaaattcatacttggggtgatacattggtgtcagaaagtgcggtgaattttagcgagattttagattggcgaccaatgctcagcgaaatgcgccttataaaatcgccgaatgaaatccgattaatgcaacaagcgggacaaattacggcacttgggcatattaaagcgatgcaaacaacacgcccaaatcgctttgaatatgaaattgaaagcgatattttgcatgaatttaatcgccattgcgcaagatttccttcttacaattccattgttgcaggaggaagtaacgcctgtattttgcactacacagaaaatgatcgcccactaaatgatggggatttagtgctgattgacgctggctgtgaatttgccatgtatgcaggcgatatcacccgcacttttcctgtaaatggaaaatttagccagcctcaacgtgaaatttacgagttagttttaaaagcacaaaaacgtgcgattgaattacttgtaccgggcaattccattaagcaagccaatgatgaagtcattcgaattaaaacccaaggattagtggatttaggtatcttgaaaggagatgtggatacacttattgaacaacaagcttatcgccaattttatatgcacggattaggtcactggctagggttagatgtgcatgatgtgggtagttatggccaagataaacaacggatactcgaaatcggtatggtaattaccgttgagcctggtatttatatttcagaagatgcagatgtgccagagcaatacaaaggcattggcgtgcgcattgaggataatttactgatgactgaatatggtaataaaatcctaaccgctgctgtccctaaagaaattgcagacattgaaaatttaatgaatttttaa

SEQ ID NO: 7032 - DNA, 1521 bp, Haemophilus influenzae
  CDS (1)...(1521)
atgacagctcaaactcaatgtcaagacagccaagtgctgctcacaatgaccaatgtctgcaagtcctttccgggcgtaaaagccttagataacgccaacttaacggttcgatcacattctgttcatgccttaatgggcgagaacggcgcgggcaaatctacattactaaaatgtttattcggtatttatgccaaagatgaaggcgaaattcttttcttaggcgaacccgtcaatttcaaaacatctaaagaagcccttgaaaatggtatttcaatggtgcaccaagaactcaacctcgtgcgtcaaactagcgtaatggataatttatggcttggacgctatccacttaaaggtccttttgttgatcacgccaaaatgtaccgtgatactaaagcgatttttgatgaattggatattgatgtagatccgaaagaaaaagtcgccaaactttcagtttctcaaatgcagatgatcgaaattgcgaaggcgttctcgtataacgctaaaatcgtaatcatggatgaaccaacatcctcgctttctgaaaaagaagttgagcatctgtttaaaattatcgacaaattaaaacaacgcggttgcggcattatttatatttctcacaaaatggatgaaatcttcaaaatctgtgatgaaattactattttacgcgacggtaaatggatcaacacggtaaacgtgaaagaatccacaatggaacaaattgttggaatgatggtagggcgtgaattaacacagcgtttccctgaaaaaaccaacgtgccaaaagaagttattttgcaggtggaaaatcttaccgctaaaaatcaaccatccattcaagacgtatcttttgaattacgcaaaggtgaaattctcggtattgcagggcttgtgggggctaaacgtaccgatatcgttgaagctatttttggcgtacgtgaattaatcgaaggaacgattaagttacacggaaaaactgtgaaaaatcataccgcacttgaagcgattaataatggctttgcattggttactgaagagcgtcgttcaacggggatttattctaatttaagtattgagtttaattcattgatttcaaatatgaaatcttatctcactccgtggaaattacttagcacgaagaagatgaaaagtgatacccagtgggtaattgattcaatgaatgttaaaacaccatcacacagaactacaattggttctctttctggtggtaaccaacaaaaagtcattattggtcgttggcttttaactcaacctgaaattttgatgctagatgagccgactcgtggtatcgatattggggcaaaatttgaaatttaccaacttattcaagaactcgctaaaaaagataaaggcattattatgatttcatcagaaatgccagaattactgggtgtgactgatcgcattttagtaatgagtaacggtaaattagcaggtatcgttgaaagcgcaaaaacatcgcaagaagaaattttgcaactcgcggcaaaatatttataa

SEQ ID NO: 7033 - DNA, 585 bp, Haemophilus influenzae
  CDS (1)...(585)
atggtacaacaaaaaatcgctaatcttttacaaggtgattttcgatatcaaatccaatataactgggttagcctagaaaatatctctccaaacattcaattagctgtgatttcatcagaagatcagcgttttcttgaacatttaggctttgattttgaggctatccaacgagcaattcggtataacgaaaaatctaacaaaggaatccgaggggcatcaactatttcccagcaaactgctaaaaacttaatgctttggcacggacaaaattggctacgaaaaggtttagaagttccagcgactatgttgcttgagctgacttggtcgaaaaaacgtattttagaagtgtatttaaatattgcggaatttggaaacggcatttttggtgtggaagcggcaagtcgctattactttaaaaaatcagctaaaaatttatctcaaaatgaagccgcacttttagctgctgtgttgcccaatccaatcatttataaagtaaataagccaagcttattagttcgtaaaaaacaaacttggattttgagacaaatgggaaatttaggcactgaatacttgagccatttataa

SEQ ID NO: 7034 - DNA, 684 bp, Haemophilus influenzae
  CDS (1)...(684)
atgtcaaaactcttactcgttgatgatgatattgaattaactgaactactttctacacttttagaacttgagggttttgacgttgaaactgcaaataatggattagaagcattacaaaaactcaatgaaagctataaactggttttacttgatgtaatgatgccaaagttaaatggtatcgaaacattaaaagaaattcgtaaagtctctaacgtgccagtgatgatgctaacagcaagaggcgaagacattgatcgcgtattaggcttagaattgggagcggatgattgtttacccaagccttttaacgatcgtgaacttattgcaagaattaaggcgattttgcgtcgtagtgcatctccttcaaataatatatcaaatgtagaaatcctttcttttgacggaattactctccacttttctcacggaattgcaacctataatgaagaaaatctaaatttaacggattatgaatttaagattctttgtttattgcttaaatctaagggaaatgtggtaagtcgagaagaattaagtttagaagtaatggaaaaaccgctcactccatttgaccgttctcttgatatgcacatctctaatttaagacgcaaattaccaaaacgaaaaaacaagccctcttggtttaaaactttacgcggaaaaggatacgctttagttacctaa

SEQ ID NO: 7035 - DNA, 1758 bp, Haemophilus influenzae
  CDS (1)...(1758)
atgaaatggattaaaaaaggcaccttcagcggcaaacaataccgcgatgacgtttcacgaaaaatttcgtggggtcattggtttgccttttttaatatcattgttgctatttttattggcgcacgttatgcctttatcattgactggccagatactctcgcaggaaaactttatttctttgtgagtttgctcgggcatttcagtttcaatgtttttgcgttgtacttactcgtggtctttcctctgagtttcattgttaaaaatcaccgcacttttcgcggattaaccgtgattttttctacgatttgtacaaccttattgttatttgataccgccgttttcaatcgttttaatctgcatttatcctctgttgtatggaatttgctggtcaatccagaaaatggtgaaatgtcacgcgattggcaaattttctttgcacctatgccaataattttactggcacaaatgttattttctcgctggagttgggaaaagttacgtagtcttgaacgccaaaaatggctaaaaggcactggtatattcttaaccacaacattcatcgcgacgcatttaatttatgcttgggcagatgcttatttgtatcgtccgatcaccatgcaacgctctaattttcctttatcttatccaatgacagctcgttcttttttagaaaaacacggtttcttggatggggaagaatatacgcaaaaattggcgcaagaaggtcgtttagatgctttaaaaattgattatccgaaaaaagaactcacttacgcaccaattacgcacaaacctaatattctgctcgtaacggtttcgggtttacgccatgatgcgatttctaatgaaaagatgccaaaacttgctaaatttgcaacaagctcaacggaatttactaatcattacagcacaggcaatagtaataacgcaggcttaattgggttattttacgggctaaatgcaaattacaccgatagcattttaagcaatcatacccaatctgttttaatcgaaaaattacgtgctgaaaattatcaattgggtttattttctgctacgaatttcaaagatagcatcttccgccaagcattatttcgtgaaataaaactttcatcgaataaaaccaacaaaccaaataatgaaagtgcggtaaaaaatctcaatgattttattaaagcacaaaaaactgactcaccttggtttgcttatttggatttagccttggaggctaaaaatccatcagattatgaccgcactttgcaagacattgattctcttttagcaaaagcgttagaaagtacaccgcttgaaaatacattagtcatcatcacgtcagagcatggtttaacctttaatgaaatgaatcaaaaagagcgagaaaactactttgggcgtgatgaaattcaagtgccattgcttgtatattggaaagatttaccagtaggtaaacaaaatggattaagtaatcatgcggatattttctctgcattaatgcagacagtattccgtgtagaaaacccgttgatggattatagtcagggacgcaatctctttgatcttaaaggagatgactgggtacttgcctcgaatttccgctggaatgtggtgattcaacctgatggaacacaatatcacattgatcgcaaaggtaattacaaaaaattcgataaagattatattgagcaatcttcagacagaccgccacttggaatttttttagaagccttccaattacaaaatttcttctttgaaaaataa

SEQ ID NO: 7036 - DNA, 2793 bp, Haemophilus influenzae
  CDS (1)...(2793)
atggcccaaattgcaacaaatccgcttgtgctagtggatggttcttcttatttatatcgtgcatttcatgcctttccttctttaactaatgccgcaggtgagccaacaagcgcgatgtacggcgtgttaaatatgttaaaaagcctcatctcacaagtacagcccactcatatagccgttgtttttgatgcaaaagggaaaacatttcgtgatgaaatgtttgaacaatataaatctcaccgaccaccaatgcctgatgatttacgcaaacaaattcagcctttgcacgatatgattcgtgcattgggcattccgcttttagtggtggaagggattgaggcagatgatgtgatcggcacgctcgcactacaagcatcaagtttgggtaaaaaagtactcattagtactggcgataaagatatggcacagttggtggatgacaatattatgctcatcaacaccatgaataatagcttattagatcgcaagggcgtgattgaaaaatacggtattccacctgaactcattattgattatctagcactcatgggcgatagtgcagataacattcctggcgttgctggcgtgggcgaaaaaaccgcacttggtttactacaaggcataggaagcatggctgaaatttatgccaatcttgaaaaagtagcggaactgccaattcgtggagcgaaaaaattaggtgaaaaattattggcagaaaaaaacaatgccgatctttcttatacattagcaaccatcaaaaccgatgttgaacttaacgtgacaacagatcaattgttgcttggagaaagccaaaaggatcaacttattgaatattttgctcgctacgaatttaaacgctggcttaatgaagtgatgaatggggcagattctattacccaaaccactgaacagccagtgaaaatgaaccagtataaagcgacctcacaagatcaaagtgcggtggaaaatacgcctaaaattcaaatcgatcgtacaaaatatgaaaccttgctcactcaagcggatttaacccgctggattgaaaagctcaatgcagcaaaactcattgcagtcgatactgaaacagacagccttgattatatgtctgcgaatttagtgggtatctcttttgctcttgaaaatggcgaagctgcttatttaccattgcaattggattatttggatgcaccaaaaacactcgaaaaatcgaccgcacttgccgctatcaaaccaatcttagaaaatcctaatattcacaaaattggacaaaacattaaatttgatgaaagtatttttgcccgtcatggcattgaattacaaggtgttgaatttgatacgatgttgctttcctatacgctaaatagtacgggtcgtcataatatggacgatttagccaaacgttatttaggtcatgaaactatcgcatttgaaagccttgcaggaaaagggaaaagtcagcttacgtttaatcaaattccattagaacaagccacagaatacgcggcagaagatgctgatgtgacaatgaaattacaacaagcactgtggttgaaactgcaagaagaaccaacgcttgttgaattgtataaaacaatggaattaccattgcttcatgtgctttctcgtatggaacgtacaggcgttttgattgatagtgatgctctctttatgcaatctaacgaaattgcctcaagattaaccgcacttgaaaaacaagcttacgcattagcgggtcagccattcaatttagcctccaccaaacaattacaagaaattttgttcgataaacttgagctacctgttttacaaaaaacgccaaaaggtgcgccatcaacgaatgaagaagtattggaagaattatcctatagccacgaattacccaaaattttggttaaacatcgtgggttgagcaaacttaaatccacttacacggataaactgcctcaaatggtcaattcacaaacaggccgagtgcatacctcttatcatcaagcggtgacggcgacagggcgtttatcatcaagtgatccaaacctacaaaatattccaattcggaatgaagaaggtcgtcatattcgacaagcatttatcgcgcgtgaaggttattctattgtcgccgctgactattctcaaattgagttacgcattatggcgcatctttcaggcgatcaaggcttaattaatgcgttctcgcaaggcaaggatattcatcgctccaccgcagctgaaattttcggtgtatcattagatgaagtcaccagcgagcaacgtcgcaatgctaaagcgattaatttcggcttaatttatggaatgtccgcctttggactttcacgccaacttggtatttcccgtgctgatgcacaaaaatatatggatttatatttccaacgctatcctagcgtacaacaatttatgactgatattcgtgaaaaagcgaaagcacaaggctatgtggaaacgctatttggtcgccgtttatatttaccagatattaattctagcaatgcaatgcgtcgtaaaggagcagaacgtgtggcaatcaatgcaccgatgcaaggcacggctgcggatattattaaacgagcgatgattaaacttgatgaagtaatccgtcacgatccagatattgaaatgattatgcaagtacatgatgaattagtgtttgaagtgcggtcagaaaaagtcgcgtttttccgtgagcaaattaaacaacacatggaagccgctgctgaattagttgtcccattgattgtggaagtaggtgttggacaaaattgggatgaagcgcattaa

SEQ ID NO: 7037 - DNA, 2571 bp, Haemophilus influenzae
  CDS (1)...(2571)
atgaacattgaaaaatttacgacaaaattccaagaagcgttaagcgaacgacaatcacttgctatcggaaaagacaatcaatttattgaacctgtgcatttattgaccgcacttttaaatcaacagggcggctctattgcgccaattttgacagcaagtggcgtaaatgtggctttattgcgtaatgaattaaagacagaactaaataaattgccgcaagtgattggcaatggcggtgatgtacaactttcacgccagcttattaatctacttaatttatgcgataaattcgcacagcaaaaccaagataaatttatttcgagcgaattgtttttgtttgcagctttagaagaacgaggaacgatcagcgatattttgaaaaagtgcggtgcgaaaaaagaacaaatttcgcaagctattcagcacattagagggggacaaaacgtgaacgatcaaaatgcagaagaaagcagacaagcgcttgaaaaatatacgattgatttaaccgctcgtgcagaaagtggcaaacttgatcctgtaattgggcgtgatgaagaaattcgtcgagccattcaagtattacaacgtcgtaccaaaaataaccctgtgttaattggtgaaccaggtgtagggaaaacggcgattgtcgaaggcttggcacagcgcatcgtaaacggcgaagtgccagaaggtttgaaaaataaacgtgtgctttcattagatatgggggcgttgattgctggtgcgaaatatcgtggtgaatttgaagaacgtttaaaagcagtactcaatgaactttcgaaagaagaaggtcgcgttatcctctttattgacgaaattcatactatggtcggcgcgggtaaaaccgatggtgcgatggatgcgggtaatttgttaaaaccaagtttggcacgaggcgaattacattgcgtgggtgcaactactttagatgaatatcgtcaatatatcgaaaaagatgccgcacttgaacgccgtttccaaaaagtctttgtggacgaaccaagtgtagaagataccattgcgatcttacgtggtttgaaagaacgttatgaaattcatcatcacgtggatattactgacccagcaattgtcgctgcagcaacgctttcacatcgttatatttccgatcgtcagttaccagataaagccattgatttgatcgatgaagcagcgtctagcattcgtatggaaatagattctaaacctgaaccgcttgatcgtcttgaacgtcgtattatccaattaaaattggaacaacaagcgttacaaaaagaagaagacgaagcaagtcgcaaacgtttagaaatgttagagaaagaattggctgaaaaagaacgtgaatacgccgaacttgaagaagtatggaaatctgaaaaagcaacgctttctggctctcaacatattaaacaagagttagatactgcaaaaaccgaactagaacaagctcgtcgcgcgggtgatttagcgaaaatgtctgagttgcaatatggccgcatccctgatcttgaaaagcaacttgagcaagctgaaaccagcgaaggaaaagaaatgacgcttttacgctatcgcgtcacagatgaagaaatcgcagaagtgctttctaaagccacaggcattcctgtatcaaaaatgatggaaggcgagaaagaaaaactcttgcgtatggaagatgaactacataaacgagtgattggtcaagaagaagcggttgatgcggtagcaaacgcgattcgtcgtagtcgtgcaggtctttccgatcctaatcgcccaattggttctttcttgttcctagggccaacaggtgttgggaaaacagagctttgcaaaactttggctaaattcttgtttgatagtgaagatgcgatggtgcgtattgatatgtcagagtttatggaaaaacacagtgtttctcgtttagttggtgcgcctccaggctatgtcggctatgaagaaggcggttatttaactgaagctgttcgtcgtcgtccatattcagtgatcttattagatgaagttgaaaaagcacacgcagatgtattcaatatcttattacaagtgttggatgatggtcgtttaactgatggtcaaggtcgtactgtggacttccgtaacactgtggttattatgacctctaacttgggttctgatttaatccaaggtaataaagacgaaagctatagcgaaatgaaagccttagtgatgtcagtggtaagccaacatttccgcccagaattcatcaaccgtattgacgaaaccgtggtattccatccacttggtaaagaaaatatccgtgcgattgcaagtatccaattagaacgcttagcaaaacgtatggaaactcgtggatacgaattggtgtttaccgatgctttattagacttcattggcgaagtgggatacgacccaatttatggtgcacgtccattgaaacgtgctattcaacaagaaattgaaaacagcttggcacaacaaattctatctggtgcgttattacctggtaaggttgttaccattgattatgccaacgcagaagttcaagcgagacaatag

SEQ ID NO: 7038 - DNA, 741 bp, Haemophilus influenzae
  CDS (1)...(741)
atgtcagaacaaatctacggcattcatgctgttaatagtattttaacccattcaccagaacgtttaattgaagtcttcgtacttaaaggccgtgaagataaacgtctacagccactcttaaatgagctttattccctgggaattggtgtgcaatttgttaatcgacaaacacttgataaaaaagccgatggtgaggttcatcaaggtgtcattgctcgagtacaagcggcaaaagaacttaatgaaaatgatcttgatgaaattcttgcgaataaacaaaatccgcttttattagttttggatggcgtcacagatccacacaatttgggagcatgtttgcgaacagcggatgcagcgggcgcagtggcagtgatcgtaccgaaagataaatccgcacaattaacatctattgcacgtaaagttgcttgtggcgcggcagaaaccgtgccgttaattcgtgtaaccaatctttctcgcacactacgcgatttacagcaaaaccataatatttgggtggttggcactgctggcgaagcaactgaaaccatttatcaaagcaaactgacaggaccactagcacttgttatgggagccgaaggcgaaggaatgcgtcgtttaacacgtgaacattgcgatcaactgattagcattccaatggctggttcagtttcatcattaaatgtatctgtcgcaacaggggtatgtttatttgaaattgtacgtcagcgtttaggttcataa

SEQ ID NO: 7039 - DNA, 1851 bp, Haemophilus influenzae
  CDS (1)...(1851)
atgaaaaacgaaattgatattaaaaaactccgtaacatcgccattattgcgcacgtagaccatggtaaaaccactcttgtagataaacttcttcaacaatctggtacttttgaatctgctcgtggtgatgtggatgaacgcgttatggactcaaacgatcttgaaaaagaacgtggcattaccattcttgcaaaaaataccgcgattaactggaatgactaccgcattaacatcgtggatactccagggcacgcagacttcggtggcgaagttgaacgtgtactttctatggtggattctgttctattagttgttgatgcgtttgatggcccaatgccacaaacgcgtttcgttacacaaaaagcattcgctcacggcttaaaaccaatcgtcgtaattaataaagttgatcgccctggtgcacgtcctgactgggttgtggatcaagtgtttgacttatttgtcaatcttggtgcaagcgatgaacaattagacttccctattatctatgcttcagcattaaatggtgttgctggtcttgaacacgaagatttagcggaagatatgaccccattatttgaagccattgtgaaacatgtagaaccgccaaaagtagaacttgatgcgccattccaaatgcaaatttcacaattagactacaacaactatgtaggcgttattggtattggtcgtattaagcgcggttcgattaaaccaaaccaacctgttactatcatcaatagtgaaggaaaaactcgtcaaggtcgtatcggtcaagtacttggacatcttggtttacaacgttatgaagaagacgttgcttatgctggcgatattgttgctatcactggtttaggagaattaaatatttctgatacgatttgtgatatcaacacagttgaagcactgccatcattaacggttgatgaaccaaccgtaaccatgttcttctgtgtaaatacctctccatttgcgggacaagaaggtaaatacgtcacatcgcgtcaaattcttgaacgcttaaataaagaattggttcacaacgtggcattacgcgtagaagaaaccccaaacccagatgaattccgtgtatctggtcgtggcgaattacatctttccgtgttaatcgaaaatatgcgtcgtgaaggttatgagcttgcggtttctcgtccaaaagtaatttatcgtgatattgacggtaaaaaacaagaaccatacgaacaagtaactatcgatgtggaagaacaacatcaaggttctgtgatggaagcattgggtatccgtaaaggtgaagttcgtgatatgttgcctgacggtaaaggtcgtgtgcgtttggaatacattatccctagtcgtggattgattggcttccgtggtgattttatgaccatgacttctggtacaggcttactttactcaagctttagccactatgatgaaatcaaaggcggcgaaattggtcagcgcaaaaatggtgtgttgatttctaatgcaacaggtaaagcacttggctatgcattatttggcttacaagaacgtggtaagttaatgattgatgcaaacatagaagtttatgaaggtcaaattatcggtattcatagccgctcaaatgacttaaccgtaaactgcttgcaaggtaaaaaactaactaatatgcgtgcgtcaggtaaagacgatgcgattgtgctaactacacctgtaaaattcagtcttgaacaagcgattgaatttatcgatgatgatgaactagtggaagtaacacctgagtcgattcgtatccgtaaaaaacttttaacggaaaacgatcgcaaacgtgcaaatcgtacaacaacaagtactagcacgcattaa

SEQ ID NO: 7040 - DNA, 1419 bp, Haemophilus influenzae
  CDS (1)...(1419)
atgccaaacgcaaatgcaattgccaatgtatttaagctaattgaagaaaataatgtgaaatttgtacttcttcgatttaccgatattaaaggtaaagaacatggtgtttctatcccagttagccttgttgatgaagatatgtttgaagacggcaagatgtttgatggttcctctgttgaaggatggaaaaccattaataaagccgatatgttgcttatgccaatggctgaaacggcaattgttgatccattcgcgcaaattccaacgctttctattcgttgtagtgtttatgaaccaacgacaatgcaaagctatgatcgcgatccgcgctctattgcaattcgtgcagaaaattatatgcgttcaacaggtattgctgatcaagctttttttggtccagagcctgaattcttcttatttgatgatgtgcgttttaatgtatcaatgaacaaagcatctttttctattgatgatatagaagctgcttggaacacgaataaaaaatatgaagaaggcaataacgcttatcgcccattgaaaaaaggtggatattgtgccgttgcaccgattgatagtgcgcacgatattcgttctgaaatgtgcttgattttagaagaaatgggattagtcattgaagcccatcatcatgaagtggcgactgcagggcaaaacgaaattgcgactaaatttaatacgctaactttaaaagcggatgaaactcaaatttataaacatgtcgtacaaaacgttgcattagagcacggtaaaacggcgtgttttatgcccaaaccaattactggagataatggttcgggtatgcactgtaatatgtcgttaagtaaagacggaaaaaatattttccaaggcgataaatatgcaggcctttctgaaaccgcactttactacatcggcggtatcattaagcacgctaaagccttaaatgcgttcactaatccaagtactaattcatataaacgtttagtgcctggttatgaagcaccagtattgttggcttactctgcaagcaatcgttcagcctcaattcgtatccctgctgtaaccaatccaaaagcgattcgcgtagaagcacgtttcccagatccattggcaaacccatatttagcatttgctgcattattaatggcaggtcttgatggcgtggtaaacaaaatccacccaggcgatgcgatggataaaaatctttacgatcttcctccagaagaattaaaagatattcctgcagtagcaagctcgttagaagaagcgttaaattcattagaaaaagactatgaattcttaactcaaggtggcgtatttgctaaagattttattgatgcgtttatcagtatcaaacgtaaagaagtggaacgtttaaatatggcaccacatccagttgaatttgaaatgtattatgcataa

SEQ ID NO: 7041 - DNA, 1416 bp, Haemophilus influenzae
  CDS (1)...(1416)
atgaatagattatttttttctaaaattgcgttatggttattggattttttaacatttaatatttcttttttattatccttatttgttatttcttattatcataatggttatgaaaaatatttacctatttatgaaattgatgacagaacatatattcatgctgttttagctggaatatgtgttggatggtttgctattaggctaagacattatacttatagaaaacctttttggtttgagttaaaagagatttttagaacacttattatctttgcgatttttgaacttgcaattgttgcatttcctaaattgtatttctctcgctacttatgggcgcttacatgggggattacctttctactttttccattggcgagagttttagtaaagaaatttcttataaaatcaggttggtttcttagagatacaattatgattggttctggggataatgcttttgatgtttataatgcattaagagatgaaccttatttggggtttcaggtcacgcattttatttcagtttctaatattagtaataatgtaaaggaattaaatattcctatattaaatagtatgtcttcttggacatcagtaactaaaaaaacagatcaatttattattgcattggaagatgatgaagaggtagatagaaataattggttacgttatttttccacaaatggctatcgttcagtttctgtgattcctacattgagaggcttacctttatataatacggacatgtcttttatgtttagccatgaaatcatgttattacaaatgaataataatctggctaaactatcttctcgtattttgaaacgaaccatggatattgttgttggctccttagctattattatattttccccagtgttgctttatctgtattttgcagtaaaaaaagatggtggtaatgctatttatgggcatcctagaattggtcgtaatggaaaaacatttaactgtttgaaatttagaacaatggctgtgaattctaaagaagtgctagatgaattgctaagaacagatcctgaagcaagagctgaatgggaaaaagattttaaattaaagaatgatcctagaattactaaaatcggtgcttttattcgcaaaacaagtttagatgaattacctcaattatttaatgttttaaaaggtgaaatgagtttagttgggcctcgcccaattgtaattgatgagctagagcgttatgaagaaaacgtagattattacttaatggcaagacccggtatgacagggctttggcaagtcagcggacgtaataatatcgattataatactcgcgtttattttgattcttggtatgtaaaaaattggtcactttggaatgatattgcgattttatttaaaacaatgaatgtggttttaaatcgtgatggagcttattaa

SEQ ID NO: 7042 - DNA, 1173 bp, Haemophilus influenzae
  CDS (1)...(1173)
atgaaatttattgatgaatcccttattcgaattgaggctggggatggtggtaacggttgcgtaagtttccgtcgagagaaatttattccgaaaggcggccctgatggtggcgacggtggcgatggtggcgatgtctatttacaagccgatgaaaacctcaataccttaatcgattatcgctttaataaacgctttgccgcagagcgtggagagaatggacggagttcagattgtacaggacgtcgcggtaaagatattattttacctgttcccgtgggaactcgtgctattgataacgacaccaaagaaaccttgggggatttaacccaacatggtcaaaaaatgttggtagccaaaggtggttatcacggtttagggaatactcgtttcaaatcatcagtaaaccgtgcaccgcgtcaaaaaacaatgggtacgccgggcgaaaaacgcgatttattattggaattaatgctacttgctgatgtgggaatgctcggtttacctaatgctggtaaatccacttttattcgtgccgtttcagcagccaaaccaaaagttgcagattatccatttactaccttagtaccaagtctcggtgttgtaaaagtggatgactcacacagtttcgtagtcgctgatattcccggattaattgagggcgcagcagatggtgctgggttaggaattcgttttttaaaacatctagaacgttgtagagtgcttattcatttagtcgatattgcgccaattgatggctctaatccagcagataatatggctattattgaatctgaacttttccaatacagtgaaaaattatcagaaaagccacgttggttagtattcaataaaattgatacgatgagcgatgaagaagctgaagagcgagccagagaaattgctgaacaattaggttgggaagaagattattacttcatttcagcggcaacagggaaaaatgtttctccactttgtcgtgatattatggactttatcatcgcaaatcctcgcgaagctgaaacacaacaagttgcacctgaagaagtaaaattcaaatgggaagattatcatcaagaacgactagcagagcatcaatttgatgatgacgaagattgggatgatgattggagcgaagaagacgatgaaggaattgagttcatctataaaccttaa

SEQ ID NO: 7043 - DNA, 258 bp, Haemophilus influenzae
  CDS (1)...(258)
atggcaactaaaaaagctggtggttcaactcgtaacggtcgcgattctgaagctaaacgccttggtgttaaacgtttcggtggcgaatctgtattagcaggtagcattatcgttcgccaacgtggtactaaattccacgcaggtaacaacgtaggaatgggaagagatcacaccttattcgcaaccgcagatggtaaagttaaatttgaagtaaaaggcgagaaaagccgtaaatacgtagttattgttactgaataa

SEQ ID NO: 7044 - DNA, 312 bp, Haemophilus influenzae
  CDS (1)...(312)
atgtacgcagttttccaaagtggcggtaaacaacaccgtgtgagcgaaggtcaagttgttcgtttagaaaaacttgaacttgcaactggcgcaacagttgagttcgattctmtgttgatggtcgttaatggtgaagatgttaaaattggtgcgccagtagttgctggtgcaaaagtagtggctgaagttgttgcacaaggtcgtggcgagaaagttaaaatcgttaaattccgtcgtcgcaaacacagccgtaaacaacaaggtcatcgtcagtggttcacagaagtgaaaatcactgggattcaagcataa

SEQ ID NO: 7045 - DNA, 990 bp, Haemophilus influenzae
  CDS (1)...(990)
atgaagaaacaagatcttatgagcatagacgagatccagaaacttgcagatccagatatgcaaaaagttaatcaaaatattcttgctcagcttaattcagatgtaccgctaataggacagttaggtttttatattgttcaaggtggtggtaagcggatccgtccgttgatcgcagttctcgcagcacgatctttagggtttgaaggatctaattcaattacttgtgctacttttgttgaatttattcataccgcttctttgttacacgatgatgtcgtagatgaatctgatatgcgtcgtgggcgtgctacggcgaatgctgaatttggtaatgcagcgagtgtgttggtaggcgattttatttatacgcgtgcatttcaattagttgcacagttagaatcattgaaaattttaagtattatggctgatgcgactaatgttttagcggaaggcgaagttcagcagttaatgaatgttaatgatcctgaaacgagcgaagctaattatatgcgtgtaatttatagcaaaactgcccgtttgtttgaagtggctggtcaggctgcggcaattgtcgccggtggaacagaagctcaagaaaaggctttacaagattatgggcgttatcttggcactgcatttcagctcgtggatgatgtattggattatagtgcaaatacgcaagctctaggtaaaaatgtaggcgatgatttagctgaaggaaaaccaacccttcctctactacacgctatgcgtcatggaaatgctcaacaggcagctttaattcgcgaagcgattgagcaaggtggtaaacgtgaagcaattgatgaagtattagctattatgactgagcataagtctttagattatgcaatgaatcgtgcaaaagaagaggctcaaaaagcagtggatgcaatcgaaattttgccagaaagtgaatataaacaagcgttgatttcattggcatatttgtctgtagatagaaattattag

SEQ ID NO: 7046 - DNA, 711 bp, Haemophilus influenzae
  CDS (1)...(711)
atgactactccaaaaattctcgttgttgaagatgaaattgtcactcgaaatacgcttaaagggatttttgaagcggaaggatatgatgtgtttgaagcagaaaatggtgttgaaatgcatcatatattggcaaatcataatattaatttggttgtgatggatattaatttaccaggcaaaaacggcttattattggcaagagaactccgtgaagaattaagcttacctcttatttttttaactggtcgagataatgaagtggataaaattttaggtttggaaattggtgccgatgactatttgactaagccttttaaccctagagaactgactatccgcgcacgtaatctattgcatcgtgcaatgccgcatcaagaaaaagaaaatacatttggtcgagaattctatcgttttaatggttggaaattagacctaaatagccacagtttaattacaccagaaggacaagaattcaaacttcctcgcagtgaatttcgtgcaatgttacatttctgtgaaaatccaggaaaattgcaaacgcgcgaagaattgctgaaaaaaatgaccggacgagagttaaaacctcaggatcgtaccgtagatgtcacaattcgacgtatcagaaaacattttgaagatcatcccaatactccaaatatcattatgactatacatggagaaggctatcgtttttgtggagatattgaataa

SEQ ID NO: 7047 - DNA, 1266 bp, Haemophilus influenzae
  CDS (1)...(1266)
atgtttacaagaaatatgactatcgctgattacgatccagtattgtggcaagcgattcaagatgaaaatcgtcgtcaagaagaacatatcgaactcattgcatctgaaaactatgcgagtccacgtgtgatggaagcgcaaggttcacaattcactaataaatatgcggaaggctatccaggtaaacgttattacggtggttgtgagtatgctgacattgtggaacagttagcaattgaccgtgcgaaagaattatttggtgcagattacgtgaatgttcaaccgcactctggatcacaagcgaatgctgcggtgtatggtgcattgattaatgcaggcgatactattttaggtatggatttggctcacggtggtcatttaactcacggtgcaaaagtcagtttctctggcaaaatttataactccgtactttatggaattactgcggatggcttaattgattatgaagatgttcgtcaaaaagcattagaatgtaaaccaaaacttatcgttgctggtttctcggcttattcacaagttgtggattgggcgaaaatgcgtgaaatcgcagatgaagttggtgcgtatttatttgtggatatggcgcatgtagcgggattaattgcagcgggtttatatccaaatccactaccgcatgcacatgttgtgacaacaacaactcacaaaacattgggcggtccgcgtggtggtttaattctttcatcttgtggcgatgaagaaatctacaaaaaattacaatcatccgtattccctgcaaaccaagggggtccattagttcatattattgcggcaaaagcagtttgctttaaaggagcattagagcctcaatataaagaataccaagcaaatgtaatcaaaaatgcaaaagcaatggttgaagtatttaaacaacgtggttatgacgttgtgtcaaatggtactgaaaaccacttgttcttagtaagtttcatcaaacaaggattaacaggtaaagcagcagatgcggcattgggcaaagcaaatattaccgtgaataaaaatgctgtaccaaacgatccgcaaaaaccattcgtcacttctggcatccgtgtaggtacaccatctgtgactcgtcgtggtttcaatgaaaatgatgtgcgtgaattagctggctggatgtgtgatgttttagatgctttaggcaaagaaaatgaagaacaagtgattgctgaaactaaagaaaaagtattagcaatttgtaaacgtcttccagtttatccgaaatga

SEQ ID NO: 7048 - DNA, 3099 bp, Haemophilus influenzae
  CDS (1)...(3099)
atgtatgaggaaatccgaatgaaatttaccgatatatttattcgtcgtcctgttttagcagtttcaattagtttgttaatgattattttagggttgcaagcaatctcgaaattggcagtgcgtgaataccctaaaatgactactacagtcattacagtgagtaccgcatatccaggggcagatgcgaatttaatccaagcatttgttacgtcaaaattggaagaatctatcgcgcaagccgataatattgattatatgtcttcgactagtgcgcctagtagttcgactattacaataaaaatgaaattaaataccgatcctgcaggcgcgttagcagatgtgttagccaaagtgaatgcagtaaagtcagcattaccaaatggtattgaagatcctagtgtatcctcttcttcaggtgggagcggtattatgtatatcagtttccgatctaaaaaactagattctagtcaggtaactgattacatcaatcgtgtagtcaaaccacagttttttaccattgagggtgttgccgaagtacaggtatttggtgcagctgaatatgcattacgtatttggctagatccacaaaaaatggcagctcaaaatctttctgtgccaacagtgatgtctgccctttctgcaaataatgtacaaacggctgcggggaacgataatggctattatgtgagttatcgtaataaagtagagactacaacgaaatcagtggaacaactcagcaacttaattatttcatcaaatggcgatgatttagtgcgtttgcgtgatattgcaaccgttgaattaaataaagaaaatgataattcgcgtgctacggcaaatggtgcagagtccgttgtgttagccatcaatccaacctcgacagcaaaccctttgactgtcgcagaaaaaattcgccctttatatgaaagtataaaaacacaactgccagacagtatggaaagcgatattctttatgaccgcactattgccattaatagctctattcacgaggtcataaaaactattggtgaagctactttgatcgttttagtggtaattttaatgtttatcggttcgttccgtgctattttaattccaatattggctattccaatttctcttattggcgtattaatgctgctacaaagtttcaacttttctattaatttaatgactttgcttgctttaattcttgccataggtttagttgtagatgatgctattgtggtgctggagaatattgatcgtcatattaaagcgggagaaacgccattccgagcagcaattattggtacgcgtgaaattgcagtccctgttatttctatgactatcgcattgatcgcagtttactcaccaatggctttaatggggggcattactggcacattgtttaaagagtttgctttaacccttgctggtgcagtatttatttctggtgttgtggcattaacgttatcgccaatgatgagtagtaagttactcaaatccaatgctaaaccaacatggatggaagaacgcgtagaacataccttaggtaaagtaaatcgtgtttacgaatacatgcttgatctcgttatgctcaatcgtaaatcaatgctggcttttgcggtcgtgattttctcaacgctcccatttttgtttaattcactttctagtgaattaacgccaaatgaagataaaggcgcatttattgcaattggtaacgcgccatctagcgtaaatgtggattacattcaaaatgcaatgcaaccatatatgaaaaatgtaatggaaacacccgaagtttcttttggtatgagcattgctggtgcgccaacttctaatagctcgttaaatatcatcacattgaaagattggaaagaacgttcacgtaaacaatccgcaataatgaatgaaattaatgaaaaagcaaaatcaattccagaagtgtcagtatcagcatttaacattcctgaaattgatacaggggaacaaggccctccagtctctattgtattgaaaactgcacaagattataaatctttggcaaacaccgcagagaaattcctcagtgcgatgaaagcctctggcaaatttatttatacaaatttagatttgacctatgacactgcacaaatgactatttctgtggataaagaaaaagcgggaacttacggtattacaatgcaacaaatcagtaatactttagggagtttcttatctggtgcgacagttacgcgtgtggatgtggatggacgcgcttataaagtcatttcgcaggtaaaacgagatgatcgcttatcgccagaaagtttccaaaattattatttaactgcatctaatggtcaatcagtgccattaagtagtgttattagtatgaaattagaaactcagccaacatcattaccgcgtttcagtcagttaaattcggctgaaatcagtgctgtaccaatgccgggtatatcaagtggtgatgccattgcttggcttcaacaacaggcaacagacaatttaccgcaaggctatacgtttgattttaaatctgaagcacgtcaattagtccaagaaggcaacgcattagccgtcacttttgcattggctgttatcatcatattcttggtacttgccattcagtttgaatctatacgtgacccaatggtaattatgatttctgtaccattagccgtaagtggtgcattggtgagcttaaatattttatccttctttagcatcgcaggaacaacattaaatatctactctcaagttgggttgattactctcgtgggattaatcaccaaacacggtatcttaatgtgcgaagtggcaaaagaagaacagcttaaccatggtaaaactcgaattgaggcaatcactcatgctgcaaaagtacgtttacgcccaatcctaatgacaacggcggcaatggtagctggcttaattccattactctatgcaacgggtgcaggagcggtatctcgctttagtattgggatagtgattgtagcgggattatccattggtactattttcaccttgttcgtcttgcctgtagtatatagctatgtcgcaactgaacacaaaccattaccggtttttgatgaaaataaaacaacccactaa

SEQ ID NO: 7049 - DNA, 1173 bp, Haemophilus influenzae
  CDS (1)...(1173)
atgacgcaaattgcaactgaaaacccatcaactaaatctgtatcaaataaaactgaccgtaaaaaaggcttaagcatttttattcttctcctgcttattattggtattgcttgtgctttgtattggtttttcttcttgaaggattttgaagaaacagaagatgcttatgtgggtggaaatcaagtaatggtatcatcacaagttgcaggtaatgtagcgaagattaatgcagacaatatggataaagtccatgcaggtgatattctagttgaattggatgataccaatgcgaaacttagtttcgaacaggccaaaagcaatctcgccaatgctgtacgtcaggtagaacaactgggtttcactgtgcagcaattgcaatcagctgtgcacgccaatgaaatttctttagctcaagctcaaggcaatttggcgcgccgagttcaacttgaaaaaatgggtgcgattgataaagaatctttccaacacgcaaaagaagctgtcgagcttgccaaagcaaatttaaatgcctctaaaaatcaattggctgctaatcaggctttattgcgtaacgttccattacgtgaacaaccgcaaatacagaatgcgataaactcgcttaaacaggcttggttaaatttgcaacgtacaaaaattagaagtccaattgatggctatgtggcgcgtcgtaatgttcaagttgggcaagccgtttcagtgggtggcgcgttaatggcagtggtatctaatgaacaaatgtggctagaagctaacttcaaagaaacccaattaacgaatatgcgcattggtcagccagtaaaaatccattttgatttatacggtaaaaataaagaatttgatggcgtgataaatggtattgaaatggggactggcaatgcattttctcttttgccttcacaaaatgctacgggtaactggattaaagtggtgcaacgcgtacctgtgcgaattaaattagatccacaacaatttacagaaacgccattgagaattggtctttctgcaacggcaaaagtaagaatttcagattcatcaggcgcaatgctacgagaaaaaacagaaccgaaaacgttattttctactgatacacttaaatatgatgaaagtgcggtagaaaatttgattgaatctatcattcagcaaaacagccattaa

SEQ ID NO: 7050 - DNA, 483 bp, Haemophilus influenzae
  CDS (1)...(483)
atgacatttagtttaattgtggcgacaacattaaataatgtgattggtaaagataaccaaatgccttggcacttgcctgcagatttagcttggtttcgtcagaacaccactggtaaacctgtcattatggggcgtaaaacctttgaaagtattggtcgtccactacctaaacgtaccaatatcgtactttctcgccagctttttgaacacgaaggtgtgatatggaaagatagctttgaaagtgcggtcaattttgtcagagattttgatgaaattatgttgattggtgggggagagttattcaaacaatatttacccaaagcagataagttataccttactcaaattcaaacagaactagatggcgatacttttttccctcaattgaattgggaggagtgggaaattgaatttgatgaatatcgtaaggcggatgaacaaaatcgctatgattgtcgatttttgattcttacacgaaaataa

SEQ ID NO: 7051 - DNA, 2706 bp, Haemophilus influenzae
  CDS (1)...(2706)
atgagcattttaacaagaatttttggtagtcgtaatgaacgcgttttacgtaaattaaaaaaacaagtcgtaaaaattaataaaatggagcctgcttttgaggcattaagtgatgatgaattaaaagcaaaaacacaagagtttcgtgatcgtttaagtggtggcgaaactttgcaacaaattttaccagaagcattcgcaacggtacgcgaagcaagtaagcgtgtgcttggtatgcgccattttgatgttcagcttatcggtgggatggtattgactaaccgctgtatcgcagaaatgcgtactggtgaaggtaaaacattaacggcgactttgccttgttatttaatcgcacttgaaggtaaaggcgttcacgtggtaaccgtgaatgattatcttgctcgccgagatgcagaaacaaaccgtccgttatttgaatttttaggcatgagtgtaggcgtcaatattcctggtttatcgccagaagaaaaacgtgcagcttatgcggcagatattacttatgcaaccaatagtgaacttggttttgattatttacgtgacaacttagcccactcaaaagaagagcgtttccaacgtactttaggctatgcgttggtggatgaagtggattctatcttaatcgatgaagcgcgtacgccattgattatttctggtcaggcagaaaacagttcagagctttatattgcggtaaataaattgatcccaagtttaattaaacaagaaaaagaagatacggaagaatatcaaggagagggcgatttcactttagatttgaaatctaaacaagcgcatttaaccgaacgtggtcaagaaaaagtagaagattggttaattgcacaaggtttaatgcctgagggggactctttgtattctcctagtcgaattgtattgcttcatcacgttatggctgcattgcgtgcgcacacattgtttgaaaaagatgtcgattacattgtgaaggacggtgaaatcgtgattgttgatgaacacactggtcgtacaatggcggggcgtcgttggtcagatggtttgcaccaagccattgaggcaaaagaaggggtggatgttaagagcgaaaaccaaactgttgcatcaatttcttaccaaaactacttccgtttatatgaacgtcttgcgggtatgacggggactgcggataccgaagcatttgagttccaacaaatttatggcttggaaactgttgtaattccaacaaatcgtccaatgattcgtgatgatcgcactgatgtgatgtttgaaaatgaacaatataaatttaatgcgattattgaagacattaaagattgtgtagaacgccagcaaccagtattagtggggacgatttcagtcgaaaaatcagaagaattatctaaagcgttagataaagcaggtataaaacacaatgtgttgaatgcgaaattccaccaacaagaagcggaaatcgtggcagaagcaggatttcctagcgcagtgactatcgcaacgaatatggcgggtcgaggtacggatattattcttggcggtaactggaaagcgcaggctgccaaattagaaaatccaactcaagaacaaattgaagcccttaaagcagagtgggagaaaaaccacgaaattgtaatgaaagcgggtgggttgcatattatcggtacagagcgtcacgaatctcgccgtattgataaccagttgcgcggtcgttctgggcgtcaaggtgaccccggttcttctcgtttctatctttctttggaagatggtttaatgcgcatttatttgaatgagggtaagctcaatttaatgcgtaaagcgttcacggtagcaggcgaggcaatggagtcgaaaatgttggcgaaagtgattgcatctgctcaagcaaaagttgaggcgttccattttgatggccgtaaaaacctacttgaatatgatgatgtggcaaatgaccaacgtcacgcgatttatgagcaacgcaatcatttgcttgataatgatgatatttctgaaactatcaacgctattcgccacgatgtgtttaatggtgtgattgatcaatatattccaccacaatctttggaagaacaatgggatattaaagggcttgaagaacgtttatctcaagagtttggtatggaattaccgatttctaattggttggaagaagataataatcttcacgaagaaagtttgcgcgaacgcattgtggaaattgcagaaaaggaatacaaagaaaaagaggctttggttggcgaagacgctatgcgccattttgaaaaaggtgttatgttgcaaaccttagatgaactttggaaagaacacttagcttcgatggattatttacgccaaggtattcatttacgtggctatgcccaaaaagatccaaaacaagagtataaaaaagaatctttccgtatgtttacggaaatgttggattctttaaaacaccaggttatcacggctttaacccgtgtacgtgtgcgtactcaagaagaaatggaagaagctgaacgtgctcgtcaagaaatggcagcacgtatcaatcaaaataatttacctgtggatgaaaatagtcagacaactcaaaattcagagactgaagattattcagatcgtcgcattggtcgcaacgagccttgtccttgtgggtcgggtaaaaaatataagcattgtcacggcagtcgtgtggcacgccagtaa

SEQ ID NO: 7052 - DNA, 756 bp, Haemophilus influenzae
  CDS (1)...(756)
gtggaggctcaaccccaacaaaaggaaaatattatggcacaagtttcaatgcgcgatatgatcaacgcaggcgtacacttcggacaccaaactcgttactggaacccacaaatgaaacctttcatttttggtgctcgtaacggtgttcacatcatcaatcttgaaaaaactttacctttattcaacgaagctttagcggaattaactcgcattgctagcaacaacggtaaagtattattcgttggtacaaaacgtgcagcgtctgaagcagttcaagcagcagcattagattgtcagcaatattacgtaaaccaccgttggttaggtggtatgttgactaactggaaaaccgttcgtcaatcaattaaacgtttaaaagatttagaaacccaatctcaagacggtacttttgataaattaaccaaaaaagaagcgttaatgcgtagccgtgagatggaaaaacttgaattaagccttggcggtatcaaagatatgggcggcttaccagatgcgttattcgttatcggtgcggaccacgaacatatcgcagttaaagaagcaaacaacctaggtattcctgtatttgctatcgttgatactaactcaacaccagctggcgtagatttcgttatccctggtaacgatgatgcgactcgtgctatccaactttacgtttctgcagctgcagcagcggttaaagaaggtcgtggtaacgaagctcaagttgctgaagaattagcagctgacgcagaataa

SEQ ID NO: 7053 - DNA, 852 bp, Haemophilus influenzae
  CDS (1)...(852)
atggctgaaatcacagcatcattagtaaaagaacttcgtgaccgtactggcgcaggtatgatggaatgtaaaaaagcattagttgaagcaaacggtgatattgagttagcaatcgacaatatgcgtaaatctggtcaagctaaagcagctaaaaaagcaggccgtgttgcagctgaaggtgttatccttgctcgtgtagaaaatggtttcggtgtattagttgaaatgaactgtgaaactgacttcgtagcaaaagatgcaggtttcttaggtttagcaaatgaagtaactgatttcgcagcagcaaacaaaggtaccactatcgaagcattacaagcgcaatttgaagaaaaacgtgctgcattagttgctaaaatcggtgagaacatgaatattcgtcgtgttgcttacctagatggtcaagtaattgcacaatacttacacggtgcaaaaattggcgtattagttgcgggcgaaggttctgctgatgaactgaaaaaagtagcaatgcacgtagctgcatctaaacctgaattcgtgaacccagaagatgtatctgctgaagtggttgaacacgaacgccaaatccaaatcgatattgcgatcaactctggtaaaccaaaagaaatcgcagagaaaatggttgaaggtcgtatgaagaaattcactggtgaagtttcattaacaggtcaagcatttgtaatggatccttctgtatctgtaggggatttcttaaaatcagtaaatacttctgtttctaacttcattcgtttagaagtaggcgaaggtattgagaaaaaagaagaagattttgctgctgaagttgcaaaaatcactggcggtaatgcgtaa

SEQ ID NO: 7054 - DNA, 720 bp, Haemophilus influenzae
  CDS (1)...(720)
atgatagagttggatcaaacaaatataccaaaacacgttgccattattatggatggtaatggccgttgggcaaaacagaaaaataaaatgcgaattttcggacacaccaatggcgttactgcggtacgcaaagcagtggcttatgcacgacaaatcggtgtggaagtactcacactttatgcctttagtagcgaaaattggagtcgcccagaacaagaaatcagcgcgttaatgtcgctttttatgcaagccttggatcgcgaagtgaaaaaattacataaaaataatatttgtctgaaaattataggcgatgtatctcgttttagtgaaactttacaagaaaaaatcaaaaaagcggaaaatttaacagaaaaaaataccgcacttacactcaatattgcggcaaattacggcggttgttgggatattattcaagccgctaaacaaattgcagaaaaagttaaaaaagaagaaatgtcagtttcagatattaataactcgacttttcaacatcatcttgcaacccaaaatgcaccacctgtggatttattaattcgcaccagtggagaacagcgcataagcaactttttattatggcaaattgcctatgcggaattatatttttccgatgtgctttggcctgattttaatcaattagaatttaatcgcgcgattgcaagttatcaacaacgtcatcgccgttttggcgggactgaatag

SEQ ID NO: 7055 - DNA, 2586 bp, Haemophilus influenzae
  CDS (1)...(2586)
atgcaagaacaatatcgccccgatatgatcgaaccaaaggttcaacaatattgggcagaaaataaagttttcaaagcaatcaaagacgaatctaaagaaaaatattactgtctttctatgttcccatatccttctggccgcctgcatatgggacatgtacgtaactatactattggtgatgtcatttctcgttatcaacgcatgttaggtaaaaacgtgttgcaaccctttggttgggatgctttcggcttaccagcagaaggtgccgcaatcaaaaacaaaactgcgcctgctaaatggacgtacgaaaacattgcctacatgaaaaaacaacttcagcttttaggctttggtttcgactgggatcgcgaaatcgcaacctgtaaaccagaatactacaaatgggaacaatggttcttcacggagctttataaaaaaggcttagtgtacaaaaaaacctcaaccgtaaactggtgcccgaatgatgaaacagtactcgcaaacgagcaagtacacgaaggttgttgctggcgttgtgatacaccagtggaacaaaaagaaatcccacaatggtttatcaaaattactgactatgcagagcaattattaggtggtttagatacccttccacaatggcctgacatggtaaaaaccatgcaacgtaactggattggtcgctctgaaggggtagaaattacctttgatgttgcaaataccaacgaaaaagtggcggtttacaccacgcgtccagataccttttacggcgtgagttatttaggtattgcagcggcacatccattagcaagtttagcagctcaaaacaattccgaattagccgcctttatccaagaagcgaaaaacgccaaagtggcagaagctgatcttgcgacaatggagaaaaaaggaatggcaacgggattatttgctattcatccattgacgggggataaattaccgatttgggttgcgaatttcgtattaatgcactacggcactggcgcagtaatggcggttcctgctcatgaccaacgtgactttgaatttgctcaaaaatacagtttgccaattaaacaagtgatcgcaccgcttgcagatgaagaaattgatttaaccaaacaagctttcgttgaacacggtaaattagtgaactcagacgagtttgatggtaaaaattttgatggtgctttcaacggcattgcagataaattagaaaaattaggtgttggaaaacgtcaagttaattaccgtttacgtgactggggcgtttctcgccaacgttattggggtgcaccaattccgatgctaacccttgaaaatggcgatgtagtacctgcaccaatggaagatttacctattattctacctgaagatgtggtaatggatggcgtaaaaagtccaattaacgctgatcctaattgggcaaaaacaacctttaacgacgcaccagcgttaaaagaaacggatacctttgatacctttatggaatcctcttggtattacgcgcgctacacttgtccacaatatcaaaatggcatgcttgatgcggaagaagcaaactattggttacctgtggatcaatatatcggtggtattgaacatgctacgatgcatttactctacttccgcttcttccacaaattattgcgtgatgcaggatttgtaactagtgaggaaccagccgataaattattatgtcaaggtatggtgcttgcagatgccttctactacacaagtccaaccaatgagcgtatttgggtaagtccaacacaggtaactcttgaacgtgatgaaaaaggcagaattattaaagcgaccgatcctgaagggcgtgaattagtccacagtggcatgaccaaaatgtcgaaatccaaaaataacggtattgacccacaagaaatggtagaaaaatatggtgccgatactgttcgcctctttatgatgtttgcctctccagcagaaatgaccttggaatggcaagaatcaggcgtagaaggtgcgaaacgtttcttaggacgcgtttggaatttggtatatcaatatcaacaaaatccagcaaaaactagcctagatttgaccgcactttccgcagaacagaaagtgcttcgtcgtgaagttcataaaaccattgcgaaagtgagcgatgatattggtcgtcgtcaaacatttaatactgcgattgctgcagtgatggaattgatgaataaactgactaaggcatcgcttgatagcgagcaagatcgtgcagttatggcggaggcattaagtgcagttgttcgtatgctttatccaattacgccacatatctgttttgaattatggcaagctcttggcaatgaaagtgctattgatactgcagaatgggtaaaagccgatgaagccgcaatggtagaagatgaaaaactgattgttgtgcaagtaaatggcaaggttcgtggcaaagttactgttgcgacagatgcagatgaagacacagtcaaaacgattgcttttgcggatgaaaatgtgaagaaatttattgataatcaacacattgtcaaagtgatttatgtcgtaggtaaattattaaacgtggtagtgaaaccataa

SEQ ID NO: 7056 - DNA, 909 bp, Haemophilus influenzae
  CDS (1)...(909)
atgagtacaaaatttaacgtaaaaacattccaaggtatgattttagccctgcaagaatattgggcaaaccaaggctgcaccattgtgcaaccttttgatatggaagtgggcgcaggtacttctcacccaatgaccgcattgcgcgcattaggcccagagccaatggcatttgcttatgtgcaaccttcacgtcgtccgaccgatggtcgttatggtgaaaacccaaaccgtttacaacactactaccaattccaagtggtaatcaaaccttctccagataatattcaagaactttatttaggctcgcttgaaatgctcggcttcgatccgaccaaaaacgacattcgtttcgtagaagataactgggaaaacccaaccttaggtgcatggggcttgggctgggaagtatggttaaacggtatggaagtgacccagtttacctatttccaacaagtgggtggcttagaatgtaaacctgtaacaggcgaagtaacttatggtttagagcgtttagccatgtacattcaaggcgtagattctgtatatgacttagtttggtctgatggcccgcttggtaaaaccacttacggtgatgtattccatcaaaacgaagtcgagcaatcaacctataactttgaacacgcaaacacagatttcttattctactgcttcgatcaatacgaaaaagaagcacaagagttattagctttagaaaaaccgttaccattgccagcttatgaacgtattttgaaagcagcacacagcttcaacttattagatgcacgtaaagcaatttcagtgaccgaacgccaacgctatattttacgcattcgagccttaactaaaggcgtggcggaagcttattatgcaagccgtgaagccttaggtttcccaggttgtaaaaaataa

SEQ ID NO: 7057 - DNA, 1311 bp, Haemophilus influenzae
  CDS (1)...(1311)
  misc_feature (1)...(1311): n = A,T,C or G
atggcaaaaatcgttaaagtgattggtcgcgaaatcatcgactcacgcggtaatccaactgttgaagctgaagttcatcttgakggtggttttgtnggtttagcagcagctccatctggtgcatcaactggttctcgtgaagcattagaattacgtgacggcgacaaatctcgtttcttaggtaaaggcgtattaaaagctgtggcggcagtgaacaacgaaattgcacaagctatcgttggtaaagatgcaacaaaccaagctgaaatcgaccaaatcatgatcgatttagacggaaccgaaaacaaatctaactttggtgcaaatgcaatcttggcggtatctttagcaaacgcaaaagcagctgcagcatctaaaggtttaccactttacgcttacattgcagaattaaatggcactgctggtgtttattctatgccattaccaatgatgaacatcattaacggtggcgaacatgcagataacaacgttgatatccaagaattcatgattcaaccagttggtgcgaaaacattacgtgaagcacttcgtatcggtgctgaagtattccacaacttggcgaaagtattaaaagctaaaggcatgagcactgcagttggtgacgaaggtggtttcgcaccaaacttagcctctaacgcagacgctttagcctgtatcaaagaagcagtagaaaaagcaggttacgtattaggtaaagacgttactttagcgatggactgcgcatcttctgagttctataacaaagaaaatggtatgtacgaaatgaaaggtgaaggtaaatcattcacttctcaagaattcactcactacttagaagaattatgcaaagagtacccaatcgtgtctatcgaagatggtcaagatgagtcagactgggaaggttttgcataccaaactaaagtgttaggcgaccgcgttcaattagtgggcgatgatttattcgtcactaacaccaaaatcttaaaagaaggtatcgaaaaaggtatcgcaaactctatcttaatcaaattcaatcaaatcggttctttaactgaaactttagcagcaattaaaatggcgaaagatgcaggttacaccgctgtaatctctcaccgttcaggcgaaactgaagatgcaactatcgctgatttagcggtgggtacagcagcaggtcaaatcaaaactggttctatgagccgttctgaccgtattgcgaaatacaaccaattaatccgtatcgaagaagcattagaacgcgctggtactccagcagcattcccaggcttaaaagcggttaaaggtcaagcgtaa

SEQ ID NO: 7058 - DNA, 1206 bp, Haemophilus influenzae
  CDS (1)...(1206)
gtgagccaatattctgaaaatattattattggtgcgggtgcggcaggattattttgtgccgcacaattggctaagctaggcaagtcggtaacagttttcgacaacggcaaaaaaatcggacgtaagattttgatgtcgggcggtgggttttgtaatttcaccaatttagaggttacgccagctcattatctttcgcaaaatcctcatttcgtcaaatcggcactagctcgttataccaactgggattttatttctttagtggcggagcaagggattacttatcacgaaaaggaattggggcaattattttgcgatgagggtgcagaacaaatcgttgaaatgctgaaatctgaatgcgataaatatggtgctaagattttattgcgtagcgaagtttctcaagttgaacggattcaaaatgatgaaaaagtgcggtttgttttacaggtaaattcaacccaatggcaatgtaaaaatttgattgttgcgacaggtgggctttctatgcctgggcttggcgcaacgccatttggttatcaaattgcggaacaatttggcattcctgttattccgcctcgtgcgagtttagtgccttttacttatcgagaaacagataaatttttaaccgcactttcaggtattagcttgcctgtcactatcacggcactgtgcggaaaatctttttacaaccagcttttgtttactcatcgtggtatttcaggccctgcggtgttacaaatttctaattattggcagcccactgagtcagtggaaatcgatttattaccgaaccacaatgtggaagaggaaattaatcaagcaaaacaatcttctccaaaacaaatgttgaaaaccatcttggttcgattattgccgaaaaaattggtcgaactttggattgaacaaggcattgtgcaagatgaagttatcgctaacatcagcaaagtgcgggtaaaaaatctggtggattttattcatcactgggaatttactccaaatggcacagagggctatcgtacggctgaagtcacaatgggcggagtggatactaaagtaatttcttctaaaacaatggaaagcaaccaagtcagcggtttatattttattggtgaagtattggatgtgacgggctggctcggtggttataacttccaatgggcgtggagctcggcttatgcttgtgctctaagtatctcaagacaataa

SEQ ID NO: 7059 - DNA, 1119 bp, Haemophilus influenzae
  CDS (1)...(1119)
atgcttgaattttcctcacaagattgcgtatttatgcaacgtgccttagatttggcagccaaaggtcaatataccactacaccgaacccatcggtgggatgcgtattggttaaaaatggtgaaattgtgggggagggctttcattttaaggcaggacaacctcatgctgaacgcgttgccttagctcaagctggtgaaaatgctaaaggagcaaccgcttacgtcaccttagagccttgcgctcattatggtcgcacaccaccttgtgcattaggattaattgaggcgggcgtagtgaaagtcattgcggctatgcaagatccaaatcctcaagtcgcaggaaaaggtttgaaaatgttgtctgatgccggtatcgaaagtacggtgaatttattgaacgatcaagcggaaaaaataaataaaggttttttaaaacgaatgcgtcaaggtatgccttttgttcaactaaaacttgccatgagtttagatggacgaactgcaatggcaagtggagaaagtaaatggattacgggcccagatgctcgttcggacgtacaaaaaatgcgagcaaaatcatccgcacttttatctacttccacaacagtcattgcagatgatccaagccttaatgtacgctgggacgaatttcctgaaaatcttaaaacagaatataaaaaagaatggcttcgccagcctgtgcgagtcattttagattcacaacatcgcattcagccgactcataaactttttttaacccattctcccgtttggttagtctctagtgagccacgagatttaacaggctttcctgatttttgtgaacaaattatttttccgaaagaaaatttactaaaagaattaatgcgagaactgggaaaacgacaaatcaataccctttgggtagaagctggagcaaatttatcgggcagtttaattgatgcgaaattagtggatgaattgattatttacattgcgccaaaattacttggagacaatgctcgtggtctatgccaattaccgaatttaactaaacttgctgatgcaccattatggcaactcaatgaattagaacaaatcggtgacgatataaaattaacttacacaccgaaaggagtctaa

SEQ ID NO: 7060 - DNA, 1365 bp, Haemophilus influenzae
  CDS (1)...(1365)
atgacaatgattacccctgtacaagcaattcttgcttcaaaccaacattttttagatcgccaagatgtaatggaatccaacgtacgtagttatcctcgtaaattaccttttgcctatgcaaaagcacaaggctgttgggttactgatgttgaaggtaatgaatacctagactttttagcaggcgcaggaacccttgcattaggacataatcatcctatattaatgcaagccattaaagacgtattagatagcggattgccgttacacactttagatttaaccactccacttaaagatgcgtttagtgaagaattattgtcattcttcccgaaagataaatatatcttacaattcacaggcccttctggtgcagatgcaaatgaagcagccatcaaattagcgaaaacttacacagggcgtggcaatatcattgctttctctggcggttttcacggtatgacccaaggggcattagccttaacgggtaatcttggtgcaaaaaatgccgttgaaaatttaatgcctggcgtacaatttatgccatatccacacgaataccgctgcccatttggcattggtggcgaagcgggtgcgaaagcagttgaacaatactttgaaaacttcatcgaagatgtagaaagtggcgtagtaaaaccagctgcagtaattttagaagcaatccaaggagaaggcggcgttgtttcagcaccaataagcttcttacaaaaagtacgtgaagtaacccaaaaacacggcattttaatgatcgtcgatgaagtgcaagctggtttctgccgttctggaagaatgttcgcctttgaacacgcaggcattgagcctgatattattgtgatgtcaaaagcagttggtggcagcttaccattagctgtattagctattcgtaaagaatttgatgcttggcaacctgcaggacatacaggtacatttcgtggcaatcaattagcgatggcgacaggctatgcttcacttaaaattatgcgtgatgaaaacctcgcacaaaatgcccaagagcgtggtgaatacttaaccaacgcattacgtgaattaagcaaagaatatccgtgcatcggcaacgtacgtggtcgtggcttaatgatggggatcgatattgtagacgaacgccaatcgaaagatgcgacaggggcttacccacgcgattgtgaattagcggcagcaatccaaaaagcttgcttcaaaaacaaactcttgctcgaacgtggcggacgcggtggcaacgtggttcgcgtgctttgtgcggtaaacatcaaccaaagtgaatgtgaagagttcatcaaacgcttcaaacaatctgttgtagacgcattgaaagtggtgcgtagttaa

SEQ ID NO: 7061 - DNA, 237 bp, Haemophilus influenzae
  CDS (1)...(237)
atgtctagagtttgtcaagtaacaggcaagcgtccagctgtgggtaataaccgctcacacgcaatgaatgcgacacgtcgtcgttttcttccaaaccttcacactcaccgtttttgggttgaaagtgaaaaccgtttcgtaaccttacgtttaactgcgaaaggtatgcgtattattgataaaaaaggcattgatgcagtattagctgaaatccgtgctcgtggcgaaaaaatctaa

SEQ ID NO: 7062 - DNA, 468 bp, Haemophilus influenzae
  CDS (1)...(468)
atggacattcgtaaaattaaaaaattaatcgaattagtagaagaatcgggcattactgaattagaagtgcaagaagaagagggtacagtacgtattagccgtgctgcaccagtaattgctccagcagccgttcaatatgctgcagcaccagtagtagcaccgactcctgccgctgcaccagctcaagttccagcagctgcgacaaccgcaccagccgcatcggatgagttatcaggccatcttgtacgttctccaatggtgggaacgttctatcgcagcccaagcccagaagcaaaagcattcgttgaagtggggcagtctgtgaaagttggcgatgcgctttgtatcgttgaagcaatgaaaatgatgaaccgcattgaagcggacaaagctggcgtagtaaaagcaattcttatcaacgacggtaacgccgttgaatttgacgaaccattaatcgttattgaataa

SEQ ID NO: 7063 - DNA, 1347 bp, Haemophilus influenzae
  CDS (1)...(1347)
atgttagaaaaagttgtgattgctaaccgcggtgaaattgcactacgcattttacgtgcttgtaaagaattaggtattaaaactgtggcggttcactccactgctgatcgtgatttaaaacacgttttactcgctgatgaaaccatttgtatcggtccagcaccttccgcaaaaagttatttaaatattccagctatcattgctgccgccgaagtaacaggtgcggatgcaattcatcctggatacggtttcttatctgaaaacgctgactttgctgaacaagttgaacgttcaggtttcactttcatcggcccaacagcagatgttattcgtttaatgggcgataaagtttcagctattaaagcgatgaaaaaagcaggcgtgccttgtgtaccaggttcggatggccctgtaagtaatgatattgctaaaaataaagaaatcgccaaacgtattggttatccaatcatcatcaaagcatcaggcggcggcggtggccgaggaatgcgtgttgttcgtagcgaagacgcattagaagaatctattgcgatgaccaaagcagaagcgaaagccgcattcaacaatgatatggtttatatggaaaaatacttagaaaatccacgtcacgtggaaattcaagtattagcagatacccatggaaatgcggtttatttggctgaacgtgactgctcaatgcagcgtcgtcaccaaaaagttgtggaagaagcaccagctccaggtattacagaagaagttcgccgcgatattggctctcgctgtgcaaatgcttgtgtagaaatcggctatcgcggagcgggaacctttgaattcttatatgaaaatggcgaattctactttattgaaatgaatacccgtatccaagtagaacacccagtaacagaaatgattacaggtgtagatttagtgaaagagcaattgcgtattgcagcaggcttgccaatttcctttaaacaagaggacattaaagttaaaggccatgcaatggaatgccgtattaacgcagaagatcccaaaacattcttaccgtctccgggcaaagtaaatcacttacattcgcctggcggtttgggcgttcgttgggattctcatgtttatggtggctatactgtgcctccacattacgactccatgatcgcaaaacttatcacttacggcgatacacgtgaagtggcaatccgtcgtatgcaaaatgccttatctgaaacaattattgatggtatcaaaaccaatatcccacttcatgaattaattcttgaagatgaaaatttccaaaaaggcggaacaaacatccattatttggagaaaaaattaggtatgaatgaataa

SEQ ID NO: 7064 - DNA, 993 bp, Haemophilus influenzae
  CDS (1)...(993)
atgcgaatcggttcataccaattaagaaatcgtgttttacttgcaccaatggcaggtattaccgaccagcctttccgccgtctttgtgcatattatggtgcggggcttacattttcagaaatgatgtccacaaatccgcaagtttggcataccgaaaaatccaaattgcgtttggcacatagcgaagatttaggtctcaatgcggtgcaaattgcaggtagtgatccactcgagatggcgcaagccgctgctattaacgtggaatatggcgctcaaatcattgacattaatatgggatgccctgccaaaaaagtaaatcgcaaactcgcaggttctgcgttgttgcaatttccagatttggtggaaaaaatcttgcgagaagtagtgtccgccgtcaatgtgccagtgaccttaaaaattcgtacaggctgggataaatctaatcgaaactgcgttcaaatcggcaaaattgcagaacaatgtggcatacaagcattaacggtgcatggtcgtacacgcgcttgtctttttgaaggcgaagcggagtacgataacattaaagccgttaaacaagcaattgctataccagttatagctaatggcgatattgattctgctcggaaagcaaaattcgttctcaattatactggagcggatgccattatgatcggtcgtgctgccttaggtaacccttggttatttcaagctgtggaaaacctaattgagcataactcgataagtcaaatgccaagtttaaaagaaaagtgtggtcagattttgcgtcatattcaagaattgcatcaattctatggcgaacaaaaaggctatcgcattgcgcgtaaacacgtagcttggtatttacagggaattcaacctgattccgtttttaaacagacttttaatgcaattagtgatcctaaagagcagctgattgtattggaagattttttcaatttaattttggataaaaaaaatgttagaacaacaacgtaa

SEQ ID NO: 7065 - DNA, 966 bp, Haemophilus influenzae
  CDS (1)...(966)
atgattaaaaaaattgcagttttaacaagtggtggcgatgcgcctggtatgaatgccgcaattcgtggcgtagtacgttctgcacttgcagaaggcttagaagtatttggtatctatgacggttatcaaggtttatacaataataaaatcaaacaattaaatcgctatagcgtatctgatgtgattaatcgtggcggtacttttttaggttctgcacgttttcctgaatttaaagatcctaatattcgggcaaaatgtgcggaaattttacgttctcacggcattgatgcacttgtggttatcggtggtgacggttcttacatgggggcaaaattattaaccgaagaacacagtttcccttgtgttggcttacccggtactattgataatgatgttgcaggtactgactataccatcggttatcaaaccgcattacaaactgcagtggatgcaatcgaccgtttacgtgatacatcaagctcacaccaacgtatttctatcgttgaaattatgggtcgccattgtagtgacttaaccatttctgcgggcattgctggcggttgtgaatatatcgtcgcatcagaaattgaatttaatcgtgaagaattaattcaacaaattgaacgtagcattattcgcggtaaacgccacgctattattgctatcactgaacttttaaccgatgttcattctctggcaaaagaaattgaagctcgcgttggacacgaaactcgtgcaactgttttagggcatattcaacgtggtggttctccttgtgcttttgaccgtattcttgcctcacgtatgggcgcatacgcagtagatttattgctacaaggcaaaggcggctattgcgtaggtatccaaaatgaacaactcgttcatcacgatattattgatgccattaataatatgcagcgtgtatttaaggctgattggcttaaagtggcaaaacgtttggaataa

SEQ ID NO: 7066 - DNA, 1077 bp, Haemophilus influenzae
  CDS (1)...(1077)
atgcaatcatacaatatagcagtattagcaggcgatggtattggtcccgaagtcatggcggaagccattaaggtattaaacagagttcaagaaaaatttggttttaaacttaactttaacgagttttttgtcggcggcgcggctattgagcattgcggttatccgttaccagcagaaaccttaaaaggctgtgatcaagcggatgccattttatttggttctgtaggtggccctaaatggacaaatttaccaccagatcaacagccagaacgtggtgcattattgcctttgcgtaaacatttcaaattattctgtaatcttcgtcctgcaaccctttataaaggcttggaaaaattctgtccattacgtgcagatattgccgcaaaaggttttgatatggtggtggtgcgtgaattaacgggtgggatttatttcggtcagcctaaaggtcgtgagggggatggcgtacaaaccaaagcatttgatacggaagtgtattacaaatatgaaatcgaacgaattgcacgtgcggcttttgaggcagcaatgaaacgcaataaaaaagtcacttctgtagataaagcgaacgtattacagtcttctattttatggcgtgaaactgtgacagaaatggcaaaagactatcctgaagtgactttagagcatatctatatcgacaatgccaccatgcagttaattaaatcacctgaatcttttgatgttttactttgctctaacattttcggcgatattatttctgacgaagcggcgatgatcacaggttctatgggaatgttgccatctgccagcttaaatgaagagggttttggtttatacgagcctgcaggcggttctgcccctgatattgcaggcaaaggcattgctaacccaatcgcacaaattctttctgcggcaatgatgttgcgttatagcttcaacttaaacgaagcagcagatgccattgaaagtgcggttcaaaaagtcttggcaagtggtcatcgcaccgccgatttggccgatgattccacaccagtttcaacggcagaaatggggacattgattacacaagcaatttaa

SEQ ID NO: 7067 - DNA, 1410 bp, Haemophilus influenzae
  CDS (1)...(1410)
atggcaaaaacactttacgaaaaattatttgattcacacattgtgtatgaagcagagggcgaaacgccaattttgtatattaatcgtcatttgattcacgaagtaaccagcccgcaggcctttgatgggttacgcgtcgcaaatcgccaagtgcgccaagtgaataaaacttttggcacaatggatcacagcatttctactcaagtacgagatgtcaataaacttgaaggtcaagcgaaaattcaagtgttagaattggataaaaataccaaagcaacaggtattaaattatttgatataacaactaaagagcaaggtattgtacacgttatggggccagaacaaggtttaaccttacccggtatgacaattgtttgtggcgattcacacaccgcaacgcacggtgcatttggtgccttggcttttggtatcggtacttctgaagtagagcacgtattagccactcaaactttaaaacaggctcgcgcaaaaagtatgaaaattgaagtgcgtggtaaagtcgcatcaggtattacggcaaaagatattattcttgctattatcggcaaaactacgatggcaggcggtacaggacacgttgtagaattctgtggcgaagcgatccaagacctttctatggaggggcgtatgaccgtctgtaatatggcaattgaaatgggtgcaaaagcaggcttgattgcgccagatgaaaccacatttgcatatttgaaagatcgtccacacgcgccgaaaggcaaagattgggaggatgccgttgcttattggaaaaccttaaaatctgacgatgatgcacaatttgacactgtggtaacgctagaagcaaaagacatcgcaccacaagtcacttgggggacaaaccccgggcaggtaatttctgtgaatgaaaccataccaaatccgcaagaaatggcagaccctgtacaacgtgcttcggcggaaaaagccttacattatattggcttggaagctggcactaatttaaaagatattaaagttgatcaagtgttcatcggatcttgcaccaactcgcgcattgaagatttacgcgcagcggcggctgtgatgaaaggccgtaaaaaagctgataacgtaaaacgtattttagtagtaccaggttctggcttagtgaaagaacaagcggaaaaagagggcttggataaaatctttattgccgcaggtgcagaatggcgtaatccaggttgttcaatgtgtttaggaatgaacgacgaccgtttaggcgaatgggaacgctgtgcttccacttcaaaccgtaactttgaaggtcgccaaggccgtaatggacgcacccatttggtaagtcctgcaatggcggcagcggcaggagtgttcggtaaatttgttgatattcgtgacgtaacattaaactaa

SEQ ID NO: 7068 - DNA, 603 bp, Haemophilus influenzae
  CDS (1)...(603)
atggcaggatttaaacaactttcaggcttagtcgtaccattggatgcggcaaatgtagataccgatgcaattattccaaaacaatttttacaagccattacccgcataggtttcggcaaacacttattccacgaatggcgttatttggacgtagaaggcaccaagccaaatccagaatttgtcttaaattatccgcaatatcaaggtgcaacaattttgttggcgcgtaaaaaccttggctgtggttcttctcgtgaacacgccccttgggcattagcagactacggctttaaagtaatgatcgccccaagttttgcagatattttctataacaatagcttaaataatcatatgttaccgattcgtttaagcgaagaagaagtagaagaaatcttccaatgggtatgggcaaatgaaggcaaacaaatccacgtagatttagaagcgatgacggtcactgtaggggataaagtttatacttttgagcttgatgaattccgccgccattgtttgctaaacggtttagataatatcggcttaactcttcagcacgaagacaaaatctcagcatacgagaaaaatattccagcgtttttacgttaa

SEQ ID NO: 7069 - DNA, 1101 bp, Haemophilus influenzae
  CDS (1)...(1101)
atgcaatttagtatttcaagagaaaatttattaaaaccgttgcaacaagtatgtggcgtattgagtaatcgcccaaatattcctgtattaaacaacgtattattgcaaattgaagactatcgtctgactatcacagggacagatttagaagttgaactctctagtcaaactcaactttcatcatcttctgaaaatggcacttttaccattccagcaaaaaaattcttagatatttgccgcactttatctgatgattcagaaatcacggtgacttttgaacaagatcgtgcattagtgcaatctgggcgtagccgttttacactagcaacccaacctgccgaagaatatcccaacctcacagattggcagtctgaagtggattttgaactaccgcaaaataccttacgccgtttaattgaagccactcaattttctatggcaaaccaagatgcccgctatttcttaaatggtatgaagtttgaaacagaaggcaatttattgcgaactgtggcaacagatggtcatagacttgcggtctgtactatctcacttgaacaagaattacaaaatcattctgtgattttacctcgtaaaggcgtgttagaacttgttcgtttattagaaacaaacgatgaaccagcacgcttacaaattggcaccaacaatttacgtgtccatttaaaaaacacagtatttacatcaaaattaattgatggtcgctttcctgactatcgccgagtattgcctcgtaatgccacaaaaattgtcgaaggcaattgggaaatgctgaaacaggcttttgctcgtgcgtctattttatctaatgaacgcgcacgcagcgtacgtttaagtttaaaggaaaaccagcttaaaattactgcctcaaatacagaacacgaagaagcagaagaaattgtcgatgtcaattacaatggcgaagaattagaagtgggctttaatgtgacctatattcttgatgtgctgaatgcacttaaatgtaatcaagtgcgaatgtgcttaactgatgcgttctccagttgcttaattgaaaactgtgaagacagcagctgcgaatacgtcattatgccaatgcgtttataa

SEQ ID NO: 7070 - DNA, 1365 bp, Haemophilus influenzae
  CDS (1)...(1365)
gtgaatctctcaaatctttggcaaagttgcctgttacaacttcaagatcaagtttcagccagcgatcttagcacttggcttcgtcctttacaggctgacgtggtggcggataaccacattgttttatatgcttctaatatgtttgtgaaaggttgggtggaaactcattatctcgcacaaatccagcaaatttgtcaaacacttgcacaaaatcctgaactgcgtatttctttaaaagaaggggttaaacctgcacccaagatagtggaaagcacaccaaatacatcacttagatcagaaagtgcggtagattttcaagctgaatctagtgcttcagtaaaatttgaatctcatctcaatactaaacacttatttgataactttgttgaaggtaaatcgaaccaactcgcacgtgcagtcggtcaaaaacttgctcaagcaccaggcgaaccatcagccaatcctttctttttatatggcggcactggtttagggaaaactcacttgttacacgccattggcaacggcattttagccgataaaccgaatgcacgagtgctttatattcacgcaaataactttatgcaacatatggtaaaagcagtgcgtgataataaaatggatcagttcaaaaaattctatcgttctcttgatgcgcttttagtggatgatattcaatttttcgctgaaaaagaaaaaactcaagaagaattcttccatattttcaatagcttgtttgaaacaggtcgccagattatcttaacttcggatcgttatcctaaagaaattgaaaaaattgaagaacgtttaaaatcacgttttggctggggcttaacaacagccattgaaccgcccgatcttgaaacccgtgtagcgattttattgaaaaaagcggaagaacataatatgaacttgccagaagaagtcgctttcttcattgctcaacgcttgcgtaccaacgtgcgtgaacttgagggtgcattaaatcgtgtaaaagcaatgcaagacttcaaaggcggtgacattgatattgatttcgtgcgtgataccttaaaagatattttggctctgcaagaacgcttagttaccattgaaaatattcaaaaagtggtggctgaatattatcgaattaaggtttcagatttaaaatcaaaaagtcgtgcacgttcagtgactcgtcctcgccaaattgcaatggcgttagcaaaagaattaacaaatcgcagtttgccagaaatcggtcgtgcctttgaccgtgatcacacgaccgtattaaacgcttgccgagaagtaccaaaattccgtgagcaagacaatagcattcaagaagattgggcgaatttgatccgcactttgtccgcataa

SEQ ID NO: 7071 - DNA, 135 bp, Haemophilus influenzae
  CDS (1)...(135)
atgaaacgtacatttcaaccttctgtattaaaacgtagtcgtactcacggtttccgtgctcgtatggcaactaaaaatggccgtcaagttttagcgcgtcgccgtgctaaaggtcgtaaaagtttatctgcataa

SEQ ID NO: 7072 - DNA, 1386 bp, Haemophilus influenzae
  CDS (1)...(1386)
gtgcggctagattttaaagagttttttatgaaagaaacaatcgttgctcaagctactgcaccaggtcgtggtggtattggaattttaagagtctctgggcctttagcaacaaaagttgctcaagctatattaggtaaatgcccgaagccaagaatggcagattatcttccttttaaagatgctgatggcactattttagatcaagggattgcgctttatttcaaatcgccaaattcatttactggtgaagatgtgttggaattgcaaggtcacggtgggcaggttgtattagatttattactcaaacgtattttacaaattgatggaatccgtttggcgagaccaggcgagttttctgaacaagcttttttgaatgataaattggatcttgctcaagcggaggccattgcggatttaattgatgcaacatcagaacaagcggtacgctcagcattaaaatctttgcaaggtgaattttctaaaaaagtaaatgaattagttgattctgtgatttacttacgtacttatgtagaagcaagcattgactttcctgatgaagaaatagatttcttggcagatggaaaaattgaagcaaacttacgtggtattattaatcagttggaagatgttcgctctgaagctaaacaaggttctattttacgtgagggaatgaaagtcgtgattgctggtcgtccgaatgcgggtaaatcgagcttgcttaatgcgcttgctggtcgcgaagcggctatcgtcacggatattgcaggtacaacccgtgatgtattgcgtgagcatattcatattgacggtatgccattgcatattattgataccgcaggtcttcgagatgcaatcgatgaagtagagcgtattgggatttctcgtgcttggacagagattgaacaagccgatcgtattattttgatgttagatagtagcgatcctgaaagtgcagatttaagcaaagtgcggtcagaatttttagcaaaattaccctcaaccttgccagttactattgttagaaacaaaattgatttaaatggcgaacaagcaagtgaaagcgaacagggcggttatcaaatgattagtctttccgctcaaacgcatgatggtgtacaacttttacgtgagcatttgaaacaagcaatgggtttccaaacaggcatggaaggaggctttttagctcgtcgtcgtcatttagatgcgctggataaagccgcagagcatttacaaatcggtttggttcaacttacagaatttcacgcaggagaacttttagcggaagaattacgcttagttcaaagctatttaagtgaaattacgggtcaattcacatctgatgatttacttggtaatatttttagttctttctgcattggaaaatag

SEQ ID NO: 7073 - DNA, 1002 bp, Haemophilus influenzae
  CDS (1)...(1002)
atgttagcggaaaaattacaaattaactctattacacctcatccaagtgtagaatattggtctgtttgcaaagttgaggcgttatttgaaacgccatttttggaattagtttaccgagcaacgcaagttcatcgtaagcattttaatcctcgcgcgattcagttatccacgttaatgtctatcaaaacggggggatgcccagaagattgtagttattgccctcaatcagcccgttatcatactggcgtacaaaatcagcagttattagatgttgatgagatcgtcgctaaagcaaaaattgcgaaagcacgtggtgcagggcgtttctgtatgggggctgcttggcgaggccctaagccaaaagatattgagaaagtcacagaaattattaaagccgtgaaatcacttggtttagaaacttgcggtacctttggtttattgcaagacggtatggcggaagatttaaaagaagctggattagattattacaatcataatcttgataccgcaccagaacattatgcagaagtgattggtactcgccgttttgatgatcgccttagcaccttaggaaaagtgcgcaaagctggattaaaagtgtgttgtggtggcattgtagggatgaatgaaactcgcaaagaacgggctggattaatcgcgagccttgcaaatcttgatccgcaacctgagtcagtgccgattaatcaactcgttaaggttgaaggtacgccgttagccgatgcggaagaattagattggacggagtttgtgcgaacgattgctgttgcacgtattactatgccaaaaagttatgttcgcctttctgcaggtcgcagtggtatgactgaagaaatgcaagcgatgtgttttatggcgggtgcaaattctattttctatggcgataaattacttgttacagataatccagaagaagatggcgatcagttattgatggcaaaattagatttagagccagaaactgcagaaaataaaaagttgtag

SEQ ID NO: 7074 - DNA, 1998 bp, Haemophilus influenzae
  CDS (1)...(1998)
atggcaactcgtagacaattagccaatgcaattcgtgtcttagcaatggattctgtacaaaaagcgaaatctggtcaccctggtgcaccaatggggatggcggatattgctgaagtattatggcgcgactttttaaaacacaatccaaccaatcctaaatgggctgatcgagatcgttttgtactttctaacggccatggttctatgttgatttatagtcttttacatttaactggctatgatctttctatcgaagatttaaaacaattccgtcaattacattctaaaaccccaggtcacccagaatatggttatgcccctggtgttgaaaccacgactggcccgttaggtcaaggtatcactaatgcggtgggtatggcaattgctgagaaaaccttagctggacaatttaaccgtgaaggccatgaaattgtcgatcaccacacttatgtgttcttaggcgatggttgtttaatggaagggatttctcacgaggcttgctctttagcaggaaccttaggtctgggtaaattaatcgcattctacgatgacaacaatatttccattgatggtcatgttgatggctggttcagtgatgacactgccgagcgttttgaagcttatggctggcaagtaatccgtaatgtagatggtcacgatgcagagcaaattcgtgctgctaccattcttgctcaagcagaaaaaggaaaaccaacgttaattatttgtaaaaccatcatcggctttggttcaccaaataaatcaggttctcatgattcccatggcgcaccattaggcgatgaagaaatcgatttaacccgtaaagcacttggttgggaatatgcgccatttgaaattccagctgaatactatgctgaatggtcggcaaaagagaaaggtgctgcagcagaaaaatcttgggaagaaaaatttgccgcttatgcaaaagcctatcctgaattagcagcagaatttaaacgtcgtgtttctggcgaattaccaacaaactgggcggcagaatctaaagcgttcatcgaaaaattacaagcaaatccagcgagtattgcaagccgtaaagcatcacaaaatgctatcgaagcttatgcgcacgtattacctgaattcttaggtggctctgcagacttagcaagctctaacttaacgttatggagtggttctaaaccaattcgtgcccacgaaaacgtaggtggtaactacattaactacggcgttcgtgaatttggtatgtctgccattatgaacggtattgctttacacggcggtttcattccttacggcgcaaccttcttaatgttctacgaatatgctcacaatgcggtgcgtatggcagcattaatgaaacaacgcacattattcgtttatacccacgattccattggtttaggcgaagatgggcctacacaccaaccagtagaacaaacggcttcactacgcttaattccaaaccttgaaacatggcgtccatgtgaccaagttgaatcagccatcgcatggcaacaagcggttgaacgtcaagatggcccaagtgcgttgatctttacccgtcaaaacttagcccaaatggaccgcacttctgcacaattagatgcggttaaacgtggtgcttatgtgttaaaagactgtgatggcacacctgagttaatcttcattgcgacaggttctgaagtggaattagcagtgcaagcagccgaagcattaagtgctgaaggtaaaaaagtacgcgttgtttctatgccaagtactaaccgtttcgataaacaagatgcagcgtaccgtgaaagtgtattacctgcagcggtaaccaaacgtgttgcgattgaagcgggtattgctgacttctggtataaatacgttggattcaatggtcgtgttatcggtatgaatagctttggcgaatccgcaccagcagatcaattattcaaactctttggtttcactgttgaaaacgtggtagcaaaagcgaaagaaattctttaa

SEQ ID NO: 7075 - DNA, 897 bp, Haemophilus influenzae
  CDS (1)...(897)
atggactatttagataaacttacccatttagcacaagtgcgtggagaaattaatattcgctgtgaatttcaaggcgaatggcaaatatctcatcaagaaaaggatgcaggaaaaggcatattccatcttattgaacaaggcgagtgctggcttacactaaatgaaaaacaatttcatttaaaagagggggatgttttttttcttcctcaaaatcaaccgcactctatgcattattcagcaaataaaagagcggatattcctacaaaaaaaagtcatcaaggattatttgagttacatcagattggacgaggtacaccagatttaaaaatgttctgcggtaatttttattatcaacaagatgcgcttcttacagcatcaatgcctgaatatttacatataaatttatgcgacacaccaattcatcctttagtacagctttttttacaagaagcgcaaaaaaatgatgcgggtacgaaatccgtcgttgatgcactttcaaatgtacttttaatttatattttacgccacgctattcaacaaaatttaattgaacaaggcatcttatttgccttgcaagataagcgattaaatactgcactgatcgcaatattacaacaacctcaaaatgattggcatattgaacaattagctgaacttgcaacaatgtctcgtgcaaactttattcgtatctttcaacaacatattggtatgtcgccaggacgttttctcacgaaagtgcggttacaatctgcggcgtttttattaaaacaatcacaacaatctgtgcttgccattgctttagaagtggggtatcaatcagaagctcatttttgtaaagtttttaaaaattactaccaactttctccaagccaatacagaaaatctgtcagcctataa

SEQ ID NO: 7076 - DNA, 1173 bp, Haemophilus influenzae
  CDS (1)...(1173)
atgaacaaaacaaatccaaccattgctcttgttgcaggagaagtgtctggcgatattctcggggcgggattaatacgccagctcaaagcacattatcctaatgcgcgctttattggcattgcaggcccaagaatgttggctgaaggttgtgagacgcttgttgatatggaagagctttcagtcatgggcttggctgaaatattaaaacatcttcctcgtctgttgaaaattcgcaaaaatgtcattcaaactatgttgcaagaaaaacctgatgtttacatcggcattgatgcgcctgattttaatttggatgtagaacttaaactaaaagcgaacggaattaaaactattcattacgtgagcccctctgtatgggcttggcgtcaaaaccgcatccataaaattgccaaagcaactcatcaagttctagcctttttgccttttgagaaagccttttacgataaatttaatgtgccttgccgttttattgggcacacaatggcagatgctattccgctcaaaccaaaccgtgccgaagcctgccaaacgttacagattgatcccgcacaacgctatttagcaatcttagttggaagccgaggttcagaagtggaatttctggctgagcctttcttaaaaaccgctttattattaaaagaacaattcccagatttacaattcctcgtgcctttagtgaacgaaaaacgacgaattcaatttgaaaccattaaagctaaaattacgccaaatctagacctgcatttaattgatggcaatgcacgacaagcaatgatcgcagctgatgcaacacttcttgcttcaggaacagcagcacttgaagcaatgctttgtaaatcccccatggtagttggctatcgaatgaaaccactgacctatttcttagcaaaacgtttagtgaaaactgattatatttctttaccaaacttgcttgcgaatgaaatgcttgttcctgaaatgattcaagaagaatgcacgccagaattgcttgctgaaaaactatcagtttatctttctgatgatgaaagtgcggtaaaaaatcgccatgttttaattcagcacttcacggatttacaccaaaaaattcaatgcaatgccgataagcaagcggctcaagcggtcattgatttattagaaggaaaagaaaatgtttga

SEQ ID NO: 7077 - DNA, 447 bp, Haemophilus influenzae
  CDS (1)...(447)
gtgtcagaacaacaaccaaaagtgatcgaatcaaaagaaattatgactttattaccacatcgctatccatttttattagtggatcgcgtattggattttaaagaaggcgaatggttaaaagcgattaaaaatatcagcgtcaatgagccttgtttcacaggccacttcccaggcgaacccattttaccgggcgttttaattttagaagctttggcacaagcaatgggcattttagcctttaaaactcacgaattaaaaggcggcgaactattctactttgcaggtattgatgaagcgcgctttaaacgcccagtattaccgggagatcaaatggaattaaacgttcaagtgattaaaaaacgccgtggtattactgcatttactggcgttgccaccgtaaacggcgaaatcgcttgtgaagcaaaactaatgtgtgctcgtcgttaa

SEQ ID NO: 7078 - DNA, 1638 bp, Haemophilus influenzae
  CDS (1)...(1638)
atggctacaaattatattttcgtcactggcggtgtggtttcatcgttaggtaaaggcattgcggcagcatcattggcggcaattttagaagcacgtggtttaaacgtaaccattatgaaattagatccatatattaatgtggatcccggtacgatgagcccaacccaacacggggaagttttcgttactcaagatggcgcagaaacagatttagatttaggtcattatgagcgtttcatccgcacgaaaatgaccaaacgtaataacttcactacaggtaaaatttattctgaagtattacgtaaagagcgtcgtggcgattatcttggtgcaacaattcaagtgattccacatatcactaatgaaattaaagatcgcgtcattgctggtgctcaaggtcacgacgttgtgattgttgaagtgggcggcactgttggggatattgaatcacttccattcttagaagcattacgtcaattagccgttcaagttggtcgtgaacatacgttatttatgcatttaaccttggtgccttacattccaacggcgggagaggtaaaaactaaaccaacccagcattcggtaaaagaattgctttctattggtattcaacctgatgtgttgatttgccgttcagatcgtatgattccaccaaatgaacgtgcgaaaattgctttattttgtaatgttgcagaacgtgcagtcatttcattaaaagatgtgaattcaatttatcaaatccccgcattattaaaatctcaaggtttagatgattttgtctgtgaacgtttccgtttaacttgccctgaagcagatcttactgaatgggaacaagtgctttacaagcaagccaatccagtgggagaagtaaccatcggtatggtaggtaaatacactgagttacccgatgcctataaatcagtaaatgaagccttaaaacacgcaggtttaacgaaccgtttaagtgtaaacattaaatatattgattctcaagatgttgaaaccaaaggtgttgaagtattaaagggcattgatggcattcttgttccagggggatttggttatcgtggtgtagagggtaaaattcgtaccgcacaatatgcacgagaaaacaaaattccttacttgggtatttgcttaggtatgcagatcgcattgattgaatatgcacgtaatgtagcgggtttaactaaagccaattcatctgaatttgataaagattgtgaacaacctgtggtggcattaatcacagaatggcaagatgcggagggtaatactgaagtgcgtaccgatgaatcagatcttggcggaacaatgcgtttaggcgcacaacaatgtcatttggtatcaggtagccgcgcccgcgagctttatggcaaagaaaccattgaagagcgtcatcgtcatcgctatgaagtgaacaataccttgcttccacaaattgaaaaagcaggattgaaagtaactggattatctgcagataaaaaattggtagaaattatcgaagtgccaaatcatccttggtttgtcgcttgtcaattccatccagaatttacttctacgcctcgtgatggtcatccgttgtttgcaggctttgtaaaagcagcctatgaaaatcacaaaaaatctgtgaagtaa

SEQ ID NO: 7079 - DNA, 774 bp, Haemophilus influenzae
  CDS (1)...(774)
atgaaaaaattactttttacgaccgcacttttaactggagctattgctttctcaacgttttctcacgcaggcgaaattgccgatcgtgttgaaaaaacgaaaactttattagtcggaacagaagggacttatgcaccatttactttccatgataaaagtggaaaattaacaggctttgatgtagaggttattcgtaaagttgctgaaaagctcggtttgaaagtggaatttaaagaaacacaatgggatgcaatgtatgcggggttaaatgcaaaacgttttgatgtgattgcaaaccaaactaacccaagcccagagcgtttaaaaaaatacagtttcacaacgccttataattattctggtggggtgattgtaacaaaatcatcggataacagtattaaatcatttgaagacttgaaaggtcgtaaatctgcgcaatctgcaacaagtaactggggtaaagatgcaaaagctgcaggtgcgcagattcttgtagtggatggtttagcacagagcttagagcttattaaacaaggccgtgcagaagcaacaattaatgataaattggctgtattagattattttaaacaacacccaaattctggtttaaaaattgcttatgatcgtggggataaaactccgactgcctttgcttttttacaaggtgaagatgcattgattacaaaatttaatcaagtacttgaagcacttcgccaagatggtacattaaaacagatttcaattgaatggtttggttatgatattactcaataa

SEQ ID NO: 7080 - DNA, 1275 bp, Haemophilus influenzae
  CDS (1)...(1275)
atggataaatttcgtgtttatgggcaatctcgtttaagtggaagtgtgaatatttcaggcgcaaaaaacgccgcacttccaattctttttgcggctattttagcgacagaacctgttaaattgacaaatgttcccgaacttaaagatattgaaactactttgaaaattttgcgtcaattaggcgtggttgtagatcgtgatgcaactggtgcagttttattagatgcctctaatatcaatcatttcactgcaccttatgaattggttaaaactatgcgagcttcaatttgggcattggcacctttagtcgctcgtttccatcaaggtcaagtatcattacctggaggttgttctattggggctagacctgttgatctccatattagcggtttagaaaaattaggtgcggatattgttcttgaagaaggatatgtaaaagcacaagtatcggatcgtcttgtgggaactcgtattgtaatagaaaaagtaagtgtaggcgccactttatctattatgatggcagcaacccttgcgaaaggtacgactgttattgaaaacgccgctcgtgagcctgaaattgttgataccgccgatttccttaataaaatgggtgcgaaaataacaggtgcaggatctgctcacatcacgattgaaggtgttgaacgtttaactggttgtgagcacagtgtcgtgccagatcgcattgaaacgggtacattcttaattgctgcagcaatttcgggcggttgtgttgtttgtcaaaatactaaagcggatactttagatgccgtaattgataaactccgtgaagctggtgcgcaagttgatgtaactgaaaatagcattactttagatatgcttggtaatcgccctaaagcagtgaatattcgtactgcaccacatccagggttcccaactgatatgcaggctcaatttactttattaaatatggtggcagaaggtacaagcattatcactgaaacgatttttgaaaatcgttttatgcatattcctgaattaattcgtatgggtggtaaagctgaaattgaagggaatacagcggtatgtcacggggttgaacaattgtctggcacagaggtaatagcgacagatttacgcgcttcaatcagtttagtgcttgcaggttgtatcgcaacgggtgaaaccattgtagatcgtatttatcatatcgatcgtggttatgaacatatcgaagataaattacgtggcctaggtgcgaaaattgaacgtttttctggaagtgatgaagcgtaa

SEQ ID NO: 7081 - DNA, 2040 bp, Haemophilus influenzae
  CDS (1)...(2040)
gtgcggtcatttttctccgagaattttatgacaaatattcaaactcaactagacaatctacgcaaaaccttgcgccaatatgaatacgaataccacgttttagataatccgagtgtgcctgatagcgaatacgatcgtttatttcatcagctcaaagccctagaattagagcatcctgaatttctgacgtcagattcgcccactcaacgtgttggtgcaaaaccactttctgggtttagccaaattcgtcacgaaattcctatgctctctttggataatgctttttccgatgcagaatttaatgcttttgtaaaacgcattgaagatcgtttaatcctattaccgaaaccacttactttctgttgcgaacctaaacttgatggcttggctgtgagtattttgtatgttaatggtgaacttacacaagccgccactcgtggtgatggcaccacaggcgaagatattacagccaatatccgcacgattcgtaatgttccattgcaacttttaacagataatcctccagcacgtttagaggtgcggggcgaagtttttatgccgcacgcaggctttgagcgtttaaataaatatgcgttagaacataatgaaaaaacctttgctaatcctcgcaatgcagcggcaggctctttacgccagcttgatcctaatattaccagcaaacgtccgctggtattaaatgcttatggtattggaattgctgagggggttgatctgccgactacgcattatgctcgtttgcaatggctaaaatctatcgggattccagtaaatcctgaaattcgtttatgcaatggtgcagatgaagttttaggtttttatcgagatattcaaaacaaacgtagctcgttaggttatgatattgacggaacggtattaaaaatcaatgatatagccttacaaaatgaactaggatttatttctaaagcacctcgctgggcgattgcttataaattccccgcccaagaagaattaaccctgttgaatgatgttgaattccaagtgggtcgaactggcgcaatcacaccagttgccaaattagagccagtgtttgttgcaggcgttacagtaagtaatgccaccttacataatggcgatgaaattgaacgtttaaatatcgctattggcgatactgttgttattcgtcgagcaggcgatgtaattccacaaattattggcgtattacacgaacgtcgccctgataatgctaaaccaatcattttcccaacaaattgccctgtgtgcgattctcaaattattcgtattgaaggcgaagcagtagcacgttgcacgggaggattattctgtgcggcacagcgtaaagaggcgttaaaacatttcgtctctcgtaaagcaatggatattgatggtgtaggcggaaaattaatagagcaattagtcgatcgagaactgattcatacacctgcggacttatttaaacttgatttaaccacgctcacacgcttagaaagaatgggtgcaaaatctgcagaaaacgctctcaatagtcttgaaaatgcaaaaagcacgacgcttgctcgctttatttttgctttaggcattcgtgaagtgggcgaagccactgcattaaatcttgctaatcatttcaaaactttagatgcgcttaaagacgcaaatcttgaagaacttcaacaagtgcctgatgtaggggaagttgtagcgaaccgaatttttatattttggcgtgaagcgcataatgttgcagtcgtggaggatttaatcgcacaaggtgtgcattgggaaactgtagaagtgaaagaagcaagtgaaaacttgttcaaagataaaactgtagtactgacaggcactcttacacaaatggggcgtaatgaagcaaaagccttattacaacagcttggtgcaaaagtaagtggttcggtatccagtaaaacagatttcgttatcgcaggtgatgcagcaggctctaaacttgcaaaagctcaagaactaaatattacagtactaacagaagaagaatttttagcacagataacaagataa

SEQ ID NO: 7082 - DNA, 951 bp, Haemophilus influenzae
  CDS (1)...(951)
atggcaatttatgcagacaattcttattctatcggaaatacgccgcttgtgcgtttaaaacactttggccataacggtaatgtggtggtaaaaattgaaggtcgtaacccaagctacagcgtaaaatgccgtattggggcgaatatggtgtggcaagcagaaaaagatggcacgctcacaaaagggaaagagattgtagatgcaacgagtggtaacacgggcattgctttggcttatgttgcggcggctagaggttataaaatcacgctcactatgccagaaacaatgagtcttgaaagaaaacgcttattgtgcggattgggtgtaaatttagtgcttaccgaaggcgcaaaaggaatgaaaggtgctattgcgaaagcagaagaaattgttgcttctgatccaagccgctatgtcatgcttaaacaatttgaaaatccagccaacccacaaattcatcgagaaacaacagggcctgaaatttggaaagatacggatggcaaagtcgatgttgttgttgctggcgtaggaacaggtggttcgattacgggcatttctcgcgcgattaaattagattttggtaaacaaatcacttctgttgccgttgagccagtggaatctccggtcattagtcaaactttagcgggtgaagaagtaaaaccaggcccacacaaaattcaaggtatcggtgcgggtttcattcccaaaaatttagatttatctattattgatcgcgtagaaactgttgatagtgataccgcacttgccacagctcgtcgcttaatggcggaagaaggaattcttgcaggtatttcatctggtgcagctgtcgcggctgcagatcgcttagctaaattaccagaatttgctgataaactcattgttgttattttgccttcagcgtctgaacgctacttaagcacagcactgtttgaagggattgagggataa

SEQ ID NO: 7083 - DNA, 1224 bp, Haemophilus influenzae
  CDS (1)...(1224)
atgacaaacaaagtaaacagttatggctggaaagccttaattggctctgccgtcggctatggaatggacggtttcgatcttctcattttaggtttcatgcttagtgcaatttccgcagacttaaatctaacacccgcccaaggtggctctctcgtaacttggactctgattggtgccgtatttggcggcattttatttggtgcattaagcgataaatacggtcgtgtacgcgtactgacttggactattcttctttttgcggtgtttactggtttatgtgcgattgcacaaggttattgggatttactgatttatcgcacaattgctggcattggcttaggcggtgaatttggaattgggatggctctagcagcggaagcatggcccgcacgccacagagctaaagcagcatcttatgttgcattaggttggcaagtcggtgtgttaggtgcagcattgcttacaccattattgctcccacatattggctggcgtggaatgttcttagtgggtatcttccctgcatttgtcgcttggttcttacgttctcatctgcacgaacctgaaattttcacgcaaaaacaaaccgcactttcaacgcaatccagctttactgataaattacgttcatttcagcttctgattaaagacaaagccacgagcaaaattagccttggtatcgtcgtactcacttctgtacaaaacttcggttattacggcattatgatttggttacctaatttcttatcaaaacaacttggattcagtttaactaaatctgggctttggacagccgttaccgtctgcggcatgatggctggaatttggattttcggacaactcgccgaccgcatcggacgcaaaccaagtttcttacttttccaattaggcgcagtgataagtattgtggtttactcacaacttaccgatcctgacatcatgcttcttgctggggcatttttaggtatgtttgtgaacggaatgctgggcggttacggtgcattgatggcggaagcctacccaacagaagctcgagcaacggcacaaaacgtacttttcaatattggtcgtgccgtagggggatttggacctgtagttgtgggctcagttgtacttgcttactctttccaaactgccatcgctctacttgcgattatctacgtaattgatatgttagcgacaattttcttaatccctgaattaaaaggtaaagccttagactaa

SEQ ID NO: 7084 - DNA, 972 bp, Haemophilus influenzae
  CDS (1)...(972)
atgaatcctttattagatgtaaaaaatctctacgttcgcttcaaaacaccagatggcgtcgttacagcagtgaatgacttaaacttcacgctgaatgcaggaagcacgctgggcatcgtaggcgaaagtggatcaggcaagtcacaaacagcctttgctttaatgggtttattggcagccaacggtgaagtggaaggctctgccatttttgaaggtaaagaattagttaatttaccgaatgctgaattgaataaaatccgcgccgagcaaatttccatgattttccaagatccaatgacgtcactcaacccatacatgaaaatcggtgaacaactcatggaagtgctgcaattgcacaagggctatgataaacaaactgcctttgctgaatccgtgaaaatgttagacgcagttaaaatgccagaagctaaaaaacgcatgggcatgtatccgcacgagttttctggcggtatgcgtcaacgggtgatgattgcgatggccttattatgccgtcccaaactactcattgcagatgaaccaacaaccgctttggatgtgaccgttcaagcacaaatcatgactttattaaatgaactaaaacgtgaatttaatactgcaattattatgattacccatgatcttggggtagtggctggtatctgcgatcaagtcatggtgatgtatgctggacgaaccatggaatacggcacagcggaacaaattttctatcatccaacccatccctattccataggcttaatggatgcgattcctcgcttagacggcaatgaagaacacttggtaaccattcctggcaatccaccgaatttattgcatttgccaaaaggttgtccattctcacctcgttgccaatttgctaccgaacaatgccaaattgcgccaaaactgactacatttaatcacggtcaattacgtaattgttggttatcagcggagaaatttaacctatga

SEQ ID NO: 7085 - DNA, 966 bp, Haemophilus influenzae
  CDS (1)...(966)
atgaatagcgaaaattccttttcttcatctgaacatattacagttttacttcacgaagccgtgaatggcttggcattgaaggagaatggcatttatattgatggtacttttgggcgtggggggcattctcggtttatcctttctcaactttcttctaatggtcgtttgatagctgtagatcgcgatcctcgtgctattgcagaagcacacaaaatccaagacttgcgttttcagattgaacataacagcttttcgcatattcctgaaatttgtgacaaattaaatttagtgggcaaaattgacggtattttgcttgatcttggtgtgtcttcccctcagcttgatgaagcagaacgtggttttagttttatgaaagatggcccgcttgatatgcgtatggatacaactcaaggtttatctgctgaagaatggttaaaacaagtgtccattgaggatttaacttgggtgttgaaaacttttggcgaagagcgtttcgctaaacgtattgccactgctattgttgatttcaataaaagtgcggtaaaaaatggcacagaatttttatcgcgtaccagtcaattggcggaacttatttcacaggcagttccttttaaagataaacataaacatcctgcgacgcgtagtttccaagctattcgtatttttattaattcggaattagatgaattagaaagtctgcttaattctgcgttagatatgttagcaccagaaggtcgtttatcaattattagtttccattctttagaagatagaatggtgaaacattttatgaaaaaacaaagtaagggcgaggatattcccaaaggtttaccattgcgagaagatcaaattcagcgtaatcaaaaattaagaattattggtaaagccattcagccaagtgatgcagaaattcaagccaatcctcgttcaagaagtgccatattacgtgtggcagagagaatttag

SEQ ID NO: 7086 - DNA, 1833 bp, Haemophilus influenzae
  CDS (1)...(1833)
atggtgaaatttaattcctcgcgtaaatcaggtaagtcaaaaaaaacaattagaaaattgaccgcacctgaaactgtaaagcaaaacaagcctcaaaaggtgtttgaaaaatgctttatgcgtggacgttatatgctttctacggttcttattttacttggcctgtgtgctttagtcgcacgagcagcttatgttcaatctattaatgccgatacgttatcgaatgaagcggataagcgttctttgcgtaaagatgaagtattatcggtgcgtggttctattttagatcgtaatggtcagcttttatctgtaagcgtgccgatgagcgcgattgtggcagatccaaaaacgatgttgaaggaaaattcgcttgcggataaagaacgaattgcagctttagccgaagaattaggtatgactgaaaatgatttagtgaaaaaaattgagaaaaattctaaatctggttatttgtatttagcacgtcaagttgaattaagtaaagctaactatattcgtagattaaaaattaagggtattattttagaaacagagcatcgccgtttttatcctcgtgtagaagaagctgcacacgtggtgggttatacggatattgatggaaatggtattgaaggcattgagaaaagttttaattccctgcttgttggtaaagacggttcacgtactgttcgtaaagataaacgtgggaatattgttgcacatatctccgatgagaaaaaatatgatgcacaagatgttaccttaagtatcgatgaaaaattgcaatctatggtgtatcgtgagattaaaaaggcggtgtctgagaataatgctgagtctggtactgcggtgttagttgatgttcgaacaggggaagtgttagctatggcgactgcgccctcttataatccaaacaaccgtgtcggcgtgaaatcagagttaatgcgtaaccgtgcaattaccgatacttttgagccaggttctacggtaaaacctttcgttgttttaaccgcacttcaacgaggtgtagttaaacgagatgaaattattgatactacgtcctttaaattaagcggtaaagaaattgtggacgttgcaccacgtgctcagcaaactttagacgagattttaatgaactctagtaaccgtggtgtaagtcgtcttgcattacgtatgccacctagtgcattaatggaaacttatcaaaatgcaggtttaagtaaaccgacagatttaggcttgatcggagagcaagttgggattttgaatgcaaatcgtaaacgctgggcagatattgagcgtgcaacagtcgcttatggttatggtattactgcgacacctttacaaattgctcgtgcctatgcaacccttggtagtttcggtgtttatcgtccgctttctatcactaaagttgatccgccagttattgggaaacgggttttctctgaaaaaataactaaagatattgtgggaattttagagaaagtagcaattaaaaataaacgcgcaatggtggaaggctaccgtgtcggcgtaaaaacaggtacggcacgtaagattgaaaatggacattatgtaaataagtatgtggcatttactgcgggtattgcaccaattagtgatcctcgttatgcattagtggttttgatcaatgatccaaaagcaggagaatattatggtggtgcggtttctgcccctgtattctctaacattatgggctatgcgttacgtgcaaatgctattccgcaagatgctgaagcagctgaaaacacaacaacgaaaagtgcaaaacgtattgtttatattggcgaacacaagaatcaaaaagtgaattaa

SEQ ID NO: 7087 - DNA, 1467 bp, Haemophilus influenzae
  CDS (1)...(1467)
atgaaaaaactcaccgcactttttaatttgcctgaattaaagaatgatatagaactccataatatggtgttagatagccgtaaggttaaagctggcgatctttttgtggcgataaaaggtcatcaggtggatggaaatcaatttattgattctgctcttcattctggtgcgagtgcggtggtttctgagacagaattatccagcgagcatttaactgtagcgtttatcgggaatgttcccgtagtgaaatattatcaacttgcacatcatctttcatctttggcggatgttttctatgattcgccctctaacaatttaacccttgttggtgtcacggggacaaatggcaaaaccactatttctcaattattagcgcaatgggcggaattattggggcatcgtgcggctgtgatgggaaccattggtaatggactttttgggcaaattgtagaagctaaaaatacgacaggttcagcagtagaaattcagtcatctctttcagctttcaaacacgcaggtgcagattttacctctattgaagtttcatcacacggtttggcgcagcatcgtgtagaagccttgcattttaaagcagcaattttcacgaatttaacccgtgatcatctagattatcatcaatctatggaaaattatgctgcagcgaagaaacgcttgttcactgaattagatacccaaattaaagtgattaatgctgatgatgaaattggataccaatggctaactgaactacctgatgctattgccgtaagtatgaatgcggattttaaagtaggttcacaccaatggatgaaagcaataaatatccattatcattttaaaggtgcagatattacttttgaatctagctggggtaatggtgttttgcatagcccattaattggtgcttttaatgtaagtaatttattattagtaatgaccacgttgttatcgtttggttacccattggaaaatttactcgctacggcgaaatctttaaaaggagtatgtggaagaatggaaatgattcaatatccaaataaaccaaccgttattgtagattatgcgcatacaccagatgcgttggaaaaagcgttgattgctgcgcgtgaacattgccaaggcgaattatggtgcatttttggttgtggcggagaccgtgatagaggcaaacgtccgttaatggcacaggttgcagagcagtttgctgaaaagattattgtgacaaaagataatccacgaacagaatcacaaagccaaattgaaacagatattgtcgctggctttaaaaatatggaaaaagtggggattattcctgatcgcgcacaggcgatccagtttgcgattgaaagtgcggtagaaaatgacgtgattttaattgctggaaaggggcacgagcattatcaaattattggttcggaagttgtgcatttttccgaccaagaaattgcacttgatttcttaaaataa

SEQ ID NO: 7088 - DNA, 1374 bp, Haemophilus influenzae
  CDS (1)...(1374)
atgattaaactctctactgtacaacttgcacagattcttcaagctaaattaattggcgatgaaaatgtgcaagttgaaaaaattaatacggatactcgaaaaagcgtatcaaatagcttattttttgctttaaaaggcgaaaaatttgatgctcatcaatatcttgatcaagcggtgtcacagggtgcgcttgcgcttgttgttcagcaagaaaattcatccatttctgttccacaattggtggttaaggatacccgtattgccttgggtgaacttgcaaaatggttacgtgagaaaattaatccacgtactgtggcgatgaccggctcttctggtaaaaccacggtaaaagaaatgacggcaagtattttgcaacataccgcagcggattcagaagcggtactttttaccaatggtaacttcaataacgatataggtgtgcctttaactctacttcgcttaacagaaaaacatcgttttgctgtgattgaacttggtgcaaatcatcaaaatgaaatcaattacaccacaaaattagttcaacctaatgccgcattgattaataatattgcgcccgcacatttagaggggtttggttctttagcgggggttgttcaagcaaaaggcgagatttatcgaggtttaacaaaaaatggtgtggcgattatcaatgctgaacataatcacttagatatttggcaaaaagaaatcagtaatcacgccattcaatatttcaacggtaaagattattctgcaaaaaatattcatcatacttctcaaggctccacttttacacttatttccccacaaggtgaaattgagattaccttaccttaccttggtgaacataatgtaaaaaatgccttggcagcgaccgcacttgcaatgaatgtcggtgccactcttacagatgtaaaagctggattagaacaacgttcacaagtgaaagggcgtttattccccattcaagtcacgcctaatttattgctgttagatgatacttataatgcgaataaagattctctgtgtgctgcgattgatgttttaaaaggttatgatgctttccgtattttgtgtgtcggtgatatgaaagagctaggcgaaaactctctcgctattcatcgtgaagttggacaatatattaatttggtaaatttagatttagtgtgttcttatggcaatgaaagtgcggttatttctgaggctgtttcgggtaagcattttacggataaaactgaaatggtggatttcttagttccacttattgaaaaccaattacaacaaaataaaaaagttgtggtgctaggaaaaggctcacgctcaatgaaaatggaagatgtgatctattcattaaaggataaaattaaatgttag

SEQ ID NO: 7089 - DNA, 1083 bp, Haemophilus influenzae
  CDS (1)...(1083)
atgttagtctggcttgctgaatatcttgttcgttacgaaaccgcgtttaatgctatttcttatattacagtccgcgcaaatcttgcattattaaccgcactttttatctcactttggattggccctaaagtgatcaaacgcttgcagatcttaaaatttggccaagaagtgcgaaatgatggccctgaaagtcactttgcaaaaaaaggcacacccactatgggtggtgtgatgattttattctctattggcgtaagtacgttattatgggcaaatcttgctaatccgtatatttgggtttgtttatttgttttatttggatacggcgcaattggttttgtggatgatttccgtaaaattacccgtaaaaatactgatggattgattgctcgttggaaatatttctggatgtctgtggtggcattagtggcaatcctttggctttattggcttggtcacgacactgatgccacccgtttagtgattccattctttaaagacattatgcctcaattaggtttgttctatattgtgttatcttactttgtgattgttggcacgggtaatgcagtgaatttaaccgacggtttagatggattagcgattatgcctactgcgcttgttgcaggtgcgtttgctttaattgcttgggctacaggtaacgtgaatttcgcagaatatttgcacattccgtatattaaatacagttctgaagtagtggtgttctgtacagctattgttggcgcgagtttgggattcttatggtttaatacttatccagctcaagtatttatgggggacgtgggttctctagcattaggtggtgcgctgggtgttgtagcaattcttgttcgtcaggaatttttgcttgtgataatgggtggtgtatttgttgttgaagcactctctgttattttgcaagtagggtcttataagttacgcaaacaacgcatttttagaatggcaccgattcaccaccattttgaattgaagggatggcctgagccaagagtgattattcggttttggattatttccttaatgctggtgttgatgggattggtcaccttgaagttgcgttaa

SEQ ID NO: 7090 - DNA, 1314 bp, Haemophilus influenzae
  CDS (1)...(1314)
atgaacgcctatcaaaacaaaaatattactatcatcgggcttggcaaaacaggtctttcttgtgtggattatctcttatcccaacaggctaatattcgtgtgattgatactcgaaaaaatcctactggtattgataaacttcctcaaaatatccctcttcatactggtagtttaaatcaggaatggttacttgaaagcgatatgattgttattagcccagggcttgcggtaaaaacaccagaaattcaaaccgcacttaaagcgggagtggaagtaatcggcgatattgaattattctgccgcgcagcgacaaagccaattgtggggattacaggttcaaatggtaaaagtaccgtaactactttagtttatgaaatggcgaaagctgctggtgtgaaagttggtatgggcggaaatattgggattcccgctttgtcattgttgaatgaagattgtgaactttatgtactagagctttctagttttcagcttgagacaacttatagcttaaaagctgcggcagcgactgtcttgaacgtgactgaagatcatatggatcgctatatggatttagaagattatcgccaagcaaaattacgcatttatcataatgctaaagtaggtgtgttgaacaatgaagataggctgacttttggggaaaacgaaaatcaagcgaaacataccgtttcttttgcggaaaatagtgcggattattggctaaaaactgaaaatggcaagcaatatttaatggtaaaagatgaagtgattttaccttgtgaagaagctacattggttggtcgccataattatatgaacattttggcagcaacagcattggcacaagctataggtattaatttagattcaattcgtaccgcacttcgtcatttcaaagggttagatcatcgttttcaattagtgcatcaagctaatggcattcgttggattaatgactctaaagcaacaaatgtggggagtacagttgctgcattggctgggctttatattgagggtaaattgcatttgttgctaggcggagacggaaaaggggctgatttttcagaattagctgaattaattaatcaaccacacattatttgttattgttttggtcgagatggtgcgctgcttgcaaaattttcatcgcaaagttatttgttcgatacaatggaacaagcgatagaatttttacgcccaacattgcaaagcggagatatggtattattgtcgcctgcttgtgcaagtctcgatcagtttgcttcttttgaaaagcgcggcgaagaatttacgcatttagctcaatgtttaacctaa

SEQ ID NO: 7091 - DNA, 1185 bp, Haemophilus influenzae
  CDS (1)...(1185)
atggaatttttacaaaatatcaaaaaaaattacgatgaatggacacgcatcacacctcaaggtttgttgtatgatcgcgcactattttggttatttgttattttgcttttaattggtttagtggcagtaacatctgcttctattccttatagctctcgtttatttaatgatcctttttactttgcaaaacgcgacgctatttatgtgctactttctttactcacttgttatatttcattacaaatttcttcttcgcaatgggaaaaatggcacgctaaaatttttttattttctgtcatattattattgcttgtcccttttatcggtacatcggttaatggcgcaaaacgttggatttcgttgggaatcttaaactttcaacctgcagaatttgcaaaattggctttgacttgttttttagcaagttatttcactcgtcgttatgatgaagtgcggtcgcgacatgttagtatttttaaaccgtttattgttatgcttgtattgggttgttttcttttattgcaacctgatttaggtagtacagtcgtgctatttattattatgtctgggatgctttttatcgtaggggcgaaaattttacagtttgtaggattgatagcattaggtggaatcttattcgtttggctagtattgaccgcctcttatcggttaaagcgatttataggttttttagaaccctttaaagaaccttatggcactggtttccaattaacaaactctcttatagcatttgggcggggagaaattactggcgaaggattaggtaattcaattcaaaaattagactatctgcctgaagcacataccgatttcattatggcgattatcggcgaagaatttggatttatcggtatattgattgttattcttttattaggtttattaatttttcgtgcaatgaaaattggacgagaatccttaatgttagaacaacgttttcgaggtttttttgcattaggtattggtttttggattttctttcaaggctttgtgaatttaggtatggctcttggaatgctaccaactaaaggtttaacctttccactcgtgagttatggtggttcgagtattatcattatgtccgccactattggtattttattgcgaattgatcacgaaaatcgtttatttcgtataggtcaagcacgcttgcgtgatgattag

SEQ ID NO: 7092 - DNA, 1056 bp, Haemophilus influenzae
  CDS (1)...(1056)
atgaaaaataaaaaattattagtgatggcgggtggtactggcggtcatgtttttcctgccattgcagttgctcaaactttacaaaaacaagaatgggatatttgctggttaggtacgaaagatagaatggaggctcaacttgtaccaaaatatggtattcctattcgatttattcaaatttctggtttgcgtggtaaaggtataaaagctttgttaaatgcgccttttgccatttttcgtgcggtgttgcaggcaaaaaaaattattcaagaagaaaagcctgacgctgtacttggtatgggaggctatgtttctggccccgctggcgttgcggcaaaactttgtggtgtaccaatcattttacatgaacaaaatgcgatagcgggtttaacgaataagttattaggtaaaattgcaacctgtgtattacaggcatttccaactgcttttcctcatgctgaagtagtaggaaacccagttcgagaagatttatttgagatgccaaatcctgatattcgtttttcggatcgtgaggaaaaattacgtgtcttagtggttggtggtagtcaaggagcgagagtgcttaatcatactttacctaaagtagtcgcccagcttgcagataaattagagtttcgtcatcaagtaggtaaaggtgcggtagaagaagtcagccaactttatggcgagaatttagaacaagttaaaataacagaatttattgataatatggcagaggcttatgcttgggctgatgtggttatttgccgttctggcgcattaaccgtatgtgaaattgcagcagtgggagccgcagcaatttttgtaccattccaacataaagatcgccaacaatatttaaatgcgaaatatttatcagatgttggcgcggcgaaaattatagaacaggcagatttaacgcctgaaattctagtgaattatttaaaaaatttaactcgtgaaaatttattgcagatggcattgaaagcgaaaacaatgtcgatgcctaatgcggcacaacgtgtagctgaagtaattaaacaatattcaaactag

SEQ ID NO: 7093 - DNA, 1428 bp, Haemophilus influenzae
  CDS (1)...(1428)
atgaaacattcccacgaagaaattagaaaaattatccctgaaatgcgccgtgtacagcaaattcatttcattggcattggtggtgcgggaatgagcggcattgcagaaattttattaaatgaaggttatcaaatttcaggttcagatattgccgatggcgtagtcactcaacgtttagctcaagctggggcaaaaatctacattggtcatgcagaagaacatattgaaggtgccagtgttgttgttgtgtctagtgcgataaaagatgataaccctgaattagttacatcgaaacaaaaacgcattccagtgattcaacgcgcacaaatgttggcggagattatgcgttttcgtcacggtattgctgttgcaggaacacacgggaaaacgacaacaacagcaatgatttcaatgatttacacccaagctaaacttgatccgacttttgtaaatggcggtttagtgaaatcggcgggtaagaatgcacatttaggagcaagtcgttatttaattgccgaagccgatgaaagtgatgcgtcgtttttgcatttacagccaatggtatctgttgtaactaatatggagccagaccatatggatacttacgaaggcgattttgaaaaaatgaaagccacttatgtgaaattcctgcataatttacccttctatggtttagccgtgatgtgcgctgatgatcctgttttaatggaacttgtgccaaaagttggtcgccaagtgattacatatggttttagtgaacaggcagattatcgcattgaagattatgaacaaacaggttttcaaggtcattacacggtgatttgcccaaataatgaacgtattaatgtgttgctcaatgttcctggaaaacataatgcattaaatgcaacggctgcacttgctgtagcaaaagaagagggtattgctaacgaggcaattttagaagctctggctgattttcagggggctggtcgtcgttttgatcagctaggcgaatttattcgtccaaatggtaaagtgcgtttagttgatgattatggtcatcatccaacagaagtaggcgtaaccattaaagcggcgcgagaaggctggggagataaacgtattgtaatgattttccaaccgcatcgttattctcgcactcgtgatttgtttgatgattttgtacaagtgctttcgcaagtagacgctttgattatgcttgatgtgtacgcagcgggagaagcccctattgttggcgctgacagtaaatctctttgccgttccattcgtaatcttggtaaagttgatcctattttggtatcagatacttcgcaactaggcgatgttctcgatcaaattattcaagatggcgatttgattttggcacaaggtgctggtagcgtaagtaaaatttctcgtggcttggctgaatcttggaagaattaa

SEQ ID NO: 7094 - DNA, 921 bp, Haemophilus influenzae
  CDS (1)...(921)
atgaacttaaaacaagaaaaaatcgcggtgttattaggcggcacatctgctgaacgtgaagtttctctcaattcaggcaaagcggtattagaagcattattaaagcaaggttataatgcacatcctattgatcctaaagaatataatgttgcaaatcttaaaaaggatggctttaatcgagcatttaatattttgcacggtcgtggtggagaagatggcacaatgcaaggtttattagagcaaattggtttgccttatacgggttgtggcgtgatggcttctgcattaacgatggacaaaatgcgtacaaaaatgttgtggaaagcttttggtttacctgttgcagatatgaaagtggttacccgagaaactttttctgaattggatcctcaggctgttgtggcaaaattaggcttaccattaatggttaaaccctctttagaaggctctagcgttggcttaacgaaagtaaaagcggtagaagagttaaaaagtgcggtggaatatgcgcttaaatttgataataccattctaattgaagagtggttagctggcgatgaattaactgtgcctgtgcttgacaatcaagtattacccgcaattcgtattgttccagagggcgaattttatgattatgaagcgaagtatatttctgataatacgcaatatttctgcccagcaggtttaacgcctgaacgcgagcaagcgttatcaacattagtaaaacgtgcttatgatgcagtgggatgtcgtggttggagtcgtattgatgtaatgtgtgatgcaaaaggtaatttccgtttggttgaggttaatactaatcctggaatgacgagccatagtttattcccaaaatctgcagcgacagtaggtatttcttttgagcaactcgtcgtgaaaattttggagctgagcctgtaa

SEQ ID NO: 7095 - DNA, 1266 bp, Haemophilus influenzae
  CDS (1)...(1266)
atgctatacccagagtaccctgagtacgataattttaacgaatccggcgcactgatcaaagtcgtaggtgtaggcggtggcggtggcaatgccgtaaaccatatggtaatgaatatggtaaaacaagaaatgggcggaacctttgttggcgaaagttcattaacatcagaggaacacggtcgcatagtattttatgccgtcaatactgatgctcaagcattgcgtaaaagtcaagttcaacagaccgtacaaattggtggagaaacaaccaaaggtttaggtgctggggcaaatccgaatattggtcgtaaggcagctgaagatgatcaggatgaaatccgcaaaatgcttgaaggtgccgatatggtctttattgcagcaggtatgggcggcggcacaggtacgggtgcggcacctgttgttgctaaaattgctaaagaactcggtattttgactgttgctgtagtgactaaaccttttacctttgaaggcaaaaaacgtatgcaatttgcagagcttggtattaaagatttatcccaatatgttgattcaatgattattattccgaatcaacaaatccaaaaagttctccctaaaaatgctaaattaattgatgcttttgctgctgcaaacgacgtattgcgtaattctgtaatgggaatttcagatatgattacctctcctggtttaattaacgtggacttcgctgatgtaagaacggtaatgtcagttcaagggcaagctatgattggttttggttcagctgtgggagaacccggtgcaggtagagcagaagaggcagctcgtcttgcagtacgcaatgatcttctagaaaaaatcgatctttctaacgctcaaggaattttagttaatattactgctggaatggatttagtttttgaagagtttaacattataggtgagacaataggtagttttgcttctgaagaagctacagttgttgttggtacgagtttagtgcctgagatgagcgatgaaattcgtgtaactattgtggcaactggtctcggtgaaattgcaggaaatgaaccaattcaggttgttcgtcaagggctttctacgcagaatattgaaggtgaaggacgtgtaaacattgttcctgaacttcatcgtcgtgaatctgttgaagtgtcaagaactgcatcagaagaatatcaacggccgttagataaaccgattacagatcgcttggaagcatttaagaaaaataatttctttaatcctgcacagcgtgaagaaaattaa

SEQ ID NO: 7096 - DNA, 870 bp, Haemophilus influenzae
  CDS (1)...(870)
gtggggaaacttatggaaattatcattattagtggacgttctggcgcaggaaaatctgtagccttacgagcattagaagatgccggatattattgtgttgataatattcctctggatttacttcctcaattgactgatattctatctcaatcccaatcatctgtcgccatcagtcttgatattcgtaatattccaaactccgctcattctcttaagcaaaccctttcaacattacaaaagcatcatcagattaaaatcattttcttagaggctgatcgtgccaccctgattcgccgatatagcgattcacgccgtttgcacccgctttcattaaaagatttatctcttgaagccgcaattgatgaagaatatcgctatcttgaaccattgattcaacacgcaaatcttattcttgataccacccatctttctacgcatagtcttgcagagcgattacgcgaatttttacgcggtaatagtgaaaaagaattaaaaattattgttgaatcttttggttttaaatatgggattcctttagatgcggattatgttttcgatgtacgatttttacctaacccccattgggatccaacattacgcccaatgactggattagaagcccctgtcgcagaatttctaaatagtcatacagaagtcaatgaatttatttatctcactcgtcattacattgatacttggttgccgatgttagaaaaaaataaccgtagctatttgacgattgccatcggatgtactgggggaaaacatcgctccgtttatattgcccagcaattaggcgaatattttcaagccaaaggaaaaacggtgaaaattcaacataaatctttagaacggaacaaaaaaatataa

SEQ ID NO: 7097 - DNA, 726 bp, Haemophilus influenzae
  CDS (1)...(726)
atgtcaattttgactgcagagaatttagctaaaagctacaaaagtcgtaaagttgtttcggatgttagtttaaccgtaaattctaatgaaattgttggtttactcgggccaaacggtgcaggtaaaacaacaactttctatatggtcgttgggcttgttcgccaagatcaaggtaaaattgttattgatggcgaagatattagtttgctcccaatgcataatcgtgcgcaacgtggcattggttatttaccgcaagaagcctcgatttttcgccgtttgactgtctatgaaaatttgatggcggtattggaaattcgtaaagatttaaccccacaacaacgtcgcgaaaaagcagatgaattaattgaagaatttaacattagtcatattcgagataatttagggcaagccttatcaggcggagaacgtcgccgtgtagaaatcgcacgtgccttagcagcaaatccaaaatttattctattagacgaaccttttgctggtgtagatcctatttctgtgagcgatattaagaaaattattactgatttgcgcaatcgtggattaggtgtattaattactgaccataatgttcgtgaaacccttgatgtttgcgaacgcgcttatattgttggcgcaggtaaaattatcgcaacaggcacaccagaacaagtgatgaacgatgaacaggttaaacgcgtttatcttggcgaacaattcaaattataa

SEQ ID NO: 7098 - DNA, 537 bp, Haemophilus influenzae
  CDS (1)...(537)
atggcaaaacgtaagaaaaaagaagttttcgattgggaagatgaagatcaagaagaaattatttgggtgagtaaaagcgaaatcaaacgcgatgcggaagatttaaaacaacttggcgaaaagattgtcaatttaaccaaagctaatcttgccaaaatcccacttgatgaatccttacttgatgccattgaacttgcacagcgtttacaaaaagaagctcgccgccgtcaattacagtatatcggcaaattatttcgaggaattgatgttgagcccattcgtgaagccttagataaaattgaaaataagcataaccaacaacaagctatgctacataaaatcgaaaaagtgcgggatgaattggtggaaaaaggcgatgtggctttaacagatttattaaatgattatcctaatggcgatcgtcagcaactacgcaatctgattcgttctgcacaaaaagaactggagcaaaataaaccatcgaaagcctatcgagaaatttatcaaatgctcaaggtattaatgttggaagattaa

SEQ ID NO: 7099 - DNA, 1155 bp, Haemophilus influenzae
  CDS (1)...(1155)
atgtctagttatttatttacatctgaatcagtctctgaagggcatccagataaaattgccgatcaaatttctgatgcggtacttgatgaaatcctaaaacaagatccaaaagcacgagtagcttgtgaaacttacgtaaaaactggtatggcattggttggtggtgaaattacaacatcagcatgggttgatattgagaatttaacccgtaaagtgatttgtgatattggttatgaacattctgaaatgggctttgatggtcattcttgtgcagtgcttaatgcgattggtaaacaatctgcagatattaatcaaggcgttgatcgtgaaaatccattagatcaaggcgcaggcgaccaaggtattatgtttggttatgccaccaatgaaacggatgtattaatgcctgcagccattacttatgcacatcgtttaatggaaaaacaatctgaagtgcgtaaaagcggtaaattagcatggttacgcccagatgcgaaaagccaagttactttaaaatatgaagataataaaattgttggtgtggatgcggttgtgctttctactcaacattctgaagaagttagccaaaaagatttacatgaaggtgtgatggaagaaattatcaaacctgtgttaccaagtgaatggctttctaaagaaacaaaattcttcattaacccgactggtcgttttgttatcggtgggccaatgggcgattgtggtttaactggccgtaaaatcatcgtggatacttacggtggtgccgctcgtcacggtggtggcgcattctcaggaaaagaaccatctaaagttgaccgttctgcggcttatgctgcacgttatgtcgcaaaaaatattgtggcagcaggtttagcagatcgttgtgaaatccaactttcttatgcgattggtgtggctgaaccaacatctatcatggtcgaaacctttggaactggaaaagttgcgaatgaattattagtgtcattagttcgtgagttttttgatttacgtccttatggcttaattaaaatgttagatttaatccaaccaatctatcgtgaaacggcagcttatggtcatttcggtcgtgaacaattcccttgggaaaaagtggatcgcgcagaagatttacgtattgcggcaggtttaaaataa

SEQ ID NO: 7100 - DNA, 684 bp, Haemophilus influenzae
  CDS (1)...(684)
atgtttcaagaatatttaagcgtgatcgtaaaagggattccaacgagtttgttgcttactgtcgtatccttactgattgctttctttttagccttatttcttacttttttactttcaatggaaaataaatggataaaaagtgcggtcaatttataccttactttattcacaggcacgccactgttagtacagttctttttaatttatgcaggacccggtcaattccaatggattattgacagcccattatggtatgtcttatccaatgcgtggttctgtgctgcattagctttagcactaaacagtgcagcctattccacccaattatttcacggtgcagtgaaagccattcccaaaggacaatgggaaagttgtggcgcattaggattaaaccgcatacaaactttaaaaattttaattccttatgccttaaaacgtgcgttgccttcttacagtaacgaaattattttggtatttaaaggcacggcattagcatccaccattacgattatggatattatgggttacgcacgccaactctatggtacagaatatgatgcactcacaatttacggcattgcgggtggtatctatttaattatcacaggcattgcaacattattactacgtaaattagagaaaaaagtattggcatttgaacgttttgaagtaagcaaagcataa

SEQ ID NO: 7101 - DNA, 984 bp, Haemophilus influenzae
  CDS (1)...(984)
atgacgaatgaagtaaaagaaaatacgccattattaaatgccattggcttaaaaaaatattaccctgtaaaaaaaggcttgtttgcaaaaccacagcaagtaaaagcgttggatggtgtctcttttcagcttgaacgaggtaaaactttagcagtcgtgggggaatctggttgtggaaaatcaacgctaggtcgtttattgacaatgattgaagaaccaaccaaaggcgaactttattacaaagggcataattttttagaaaatgattctgaaacaaaagcactacgtcgtaaaaaaattcaaatagtttttcaaaatccttacgcatcgttaaatccacgcaaaaagattggttcaattttggaagaaccattaatcatcaatacaaaactttccgccaaagaacgtcgagaaaaagttttatcgatgatggaaaaagtgggcttgcgcgctgaattttatgatcgttatcctcacatgttctcaggcggacaacgccaacgtattgccatcgctcgtggtttaatgttagatccagatgttgtcgttgccgatgagcctgtttctgcattggatgtttccgtgcgtgcacaagtactgaatttaatgatggatttacaagatgaattaggcttgtcttacgtgttcatttcacacgatctttctgtggtagaacatatcgctgatgaagtgatggtaatgtatctaggtcgttgtattgaaaaagggacgacagagcagattttttctaatcctcagcatccttataccaaagcgttactttcagcgacaccacgtttgtcgccaaacttgcgccgtgagcgtattaagctgacaggcgaattaccaagcccgattaatcctccaaaaggctgtgcatttaatcctcgttgttggaaagcgacagaaaaatgtcgtgaaaatcaaccgcacttggagcaacatactgatggaaaattaatcgcttgtttccatattgattaa

SEQ ID NO: 7102 - DNA, 2184 bp, Haemophilus influenzae
  CDS (1)...(2184)
atgatggatatttctgaattacttgacggactcaacgataaacaacgcgaacgcgtagctgctcctcttggtaatcacttagtgctagctggtgcaggctcgggcaaaacgcgtgtattgacgcaccgtattgcttggttaattgcggtcgaaaatatttctgaaggcagcattatggcggtgacgtttaccaataaagccgcagcagaaatgcgtcatcgtattcaatctacccttgccaaacacgcacaacatcaattatttggtatgtggattggcaccttccatagcattgctcatcgtttgttgcgagctcatcatttagatgtgggattgccacaagatttccaaattttagattcagaagatcaacttcgtttaattaaacgattattaaaattacataattttgatgaaaaagcttttccgcctaaacaggcttgttggtacatcaataacaaaaaagatgaaggcttgcgaccaaatgatattgaagattttaatgatcgccaagaacgtgaatggattaaaatttatcagatctatcaagacacttgcgatcgcgcagggttggtcgattttgctgaattattaattcgggtctatgaattatttgagaaaaaaccattaattttgcaacgttatcaacaacgttttcagcatattttggtggatgaatttcaagacaccaataaaatccaatataaatggatcaaaattcttgctggaaaaacaggccaagtcatgattgtgggcgatgatgatcaatctatatacggttggcgtggtgcacaaatagaaaatatccaaaaattcttgaaagatttcaaagccgaaacaattcgccttgaacaaaactatcgttctaccgccaatatcctaaacagcgcaaatgaattaattgcaaacaatagtgatcgtcttggtaaaaatttatggacagagggtgagaaaggcgatcctgtgggcatctattctgcctttaatgaattagatgaagcaaaatttgtcgcttcacaaattcaggattgggtagaacatggcggaaaacttgatgattgcgctgtactttatcgtagtaatagccaatcacgggttattgaagaagctttaattcgttgtcaaattccataccgtatttatggcggtatgcgtttcttcgaacgtcaagaaattaaagatgcgttagcctatcttcgtttgattaataatcgtcaagatgatgcggcttttgagcgtgtaattaatacgccaacccgtggcattggcgaccgcactttagatatattgcgtaacttaacacgcgaacgccaaattaccttatggcaagcagtacaagtcgcaacacaagaaaatatgttggcagggcgagcctcaacagccttattacgtttccaagaattaattaattcactacaacttgataccgcagaaatgccgcttttcgcacaaactgattttgtgattaaacattcgggcttatatgaaatgtatcaacaagaaaaaggcgaaaaaggcgaagtgcgtattgaaaacttggaagaattagttaccgcaacccgtgaatttatcaaacctgataatgcggaagaaatgaccgaactcactgcctttttaacgcacgcttccttagaagctggcgaagaacaagcctcgccgcatcaatcttgtgtagaaatgatgacgttgcactctgcgaaaggcttagaatttcctcgtgtatttatggtgggcgtagaagaaggattattcccaagttttcgttcttttgaagaacccggacgtttagaagaagagcgtcgtttagcttatgtcggtattactcgcgcgaagaaaaaactgaccatctcttatgcggaaagccgtcgattatatgccaaagaagaacgccatttgccatcacggtttatcgcagaattaccgagagaatgtatccaagaaattcgtttacgagggacagtcactcgtgcgatgaacctagcaaaagtcggttcattgtcgaataccagtgcggtcgaaaatgaatggaaaatgggtcaaaaagttaaacacgaaaaatttggtttcggcacagtgattaatgtggaaggttctgaaaataacacacgtttacaaatagcattccaagcgcaaggcattaaatggttgattgcgcatttggcaaaattggaaaaagtgcggtag

SEQ ID NO: 7103 - DNA, 906 bp, Haemophilus influenzae
  CDS (1)...(906)
  misc_feature (1)...(906): n = A,T,C or G
atggaaatacttatgtataaacgtttgccaccattgaattcactaaaatcttttgagtcggctgctcgttatttaagttttactaaagcagcagatgagctttgtgttacacaggcggcggttagtcatcaaattaaattattagaagantttttagggattgatttatttaagcgaaagaatcgttctttagaattaacggagcttggtaaagcttattttgttgatattaataaaattctgcgtcgcttaaatgaagcaacagagcgattattaacgttaaaaacggatccgcatttaaatattagcgtgccacaaacttttggtatccaatggttagtgccacatttaagtgaatttaatcagctttatccgcaaattgaggttcgtttaacaggcgtggatcaagatgaaggtttgttaaataaagaaattgatcttgccatttattatggtttgggaaattggcagaatcttcaagtagatcgtctttgcgaagaaaatttattgattttagcctcacctgaattgctagcagaaaatccaattattcagcctgaagatttaaaaaaacacacattaattcacattcatacctgtgataattggcaagcgatggcaaatcatttacagttagatgatttaaatattcagcaaggaccgttatttagccatacatttatggcgttacaggcggctattcacgggcaaggcattgtattagctaatcgcttattagccttgcaagaaattgaaaatggatcattgcaagcagtgttgccgactaatttgcctgatccaaaatcattttatgtggtcaatcatcttgatcgccttgatgaccaaaaaattcaagcattccgtcagtggattattaactcaattaaacaagaagaaaatgaataa

SEQ ID NO: 7104 - DNA, 882 bp, Haemophilus influenzae
  CDS (1)...(882)
atggcgattttaattgataaaaataccaaagtgatttgccaaggttttactggtggacaagggacttttcattctgaacaagcattggcctacggaacgcaattagttggtggcgtatcgccaaataaaggtggaaccactcatcttggtttacctgtatttaatacagttcgtgaagctgtcgaaaatacgggggtaacagcgacagtcatttatgtgccagcatcattttgtaaagatgccataattgaagctattgatgcagggattcagttaattgtctgtattactgagggtattcctacattggatatgcttaaagtgaaacagaaattaaatgaaacgggcgtagtaatgattgggccaaattgcccaggtgtgattacgcctgatgaatgtaaaatcggcattatgcccgctcacatacataaaaaaggtaaagtggggattgtttctcgttctggaactttaacttatgaagcggtaaaacaaactacagatgaaggctttggacaatcgacttgtgtgggtatcgggggagatcctattccaggttctagttttattgatattcttgaaagatttcaacaagatcccgaaacagaagccattgtgatgattggcgagattggcggctctgcagaggaagaagcagcaatcttcattaaagataatgtcactaaaccagtggttgcgtatattgcgggtatcactgcgccaaaaggaaaacggatggggcatgcgggagccattattagcggcggaaaaggtactgcagtagaaaaaattgcagcgttagaagccgctggtgtgacctgtgtaaaaagcctcgctgaaattggtgaagccttgagaaagctattaaaatcatctaaaaattaa

SEQ ID NO: 7105 - DNA, 1074 bp, Haemophilus influenzae
  CDS (1)...(1074)
atgaaacctagtcaaaaacaaactcaaagacaaccgcacttttccaaagattcagcaaagaaacgtgatttttcagctaaaaatgacagacgttcagtatctcgtactgctcgcatagaaacagcaaatacgaaaaaaagtgcggttaattctgacaacaaatttttatctaagccaaaagcgaaacctgttgtaagagcctcgaatcaaccgaaagcagagggcgaaaaattacagaaagttttagcgcgtgctggacaaggctctcgtcgtgaaattgaaacgatgattgccgcaggcagagtgagcgtagagggtaaaattgcgactttgggcgatcgtattgacgtacattctggcgtgaaagtgcgtattgatggtcaaatcattaatcttagccacacacaaaaagaaatttgccgtgtattaatgtattacaaacctgaaggcgaactttgtacacgtagcgacccagaagggcgcgcgaccgtgtttgatcgtttgccgcgtttaacaggctctcgttggattgcggtggggcgtttagatattaatacatcgggtttattgctttttaccactgatggcgaattagcaaatcgtttaatgcacccaagccgtgaagttgaacgtgaatattctgtgcgtgtatttggtcaagttgatgatgcgatgttagcacgtttacgtaaaggcgttcagcttgaagatggccttgccaactttaaagaaattaaatttacaggcggtgtgggtattaaccaatggtatgacgtaaccttgatggagggacgtaaccgtgaggttcgtcgtttgtgggaatcccaagggattcaagttagccgcttgattcgtattcgttatggaaatatcaaactgatgaaaggtttgcctcgtggtggctgggaagaaatggatcttgaaaacgtcaattatttacgtgaattggtgggattacctgctgagactgaaacgaaattagatgtaaaacaggctagtcgtcgtccaaaatctgggcaaattcgtaaagcggtaaaacgttattcggagatgaacaaacgttataaaaaataa

SEQ ID NO: 7106 - DNA, 2136 bp, Haemophilus influenzae
  CDS (1)...(2136)
atgtctcgcacgattattcttatccctgtaagtacaggcgtgggtttaactagcattagtcttggattaatccactctctcgaacaaaaaggcacaaaagttgcttttatgaaaccagtttctcaaccaagcactggcgaagataaattggatcgcacaacttctattattcgcactagcactagccttgaaactgccgaaccttttatgttaagcgtggcagaatcattaattggtcaaaatcagtctgacgtattgttagaaaaaattgtagctaaccaccaacaattaaccaaaaataatgacatcgttgtagttgaaggcttaatacctacaagaaaacacggttacgcaaacagtatcaactatgaaattgcacaagcattagatgcggaaattgtattagttgcagcacctgcaactgaaacgccaaccgaattaaaagatcgcgtagaagctgcagcctctctatttggtggtaaaaacaatccaaatcttttaggtgttgttgtaaacaaattcaatgcacctgttgatgaatcaggtcgtactcgtccagatcttgctgaaatttttgattcattccaacacaatcatattagcgaaacagaagtaaacaagttatttgcaggtagtgccatcaagttattagcttgtgtgccttggaatgcaaatttaatcgcgacacgagcaatcgacttagtcaaacatttaggtgcatcaatcattaatgaaggagaaatcaatcgccgtattcgtggtatcactttctgtgcaagaagtttaccaaatatggtagaacatttccgtgcaggcagcttattagtcgcttcagcagatcgtccagatgtgcttgtagcagccgctcttgcagcatcaaatggtattgaaatcggcggtattttattaacaggcggctacaaaattgatgctcaaattaataaactttgccgtccaacttttgaaaaagcgaaattaccgatcttccgtattgaaggcaatacttggcaaactgcattaagtttacaaagttttaatcttgaagtgcctgttgatgacaaagaacgtattgaaaatattaaacaatacattagccagcactttaatgctgactttatcaataatttagttgcagattccagccgtttacctcgcttatccccacctgcattccgtttccaattaactgaacttgctcgtgcggcgaaaaaacgtattgtgcttcctgaaggcgatgaacctcgtacaatcaaagcagccgtactttgtgcagaacgtggcattgcggaatgtgtgcttttagcagatcctgcatccgttcaacgagttgcagaagcacaaggtgttaaattaggtaaaggcattacaatcatcaatcctgctgacgttcgtgaaaactatgttgatcgtttagttgaattacgtaaagcaaaaggtatgaccgaaactgcggctcgtgaacaattagaagacaccgtagtacttggtaccatgatgttagaagcaaatgaagtagatggtttagtatctggcgctgtccacaccactgcaaacaccattcgcccaccaatgcaaatcatcaaaactgcaccaggtagttctattgtttcttcgatcttctttatgttattaccagatcaagtgcttgtttatggtgactgtgcggtaaacccagatccaactgcagaacaacttgctgaaattgcaattcaatctgcggattctgctaaagcatttggtattgatccaaaagtcgcgatgatttcttactcaacaggtacatctggtagcggtgctgatgtagaaaaagtgaaagaagcaactcgtattgcgaaagaaaaacgccctgatttattaatcgatggcccattacaatacgatgcggcagtgatggaagatgtggctcgctctaaagcaccaaattcaccagtagcaggtaaggcaacggtatttgtattccctgacttaaatacgggtaacacgacttacaaagcagtacaacgttctgcagatttagtgtctattggcccaatgcttcaaggtatgcgcaaaccagtcaatgacttatctcgtggtgccttagttgatgatattgtgtacacaattgccttaaccgcaattcaagcaacacaataa

SEQ ID NO: 7107 - DNA, 891 bp, Haemophilus influenzae
  CDS (1)...(891)
atgaatattctattaacgggaggaacaggacttatcggcaaagcacttgtcgaacgactctgtttacgcaatgaacaagtgacgatcttaacgcgctcaagttcgccgcacactctctcaaagcacaaaaacatcaaatttattaccgcactttcccaacttaattcacaagaacagtttgatgccatcatcaatcttgctggcgagccaatttttcataaagtttggtcgaaaaaccagaaatctattttacgagaaagtcgtttaagcctcaccactcaactggttgaattcattaatcaatatcagcaacacccaatttttatatcaggttcagcaacaggaatttacggcgatcaagacgaacaaaaaattaccgaaacaagcaaaacagcaaaaaccttcactgcacaattatgccaagattgggaaaatattgcgcaacaagctaatgggagggtttgtttgattagaacaggcatggtcttttctacaaaaggtggcgcacttgctaaaatattgcctttctacaaatggggacttggcggtaaactgggcaagggagagcaatatttcccttggattgctttggaagatatggtaaacggcattttatttttactcgatcattcagaatgcagaggagcgtttaacttcgctgcccccaagtctataaaacagcataaatttaaccgcactttagctcaactattaaaacgtcctgcctttgcaaccattccaaaatggctattacattttattcttggcgagcgagcaaatctattactcgaaagtcaaaatgttgtacctgaaaaattacttaacgctggattccaatttcaatatgctgattgcgaaaactatctagaagacatcctaaaaaacaaataa

SEQ ID NO: 7108 - DNA, 1509 bp, Haemophilus influenzae
  CDS (1)...(1509)
atgtcagaacaagaagttaaagaattagatctcaatggcgaaatgctcgtccgtcgtgaaaaattagccgcattacgtgcaaaaggtaatgcctttccaaataagtttcgtcgtgatgctctcgcacaagatttgcacaatcaatatgatgcagaagacggggaaatcttaaaagaaaaaggcattgaagtacaagttgctggtcgtattatgactcgccgtgcaatgggtaaagcaacttttatcactattcaagatatgagcggtaaaatccaactttatgttgcacgcgataatttgcctgaaggtgtttataaagatgacgttggtacttgggatttaggtgatatcgttggcattaaaggcactttatttaaaacaaaaactgatgaactcaccgttaaaactacggaagttcaacttttaaccaaagcacttcgcccattaccagacaaattccatggtttaaccgaccaagaagttcgttatcgccaacgttatttagatttaatttctaacgaagaatctcgccgcacttttattattcgttctaaagttgtcgcgggtattcgtgaatatttcatttctaaaggctttatggaagtggaaacgccaatgttacaagtgattccaggcggtgcatctgcgcgtcctttcgtgactcatcacaatgcattagatgtggatatgtatttacgtatcgcacctgaactttatttaaaacgcttagtcgttggtgggtttgaacgagtatttgaattaaaccgtaacttccgtaatgaaggggtttctgttcgtcataatccagaatttactatgcttgaatactatcaagcatatgcggactaccatgatttaatggataacaccgaagaacttcttcgtaaattagcgattgatattcttggtacaaccattgtgaaatacggtgatttagaatttgacttcggcaaaccatttgagcgtattacattacatgatgcaaccattaaatatggtgcagataaaggtatcgtaaaagaagatctttatgacttcgatcgtgcaaaagcaactgctgaacgcttaggtattgaagtacaaaaatcttggggtttaggcagcattgtcaatgcaatctttgaagaagtggctgaacatcacttaattcaaccaacctttcttaatggctcacctgcggaaatttcgccacttgcacgtcgtaatgatgaaaaccctgaagtgactgaccgttttgaattattcatcggcggacgtgaaattggtaacggtttctcagaattaaatgacgcggaagatcaaaatgaacgctttgatgcacaagtggctgcgaaagaagcgggcgatgatgaagcgatgtttaaagatgaagactttgttgttgcactagaacacggcttaccaccaacagctggggaaggtttaggtatcgaccgtctagcgatgctttatgcaaatgcaccgtcaattcgtgatgttatcttattccctgcaatgcgtcagaaataa

SEQ ID NO: 7109 - DNA, 1650 bp, Haemophilus influenzae
  CDS (1)...(1650)
  misc_feature (1)...(1650): n = A,T,C or G
atgtcagaatcttttgctcaactttttgaagaatcattaaaagtccttgaaactcgtcaaggttcaatcgttagcggtactgtagtagctatccaaaaaggctttgtgcttgttgatgcaggtttaaaatctgagtctgcaattccagttgctgaattcttaaatgcacaaggcgaacttgaaatccaagttggcgatactgtaaatgttgcattagatgcagttgaagatggtttcggtgaaactaaactttctcgtgagaaagcggttcgtcacgaatcttggattgaattagaaaaagcttacgaagaaaaagcgaccgttatcggtttaatcancggcaaagtgaaaggtggcttcacagttgagttaaacggtgttcgtgcattcttaccaggttctttagttgatactcgtccagcgcgtgaagcagatcacttacttggtaaagaattagaattcaaagtaatcaaattagatcaaaaacgtaacaacgttgttgtttctcgtcgtgcagtaattgaatctgaaaacagccaagaacgtgaacaagtattagaaaatcttgtggaaggntcagaagttaaaggtgtcgttaaaaacttaactgagtacggtgcattcgttgatcttggtggtgttgatggtttattacacatcacagatatggcttggaaacgtgttaaacacccaagtgaaatcgtaaatgttggcgatgaagttactgttaaagtattaaaattcgataaagatcgtactcgtgtatctttaggcttaaaacaattaggtcaagatccatgggcagcaattgctgaaaatcatccagtaaacagcaaattaacaggtaaagtaactaacttaactgactatggctgtttcgttgaaatcttagatggcgttgaaggtttagttcacgtttctgaaatggattggactaataaaaatatccacccatctaaagtggttagcttaggcgatactgtagaagtaatggtattagaaattgatgaagaacgtcgtcgtatttctttaggcttaaaacaatgtaaagctaacccttggactcagtttgctgatactcacaacaaaggcgataaagtaacgggtaaaatcaagtctatcactgatttcggtatcttcatcggtcttgaaggtggtatcgatggtttagttcacttatctgatatttcttggagtatttcaggcgaagaagctgttcgtcaatacaaaaaaggtgacgaagtttcagctgttgtattagctgttgatgcagtaaaagaacgtatctctttaggtattaaacaacttgaagaagatccattcaataactttgtcgcaatcaacaaaaaaggtgcggtagtatctgcaactgttgttgaagcagatgctaaaggtgctaaagttgaattagcaggtggtgttgaaggttatatccgttctgctgatttaacaagtgaagtagctgttggtgatgtcgttgaagcgaaatacactggagtagatcgtaaatctcgcattgttcacttatcagtgaaagcaaaagatcaagctgaagaagctgcggcagttgcaagtgtaaataacaaacaagaagatattgttattccaaatgcaatggctgaagcatttaaagcagctaaaggtgaataa

SEQ ID NO: 7110 - DNA, 627 bp, Haemophilus influenzae
  CDS (1)...(627)
atgaaactggttgaagtaaaacatccacttgtaaaacacaaactaggtgtgatgcgtgaagctgagattgatacaaaaaaattccgtgaacttgcaacagaaatcggtagcctattaacctatgaagcaacctctgatttagaaactgaaaaagtaacgatcaacggttggaatgggccagtagaaatcgatcgaattaaaggtaaaaaagtaacggttgtgccaattttgcgtgcaggtttaggaatgatggatggtgtacttgaacacgtaccaagcgcacgcatcagcgtagtggggatctaccgtaatgaagaaacccttgaaccagttccttacttccaaaaattagctagcgatttagaagagcgactttcaattgttgtcgatccgatgcttgcaacgggcggctctatgattgccacccttgatcttttaaaagcaaaaggttgtaaacatatcaaagtattagtgttagtcgctgcaccagaaggaattaaagctcttgaggctgcacaccctgacattgaactttactgcgcttctattgatagccatttaaatgaacaaggttacattattcccggtcttggtgacgcgggcgataaaatttttgggacaaaataa

SEQ ID NO: 7111 - DNA, 1437 bp, Haemophilus influenzae
  CDS (1)...(1437)
atgagtaaagaaattaaaacccaagtcgttgtacttggtgcaggtcctgcaggttattcagccgcattccgttgtgcggatttaggattagaaactgttattgttgagcgttattcaaccttaggtggggtgtgtttaaacgtaggttgtattccatctaaagcgttattacacgttgcaaaagtaattgaagaagcaaagcatgctaataaaaatggtatttattttagtgaaccacgcattgagctagatgaagtacgtgcaggtaaagaagctgttgttgctaaattaactggcggtttagcgggaatggcaaaagcacgtaaagtgactgttgttgaaggtttagcgacttttaccgattctcacacattagttgcgcgtgatcgcgatggaaaccctacgactgttaaattcgacaatgccattattgcggcaggttctcgtccagttcaattaccctttatcccacacgaagatcctcgtatttgggattcaacagatgcgctcaaattaaaagaagtaccgaaaaaactacttattatgggcggtggtatcatcggtttagaaatgggtactgtatacaatgctttaggttctgaagttgaagttgttgaaatgttcgaccaagtgattcctgcagcagataaagatgttgttggtatttacactaaacaagttgagaaaaaattcaagttaatgcttgaaaccaaagtgactgcagttgaagcaaaagatgatggtatctacgtttcaatggaaggcaaagcatgtaatgataccaaacgttatgatgcagtgcttgttgctatcggtcgtgtgccaaatggtaaattaattgatgcaggtaaagcaggtgttgaagtggatgatcgtggttttattcacgttgataaacaaatgcgtaccaacgtgccacatatctacgcaattggggatattgtaggtcagccaatgttagcacataaaggtgttcacgaaggtcacgttgccgcagaagtcattgcaggacaaaaacactacttcgatcctaaagtaattccatcaatcgcttataccgaaccagaagtggcgtgggtaggtaaaactgagaaagaatgtaaacaagaaggcttaaactacgaagtggctaaattcccttgggctgcatcaggccgcgcgattgcatctgaatgttcagaaggtatgacgaagttaatctttgataaagatacacatcgtgtacttggcggtgcaatagtgggttctaacggtggtgaattattaggcgaaatcggtcttgccattgaaatgggttgcgatgcagaagatattgcattaactatccacgctcacccaactttacacgagtctgttggcttagctgcggaagtatttgaaggctcaattactgaccttccaaatgcaaaagcgaaggaaaaaataatttctatttaa

SEQ ID NO: 7112 - DNA, 1908 bp, Haemophilus influenzae
  CDS (1)...(1908)
atgggaaaaattattggtattgacttaggtacaacaaactcttgtgtagctgtaatggacggcgataaagcgcgcgttattgaaaatgcagaaggggcacgtactactccgtcaatcattgcatatacagataatgaaaccttagttggtcagccagcaaaacgtcaagcaatcactaacccaaaaaatacattgtttgcgattaaacgtttaattggtcgtcgttttgaaagtgaagaagttcaacgcgatattaaaattatgcctttcgaaattactcgtgccgacaatggcgatgcttgggtaaacgtgaaaggtgataaattagccccaccgcaaatttcagcagaagtgttgaaaaaaatgaaaaaaactgcagaagatttcttgggtgaatctgtaactgaagcagtaattactgtgcctgcatacttcaacgacgcacaacgtcaagcaacgattgatgcaggtaaaatcgcaggtttagatgttaaacgtatcattaatgaaccaacagcggctgcgttagcgtttggtttaggttcaagcaaagagaaccaagtgatcgctgtttacgacttaggtggtggtacatttgatatttcaatcatcgaaattgataactttgatggcgaacaaactttcgaagtattggcaaccggtggtaacactcacttaggtggtgaagactttgataaccgtgtaattgattacattattgatgagttcaaaaaagaacaaaatatcgatttacgtaatgatgcaatggcattacaacgtgtgaaagaagctgcagagaaagcaaaaattgaactgtcatcagcgcaatctaccgaagtaaacttaccttacatcacggcagatgcgacaggccctaaacacttagcattaaatatcactcgtgcaaaattagaagcattagtagaagatttagtggcaagctcaattgagtctttgaaagcggtattaaaagatgcagataaaggtgtaagcgaaatccacgatattattcttgtgggtggccaaactcgtatgccacttgtacaacaaaaagttgctgagttctttggtaaagaagcacgtaaagatgtgaaccctgatgaagcggtggcaatcggcgcggcagttcaaggtggtgtattaaaaggcgatgtgaaagatgttcttttattagacgtaactccattatctttaggtatcgaaaccatgggcggtgtgatgaccactttaattgagaaaaataccacgattccaactaaaaaatcgcaagtattctcaacagcagaagataaccaaagtgcggtaactattcacgttcttcaaggcgaacgtaaacgtgcggcagacaataaatctttaggtcaattcaacctagaaggtattaatcctgcgccgcgtggtatgccacaaattgaagtaacatttgatatcgatgcaaacggcgtaatcaacgtatcagcaaaagataaaaatacgggtaaagagcaacaaattcgtattcaagcatcatctggtttatctgatgaagaaattcaacaaatggtgcgtgatgcagaagcaaatgctgatgcagaccgtaaatttgaagaagttgttcaagctcgtaaccaagcagatggtattgctcacgcaacacgtaaacaaattgcagaagctggcgatgcattgagtgtcgcagacaaagagaaaattgaagctgcagtcgctgagcttgaaacagcagcaaaaggcgaagataaagcagaaattgaagcgaaaattgaagcagtaattaaagcctctgaaccattaatgcaagcagtgcaagcaaaagctcaacaagctggtggcgagcaaccacaacaatcatcagcaaaagatgatggcgtggtagatgctgaatttgaagaagtgaaagataataaataa

SEQ ID NO: 7113 - DNA, 699 bp, Haemophilus influenzae
  CDS (1)...(699)
atgagattagataaatttattgctgaaaatgtgggattaactcgttctcaagcaacaaaagcgatccgccaaagtgcggtaaaaatcaacggtgaaattgtcaaaagtggttcggttcaaatttcacaagaagacgaaatttattttgaagatgaattattaacttggatcgaagaaggccagtattttatgttgaataaaccacaaggctgtgtttgttctaatgatgacggcgactatccaacaatttatcaattttttgattaccctttagctggaaaattacatagcgcaggtcgcttagatgtggatacgacaggtctcgtattgcttaccgatgatggacaatggtcacatcgcatcacttccccaaagcatcattgtgaaaaaacctatttggtgacattagctgatcccgtagaagaaaattattcagcagcttgtgcagaaggcattttattacgcggagaaaaagagcccactaaaccagcaaaattagaaattttagatgactacaatgtgaatctgaccatttctgaaggtcgttatcatcaagtaaaacgtatgtttgccgcacttgggaataaagtcgttggattacatcgctggaaaattggtgatgtagtgttggatgaatccttagaagaaggcgaataccgcccattaactcaaagtgaaattgaaaagttagtaaaataa

SEQ ID NO: 7114 - DNA, 3441 bp, Haemophilus influenzae
  CDS (1)...(3441)
atgaaaacggcttttttccaacctgatattccaacccaacccaatgatcacaaaattttaggcaatgtattaccaggagctgatgcattggcgattagtgaaatttcagagcaaaatcaaaatttaaccgtagtggtaacaccagatacacgaagtgcggtgcgtttatcacgtgttttatcggaattaagcagccaagatgtatgcctttttcctgattgggaaaccttaccttacgatactttttctccccatcaagaaattatttcctctcgtttaagtgcgcttttccatttacaaaatgcgaaaaaaggcattttcttattgccaatttcgacattaatgcaacgcctttgcccgccacaatatttacaacacaatgtgcttctgattaaaaaaggcgatcgtttggtcatcgataaaatgcgcttacaattagaagcagcgggctatcgtgctgtggagcaagtattagaacacggcgagtacgcagttcgtggtgctttgttggatcttttcccaatgggaagtgcggtgccttttcgccttgatttttttgatgatgaaattgattctattcgcacttttgatgtggatacgcaacgcactcttgatgaaattagctcaattaatcttttgccggctcacgaatttccaacggatgataaagggattgaattttttcgtgcgcaatttcgtgaaacttttggggagattcgccgagatcccgaacatatttatcagcaaatcagtaaaggtaccttgatttctggcattgaatattggcagccacttttctttgctgaaatggcgactttgtttgattatttgccggagcaaacgctgtttgtagatatggaaaataatcaaacgcaaggcgagcgtttttatcaagatgcaaaacagcgttatgaacaacgtaaagtggatccgatgcgtccgcttttatcgcctgaaaaattatggctcaatgttgatgaagttaatcgccgattgaaatcttatccgcgcattacatttaaagcggaaaaagtgcggtcatcggtacgccagaaaaatttacctgttgccgctctaccagaagtgactattcaatcccagcaaaaagaaccattgggacaattacgtcaatttattgagcattttaaaggaaatgtactgttttcggtggagacggaaggtcgccgagagactttgcttgatttgctttcaccgttaaaactcaagccaaaacaaattcaatctttagaacagattgaaaatgaaaaatttagcttgttagtcagctctcttgaacaaggttttataattgaacaatcgcttcctgttgcgattattggcgaagctaatttacttggcaagcgcattcaacaacgttctagagacaaacgtaaaacaattaatcctgatacgcttgtacgaaatcttgccgaactgaaaatagggcagccagttgtgcatcttgatcacggtgtggggcgttatggcggtttggtcaccttagatacaggtggcattaaagcagaatatttgctactaaattatgcaaatgaatcaaaactttatgtgccagtgacttcattacatttgattagccgttatgttggtggttctgatgaaagtgcaccattacataaattagggaacgaggcttgggcgaaatcacgccaaaaagcagcggagaaaattcgtgatgtggcggcagagttattagatgtttacgcacaacgtgaagcgaagaaaggctttgcctttaaatatgatcgtgaagaatttcaacaattttccgcaacctttccttttgaagaaacctacgatcaggaaatggcaattaatgcggtaatttcggatatgtgtcagcctaaggcaatggatcgccttgtttgtggtgatgtgggttttggtaaaactgaagtggcaatgcgcgctgcctttttggctgtgatgaatcataagcaagtagcagtgctagtgccaaccacactgttagcccaacagcattatgagaattttaaagatcgttttgcgaatttgcctgtgaatgtcgaagtgttatcgcgtttcaaaactgcaaaagaacaaaaacaaattctggaaaaccttgcagaaggcaaagtcgatatactgattggtacccataaattaattcaatcagatgtaaaatttaacgatcttggattgttgattattgatgaagaacatcgttttggtgtagggcaaaaagagaaaatcaaacagcttcgtgcgaatatcgatattcttacgctaacggcaacgccaattcctcgaacgcttaatatggcgatgaatggcattcgtgatctttccattatttccacacctcctgctcgccgattaagtattaaaaccttcgtccgtcagaatgacgatcttgttgtacgagaagcgattttgcgtgaaattctccgaggtgggcaggtttattatctccacaatgatgtcgcgagcattgaaaatacagcagaaaaactgaccgcacttgtgccagaagcgcgagtaattgtaggccacggacaaatgcgagaacgtgaattagagcgcgtgatgagtgatttttatcatcagcgttataacgtcttagtttgttcaaccattatcgaaacgggtattgatgtaccaacggcaaataccattattattgaacgagcggatcattttggtttggctcagttgcatcaattacgtggacgagtcgggcgttcacatcatcaggcttatgcttatttgcttacgccaccgccaaagatgatgacaaaagatgctgaacgccgtctagatgcgttggaaaatcttgataatcttggggctggttttatcttggcaacccacgatttagagattcgtggtgctggtgaattacttggaaacgaacaaagtggacaaattgaaagcatcggtttttcactttatatggaattattggatgcagcggttaaagcgttaaaagaagggcgagaaccatcattagaagaattgacgcaacaacaagcggatattgaattgcgtgtgcctgctttactgcctgatgattatctaggcgacgtgaatatgcgtttatccttttataaacgcattgctgcagcagagagtaaagcagaattagatgaattaaaagttgagttgattgacagatttggattattgcctgatgcaacgaaaaatttattacaaattacagagttgcgtttattggttgagccgttgaacgttgtgcgaattgatgctggaacacaaggcggttttattgagttttcagcaaaagcacaagtgaatccagataaatttattcaattaattcaaaaagaacctattgtgtatcgatttgatggcccattcaaatttaagtttatgaaagatctatccgataacaaagtgcggttagaatttgtggtggatttgttaagaacgattgctgcataa

SEQ ID NO: 7115 - DNA, 891 bp, Haemophilus influenzae
  CDS (1)...(891)
atgagctggattaaccgaatttttagtaaaagtccttcttcttccactcgaaaagccaatgtgccagaaggcgtatggacaaaatgtactgcttgtgaacaagtactttatagtgaagaactcaaacgtaatctgtatgtttgcccgaaatgtggtcatcatatgcgtattgatgctcgtgagcgtttattaaatttattggacgaagattcaagccaagaaattgcggcagatttagaaccaaaagatattttaaaattcaaagatttaaagaaatataaagatcgtatcaatgcggcgcaaaaagaaacgggcgagaaagatgcgctaattactatgacaggtacactttataatatgccaatcgttgtggctgcatcgaactttgcttttatgggcggttcaatgggttctgtagttggtgcaaaatttgttaaagcggctgaaaaagcgatggaaatgaattgtccatttgtgtgtttctctgcgagtggtggtgctcgtatgcaggaagcattattctctttaatgcaaatggcaaaaactagtgccgtacttgctcaaatgcgtgaaaagggtgtgccatttatttcagtattaacggatccgactttaggcggcgtatcagccagttttgcgatgttaggggatttaaatattgccgagccaaaagccttaattggttttgcagggccacgcgttattgaacaaactgtgcgtgaaaaattgccagaaggtttccaacgtagtgagtttctacttgagaaaggggcaattgatatgatcgtgaaacgttcagaaatgcgtcaaactttagcaagtgtactgagtaaattaacgaatcaaccttctccttttgtagaacctgaactcatttcagaagatgaataa

SEQ ID NO: 7116 - DNA, 2643 bp, Haemophilus influenzae
  CDS (1)...(2643)
atgacggattcaatccaatcatctatcacccctgtcaatatcgaagaagaacttaaatcttcctaccttgactacgcgatgtcggttatcgttgggcgtgcattacctgacgttcgagatggtttaaaacctgttcaccgccgcgtactattctcaatggatcgcgaaggcaataccgccaataaaaaatacgtaaaatcagcgcgtgttgtgggtgatgtaatcggtaaatatcacccgcatggtgactccgccgtgtacgataccatcgttcgtatggcacaacccttctcacttcgctatatgttggttgatgggcaaggtaactttggttcaattgatggtgatgcgccagctgcaatgcgttataccgaagtacgtatgcaaaaaattacgcaagcattgctcacggatttggataaagaaaccgtcaatttctcgccaaactatgatggcgaattaatgattccagatgtattgccgactcgtattccagcactgttagcaaatggttcttctggtattgcggtggggatggcaactaacattccccctcacaacttaaacgaagtattaaatggttgtttggcttatattgacaaaaatgaaattaccattgatgaattaatgcaacatattccagggcctgacttcccaacggctgcgttaattaatggtcgtaaagggattgaagaggcctatcgcactggtcgtggtaaagtgtatgttcgtgctcgtgcaacggtagaaaccaacgaaaaaggacgcgagcaaattatcgtgtctgaattgccataccaagtaaataaagcaaaattagtcgagaaaatcgccgaattaattcgcgagaaaaaaatcgaaggtatcagcaatattactgacctttcaaataaagaagggatccgtattgaaattgatattaaacgtgatgcagtgggggaagtggtattaaaccatctttactcactcactcaaatgcaagtgacctttggtatcaatatggtggcattggatcacggtcagccacgtttatttaatcttaaagaaattattgaagcctttgttttacaccgccgtgaagtggttacacgtcgttctatctttgagcttcgcaaagcacgtgaacgtacgcatattttggaaggtttagcggttgctcgttctaatatcgatgaaatgattgcgatcattcgtaactctaaaaaccgtgaagaagccgcaacatcaatcagttcacgctcttggacgttacatagcgatattattaatcttcttgatgcttctgctcgtcctgatgagttagaagaaaatcttggtattcaaggcgaacaatattacttatcgccagcgcaagtaaacgcaattctagaacttcgcttacaccgtttaacgggcattgcgtttgaagaagttataaaagaatatgaagaattattagttaaaattgcggatcttcttcatattttaagtagtgcagaacgtttaatggaagtaattcgtgaagaattggaagaagtaaaagcacaatttggtgatgatcgtttaactgaaattaccgctgcttctggcgatattgatttagaagatttaatcgcacaagaagacgtggttgtgacgctttctcacgaaggttatgtgaaataccaaccactgactgactatgaagcacaacgccgtggcggtaaaggcaaatctgcaacgaagatgaaagaagaagatttcatcgaaaaattactggtagcaaatactcacgataccatcctctgcttctctagccgtggtcgtttatattggttgaaagtatatcaacttccgcaagcgagccgtggcgcacgcggtcgtccaattgtgaatattcttccgttacaagaaaacgaacgtattactgcaatcttgccagtttctgcttacgaagaagataaattcgtagtcatggcaactgctggcggtattgtgaagaaaatcgccttaaccgaatttagccgtccacgttcaaacggtatcatcgcattgaatttacgtgacgaagatgaattaatcggcgtggatattactgatggcagcaacgaaattatgttgttctcatcacaaggtcgcgtggtgcgttttgctgaaaatgccgtgcgtgcgatggggcgtttagcaacaggtgttcgcggtatcaaactggctttaacaaacgatatttctgacgatgaaagtgcggtagaaattgaagatatttctgatgacaacgctgaagcatcattagacttaaatatcgataaagtggtctcgctcgttgtgccaaaaggtgaaggggcaattttaaccgcaacgcaaaacggctacggaaaacgcacacaattaagtgaatacccaactaaatcacgtaatacaaaaggtgtgatttcgattaaagtgagtgaacgcaatggtaaagtcgttgccgcaactcaagtagaagaaacagaccaaattatgttgatcactgatgcaggaacccttgttcgcacacgcgtaagcgaagtgagcattgtagggcgtaacacgcaaggtgttcgcttaattcgtactgccgatgatgaacacgtagtaagtttagaacgtgtttgtgatgcagatgaagatgattctttggaagaaagcagttctgaagaataa

SEQ ID NO: 7117 - DNA, 2049 bp, Haemophilus influenzae
  CDS (1)...(2049)
atgacaactcaaccccgtaaaattttagtcacttgcgccttgccttatgccaatggggcaattcatttaggccatatgttagaacatatccaagcggatatttgggtgcgttttcaacgtatgcgtggcaataaaatccattttgtctgtgcggacgatgcgcacggcacgccgattatgttgaatgctgataaacttggcattacacctgaagaattaattgccaaagcaaaagccgatcacattcgtgattttgcaggttttaatattagttttgataactatcattccactcacagcgaagaaaacaaacagctcaccgcagaaatttacaataaactcaaagccaatggttttattaagagtaaagttatttctcagttattcgaccctgaaaaaaatatgttcttgcctgatcgttttgtgaaaggcacttgcccgaaatgcaaagcagaagatcaatatggcgataactgcgaagtgtgtgcttctacttatagcccaatggatttaattaatcctcgttcagctgtttctggcacaacacctatcgtaaaagaatctgaacactttttctttgacttgcctgcatttgaagggatgttaaaagaatggactcgttctggctcacttcaatctgaaattgccaacaaaatgcaagaatggtttgagagcgatttacaacaatgggatatttcacgtgatgcaccttatttcggttttgaaattcccggcgcaaaagataaattcttctatgtttggttagatgcgccaatcggctacatggcttcattcaaaaatctatgcaatcgtgaaggcattgatttcaatgaattttgggctgaaggcagtgatgcagagctttatcatttcatcggtaaagacatcgtttatttccacagcctattctggcctgcaatgcttgaaggcagtggctaccgtaaaccgactaatgtgttcgctcatggctatgtcactgtggatggggcgaagatgtcaaaatctcgcggcacattcattcaagccagcacttatttgaatcatatcgatcctgaatgtttgcgttattactatgcagcaaaattaaatgatcgcattgaagatttagactttaaccttgaagatttcgtacaacgtgtcaatacggatattgtaaacaaattagtgaatttagcttcacgcaatgcgggctttattgcgaaacgctttgaaggcaaacttgcggataaactggaagacaaatcattatttgcagaatttaccgcccaagccgagcaaatcgctgcttattacgaaagccgtgaatacaataaaaccattcgtgagattatggcattaacagataaagccaataaatacattgatgaaaaagccccttgggtgattgcaaaagaagaaggcaaagaggcagaattgcaagccgtatgttcaatgggtattgagcttttccgcgtattgatgtcttacttaaaacctgttcttccaaaactagcagaacgtgcagaaaccttcttacaagctgaattacgttgggataatattcatcaaccattacttggtcatacccttgcaccgtttaaagccttattctctcgtttagagaaaaaacaaattgatgccgttgtggaagaaactaaagccttatttgcagcagccaataaagccgcagaaaaaactgaagcaaaaccaaccgcactttctgccgttgaacctattgctgaaaccatcacgattgatgatttcgctaaacttgatatgcgtgtagcaaaagtattgaaatgcgaagcggtgccagaatccaataaacttttacgttttgaattagatcttggtgatcatactcgccaagtcttctctggcattaaagcggcttacaataaacctgaagaattagaaggtcgttttgtgattatggtggcaaaccttgcaccacgtaaaatgaaattcggcgtgtctgagggaatgattctatccgcaggaacaggcggtagtgacttattcttactttctgctgatagcggtgtcactgcgggcatgcaagtaaaataa

SEQ ID NO: 7118 - DNA, 1488 bp, Haemophilus influenzae
  CDS (1)...(1488)
atgagtaaagaaattttactggcggcggaagctgtatccaatgaaaaattattaccacgtgagaaaatttttgaagcattagagagtgcgattgcgatttctactaagaagaagtttgaatatgaaacggatattcgcgtttcaattaatcccaaaacaggagaatttgatacttttcgccgttggttagtcgtagatgaagtaaaagtaccaacgaaggaaattactttggaagcggcgcaatttgatgatccaaatttgcaacttggagagtatgtagaagatcaaattgaatctattgcatttgaccgtattgcaatgcaaacggcacgtcaagttattagcactaaaattcgtgaagccgaacgtgcaaaagtggttgaacaatttcgtgaagaagaaggaaaaattgtaacaggcactgtaaaaaaagtaagtcgagacagtattattttagatcttggcaataaagcggaagcgatgattgcgcgtgaagatatgttaccacgtgaaaacttccgtccgggagatcgtgttcgtggggtactttataaagtaaatcctgaaggcaaaactgcacaattatttgtgacacgttctaaaccagaaatgttgatcgaattattccgtattgaagtgcctgaaattggcgaagaaatgattgaaattcgtggtgcagctcgtgatgctggctctcgcgctaaaattgcagtgaaatcaaatgataagcgaattgatcctgttggtgcttgtgtaggaatgcgtggtgcgcgtgttcaggtaattacgaatgaacttggtggcgagcgtgtagatatcgtgctttgggatgacaatcccgcgcaatttgtgattaatgcgatggcaccagcggatgtttcttctattatcgttgatgaagataatcattctatggatattgctgttgaagctgataatcttgctcaagccattggtcgtaatggtcaaaacgtgcgtttagcaacacaattaacgggttggacactaaacgtaatgacgactgatgagttaaatgctaagcatcaagcagaagataacaaagtgttaaatttatttattaacgcattagaacttgatgaagaatttgctcaaatccttgtggaagaaggcttcacaagtttagaagaaattgcttatgtgccaatgaatgaattgacagcaattgatggtttggaagatgaagatcttgttgaagagcttcaaactcgtgctaaaaatgcgattacagccgcagcagtagctgaagaagaagcactgaaaaaagcgaatgttgaagatcgtttattgaatttagagggaatgaatcgtcacgttgcaatcaaactagcagaaaaacaaattaccacccttgaagaactcgcagaacaaggcgttgatgatttaactgatattgaagaattaaccgcagaacaggccgcagatttaattatggctgcacgtaatatttgttggtttggcgaagaataa

SEQ ID NO: 7119 - DNA, 2490 bp, Haemophilus influenzae
  CDS (1)...(2490)
atgactgaagatgttaaggctgatgcgccaaaaaaattaagcattcagcgcagaacaaaaacaacagtgagcagcaccacaactggcggtaaaagcaaagaagtacaagtagaagtacgtaaaaaacgcacagtaaaaactgatattgctcaacaagaagaagcaaaattaaaagcacagcaagaagcggaagcgaaaaaaattgctgaacaaaaagcagcagaagaaaaagctcgtttagaagctgaaaaagcaaaagctgaaactgctaagccagtaaaaagtgcggtagattctaaagctaaatctgttgagtctgaaaaagagaaacgtaaagcaggagaagcagaacttcgtcgtaaagctgaagaattagctcgtcaaaaagcagaagaacaagctcgtcgtgcagtagaagaagcgaaacgttatgctgaagcagatgattcagacaatgaatcttcttcagaagactattctgattacaatctaagttcaagatatgcacttgaagcagaagatgaagaagatcgtcgtaatgaaaatcgtggtcgtggcaaaaataaagtagcgaaagcgaaaaaaggcggtcgcgacgatgaaaatagcaaaaactcgaaaaacgagcgcgaatctaatcgtaaaaatcaaaaagacgctaagtttggtaaaggtaaaaatggcaaaaaaggtgccgcacttcaacaagcctttactaaacctgctcaagtagttaaatcggatgtagtcattggagaaaccattacggttgcagaacttgcgaataagatggcggtaaaagctacagagatcatcaaaatgatgatgaagatgggcgaaatggttactatcaaccaagttatcgaccaagaaaccgctcaattagtagcagaagaacttggtcataaagtgattcttcgtaatgaaaatgagcttgaagaagcggtattaggcgatcgtgatgtaaacgcagaaaaagtaacccgtgcgccagttgtaaccatcatgggtcacgttgatcatggtaaaacctctttacttgactatattcgtaaagcgaaagttgctgcaggcgaagcgggtggtattactcaacatatcggtgcgtatcacgtagaaatggatgatggcaaaatgatcaccttcttggatactccaggacacgcagcgtttacttctatgcgtgcacgtggtgcaaaagcaacagatatcgttgttcttgttgttgcggccgatgatggtgtgatgcctcaaactatcgaagcgattcaacacgcaaaagcagcgggtgcacctttagtggttgcagtaaataaaatcgataaaccagaagcaaatctagatcgtgttgagcaagaattattacaacatgatgtcatttctgagaaattcggtggtgatgtgcaattcgttccagtatcggcgaagaaaggtacaggggttgatgatttattagatgcaatcttacttcaatctgaagtgcttgaattgaccgctgtaaaagacggcatggcaagtggtgtagtcattgaatcttacttggataaaggtcgtggccctgtggcaactatcttggttcaatcaggtacactacgtaaaggtgacatcgtactttgtggttttgaatatggccgtgtgcgcgcaatgcgtgatgaaaacgggaaagaagtggatgaagcaggtccttcaattccagttgaattattaggtctttcaggcgtgcctgcagcgggtgatgaagcaactgttgtgcgtgatgagaaaaaagcacgtgaagtggcgttatatcgtcaaggtaaattccgtgaagtgaaattagctcgtcagcaaaaagcgaaacttgaaaatatgtttagcaatatgtctgaaggcgatgtggctgaattgaacgttattgtgaaagcggatgtacaaggctctgtagaggcgattgttcaagcgttaaatgaactttctaccaatgaagtaaaagttaaagttgttggttcaggtgtaggtggtattactgaaactgatgcaactttagctaccgcatctaatgccatcattgttggctttaatgttcgagcggatgcaacagctcgtcgtgtcattgaagctgaaaacattgatttacgctactactcaattatttatgaattgttgaatgaaattaaagcagcaatgagcggtatgttagagcctgaatttaaacaagaaattattggcttagctgaagttcgtgatgtattccgtcatccgaaatttggtgcaatcgcaggctgtatggtaactgagggtgtagtgaaacgtaacaacccaatccgtgtattacgtgacaacgtcgttatatttgaaggggaattagaatctcttcgccgtttcaaagacgacgtatctgaagttcgtaacggtatggaatgtggtatcggcgtgaaaaactacaatgatgtaaaagtcggcgaccaaattgaggtatttgaagtggttgaagttaaacgttcaatctaa

SEQ ID NO: 7120 - DNA, 3168 bp, Haemophilus influenzae
  CDS (1)...(3168)
atgctcaacgaaaatgacatcgaacaacttacccttcaacgcctgcaatccctcggttgggaatatcgctacggtaaagacttgcctgttcatgagggcaagtttgcccgtggcgatttgagcggcgtagtctttgttgagcaactgcgtgaggcggtgcgtaaacttaatcctcagcttcctgaaagtgcggtggattctgtagtgaaatcggcaacgaaaagcgatattggcgacttggttgtgcgtaatcagacgttttataaactgctgcgtgatggcgtgcgggtcgaatatacgcaaaacggcgaacagaaaattgagatggtgcgtttggtggatttcgagcattggggaaacaaccgctttgttgccgtcaatcaattggaaatccgcagccgcaaaggaggtaaacggattcccgatattatcggctttgtaaatggtctgccgttggtggtatttgagctcaaaaatccgttgcgtgaatcggcggatttgttgcaggcgtttaatcaatttgaaacctataaagatgaaattgccgagctgtttgtttacaaccaagctctgattatttcagacggcattgtcgcccgtttgggttcgctttcggcagatttccaacgctttacgccgtggaaagtggtcgatgaaaaaaataaaagcgcgcgcttatattttgacgatgagttgcaaagcctgctcaatggcttaatgcagcctgaggatttattggactatatccgctatttcgtcttgtttgaacgggattccgttggcaaaaccattaaaaaaatcgcggcgtaccatcaatattacggcgtaaatgaagcggtagattccaccatttgggcgacttcagaaaaaggcgaccgccgcattggggtgatgtggcatacgcagggttcgggcaagtcgatttcgatgctgttttatgcaggcaaactgcttgcacagcctgaattgaaaaatcctaccattgtagtggttaccgaccgcaacgatttagacggtcagcttttccaaactttttcttcaggcaaggatttaatcaaacaaacaccgcagcaagtagaagaccgcgatcaactgcgccaactgctcgcacaaaatgaagtcggcggcgtgttttttactacgattcagaaattcgccctaaatgaggaagaaagccgcttccctattttaaatgagcgcaacaatattattgtgatcagcgatgaggctcaccgcagccaatatggctttacgcaaaagctgcataacggcaagtttcagacaggttatgctcgccatttgcgtgatgctttacctaatgcctcgtttattggttttacaggtacgccaattagccttgaagataaggacacgcaagatgtgttcggtcgttatgtgtccatttatgacttgcaagatgcggtggaagatggagcgactgtaccgattgtttatgatgatgctcgccaaattcgcttaaataaaaaagaccacgatgctttgtttgcagaaattgatgctctactagaagaggagccatcaacttccctgcgtttgcgggaaaaattactaggctcacaagagcgtcttatcgaattggccgcagattttgtgcaacattttgccaaacgcaatgaagtggtggacagcaaagcgatgatggtggtttccagccgtcaaatttgcgtggatttgtataatcagatcatcgctctgcaccctgaatggcattcggacaatattaacgaaggggcgattaaaattgtgatgacaggttcggcaagcgatacgcctgaaatgcaaaagcatatttacagtaagcaggaaaagcaaacgttagaacgtcgctttaaagacccgaacgatccgctgaaagtggtgattgtgcgtgatatgtggctgacaggctttgatgcaccgtgctgtaacactatgtatcttgataagccaatgaaagggcataacctaatgcaagccatcgcacgagtaaaccgtgtattcgctaacaaaagtcgtgaaaacggtgggcttatcgtagattatgttggtttggcaaaagaattacgagcagccacacagcaatacaccaactctacaggcaaaggtcaattagcggaagatgtgcaaagcgtgttctttaaaatgaaagaacagcttgaatttatccgaactttgtttgcgacaccaattgaaggaaaaacttttgatgttcaggctgccttagaaaaagataatccgaatgatcttttgatggcgattcgttttgccgccaaccatattttaagccttgatcaattatcgtttgatggcaaagcgcacgagcagcattggtttaataaaaaagaaaccgagccacgcaaaaaagcctttttgaaaacggcaggcttggtaaaaaaaggctatatgctgtgcggcacattggctgaagttgagccgtataaccaagaaatcgccttttatgatgccgtacgggcaattttaactaaacgtgaacaaaaaggcacaggcacaaatgaaagacagattttattgaaaaaattggtcaatcaaactgtgtattctgaaggcgtgattgatttattcgatctgctagaaaaaccacaaccacaaatcagtttgctttccgaggaatttttacaaactgtaaaaaatagcccaactaaaaatttatgggttagcgcgatggagcgttatttggcaagtgaaattaaagttaaatcaggcacaaacttaaccttgcaaaaagattttgaacggcgtttgaaggaagcattgaatcaataccacaatcacaatttgactgtggtagagattttggacgaactctttaaaatgagccaagatttccaagaacgtttagcattagggaaaaaactaggattaaccaaggaagaactagccttctatgaagctctatctcaaaatcaaagtgcaaaagatttgatgggtgatgaagtgctttctaaactggcgaaagaaatcacggaaacacttagaaaatcggtcacaatcgactggcagtacaaagaagcggtgcgggcaagaattagattactcgttcgacgtgccttacaaaaatataaatacccgcctgataaacaggaagaagcggtaacttatgtgattaaacaagctgaagaaattgctgaggatttaactggtttataa

SEQ ID NO: 7121 - DNA, 1944 bp, Haemophilus influenzae
  CDS (1)...(1944)
gtggcattaattagtttaaccaatggatacctttcctttagtgatgcgcctttgttggatcacgcagaactacatattgaaccgaatgaatgtgtttgtttagttgggcgtaacggcgcaggtaaatcaactttattgaaaatcatcgcaggcgatgtgcttatggatgatggcaaaatccaatacgaaaaagatcttgtggtttctcgtttagaacaagacccaccgcgtaatgcacaaggcaatatttttgattatgtcgcggaaggcgtagggcatttaacggatttattgaaagaatatcatcagatttctgttcaattggaagaaaattacagtgatcaaattttaagtcaattagagcaagttcaggctaaattagaacacgctgatggctggcgatttgaaaataaaatcaatgaagtattgttaaaactaggtttaaatccaaacacaaaattatccgcactttcgggcggttggttacgcaaagcggcactagcacgtgcattggtgtgcgatcctgatgtgttattacttgatgaaccaaccaaccacttggatgtggaagctattgaatggctggaaaatttcttactggatttccaaggtagcattgtatttatttcccatgaccgttcttttattcgcaaaatggcaacacgcattgtggatttagatcgcggtcaattagtgtcttatccgggcaattacgatttatatttaactacgaaagaagaaaatctacgtgttgaagccttgcaaaatgaattatttgataaacgtcttgcacaggaagaagtgtggattcgccaaggtatcaaggctcgccgtacaagaaatgaagggcgagtgcgagcattaaaagtgatgcgtgaggaacgccgccaacgccgtgacgtaatgggaacagccaaattacagttagatacctcaagtcgttctggcaaaattgtctttgaaatggaagatgtgagctatgaaatcgcaggaaaaaccttgttaaaagatttttcaacaacgattttacgtggagacaaaattgcgcttgttgggccaaatggctgtgggaaaaccacgttcattaaattattgctgggggaaattcagccaacatcaggaaaaatccgttgtggtaccaaattagagattgcttattttgaccaataccgtgctgatttagatcctgaaaaaaccgtaatggataatgtggcagatggtaaacaagatattgaaatcaatggtgtaaaacgtcatgtgctagggtatttgcaagatttcttgttcccgccaaaacgagcaatgaccccagttaaagccttatcggggggagaacgaaatcgtttattactcgcaaaattattactcaaaccaaataatttattgattcttgacgaaccaaccaatgatcttgatgtagaaacattggagcttttagaagaaattttgacggattatcaaggcacattgttaattgtgagccacgaccgtcaatttatcgataatactgccacagaatgttatttattcgaaggtaaagggcatttgaataagtatgtgggagggttctttgatgctaaacagcaacaagccaatttctgggcaagtaaagcagtggaagagcaggctaaagcgaagaaatctgaaccactaaaagaagaaagtgcggtgaaaaatgaccgcacttctaagccgaaatccgtgaaactttcttataaagaacaacgagagctagaacaacttccacaactattggaagagttggaaactaaaatcaccgtacttcaagctgaaatagccgatccagcatttttccaacaagctcacgatattaccgacgctaaattaaaagcattggcggatactgaagccgaattagaaacagcatttttacgctgggaagaattagaagaaaagaaaaatttggttgaaggtaaagcttaa

SEQ ID NO: 7122 - DNA, 813 bp, Haemophilus influenzae
  CDS (1)...(813)
atgacattaaaaattgcaatcgctggtgctggcggaagaatggggtgtcaattaattcaagcggttcattctgcggaaggcgtagaactaggtgcagcttttgaacgcaaaggatcatctttagttgggacggatgcgggagaattggcgggaattggtcatcttggcgttgcagtttcagacgatcttgaaagtcaaaaagataaattcgatttattaatcgattttacccgaccagaaggcacccttgaacatattgcattttgcgtagcgaataataaaaaaatggtgatcggtacaacaggttttgatgaaaatggtaaagtggcgattaaagcagcttcagataaaattgctattgtgtttgcatcaaatttcagtgttggcgtgaatttagtcttcaagcttttagaaaaagcggcaaaagtgatgggggattattgcgatattgaagtgatcgaagctcatcaccgtcataaagttgatgcgccatctggcactgcactttctatgggcgaacatatcgcaaaaaccttaggtcgcgatttaaaaactcacggagtcttctgccgtgaaggaatcacaggcgaacgtaaacgcgatgaaattggtttttcaactattcgtgcttcggatgtggtgggggaacactcggtttggtttgcagatattggcgaacgtgtagaaatttcccataaagcatcaagccgaatgactttcgctaatggtgcagtgcgtgctggtaaatggttagaaaataaggcgaatggcttatttgatatgaccgatgtattagatttaaataatttataa

SEQ ID NO: 7123 - DNA, 990 bp, Haemophilus influenzae
  CDS (1)...(990)
atgcaacatctgaacgagcttgttgagaaagcgaaattagcgattgaatccattcaggataaaagtttaacggctttggatgaaatccgtgtcgaatattttggtaagaaagggcatttcacgcaattaatgcaagagttgcgtaacgtgtcagctgaagaacgtcctgcgatgggcgcaaaaattaacgaagcaaaacaagctgcgttagaatttttaaatgcaaaaaaaacggagtgggaacaggctgaacttaactcaaaattagaaaaagaacgtgtagatgtcagtttacctggtcgcaaagttgaaaccggtggcttacacccagttaccatgacgattaatcgcgtaacaaaatttttctcagaacttggcttttcagttgaaaatggtcctgaaattgaaagtgattattacaacttcgatgcgttaaatattcctaaacatcacccagcacgtgccgatcacgatactttctggtttaatccagaattattacttcgtactcaaacttctggcgtgcaaattcgtactatggaaaaaatgcagccaccaattcgcattatggctccaggacgtgtatatcgtaatgactacgatcaaacgcatacgccaatgttccatcaaattgaactactttatgtggataaaaaagcaaatttcacagaattaaaaggcttattacacgatttcttacgcgctttctttgaagaagatttacaagtacgtttccgtccatcttatttcccattcacagagccttcagcggaagtggatgtgatggggaaaaacggtaaatggttagaagtgttgggctgcggtatggtgcatccaaatgtgttgcgtaatgttggtattgatccgaatgaatattctggttttgcagtgggaatgggcgttgagcgtttaacaatgttacgttataacgtaacagatttacgttcgttctttgaaaacgacttacgtttcttaaaacaatttaagtaa

SEQ ID NO: 7124 - DNA, 2388 bp, Haemophilus influenzae
  CDS (1)...(2388)
atgaaatttagtgaacagtgggtaagagaatgggtgaaccctgcggtgtccaccgagcaattatgcgagcaaattaccatgcttggcttagaagtagatggcgtggaagccgttgcgggtacatttaatggtgtcgttgttggtgaagtggtggaatgtgcacaacatccagatgcagataaattacgtgtaactaaagtgaacgtaggcggtgatcgtttattggatatcgtgtgcggtgcaccaaattgtcgtcaaggcttaaaagttgcttgcgcaacagaaggtgcggtattacctggcgatttcaaaattaagaaaacgaaattacgtggtcagccatcagaggggatgctttgttcattttctgaattaggtattgatgttgaagctgatggtattattgaattgccacttgatgcaccaattggtactgatttacgtgaatatttagctttagatgataatgccatcgaaattagcttaacgccaaaccgtgcagattgtttgagcattgcaggtattgcgcgtgaaattggtgtggtaaataaacaactcgtaaatcaactgcactttgaagcagcgccagcaacaatttctgataaagttcaaattgatttacaagcaccagaagcttgcccgcgttatttattacgtgtgataaagaacgtcaatgtaaaagcaccatcgccaatgtggatgcaagaaaaattgcgtcgttgtggtattcgttctatcgatcctattgtcgatattactaactatattttgcttgagttcggtcagccaatgcacgcgtttgatgcggctaaagttacacaacctgttcaagttcgcttcgcgaaagagggggaagaattagtattattagatggctcaaccgcaaaacttcaatcaaatacgttattaattgctgaccaaaatgggcctttagcaatggcagggatctttggtggtgcagccagtggcgtgaatagtgaaacgaaagatgtgattttagaatccgcatttttcgctccattagcgattgcaggccgtgcaagacaatatggtttacatacggatgcatcgcaccgttttgaacgtggtgtggattttgaattagcgcgtaaagcaatggaacgagcaacggcattattacttgaaatctgtggtggtgaagcaggtgagatttgtgaagcaagcagtgaaactcatcttcctaaagtcaatacagttcaacttcgccgtagtaaattagatgcacttttaggtcatcacattgaaacaggaagcgtaacggaaattttccaccgtcttggttttgatgttacttatgcaaatgatatttggacggtaacttctgcaagctggcgttttgatattgaaatcgaagaagatttaattgaagaagtggcgcgtatttatggttataacagcattccaaacaatgcgccattagcgcatctctgcatgcgtgagcacaaagaatctgatttagatttagctcgaattaagaccgcacttgtggatgcagattatcaagaagctattacttatagctttgtggatccaaaaattcaaagtttattacatccacatcaagaagcacttgtattgccaaacccaatttctgtggaaatgtccgcaatgcgcgtgtctttaatcagcggtttattaggtgcagtgctttataaccaaaatcgccaacaatcccgtgttcgtttatttgaaacaggattacgttttgtgccagatgccaatgctgaatttggcgtgcgtcaagaatttgttttaagtgcggtgattactggaacggcaaaatctgaacattgggcaggtaaagcagagtctgtagatttctttgatcttaaaggcgatttagaatcagtactttctttaacagaaggtggtcatagagttcgttttgttgcaaaacaatttgatgcattacaccctggccaatctgctgctattgaattagatggtcaagaaattggttttattggtgcaattcatccatctattagccaaaaacttggcttaaatggcaaaacttttgtatttgaaattctttggaatgcaattgcggcacgtaatgtggtgcaagcaaaagaaatttctaaattcccagcaaaccgtcgtgatttagctttagtcgtcgcggatagcgtaccagcaggggaattaatcgcagcatgtaaacaagcaggtggcgaaaaattggtgcaagtgaacttgttcgatgtatatcaaggtgtgggcgtcgctgaaggctataagagtttagcgattagcttgactgtccaagataatgaaaaaacacttgaagatgaagaaattaatgcagtgatttcagcagtattagcggaggtaaaacaacgctttaatgctgaattaagggattaa

SEQ ID NO: 7125 - DNA, 270 bp, Haemophilus influenzae
  CDS (1)...(270)
gtgcttccaagtaactttataagttcgcctgattatgttgttttaaacgaaaaatgcggagttattttaacaatgcctaaaatcaaaacagtacgcggcgcagcgaagcgcttcaaaaaaactgcttctggtggtttcaagcgtaaacaatctcacttacgtcatattttgactaaaaaaacaactaaacgtaaacgtcatttacgtcataaatcaatggttgcgaaagcagaccaagttttagtagtagcttgcttaccatacgcataa

SEQ ID NO: 7126 - DNA, 354 bp, Haemophilus influenzae
  CDS (1)...(354)
atggctcgtgtaaaacgtggtgttattgcaagagcacgccataagaaagttcttaaggctgctaaaggttattatggtgcacgttcacgcgtgtatcgcgttgctttccaagcggtgatcaaagctggtcaatacgcataccgtgaccgtcgtcagcgtaaacgtcaattccgtcaattatggattgcacgtatcaacgctgcagcgcgtcaaaatggtttatcttatagcaaatttatcaacggcttgaaaaaagcatctgttgaaatcgaccgtaagattcttgctgatatcgctgtattcgacaaagtagcgttcgctgcattagttgaaaaagcaaaatctgcactttaa

SEQ ID NO: 7127 - DNA, 270 bp, Haemophilus influenzae
  CDS (1)...(270)
atgtctctaagtactgaaaaaaaagcagcaatcgttgctgaatttggtcgtgatgcgaaagataccggttcttctgaagttcaaatcgcattattaactgcacaaatcaaccacttacaaactcactttgcagagcacaaaaaagaccaccatggtcgtcgtggtttattacgtatggtttctcgtcgtcgtaaacttttagactacttaaaacgtactgatcttgctttataccaaagcactatcgctcgtttaggtttacgtcgctaa

SEQ ID NO: 7128 - DNA, 1908 bp, Haemophilus influenzae
  CDS (1)...(1908)
atggtcaaaaatctagtgctttgggtggtagtggcagtcattatgatgacagcataccaaagtttcaattcatcttcggtagaaaattctactgattatacaacctttgtttacgatgtaagcaacggacaagtgacagcggcacgttttgatgccaatgaaattacggtaacgaaaaccgatggttctaaatattcaaccgtaatgccaccacttgaagacaaaaaattgcttgatgatttattaagcaaaaaagtcaaagtggaaggcacgccatttgaaagacgtggttttttatcccaaattttaatttcttggttcccaatgttattccttgttggtgtatgggtattctttatgcgtcaaatgcaaggcggtggcggcaaagcgatgagctttggtaaaagccgagccaaaatgttgaatcaagatcagattaaggtgacttttgcggatgtggctggttgcgatgaagcaaaagaagaagtgggggaaatcgttgatttcttgcgtgatccgaataaattccaaaatttgggcggtaaaattccaaaaggtattttgatggtagggcctccaggtactggtaaaactttacttgctcgtgcgattgcgggagaggcaaaagttccattcttcactatttctggctctgatttcgtagaaatgtttgtaggtgttggcgcatcacgtgtacgtgatatgtttgaacaggctaagaaaaatgcaccttgcttaatcttcattgatgaaatcgatgcagtgggtcgccaacgtggtgcgggcttaggtggcggacacgatgagcgtgaacaaaccttaaaccaaatgctagttgaaatggatggctttagcggtaatgacggtgtaattgttattgcagcaactaaccgtccagatgtgcttgatccagctttaacccgtccaggccgttttgaccggcaagtagttgttggcttacctgatgtgaaaggtcgtgagcaaatcttaaaagtgcatatgcgtaaagtgtctgttgcgcaagatgttgatgcaatgacgttagcgcgtggtacgccgggctattctggtgcagatttagcaaatttagtcaatgaggcggctttgtttgctgctcgagtgaataaacgtacggtaaccatgcttgagtttgaaaaagcgaaagataaaatcaatatggggccagagcgtcgcactatgattatgacggataagcaaaaagaatccactgcttatcatgaagctggtcatgcgattgtggggtatttagtgcctgaacacgatcctgttcacaaagtgaccattattcctcgaggacgtgccttgggtgtgacattcttcttacctgagggcgatcaaattagtattagccaaaaacaattagaaagtaagctttctaccttgtatgcgggtcgtttagcggaagatttgatttacggcgaagaaaatatctcaacaggtgcatcaaatgatattaaagtcgcaactaatattgcgcgtaatatggtaacgcaatggggattctctgaaaagttaggtccgattctttatacggaagatgagggcgaggttttcttaggtcgttcaatggcgaaagcgaaacatatgtcagatgaaactgcgcattcgattgatgaagaagtgcgtgcaattgtaaatcgtaactatgcgagagcaagagagattttgatcgacaatatggatattcttcatgcgatgaaagatgcattagtcaaatatgaaactattgaagaagaacaaattaaacaattgatgaatcgcgaacctgtcacaccgccatcaggttggggagagccgaaaactcagcaggctgcttatgcaaattcaacaacgaatgatacaaagcccgaaagtgcggtagaaaataccgatgattttaatgtttaa

SEQ ID NO: 7129 - DNA, 828 bp, Haemophilus influenzae
  CDS (1)...(828)
atgaaactttacgcaaataataaatgtcttgatttaagcgtgcctcaaattatggggattcttaattttacgcctgattctttttctgatagcggacagttttttagtctagataaagcactttttcaagttgaaaaaatgctagaagagggggcgacaattattgatattggtggagaatccactcgtccgaatgcggatgaagtttctgaacaagaggaattgcatcgtgttgtgccagtagtggaggcggtgcgaaaccgttttgattgctggatttctgttgattcctcaaaagctgttgtgatgcgtgaagcggcaaatgttggaatggatttgattaatgatattcgtgctttgcaagagccgaatgcgttagaaacggcggtaaaactggctttacctgtttgtattatgcatatgcaagggcaacctcgcacgatgcaagcaaatccttattatgaaaatgtcgtgcaagatgtattggcttttttacaaaaacgtactaatgaatgcctttctgctggcattaaaaaagaaaatttaatttgggatatgggctttggctttggcaaatctgtacagcataattatcaattattacaaaatctgaatgaattttgtcagataggttatcccgtattagcagggttatctcgcaaatcaatgattggcgcagtgcttgataaacctgttgatcaaagaataattggcagtgcggcaggtgcgcttattgcagtgcaaaaaggtgcaaaaattttacgcgtacatgatgttgctgcaacatcagatatgctcaaagtttggcaggcaacagcaaatgcctga

SEQ ID NO: 7130 - DNA, 1338 bp, Haemophilus influenzae
  CDS (1)...(1338)
atggcaaatcgtaaatattttggaacagatggtgtacgtggaaaagtaggtgcttacccaattacaccagatttcgcattaaaattaggttgggctgcgggaaaagtgttggcttctcaaggttcgaaaatggttttaattggtaaagacacccgaatttctggatacatgttggaatcagcccttgaagcaggtttggctgctgcggggttatctgctgcatttaccggccctatgccgacacctgcaattgcttatttaaccagaactttccgagctgaagcaggtatcgtgatctcagcctctcataatccttattatgataatgggattaaattcttttcagcaaaaggcactaaattacctgatgaaattgaagaagctattgaagcaatgttagagcaaccgatggattgtgtggaatctgctgaattaggtaaagccagccgtattaatgatgcagcaggacgctacattgagttttgtaaaggtacattccccgctcatttaggcttggaaggttataagatcgtggtagattgtgcaaatggtgcaacttaccatattgcccctaatgtactaagagaacttggtgcggaagttattgaaattggtacggatccaaatggtttaaacattaatgaaaaatgtggcgcaactgatgtgactgcattgcaagctaaagttgttgaaacgaaagctgatgttggtttggcttatgatggcgatggtgaccgcattatgatggtggatcatttaggaaataaagtcgatggcgaccaaattctctttattattgcgcgtgaagcattgcgctcaggtcaattaaaaggcggtgtcgttggcaccttaatgagtaatatgagcttagagattgcgttgaaaatgcttggtgttcccttcttacgtgcaaacgtgggagaccgttatgtattggaaaaaatggttgaaaatgattggacgcttgggggggagaattctggacatattatcattgcggataagaatacaacgggtgatggcattgttgcgtcattggctgtattggcggcgatggcacagcataaattatcattaaatgaattagcaagtgcggttaaattattccctcaagtgttaatcaatgtacgttttgcgggtggggaaaatccacttgaaagtgatgctgtaaaatctgttgccgcagaggttgaaaaacgtttagaaggtaaaggtcgtattttattgcgtaaatcgggtacggaaccacttattcgcgttatggtggaatgccaagatgctgaacttgcacaacaatgtgcagaagaaattgcagaagccgtgaaaaaaattaattaa

SEQ ID NO: 7131 - DNA, 390 bp, Haemophilus influenzae
  CDS (1)...(390)
atggagaaaataatgaaaaaattaacattagcattggttttaggttcagctttagtcgtgacaggttgttttgataagcaagaagcaaaacaaaaagttgaggatacgaagcaaactgtagcatcagtcgcatcagaaacaaaagatgctgcagctaatacaatgactgaagtaaaggaaaaagcacagcagctttctacagacgtgaaaaataaagtagcagagaaagtggaagatgcgaaagaagtaattaaatcagcaacagaagcagcgtcagaaaaagtaggcgaaatgaaagaagcagcatcagaaaaagcaagtgaaatgaaagaggcggtttcagaaaaagcaactcaagcagtagatgcagtgaaagaagcgacaaaataa

SEQ ID NO: 7132 - DNA, 1146 bp, Haemophilus influenzae
  CDS (1)...(1146)
gtgaaattagggagaaaaccaaagctagtggaaaatcagcttcaaaacaagcctattattgagcttcgttcaatcaaaaaatcctatggttctaacaccattattaatgatttcaatcttacaattaataacggtgagtttgtcactattcttggcccctcaggctgtggtaagaccacagttttacgcttacttgcaggcttagaagaattggattcaggtagcattattttagatggtgaagatatcaccaatgtgccagcggaaaaacgtcatattaatacggtattccaaagctatgcgctatttccacatatgacaatttttgagaacgtggctttcggtttgcgtatgcaaaaagtaccaaacgaggaaattaaaccgcgtgttttagaagccttgcgtatggtacagctagaagaaatggcggatcgtaagccaactcaactttctggcggacaacaacaacgtattgccatcgctcgtgccgtagtaaataaaccaaaagtgttgttacttgatgagtctttatctgcattggattacaaattgcgtaaacaaatgcagcaagaactcaaaatgttacaacgtcagcttggcattacctttattttcgtcacccacgatcaagaagaagcgattacaatgtctgatcgtattgtattattgcgtaaaggtaaaatcgcacaggatggttctccacgtgaaatctatgaagatccagctaacttattcgttgctcgtttcattggcgaaattaacgtatttgaagccactgtgattgaacgaaaatcagaacaagttgtactggcaaatgttgaaggtcgtatttgtgatatttatacggatatgcctgtggaaaaagatcaaaaacttcaagtactccttcgccctgaagatattgtgattgaagaattagatgaaaatgaacattctaaagcaattatcggtcatattattgaccgcacttataaaggaatgacattagaatcaacggtagagtttgatcataacggaatgcgtgtccttgtaagtgaattctttaatgaagatgatccacatatggatcatagcataggacaacgcgtaggtatcacatggcacgaaggctgggaggttgtactcaacgatgaagataatcaataa

SEQ ID NO: 7133 - DNA, 1239 bp, Haemophilus influenzae
  CDS (1)...(1239)
atgatttctcaaatagataaaacagaacttttagaacgatttttacattatgtgtcttttcacacccaatcaaaacctaatgcgaagcattcccccagctcagtcgggcaaatgaagttagccatgcagttacaaaaagaattaatccaacttggtttggagaatgttgaagtaagtaaatatgcagtggtaacagcatttttacccgctaatgatcctaacttaacgaaaaccattggtttagttgcgcatcttgatacgtctccacaatgtagtggtaaaaatgtacgcccagaagtgatagaagaatatcgtggcggagatattgcattaggtattggcgaggaatttattagccctgtttattattcttttatgcaaaaattagtcggacaaacgcttattgttactgatggaaccactttgcttggggctgacaataaagcgggaattgcagaaattatgaccgcactttccattcttcaaaaagagaatattccccattgcaatattcgtgttgcttttacgcctgatgaagaaattggtttgggaatccattatttcccaatggaaaagttttcctgtgattgggcatataccattgatgggggagaagtaggggaattagaatacgaaaactttaatgctgcaacagcaaaagtgcggtttttcgggcgaaatattcacacaggttatgcaaaaggaaaaatgctgaatgcactgactttagcttgtgaatttcagcaagtttttcctgttgatgaagtaccagaaaaaaccgatgggaaagtgggcttttatcatttagaagatttttctggcgatattgagcaagtagagcttacctatttgattcgtgattttgacgaacagaatttcgcacaaagaaaagcttttattaaaaatcaggtggaaaaatttaatgctaaaaaaggtttgaaaaagcctatagagttagaaattcaagatagctaccaaaatatgtatgatgtggtaaaaaacgttcctcaatcaattgaacttgctgatcgtgcaatgaaagcggtgggaattaaaccaaatcataagccgattcgaggcggtacagatggagcatttttagcctctaaaggtttagcatgcccaaatatttttactggcggctataatttccatagtaaacacgagttggtttctttacaaggcatggaaaatactgtccaagtaattatcgaaatgctgaaatgtaaagatttgtaa

SEQ ID NO: 7134 - DNA, 483 bp, Haemophilus influenzae
  CDS (1)...(483)
atgtcaaaaacatcaatcggactagataaagttcaatcagcagaattagccgataaacttaacgaattacttgcaacctaccaagttttctatactaatgtacggggctaccactggaacattaaaggcgtaaacttctttgcattacacgcaaaatttgaagaaatttatactaatttagttgctagagtagatgaggtggctgaacgtattttaactttaggttacacaccaaataatgcttacagccaatacttaaaaatatctcgaattaaagaagatattgcagtaagtgaggcacaagaatgtttatcaggcacattacaaggtctaaaaacattactagatcaacaacgtgaaattcttgcttttgcaaataacgctaatgatgaaggtactgcatcacaaatgagtgactatattaaagaacaagaaaaattagtatggatgttccaagcagcttgccaaacttgccataattaa

SEQ ID NO: 7135 - DNA, 1539 bp, Haemophilus influenzae
  CDS (1)...(1539)
atgttaattggtgtacctagagagctgcttgagaatgagagccgtgtggcggcaacgccgaaaacggttcagcaaatattgaaattgggctttgacgtgatcgtggaacacgatgcaggttttaaagctagttttgaagatcaagcatttttagaagcgggcgcgaagatcggtacgtcggctgaaatttggcaatcggatattatcttcaaagtaaatgcaccgacagatgaagaaattgctcaaatgaaggaaggggcagctctcgtgagctttatttggcgcatgcaaaatcctgagttaatgaaaaaactcaccgcgaagaaaattaatgtgttagcaatggatgcggtgcctcgtatttctcgtgcgcaagcattggatgcgctttcttctatggcgaatatttctggttatcgtgctgtcattgaagctgcgcatgaattcggtagcttctttactgggcaaattactgcagcaggtaaagttccaccagcaaaagtgttggttattggtgcgggtgtggctggtttggcggcaattggtgcagcaaatagccttggggcgattgttcgtgcttttgactctcgtcctgaagtgaaagagcaagttcagagtatgggcgcgagcttcttagaaattgatttcaaagaagaaggtggcagtggcgatggttatgcgaaagtaatgtcggaagaatttaaccgtcgtgcgatggagctttacgcagaacaagctaaagaagtcgatattattattactacggcagccattccgggtaaaccagctcctcgtttaatcaccaaagaaatggtggattcaatgaaaccaggttcggtgattgtggatttagcggctgcaactggcggtaactgtgaatatacgcaagcagggaaagttgttacaactgaaaaccaagtgaaagtgattggttatacagatttcccaagccgtttaccaacgcaatcttctcaactttatggcacaaacttagtcaatttattaaaacttttgtgcaaagagaaagatggcaatattaatattgattttgaagatgtggttcttcgtggtgtaaccgttgttcgtgatggggaagaaattccaccagcacaaattcaagtgtctgcacaaccaaaacaagaaaccaaagctgcaccagtggcagagaaaaaagaatctaaaccaacagatcctcgtgtgaaatacggtgtgatggctggtgttggcgtgttattcctttggttagcttctgtggcgcccgctgcatttttatcacatttcaccgtatttgttttagcttgtgtggtgggttattacgtggtttggaatgttagccatgcacttcacacaccattaatggcagtaacaaatgcaatttcaggcattattattgtaggtgcattattacaaattcgtcagccaacaggcaatctatttatcgatgcgttagcttttgtggcgattttggtggcaagcatcaatatttttggtggtttccgtgtcacacaacgtatgttagcaatgtttagaaaaggttaa

SEQ ID NO: 7136 - DNA, 2607 bp, Haemophilus influenzae
  CDS (1)...(2607)
atgagtaaatccttggtgattgtggagtcgccagcaaaagcaaaaactattaataagtatttaggtagccaatatgtcgtgaaatcgagcgtgggacatattcgtgatttgccgacggttggttctagtacaggtgaaaaagctaaaccaatttcaaccaaaggtatggatgccgaagaaaaagcaaaaattaaggcagaaaaggaacgtaacgccttagttaaacgtatggggattgatccttatcacgattggaaagcaaattatcagattttgcctggtaaagaaaaagtggtttccgagttaaagtcgcttgctaaaaaagcagatcacatttatctcgcaaccgacttggatagagaaggggaagcgattgcgtggcatttacgtgaagtgattggtggtaacgatgatcgttttagtcgcgtggtgtttaacgaaatcactaaaaatgccattaaacaggcttttgaaaagcctgaacaattaaatatggatcgtgttaatgctcaacaaactcgtcgttttttagatagagtggtgggctttatggtgtcgccattactttggaaaaaagtagctcgcgggctttctgctggtcgagttcaatcagttgcggttaaattattagtcgaacgcgagcgtgaaattaaagcgttccagcctgaagaatattgggaagttgccgtccttacgaataatcaaaataaacaagctatacgtttagatgttacggattataaaggcaagaaatttgatccaaaaaatcaaaaagaagcacaaagtgcggtagattttctgaatgtttcagattacgttgtcacagatttggaaactaagccaacaagttctcgccctcgagcaccatttattacatcaacacttcaacaaacggcaagtactcgcttgggatttggcgttaagaagacaatgatgttagcccaacgtttatatgaagcgggttacattacttatatgcgtacggattcaaccaatttgagtcaagatgcgcttaatatggcgcgtagctatattgaaaatcattttggtgcacaatatttaccagaaaaaccaaatttctattctagtaaagaaaatgcgcaagaggcacatgaggctattcgtccatcagatattcgagcattgcctgaatctttagagggaatggaaaaagatgcggtacgcctttatgatttaatttggtgtcaattcttagcatgtcaaatgccacctgcacaatatgatagtagcacgctgaccgttaccgctggcgattataccttgaaagcaaagggcagaattttacgttttgatggttggacaaaagtattgccacagataggcaaaaatcctgaagatcaagaattgccttcagttactgtgtcagaaaaacttgctttaaaagaagtgcaaccaactcaacattttactaaaccacctgctcgttttactgaagcggctttagtaaaagaattggaaaaacgtggtattggcagaccttccacttatgcggcaattatttccaccattcaagaacgaggttatgttcgtactgaaaatcgtcgtttctatgcagaaaagatgggcgaaattgtgactgatcgcctcaatgagtcttttggtgaattaatgaattacgatttcaccgcgaatatggaagataccttagataaaattgcctctggttcagtaaattggaaaactgaattgaatcaattctttaaggatttttctagccagctttctaaagctgaattagatgaacttgaaggtggtatgcgcccgaatagccttgtggaaacagatattaaatgcccaacctgtggcagaaatatggcaattcgtacggcgagtacgggggtgtttttaggatgtacaggttatgcattaccaccaaaagagcggtgtaaaacgacgattaatttaattcctgaagcggaattattgaatgttttagatgaatcttcagaaaccaaagcattaatggatcgtaaacgttgtacaaaatgtggaacggcaatggacagctatgtaatcgatgcccatcgtaaaatccatatttgcggtaataatccaaattgtgatggatatttaattgaagaaggctcattcaaaattaaaggttatgatggccctgttgttgagtgtgataaatgcggtgcggatatgcatctaaaacttggtcgttttggcaagtatatgggatgtacaaattgtgataacacacgcaaaattttgaaaaatggcgaggtcgcaccaccgaaagaagagccagtacatttccctgagttaaaatgcgaaaaatctgatgcatattttgtattacgtgatggtgcgagtggtgtatttatgtcagcccataacttccctaaatcacgcgaaacacgcccagttaaaatcgctgaactagtgcaatatcgcgagcgtttacctgaaaaattagcttatttagccgatgctccacaaaaagacccagaagagaatgaagcgattgttcgttttagtcgtaaagagaagaaacaatatgtgacttctgaaaaagagggaaaagcgacgaaatggattgttgatttcaccaatggaaaatgggttgaacgaaagaaataa

SEQ ID NO: 7137 - DNA, 1932 bp, Haemophilus influenzae
  CDS (1)...(1932)
atgccaattattactttacctgacggttcccaacgtcaattcgatcgtcctgtttctgttctcgaagtcgcacaagatattggtgcgggtcttgctaaagccactatcgcaggccgtgtaaacggagaacgtcgcgatgcgtgctatgttatcgagcaagatgcaacgttagaaattattactgcaaaagatgaagacggtttagagattatccgccattcttgcgctcacttgctcggacacgctattaaacaattattcccagatgtaaaaatggcaattggtccaactattgaaaacggcttctattatgatgtagatttagatcgctctttaacccaagaagatattgatgcaatcgaaaaacgtatgttggaattggcaaaaacaaattatgacgtcgtgaaaaaacgtgttacttggcaagaagcgcgtgatacctttgaaaaacgcggcgagccatacaaaatggcaattttagatgaaaacattgaacgtactgcaacgcctgcgttatatcatcacttagaatatattgatatgtgccgtggaccacacgtgccaaatatgcgtttctgtcagcatttcaaattacaaaaagttgctggtgcgtactggcgtggcgacagtaaaaacaaaatgttacaacgtatctatggtacagcttgggcggataaaaaacaacttgctgaatatttaacacgcttagaagaagcggcaaaacgtgaccaccgtaaaattggtaaagcattagatttatatcatatgcaagaagaagcaccaggtatggtgttctggcacaatgatggctggacaattttccgtgagcttgaaacgttcgtgcgtactaaattaaaacaatacgattatcaagaagtgaaaggcccatttatgatggatcgcgtattgtgggaaaaaacaggtcactggcaaaattacgcagatttaatgtttaccactcaatctgaaaaccgtgaatacgcaattaaaccgatgaactgcccaggccacgttcaaatttttaatcaaggtttaaaatcttaccgtgacttaccaatccgtatggcggaatttggttcttgccatcgtaatgaaccatcaggttctttacacggtttaatgcgtgttcgtggctttactcaagatgatgctcacattttctgtactgaagatcaaattgagagcgaagtaactagctgtatcaaaatggtgtacgacatttatagcacctttggtttcactaatatcgcagtaaaactttctactcgccctgaaaatcgtatcggttcagatgaaatgtgggatcgtgcggaagcaggtcttgctgcagccttagcacacaacggtcttgaatatgaaattcaagaaggtgaaggtgcattctatggtccaaaaattgagtttgcactacgagattgtttaggtcgtgaatggcaatgtggtaccgtgcaattagacttcgcattaccaggtcgtttagatgcaacttatgtagcagaagataatagccgtaaaacccctgttatgattcaccgtgcgattttaggttctattgagcgtttcattggtattattactgaagaatatgcaggtttcttccctgcatggttagcaccaacccaagcagttgtaatgaatatcactgatagccaagcagactatgtacagaaagtcgcaaaacagctttctgatgtaggtttacgcgtgaaaactgatttacgtaacgaaaaagtgggcttcaaaattcgtgaacatactttacgccgtgtgccttatatgctcgtttgtggcgataaagaaatcgcagaaggcaaagtggctgtacgtacccgtaaaggtgctgatttaggcacatttactgtggaagaatttgcggaaatcttaaaaaatcaagtaagaagccgtgaattaaagttattgaatgaagaataa

SEQ ID NO: 7138 - DNA, 1422 bp, Haemophilus influenzae
  CDS (1)...(1422)
atggtaaaagatttcagcttttttatttacgattatgaaagttttggtgtaaatccagcaacagatcgccctgcgcaatttgcgggtattcgtacagatgctgattttaatatcattggcgaaccaataatgttttattgtaaacaaaccaacgattatttaccggctcctgaagccgtaatggtaacaggaattacaccacaagaatgtaatgaaaaggggctttcagagcctgaattcgccgcaaatatcttagcagaattttcccaacccaatacttgtgtcatgggttataacaatattcgctacgatgatgaaatgacgcgttatacgttttatcgtaatttcattgaaccttatgaatacagctggaaaaacggaaattcacgctgggatttgttagatttagtacgggcctgttatgccttgcgtccagaaggaattaattgggcttatgacgatgatggaatgccaagtttccgcttagaaaaactcactaaagcaaatagtattgagcatgaaaatgctcacgatgccatggcggatgtatatgcaactattgctatggcgaaattaattaaagaaaaacagcctaaattattccaatatttctttgaaaatcgcggtaaaaaagaaatcgaaaaattagttgatacaggcgcaatgacacctttagtgcatgtttctggaatgctagggaattatcgaggaaattgcacttgggttgcacctttagcttggcatccgacaaaccaaaacgcattaattgtgtgtgatttaactggtgatatcgataatttattagccaaaagtgcggatgaattacgagcagatttatatacaaaaaaattggaattagaagaaaggggagtttcatccgttccgttaaaacttgtgcatatcaataaatgtcctattttagcaccagctaaaactttgttaccagaaacagcaaatcgattgggtattgatcgtcaattatgcttggataatcttgcaaaattacgagcatcttttgatattcgtgaaaaagtggcggatatttttaatgaagaacgtcaatttgcatcgaatgataatgtagaaactgagttatacaatggcttttttagcaatgctgataaaaataatatggctattttacgtagtttacctgcagaaaaattatctgaacatggtttagcttttgaagataaacgtatccttgaattattgttccattatcgcgctcgtcatttttataaaaccctcacacgcgctgaacaaattaaatggaaaaaataccgacagaataaacttgaaaaaagtgcggtagagtttgaagcaagtttacaacgtttagtagaggyacattcagataattctgaaaaactatctttgctacaacaagtatatgaatatggtataaaattactaggttag

SEQ ID NO: 7139 - DNA, 948 bp, Haemophilus influenzae
  CDS (1)...(948)
atgctcacaaaaagtcggaaatattttaatcaaacatggattgaatcattattcaaacagactacggcattgtttgctttgcttgtgtttattttacttgctgctattttaatttctttagtcataggaagctgggaaagtattaaacgttttggtgggagttttctattagaaacatattgggatcctgtacaagaacaatatggggcaattattcctattttaggtacgcttattacggcgggtatcgcattatttatcgcagtacccatttcatttggtattgctatttttttaacggagctagctcccaattggctaaaacgtcctataagcattgcaattgaaatgctagctgcaattccttctattatttacggaatgtgggggttgtttgttttcgttccattatttcaagaacatattcagccagtactaattgacaatttggggaatttacctggattagaattatttttttctggcgtaccttttggtgttggtttatttacggcaggattagtgcttgccataatgatcattccttttattgcatccgtaatgcgggatgtctttagtatagtaccaccaatgttaaaagaaggtgcttatggattaggtgcaaccacttgggaagtggttcgacaagtgattgtaccacacactagaatagggcttgttgggagtgtgatgctaggattgggaagagcattgggcgaaacaatggctatcacttttattataggtaattcgtttcaattgcctaattccttattttcaccttctacctcaatcgcatctgctattgctaacgaatttaatgaagcaggtggattacaaaaatctgcattgatggaattaggattacttctctttgttatcacaactatggtattgattttatcaagattaatgattacaaaaatgcaacaaacaaaagggaaataa

SEQ ID NO: 7140 - DNA, 1002 bp, Haemophilus influenzae
  CDS (1)...(1002)
atgcaacacaaccaattattagaacaactttatagcggacattcactttcaacctcagaaagcaccgctctttttaatgcagtcatccaaggtgagctttccaatgaacaaattgctgcaatgcttattgctttaaaagtgcggggagcaaatactgaggaaatttcgggtgccgttgccgcctcattacaaaatgccaaagcatttccatatccaaattatccttttgcggatattgtaggaacaggaggcaatggtcaaaacactattaatatttccactaccagtgcgattgttgcggcatcaatgggagcaaaaatagcaaaacatggcaatcgtagcgtgtcgagtaaatcaggtgctagcgatgtgcttaccgcacttagcgttaatgtgaacgtcacaccagagcaagctcgacaagcgttagatgaaattggtgtctgttttttatttgctcaacaatatcattctggtttccgtcatgttgcgccagtccgtgccgctttaaaaacgcgcactatctttaatattttagggccgcttatcaatcctgctcgcccaacttatcatttacttggcgtatatgcgcctgaattagtaaaaacctatgctgaaaccgcagttgccttagaacatcaacattcctttgttgtacatggttctggcttagatgaagtcgcattgcacggcgaaacacaagtggcagaaattaaaaatggcaaaattgaatatttcactttaacgcctgaagattttggcttaaaaacgcaatccctcgaaagtcttcgcggtggtgaaccacaagaaaatgcccaatatctgaccgcacttttacaaggtaaaggaaaagctgaacacgctaatgcggtggcggcaaacacggcattattattgaaattattcggttacgatgatttaaaacaaaatgtgcaaaatgtactggcgcatcttgtatcaggtaaagcctttgaaacattacagaaattaaccacatattaa

SEQ ID NO: 7141 - DNA, 2865 bp, Haemophilus influenzae
  CDS (1)...(2865)
atgacacaaaaattcgaaatggcagaccgttttaatccgtctgcggtagaacaagccctttatcaacgttgggaagagagcggttattttaaaccgtctgaaaatgaaaatgcgccgagctattgcattgcaattccgccgccgaacgtaacaggttctctacacatggggcatgctttccaacaaaccttaatggataccttaatccgttttaaccgtatggaagggcataacaccttatggcaaacggggacagaccacgcgggtattgcgacccaaatggtggtggaacgtaaaattgcggctgaagaaggcaaaactcgccacgattatggtcgcgaagcgttcatcaataaaatttgggattggaaagcctattcaggtggcacaatcagccaacaaatgcgccgtttagggaactcaatcgactgggaacgtgagcgtttcacgatggacgatggtttatcgaatgcagtaaaagaagtgtttgttcgtttgcacgaagaagggttgatttaccgtggcaaacgcttggtaaactgggatccaaaacttcacaccgcaatttctgatttagaagttgaaaataaagaaagcaaaggctccctttggcatttccgttatccgttagcaaacgatgcaaaaacggcagatggtaaagattatttagtggtggcaaccacacgtccagaaactatgttgggcgatacggcggtggcggtacatcctgaagatgagcgttaccaatctttaattggtaaaactgttgttctaccactggctaaccgtgaaattccgattattgccgatgaatatgtggatcgtgaattcggtacaggtgtcgtgaaaatcaccccagcacacgatttcaacgactatgaagtgggtaaacgtcataatttaccaatggtaaatgtattgacgctgaacgcaaatattcgtgatgaagcggaaattatcggtactgacggcaaaccacttgctggctatgaagcgactattcctgcggattaccgtggcttagaacgttttgctgcgcgtaagaaaattgtcgcagattttgaagcactgggtttattagacgaaattaaaccacacgatttgaaagtgccttatggcgaccgtggcggtgtgccaattgagccgatgctaactgaccaatggtatgtaagcgtaaaaccacttgctgatgtggcaattaaagcggtggaagatggcgaaatccaattcgtgccgaaacaatacgaaaacctttacttctcttggatgcgtgatattcaagattggtgtatttctcgccaactttggtggggacaccgcattccagcgtggtatgacgcggaaggcaatgtttatgtcgcacgtaacgaagaagaagtgcggtcaaaatataacttagattctgcggttgaactcaaacaagatgaagacgtgttagatacgtggttctcatcaggcttatggacgttctctaccttaggttggccagagcaaactaaagagctcaaaatgttccacccaacggatgtgttaatcacaggttttgatatcatcttcttctgggttgcacgtatgataatgtttacgatgcacttcgtaaaagatgaaaacggcaaaccacaagtgccattcaaaaccgtgtatgtaacaggcttgatccgtgatgaacaaggtcaaaaaatgtcgaaatcgaaaggtaacgtgcttgacccaatcgatatgattgacggtattagccttgaagatttacttgaaaaacgtactggcaacatgatgcagccgcaattagcagaaaaaattgctaaagcgactcgcaaagaatttgctgaaggtattgcggctcacggtacagatgcattgcgtttcacattagctgcattggcttcaaacggtcgtgacattaactgggatatgaaacgtttagagggctaccgtaatttctgtaacaaattatggaatgcaagccgtttcgtcttaacaaatgaaaaattagatttaagccaaggcgagatcgaattctcattagcggatcgttggattcaatcggaattcaatcgcacagtggaaactttccgtagctcattaagccaatatcgtttcgacctttgtgccaatgcgatttatgagtttacctggaaccaattctgtgactggtatttagaattaactaaaccagtatttgcaaacggcaacgcagcacaaatccgtgcggcaagccaaaccttggttcacgtgttagaaaaattattacgtttagcgcatccgcttattccatttattaccgaagaaatttggcaaaaagtgaaaggatttgtcggcattactgctgacagcattatgttacaacctttcccacaagtggaagagagcggctttgatccagaagcagaagctgaaattgagtggttaaaagaagtgatcgttgcggtgcgtaatattcgtgcagaaagcaacatcgcaccaagtaaaggtttagatctgttattccgtaatttaagtgcagaaaatgcaaaaattctcgaaaaacagaccgctcttttaaaagccatggcgaagttagacaacgttcaagtgttagccacaaacgaaacagcaccacttgcggtagcgaaactcgtgggcaatgctgaattgcttgtgccaatggctggctttatcaataaagaagcagagcttgcccgtttaaccaaagagattgaaaaatatcaaaacgaagtgaaacgcatcgaaaacaaacttagcaatgaagctttcgtggctaaagcacctgaagcggttattgcgaaagaacgcgaaaaacaagcggaataccaatctggattagaaaaaatccaagagcagtataaagcgattgaggcgttgtaa

SEQ ID NO: 7142 - DNA, 888 bp, Haemophilus influenzae
  CDS (1)...(888)
atgggtcacttttctgaagaattacaacaggttcaaactcgtatcaatcgctttttagaagctcaatttgaaggcattgaaagtcataatgcgcctttgcttgaggcgatgaaatacgcattattacttggcggtaagcgagttcgccctttcttagtttacgcaacaggtcaaatgcttggcgcagagaaacaaaccttagattacgctgctgctgccattgaagccattcacgcctattccttaattcacgatgatttacctgcaatggatgatgacaatttacgccgtggacatcctacttgtcatatccaatttgatgaagctacagctattcttgcgggcgatgcactgcaaagtttcgcatttgaaatattaaccaaaacaccgaatatttctactgaacaaaaactggctttaattcaaattttagcgcaaggcgctggtgtgcaaggaatgtgtttagggcaaagtttagatcttatttctgagcataaacagattagtttaagtgaattagaattaattcatcgtaacaaaacgggtgcattgctaattgccgcattgaaattaggtttcatttgttctccgcattttaccgacaaaaggttagaacaatccttaacacaatatgcggaagccattggtttagcctttcaagttcaagacgatattttagatattgaaggcgatagtgcagaaattggcaaacaggtgggtgccgatcttgatttagataaaagtacatatccaaaattacttggattaagtggtgcaaaacaaaaagcgcaagatctatatcaaagtgcgttgtctgaattagaaaaaattccttttgatacaaccgttcgtgcattagctgaattcattattaccagaaaaagttaa

SEQ ID NO: 7143 - DNA, 393 bp, Haemophilus influenzae
  CDS (1)...(393)
atggcagagaatcaaaactacggcacaggccgccgcaaaagctcttcagctcgtgtatttatcaaaccgggcagtggtaaaatcactatcaaccaacgtgaattagatgtttactttggtcgcgaaacagcacgtatggtagtacgtcagccattagagttggttgawttaactgataagttagatttatacatcacagttaaaggtggtggtatttctggtcaagcgggtgcaatccgtcacggtatcactcgtgcattaatggaatacgatgaaacattacgcccagcacttcgtgcagctggtttcgttactcgtgacgcacgtcgcgttgaacgtaaaaaagtgggtttacacaaagcacgtcgtcgtccacaatactcaaaacgttaa

SEQ ID NO: 7144 - DNA, 429 bp, Haemophilus influenzae
  CDS (1)...(429)
atgaaaacttttgtagcaaaaccagaaacggttaaacgcgactggtacgtagtagatgcgacaggtaaaactttaggtcgtttagcgactgaattagcacgtcgtcttcgtggtaaacacaaggctgagtacactccacacgtagatactggtgattacatcatcgttatcaacgcagacaaagtggcagtaactggtcgtaaagaaacagataaactttactactggcacactggctatgtaggtggtattaaacaagcgactttcaaagaaatgatcgctcgccgtcctgaagcagtgattgaaattgcggttaaaggtatgttgccaaaaggtccattaggccgtgcaatgttccgtaaattaaaagtgtatgcaggtggagaacaccaacacgcagcacaacaaccacaagtattagatatttaa

SEQ ID NO: 7145 - DNA, 1215 bp, Haemophilus influenzae
  CDS (1)...(1215)
atgcttacattggatcaagctcgctcgaaaatgcttgaacagcttcccttcccgactcaaactgaatacctaaatttacaagaagccgccaatcgaatttgtgcagaagatattatttcgcctatcaatgttccctctttcgataactcagcaatggatggttatgctgtacgtttatcggatttacaacaatctttaaccctttcagtggcagggaaatcttttgcaggtaatccattccaagaggaatggccatcaaaaagtgcggtcagaattatgactggtgcgatgattcctgaaggcacagatgcagtgataatgcaagagcaagtaacactcaatgaagacggcaccatcacttttagtgaattacctaagccgaatcaaaacatccgtcgtattggtgaagatgtaaaaaaaggggatgtcgtattagaacaaggcgcacagctcaccccagtttccttgccattattggcctctctaggcattgcagaagtaaaatgctatcgtcaattaaaagtcggtgtactctcaactggcgatgaacttgtggaagtgggcaaaccattacaaagcggacaaatctatgacactaaccgtttcaccgtaaaattactgctagaaaaactacactgtgaagtcattgatttaggactattacctgataacgaagctgaatttgaaaaagcatttattgccgcacaaagccaagccgatttagtgattactagtggcggtgtttccgttggtgaagcggatttcactaaagcggtattggaaaaagtaggtcaagtaaatttctggaaaattgcaatcaaaccgggcaaaccattcgcttttggtaaattagaaaatgcttggttctgtggtttacccggcaatcctgtttctgcattagtaacattttatcaacttgttcagccattaatcgctaaacttcaaggccaaaaacaatggaaaaaaccaccgcacttttcagccattgctacaatgaatttgaaaaaagcagtgggacgtttagacttccaacggggtttttattacatcaatgaacaaggccaaattgaagtgcaatcagtaggtttccaaggttctcatctctttagtgcttttgtaaaaagcaattgttttatcgttttagaacaagaacgtggcaatgtctctgcgggcgaaacagtgacaattgagcctttcaatcatttattaggataa

SEQ ID NO: 7146 - DNA, 1338 bp, Haemophilus influenzae; identical to SEQ ID NO: 7130
  CDS (1)...(1338)

SEQ ID NO: 7147 - DNA, 828 bp, Haemophilus influenzae; identical to SEQ ID NO: 7129
  CDS (1)...(828)

SEQ ID NO: 7148 - DNA, 270 bp, Haemophilus influenzae
  CDS (1)...(270)
atgtctctaagtactgaaaaaaaagcagcaatcgttgctgaatttggtcgtgatgcgaaagatactggttcttctgaagttcaaatcgcattattaactgcacaaatcaaccacttacaaactcacttcgcagagcacaaaaaagaccaccatggtcgtcgtggtttattacgtatggtttctcgtcgtcgtaaacttttagactacttaaaacgtactgatcttgctttataccaaagcactatcgctcgtttaggtttacgtcgctaa

SEQ ID NO: 7149 - DNA, 1014 bp, Haemophilus influenzae
  CDS (1)...(1014)
atgcagccagatagttaccctaaaattctctttggcttaacgctgttgcttgtgattaccgccgtgatttctttgggaatagggcggtattctttgtctgtaccgcaaattggtcaaattctgtgggcaaaagcgaccgcacttgagatcgatccagtgcagcaacaggtgatttttcaagtgcgtttacctcgaattttaaccgcactttgcgtgggtgccggtttggcattgagtggtgtggtattgcaaggcatttttcgtaacccgttagtgaatccgcatattatcggcgtgacctccggttcagccttcggtggcaccttggcaattttctttggattcagtttatacggcttatttaccagcactattttattcggcttcggcacgcttgccttggtttttctatttagcttcaaatttaatcaacgcagcttgttgatgcttattcttatcggcatgattttaagcggacttttttcagccctagtgagcctattgcaatacatttccgatacagaagaaaaattgccaagcattgtgttttggttgatggggagttttgccacctctaactgggaaaaactcctctttttctttgtcccgtttttgctgtgtagctcgattttgctcagcttaagttggcgcttgaatttactgtctttagatgagaaagaagccaaggctttgggcgtgaaaatggccccattacgttggttagtgatctttttaagcggttcgttagtggcatgccaggtggcaattagcggcagtatcggctgggtcgggctgatcattcctcatcttagccgtatgctggtaggtgccaatcatcaaagtttattgccttgcaccatgcttgttggggcgacttatatgttgcttgtggacaatgttgcgcgttccctatccgatgccgaaattccaatcagtattttgaccgcacttattggtgcaccgttgtttggtgtattggtatataaactaaaacgcggaggcatgaatgaataa

SEQ ID NO: 7150 - DNA, 1221 bp, Haemophilus influenzae
  CDS (1)...(1221)
atgagaagaactgtaattacaggctttgggattatttcaagtatcggtaacaacaaagaagaagtattggcttcattaaaagcagggaaatcaggtattgaagttgtgcctgagtttgtagaaatgaatatgcgtagccatgttgccggaacaatcaaattaaacccaagcgagcacattgatcgtaaagtgttccgttttatgggtgatgcagcggcttatgcttatctttctatgcgtgaagcgattgaggatgctggcttaacagaagatcaagtttctaatgatcgtactggtttagtgattggtgcgggtacgggttctgcacataaccagttagtggcttgtgatgcggtgcgtggtcctagaggtgtaaaggcgattggtccttacgcagtaacgaaaacaatggcatcaagtgtttctgcctgtttagctactccttataaaatccgtggtgtgaactattcaatgagttctgcttgtgcaacctctgcacattgtatcggtcatgcggttgagttaattcaattaggcaaacaagatgtggtttttgcaggtggtgcggaagaattatcttgggaatgtgcaactgaatttgatgcgatgggtgccgtttcaactaaatacaatgaaacgccagaaaaagcatctcgtgcttatgacgcaaatcgtgacggtttcgttattgcaggtggtggtgctgttgtggttgtggaagaattagaacatgcacttgctcgtggtgcaaaaatttacgctgaaattgtaggttatggcgcaacttctgatggttacgatatggttgcaccaagtggtgaaggtgcagagcgttgtatgaaacaagcaatggcaactgtcgataccccaattgattacattaatgtacatggcacatctacaccagtaggtgacgtgaaagaattaggtgcaatcaaaaatgtatttggtgacaaaatcccagcgatttcttcaactaaatcaatgactggtcactctttaggtgcggcgggtgcacacgaagcaatttacacgttattaatgttggataatgattttattgcaccaagtattaatatcgaaaccttagatgaagccgctgaaggttgcaacatcgttactgagacgaaagaaaatgcaggattacaaactgtcatgtcaaacagctttggttttggtggtacaaatgcgacattaatttttaaacgttataacggttaa

SEQ ID NO: 7151 - DNA, 684 bp, Haemophilus influenzae
  CDS (1)...(684)
atgaataactatttattaaaatgcgaaaatatcaataaattttatcaagaaggcgaaaatcaaacgcaagtgttaaaaggcgtttctttttctatggaacctgcagaattggttgcgattgtgggaagctctggttcagggaaaagtactttattacatactttgggtggcttagatcagccaagtagtggggaagtgtttattaatggacaatccttgcaaaaagcatcggctaatgaattagctgctttgcgtaatcgttatttaggatttgtgtaccaatttcatcatttaatggcggattttaccgcacttgaaaatgtgatgatgccgatgttgattggtcatcaaaataaaactgaagcgaaagatcgcgccgaaaaaatgctaagtgcggtgggattaagtcatagaattacccatcgtccttctgcgctttctggtggggaacgtcagcgtgtggcgattgcgcgtgctttagtgaataatccatcgttagttttagcggatgaacccacaggaaatctcgatcacaagaccactgaaagtatttttgagctgattcaacaacttaatcaagagcaaaatattgcttttttattagtcactcacgatatggggcttgcggaaaaattatcacgccgtttagtgatgcaagatggtcttttgaaggaaggtgcataa

SEQ ID NO: 7152 - DNA, 1143 bp, Haemophilus influenzae
  CDS (1)...(1143)
atggatgctttcaaacagcaactggaacagcttagcgcaaaaaatcaatatcgttcaattccagatttagttcatcaaggacgatatattacgcgagaaaatcgcaaaatgctgaatatgtcatctaatgattatttaggtttggcatcaaatgaaaacttgcgccagtcttttttacagcaatatggcggtaattttccctcttttaccagttcttcatcgcgtttattaacgggcaactttcctatttataccgatttggaagagcttgtcgcacaacgtttccaacgggaaagtgcgttattatttaacagcggctatcacgccaatatcggcattttgcctgctttgacgacgacgaaaagtttgattttggcagataaattagtgcatgccagcatgattgatggcattcgtttaagccaatgtgagttctttcgttatcgtcataatgattatgaacatttgaaaaatctgcttgaaaaaaacgtcggaaaatttgaccgcacttttatcgttaccgaatctgttttcagtatggacggcgacgtggcggatttgaaacagcttgttcaattaaaaaaacaatttcccaatacttatctttatgtggatgaagcccacgccgtcggtgtttatgggcaaaacggattgggtattgccgaacgagctaatgtgatagctgatatagatttgttggttggcacttttggcaaggccttagcttcaatgggggcttatgtcgtctgtgatcaaatattaaaagaatgtttgattaatcaaatgcgtccattgattttttcaaccgcacttccgccctttaatgtggcgtggactcattttatttttgaacgattaccacaactttcaaaagaaagaacgcatcttgagcagttaagtgcatttttacgccaagaagtggaacacagaacgcaaataatgccaagccaaacttgcatcgttccctatattttaggcgagaacgaagcaacccttgctaaggcgaaagatctgcaagagcaaggttattattgtttgccaatcagaccgccgacagtacccaaaaacacatccagaatccgcctgtctctaactgccgatatgacggcagatgaagtgcggcagtttgcggtgcatttataa

SEQ ID NO: 7153 - DNA, 1293 bp, Haemophilus influenzae
  CDS (1)...(1293)
atggtggatgaacaatcacttttagcttttgatacacaacatatttggcatccttattcttcagtttcttctgatatgccgctttatgcggtggaacgtgctgatggcgtgatgataactttaaaagatggtcgtcgtttgattgatggtatgtcctcttggtgggcggcgttgcacggttataatcatcctcgtttaaatgcggcggcacagaatcaattagcaaaaatgagccatattatgtttggcggatttacccatgacccagcggtggaattagctcaattattggtacaaattttgcccaatggattagataagatcttttttgctgatagtggttctgttgcagtggaagtagcgatgaaaatggctattcaatatcagcacgctaaaggagaagtgcaacgacaaaaatttgccactattcgttctggttatcacggcgatacttggaatgcaatgtcagtgtgtgatccaaccacagggatgcatcatttatttcatcatagcttacccgtgcagtattttcttcctcaacccaacattccatttaatgaatcttggaatgattgtgccattgaacctttagctgatttacttaagaaaaaaggtaatgaaatcgccgcactgattttagaaccggttgtgcaaggtgcgggcggtatgtatttttattcgccaacttatttagtgaaagcgcaagcgctttgtaaacaatatggtatattgctaatttttgatgaaattgccacgggatttggtcgaacaggaaaattatttgcagctgaacacgcaggcatttcgccagatattatgtgtatcggtaaagccttaacaggtgggtatttgactttatctgcaagcattacgaccactgaaattgcgcaaactatttgtagcggtgaggctaaatgctttatgcacgggcccacttttatggcaaatccgttggcttgtgcgattgcagcagaatctatccgtttattgttggaaagcccttggcagcaaaatattcagcgaattgagtcttccttaaaacaacagctttcgcctttatctgaaaaagattacgtcaaagaagttcgtgcattaggggcgattggggtggttgaaatgaaaagtgcggtaaatatgaaaactttagtcccacgttttgtggaacaaggtgtttggattcggcctttcggaaaattggtttatgttatgccaccatttgtgattaaagatgatgaacttcagaaattaacggaaggcatgattctggctttaactcaggaatatgaacattag

SEQ ID NO: 7154 - DNA, 1086 bp, Haemophilus influenzae
  CDS (1)...(1086)
atgatgaaagattccattattgcaaaattagaaagtttaaaagaacgctatgaagagctagaagccttattgggcgatgtttctgtaattagtgatcaggataaattccgtgcgtattctaaagaatattcgcaacttgaagaagtggtgaaatgttttaatcgttggacgcaattaaatcaaaatattgaagaagctgaaatattgctcgacgatcctgaaatgaaagaaatggcacaaatggaaatcgaagaatccaaagcggaaattgaagaagtggaacaacaacttcaaattcttttactgccgaaagatcctaatgatgaatataactgctatttagaaatccgagcgggaacaggcggtgatgaagcgggtatttttgcgggtgatttattccgtatgtacagtcgttatgctgaaagtaaacgctggcgtgtagaaatgctaagtgctaacgaaagtgagcaaggcggttataaagaggtgattgttaaagtcactggcgaaggtgtgtatggtcagttgaagtttgagtctggtggtcatcgtgtgcaacgtgtaccaaaaactgaaagccaagggcgtatccacacgtctgcttgtaccgttgcggtaatgccagaattgcctgaatctgaaatgccagaaattaatccagcagatttgcgtattgatacttatcgttcatcaggcgctggtggtcagcacgtaaatacaacggattctgcggtgcgtattacacatattccaacaggtattgtggtggaatgtcaggatgagcgttcacagcacaaaaataaagcgaaagcaatgtcagtattagcgtcacgtattgttcaagcagagcaagaacgccaagccgcagaacaaacagatatgcgtcgtaacttattaggttcgggcgatcgttctgataaaattcgtacatataattatccgcaaggtcgagttacagatcaccgtatcaatctcaccatttaccgtttggatgaagtgatgaatggtaaaattgatgaactgattcagccgattattaccgaatatcaagcggatcagttggctgcattgtctgaacagaattaa

SEQ ID NO: 7155 - DNA, 1437 bp, Haemophilus influenzae
  CDS (1)...(1437)
atgtctagaagactaagaagaacgaagattgtatgtactatgggcccatcaactgaccgtgataacaatcttgaaaaaattatcgcagcgggcgcaaacgtagttcgtatgaacttctctcacggtacacctgatgaccatatcggacgtgctgaacgtgtacgttctattgcgaaaaaattaggtaaaaccgtggcaatcttaggtgatttacaaggtcctaaaattcgtgtttctacttttaaagacggtaaaattttcttaaacgttggcgataaattcattcttgatgcagagttaccaaaaggcgaaggcactcaagaatccgttggtttagactataaaacgcttcctcaagatgttgtgccgggcgatattcttttattagatgatggccgtgttcaattaaaagtattatcaactgatggtgcaaaagttttcactgaagttactgttggtggtccattatcaaataataaaggtatcaataaattaggtggcggtttatctgcggatgccctaacagaaaaagataaagccgacattattaccgctgcacgcattggtgttgatttcttagccgtttctttccctcgttcaagtgcagatttaaattatgcacgtgaacttgctcaacaagcaggtttaaatgcaaaaatcgttgctaaagttgaacgtgcagaaaccgttgctaatgatgaagccatggacgatattattttagcctctgatgtaattatggttgcacgtggtgacttaggtgtagaaatcggcgatcctgaattagtcggtgtacagaaaaaattaatccgtcgttcacgtcaattaaatcgtgctgtaattacagcgactcaaatgatggaatcaatgattagtaacccaatgccaactcgtgctgaagtaatggacgttgcaaacgcagtattagatggaactgatgcagttatgctttctgcagaaacagcagctggtcaatatccttctgaaacagtggcagcaatggctagcgtatgtttaggtgcagaaaaaatgccaagcattaacgtttctcgtcaccgtatggataaagaatttgaaactattgaagaatctgttgcgatgtctgcaatgtatgcagcaaaccacatgaaaggtgtagcggcaatcgtcactttaagtagcacaggccgtactccattattaatgtcacgcattagctctggcttaccaatctttgctttatctcgtaatcaagaaaccctaaacctttgtgcactataccgcggtgtaacaccaatttatcacggcgaagaaagtcgtacagaagctggtgcaaaagcagcacctcaatcattaaaagaaaaaggttatttatctactggcgatttagtgctggtaacccaaggtggtcaaggtgcgacacaaactaacgtatgtcgtacattaattgttgaataa

SEQ ID NO: 7156 - DNA, 1515 bp, Haemophilus influenzae
  CDS (1)...(1515)
gtggatttttccaccgttttttatttccttttttcaccgcacttttcacttaaatccaatagatatttgcggtatcatagacgacattctagtatcgaaataagtcctatggcatcacaacctcaaatcaaatcttcagacaaaaaaacagcacaagttagcattcctccgcactcaactgaggctgaacaagccgtgttgggtggcatcatgctgagcaatcaacattgggatggcattgctgaacgtgtgattgctgacgatttttatacttttcagcatcgtctaatttttacagaaatggaacatctaatgcgtaatcaatcgcctattgatttaattacgctagatcaagccttaagaagccgtggtgtaagcgatgaagtaggtggatttgcctatctagcagagctttccaataatactccgaacgccattaatattttggcttatgcagatatcgtgcgcgagaaagccatattacgagaacttatttcggtagggaatcgcattgctgaaaatagctattctcctaaagggcaagacattaagttaattcttgatgaggctgagcgtgaagtatttgcgattgcagaaaaacgtacgacttctagcgaaggcccacaaaatgtgatcaatgtgctagaaagtacgattgaaaaaatcgatattttaagcaaacttgaaaatcattcaggtgtaacaggtgttacgacgggctttaccgatcttgataaaaaaacggctggtttacaaccttctgacttaattatcgttgcggcacgtccgtcaatgggtaaaaccactttcgccatgaacctttgcgaaaatgccgcaatggcaagtgaaaaacccgttttagtatttagtttagaaatgccagcagaacaaattatgatgcgtatgatcgcttcccttgctcgcgttgatcaaactaaaatccgaacaggtcaaaatttagatgaaatcgagtggaacaaaattgccagcgtagtaggaatgttcaagcaaaaaaataatctttttatcgatgattcttcaggtctaacacctaccgatgttcgttcgcgcgcacgccgagtttatcgtgaaaatggtggattaagtatgattatggtggattatttgcaattaatgcgcgcaccagcattttcagataaccgaacactagaaatcgcagaaatttctcgctccctcaaagcactcgccaaagaattacaagtgccagtagtcgccctttctcagttaaatcgtactttagaacaacgtggagacaaacgccctgtaaactcagatttacgtgaatctggctctattgaacaagatgcagacttgattatgtttatttatcgtgatgaagtctataacgataactcggaagataaaggtgttgcagaaattattatcggtaaacagcgtaacggcccaattggtcgagtgcggttaaaatttaatggacaattttcacgcttcgacaatctcgccgaacaacgtgaatatcgagatgattattaa

SEQ ID NO: 7157 - DNA, 1083 bp, Haemophilus influenzae
  CDS (1)...(1083)
atgaacgtaaaaccggcgacagcgaaaattagttcgcacgccttaaaacagaatttagaaataattaaacaaaaagcaccaaatagcaaaattattgctgtggttaaagcaaacgcctatggtcacggcgttgtattcgttgcttcaaccttagaacaaaatgttgattgctttggcgtggcgcgtttagaagaggctttagcattacgctccaacggcattactaaaccgattttattgcttgaaggttttttcaatgaacaagatttgcctattctagccgttaataatattgaaaccgtggtacacaatcacgaacagcttgatgctttaaaacgtgcgaatttaccaagtccaattaaggtttggttaaaaatagatacgggaatgcatcgcttgggcgttgctcttgatgaagtggattatttttatcaagaactgaaaaaactccctcaaattcaaccgcacttaggctttgtcagccatttcagccgagccgatgaactagaatcagattacacccaacttcaaatcaatcgttttttatccgtcacaaaagataaacaaggtgaacgtactattgcagcgtcaggcggcattcttttctggccaaaatcccacttagaatgtatccgcccaggcattattatgtacggcatttctccaactgatactatcggtaaagagtttggcttaacgccagtgatgaatttaacctcgtcattaattgccgttcgccatcataaacaaggcgatcctgtaggttacggcggtatttggacaagtccacgagataccaaaattggagtggtcgcaatgggttatggcgatggttatccgcgcgatgtgccagaaggtacacctgtttatttaaatggccgtcttgtaccaattgttggacgtgtgtcaatggatatgcttactgttgatttaggcgcagatagccaagatttggtaggcgatgaagtaattttatggggcaaggaattacctattgaaaccgtagctaaattcacaggcattttaagctacgagctaattacaaaattaacacctcgtgttataactgaatacgttgattaa

SEQ ID NO: 7158 - DNA, 1734 bp, Haemophilus influenzae
  CDS (1)...(1734)
gtgaatattcaatctattctatccgataaaattaaacaagcgatgattcttgcaggtgctgatcaatcttgcgatgcgcttattcgtcaatcaggaaaaccacaatttggcgattatcaagccaatggcattatggctgcggcaaaaaaattaggtttaaatccacgagaatttgctcaaaaagttttagacaatcttcaactatctgatattgcagaaaaattagaaatcgcaggtccaggttttatcaatattttcttaaatccaacttggctaacaactgaaatttcagctgcactttcccacaaaaatttaggtattcaagctaccaataaacaaacagttgtgattgattattcatctccaaacgtagcaaaagaaatgcacgtaggtcatttacgctctacgataatcggcgatgctgtagccagaacccttgagtttttaggtcacaatgtcatccgagctaaccacgtaggcgactggggaacgcaattcggaatgcttattgcttatcttgaaaaaatgcaaaacgagcatgcgagtgaaatggaattacaagatcttgaagccttttatcgcgaagccaaaaaacactacgatgaagatgaagtattcgcagaaaaagcgcgtaattatgttgtgaaattacaaagtggagatgaatattgtcgaacgatgtggaaacgtttagtcgatatcactatgcaacaaaatcagcacaactatgctcgcttaaacgtgactttaaccgaaaaagatgtaatgggcgaaagtctttataatcctatgttaccaagcattgtaaaagatcttaaaaaacaaggtttggctgtggaaaatgatggtgcattggttgtttatttagatgaatttaaaaataaagatggcgacccaatgggtgtaatcgttcaaaaaaaagacggcggtttcctttatactacaaccgatattgctgcagcaaaatatcgttatgaaacattaaaagctaatcgcgcccttgttttttcagatactcgccaaagccaacatatgcaacaagcttggttaattactcgtaaagcaggttatgtaccagatagtttctcgttagagcataaaaactttgggatgatgcttggtaaagatggcaaaccatttaaaacccgtactggcggcacagtgaaattggccgatctattagatgaagccattgaacgcgccactgtattaattaatgaaaaaaataccaatttatctaatgatgaaaaagaagctgtgattgaggctgtcggtattggtgcggtgaaatatgccgatctctccaaaaaccgtactactgattacgtttttgattgggataatatgttaagtttcgaaggtaacacggcaccttatatgcaatatgcctacacccgtattcgttcgatctttaataaaacagatataaattcaaccgcacttttggctgcacctttaactattaaagatgataaagaaagaacgcttgctattaaacttctacaatttgaagaagccgtgcaaactgtcggaaaagaaggcacgccgcacgtgctttgtgcttatttatatgaacttgctggcatcttctcgtcattctacgaacattgtccaattttaaatgctgaagatgaatctataaaattaagtcgtttgaaattagcattattaacggaaaaaaccttaaaacagggtttaacgttactcggtattaaaaccgtagaaaaaatgtaa

SEQ ID NO: 7159 - DNA, 492 bp, Haemophilus influenzae
  CDS (1)...(492)
atgcgtagaattttatctgttttactcgaaaatgaatcgggagcattgtcgcgtgttgttggtttattctctcaacgtgcctttaatattgaaagtttgacggttgcaccaacggatgatccaacgctttctcgaatgaccattgaagctgtgggcgatgctcaggcattggagcaaatcgaaaaacaacttcataaattagtggatgtgtttaaagtggttaatttaagtgagcaggaacatatagaacgagaaattgttttagcgaaagtaagagcagtaggttcatctcgcgatgaaattaaacgattagcagatattttccgcggtcaaattgtagatgtaacaccaaagtcttacacaattcaattaagcggtacaaatgataaagttgatgcgtttatttctgcattgaaagaagaaactacattgttagaaattgttcgttctggattgattagtgtgtctcgtggagaaaagaatattctttaa

SEQ ID NO: 7160 - DNA, 1722 bp, Haemophilus influenzae
  CDS (1)...(1722)
atgaagaagttatctggcgcagagatggtggttcaatctttacgtgatgaaggcgtagagtatgtatttggttatcccggaggcgcggtattagatatttatgatgcaattcatacgctgggtggtattgaacatattttagttcgccacgaacaagccgcggtgcatatggcggatggttacgcacgttcaacgggtaaagttggatgtgtgctagtgacttcggggcctggtgcaacaaatgctatcactggcattttaacggcttataccgattctgtgcctatggttatcatttcgggtcaggttatgagcaatttaattggcagtgatgctttccaagaatgtgatatgctgggtatttctcgtcccgttgtgaagcatagctttattgtcaaaaaggcggaagatattccatctactttgaaaaaagccttttatattgcatctacgggtcgtccaggtcctgttgttgtggatattccaaaagacactgtaaatcctaattttaaatatccttatgaataccctgaatatgtcgagttacgttcttataatccaacagtaaatggacacaaaggtcaaattaaaaaagcgttaaaagcacttttagtggcgaagaaaccaatactttttgtcggtggtggtgcaatcactgctgaatgtagtgagcagttaattcagtttgcacaacgtttaaatttacccgtgacttcctcattaatgggattgggtgcttatccaagtacggataaacaattcttaggtatgttgggtatgcatggtactttagaagcgaatacggcaatgcacgaaagtgatcttattttggggattggcgttcgttttgatgatcgtacgacaaataatttagaaaaatattgcccaaatgcaaaagtgattcatattgatattgatccaacctcaatttctaaaaatgtgccagtagcgattccaattgtcggaaatgcgaaaaatgtattggaagaatttttgggtttattgaatgaagagggattaaaatctcaaacagatcttgaaagttggtggcaagaaatcaaccaatggaaagcaaaaaaatgtttggaatttgaccgcacttctggcgtgattaaaccgcaacaagtcgtggaagcggtatatcgcctcacgaaaggacaagcttatgtggcttctgatgtaggtcagcaccaaatgtttgctgcgttacattatccattcgatgaaccgcgtcattggattaattctggtggtgcaggcacaatgggttttggttttcctgcggcacttggtgttaaattagctcatcctgaaggaactgttgtttgcgttactggcgatggtagtattcaaatgaatattcaagagctttctaccgcaacacaatatggcattcctgttgtcattatttgtttgaataatcatttcttgggaatggtaaaacaatggcaagatttgatttattctggtcgccattcgcaaacctatatgaattccttgcctgattttgcgaaattggcagaatcttacggtcacgtaggaataaaaattgctacccccgatgaacttgaaagcaaattgcaagaagcattcagtattaaaaataaattagtctttgtagatattaatgtagatgaatctgaacacgtttatccaatgcaaattcgtggtggtgcaatgaatgaaatgattttaagtaaacctcaagaggagacaaactaa

SEQ ID NO: 7161 - DNA, 1590 bp, Haemophilus influenzae
  CDS (1)...(1590)
atggaagccgttcaattagacaaaaatcaagagcctaattataaaggttatagcggtagcttgattcatcctgcatttcaacagcaaacaacaaaacgtgaaaaaccgagtacaccattacctagtttggatttgcttttaaaatatccgccaaatgaacaacgcattacaccagatgaaataatggaaacctcacagcgtattgaacaacaattacgcaattttaatgtaaaagccagcgtaaaagatgtgcttgttggccctgttgttacgcgttatgaattagaattacagccgggtgtgaaagcatcaaaagtcacgagcatcgataccgatttagcaagagcattgatgtttcgttctattcgtgtggcagaggtgattccaggtaaaccttatattggtattgaaaccccaaatcttcatcgtcaaatggtgccattacgtgatgtattagatagcaatgaattccgtgatagcaaggcaactttacctattgctttaggtaaagatattagtggcaaaccagtcattgttgatttagcgaaaatgccacatttattggtagcaggttctacgggatcaggtaagtctgttggtgtgaatacgatgattctaagtttactttatcgtgttcaaccagaagatgtgaaatttattatgattgatcctaaagtcgtcgaactttctgtttataatgatattccacatttactgacaccagttgtaacggatatgaaaaaagccgctaatgcgttgcgttggtgcgtagatgaaatggaacgtcgttatcagttgctttcagctttacgcgtacgaaacattgaaggctttaatgaaaaaattgatgaatacgaagcaatgggaatgcctgtgccaaatccaatttggcgactgggcgatacgatggatgcaatgccaccagcgttgaaaaaattgagttatattgtggttattgtcgatgagtttgctgatttaatgatggtagcgggtaagcaaatcgaagaactgattgcacggttggcacaaaaagcacgagctatcggtatccatttaattttagccacacaacgcccctctgtggatgtgattactggtttaattaaagcaaatattccaagtcgcattgcctttacggtggcaagtaaaattgactcacgtactattcttgatcaagggggtgcagaagcccttttagggcgtggagatatgctttattctggacaaggttcatctgatttaatccgcgtacatggagcctatatgagtgatgatgaagtcatcaatattgccgatgattggcgagcacgcggtaaacctgattatattgatggaattttagaaagcgcagacgatgaggaaagttcagaaaaagggatatcaagcggtggggaattagatccactctttgatgaagtaatggactttgttattaatactggtacaacttcagtatcttctattcaacgtaaattcagcgtaggttttaaccgagcagcgcgtattatggatcaaatggaagaacaagggattgtcagcccaatgcaaaatggtaagcgtgaaattttatcgcatcgtccagaatactaa

SEQ ID NO: 7162 - DNA, 1428 bp, Haemophilus influenzae
  CDS (1)...(1428)
gtgggtatacttacccacgggaagttatccacggcaaatacggagaataaaatggctaaagccccaaaaacagcttatgtatgtaacgattgtggtgcggagttttctcgttggcaagggcaatgttccgcttgtaaagcgtggaatacaattacggaagtgcggttaatttccacggcaaaatcaaaaaatgatcgttttagtggctatgcgggtgaaactcaggcaaaaattcaaacgctctctgaaattagtttgcaagaaacaccacgtttttccagtggttttagtgaattagatagggtactgggcggcgggatcgtaccgggtagtgcgattttaattggtgggcatcctggagcagggaaaagtacattgttactacaggttatgtgtggtttggcaaaaaatatgaccgcactttatgtaacgggagaggaatcattacaacaggttgcgatgcgcgcaagccgattgggattgccaagtgatcaattaaaaatgttgtcagaaacctctgtggaacagatttgtaatttagcggatcaattaaaaccgcaaattatcgtggtggattctatccaagtaatgcatttggcagatattcaatcatcgccaggcagtgtagctcaagtgcgtgaatgcgcttcttttctcactcgttatgcaaaaactcgccaagtggcgattattatggttggacacgttacgaaagacggaacccttgcagggcctaaagtgttagagcatgccattgactgttcattgttattagaaggcgaagccgattctcgttatcgtactttgcgtagtcataaaaaccgttttggtgcagtaaatgaattgggcgtgtttggaatgacagagcagggtttgcgcgaagtgaaaaatccatcggcgatttttttaagtcgcggagatgaaattacgtcaggcagttctgttatggtactttgggagggtactcgtcctcttttagttgaaattcaagctttagtagatcattcaatgctggcaaatcctcgccgtgttgcggtgggattagagcaaaatcgcttagcgctattactggcggtgttacaccgacatggtggcttacaaatggcggatcaagatgtttttgtaaatgtggttggtggtgtaaaagtcagtgaaaccagtgcggatttagctttgttgcttgcgttaatttcaagtttccgtaatcgccctttgccgcaagatttagtgatttttggcgaagttggattagcgggagaaattcgtcctgtgccaagtggacaggaacgtattagcgaggctgcaaaacacggttttaaacgtgctattgttccttttggtaacaagccgaaaagtgcggtcgaaaatatgcaggtttttactgtgaaaaaactcacggatgcgctcgctgtgttagataatttgtaa

SEQ ID NO: 7163 - DNA, 1263 bp, Haemophilus influenzae
  CDS (1)...(1263)
atggaaattattagtcaatatggttcttggttggtgtggatcacagcagtctttggcttttttatggcgttcggaattggagcgaatgatgtctcaaattcaatgggaacatcagtaggatctggtaccataaccgccaaacaagcgattattatcgcattaatttttgaatctgctggtgcctatctagcaggtggtgaagtaacacaaaccattaaaagtggtgtaatcgaaccaatacaatttgtcgatacgccagatattttagctctaggtatgctttcaaccttatttgcatcgggtgcttggttatttattgcaaccaaaatgggttggccagtttctggtacacacactattattggtgcaattattggatttgcctgtattacgattggccctagttctgtagattggtcaaagattggcagcatcgttggtagctggtttgtcacgcctgtcattgcgggtattttggcttatgcaatctttgcaagtacgcaaaaacttatttttgataccgaacaaccactaaaaaatgcacaaaaatatggcccttattatatggggataaccgtgtttgtactttgtatcgtgacgatgaaaaaaggcttaaaacacgtaggcttaaatctttcaaacagtgaaactttaatcatttcacttgccatcagtcttatcggaatgtttttcttccatttctattttaaaagcaaaatcttcactcaatcagcaaacaaaggcacttttggtgcagtagaaaaagtcttcagtattttaatgttattaaccgcttgtgcgatggcatttgcgcacggttctaatgacgtagccaatgcaattggccctctttctgcagtggtctctattgtaaatgaaggcggtaaaattgtttcaggtggagccttaacttggtggattttacccttaggtgcattaggtattgctgtgggcttaattactatgggacaaaaagtgatggcgactgttggatctgggatcaccgatttaacgccaagccgtggctttgccgctcaatttgctactgcgatgaccgttgtcgtggcatcaggcacaggcttacccatctcaacaacacaaacacttgttggagctattttaggtatcggctttgcacgtggtatcgcagcactgaatttaacggttatccgaaacatcattagttcttggattgtcacattaccagcaggtgcatttttcgccattattattttctatgtgctaagaacaatctttaattaa

SEQ ID NO: 7164 - DNA, 948 bp, Haemophilus influenzae
  CDS (1)...(948)
atgcctgacattaaactcttcgcgggtaatgctacacctgaacttgcaaaacgtatttctgaacgtttatatatttcactaggcgatgcaacagtcgctcgtttcagcgatggagaaattcaagttcaaattaatgaaaatgtgcgtggtgcggatgtatttatcatccaatcaacttgtgcgccaaccaatgataacttgatggaattggttgtgatggtagatgcgttacgtcgcgcatctgctggtcgtattactgccgtgattccttatttcggctatgctcgccaagatcgtcgtgttcgttctgctcgtgtgcctattaccgctaaagttgtggcagatttactttcaattgttggtattgaccgtgtcttaacctgtgacctacacgcagaacaaatccaaggtttctttgatgttcccgtagacaacgtatttggttcgccagttttaattcacgatattttgaaaaaatctgatcttaaaaatccaattgttgtttccccagatattggcggcgttgtacgtgctcgcgctgtcgctaaattattaaatgatacggatatggctattattgacaaacgtcgtccacgtgcaaacgtagcacaagtgatgcatattatcggtgatgttgcagatcgtgattgtattttggttgatgatatgattgatactggcggtacgctttgtaaagcggcagaagcattaaaagaacgtggtgcaaaacgtgtttttgcttatgcaactcacgccgttttctctggtgcagcagccaaaaatttagccagcgatgccattgatgaagttgtagttactgacacgattcctctatcagaagaaatgaaagcgatcggtaaagttcgcgtgcttacgctttcttccatgctggcagaagctattcgccgcattagcaacgaagaatctatttctgcgatgtttaactaa

SEQ ID NO: 7165 - DNA, 1206 bp, Haemophilus influenzae
  CDS (1)...(1206)
atgactgacattaataccgttctcgcggaactaaagcgtggtactgatgaaatcctttcagaagcggatttaatcgaaaaactgaaagaaaatcgcccattaaaagtaaaattaggcgcagatccaaccgcaccagatattcatttaggacatactgttgtattaaacaaattacgtcaatttcaacaactcggtcatgaagtctatttcttaattggcgattttactggaatggtgggcgatccatcgggcaaaaatgcgactcgtcctccacttagccgtgaagatgtattgcgcaatgcggaaacctataaagagcaaatttataaaattctcgatccacaaaaaaccaaaatcgtcttcaactctgaatggttaagcaaacttggtacagraggtatgattcgccttgcaagcaactatacggttgcgcgtatgcttgaacgcgacgacttcaaaaaacgctttggaaacaaccaacccattgccatccatgaatttatttatccattactacaaggctacgattccgttgcattagacgcagatgtggaactaggcggtacagaccaaaaattcaacttacttgttggtcgtgaattacaaaaatcagcaggcaaaaaaccacaggttgcgattacactcccattactcgttggcttagatggcgagaaaaaaatgtctaaatcacttggtaactatattggcgtaacggaagcaccaagcgatatgttcggtaaagtgatgtcaatttctgatgaactcatgtgggattggtataaccttctttcattccgtccattaaacgaaattgcacaattaaaatcggaagtagaaaacggcaaaaatcctcgtgatgtcaaaatcttactagcaaaagaattaattgcacgtttccacaatgaagaggcagcaaacgctgcagaacaagaatttattaaccgtttccaaaaaggcgcaatgcctgatgaaatgcctgaatttacgttctctggcgaaatgggtttagccaccttattaaaagaagcaggtcttgttccttccacttctgaagcgattcgctctgctcaacaaggcggtgtaaaaatcaatggtgaaaaagtcgataacgtaaaagacaatgcaccgaaaggtacaaatgtttaccaagtgggtaaacgaaaatttgcgcgtgtacggttgaataaagtagatacagttaaataa

SEQ ID NO: 7166 - DNA, 615 bp, Haemophilus influenzae
  CDS (1)...(615)
atgtttactggaattgtacaaggcaccgcccccatccactccattaaagaaaaggctaattttagaacacaagtggtaaaattactacctgaaatgcgtaaagatctggaaattggcgcatcaatagcaaataacggcgtatgtttaactgtaactgaaatcaatggtgatctggttagctttgatctgatgcaagaaactttaaaaattacaaatctcggcacagtaaaagtgggcgattatgtgaatatagaacgtgctatgcaaatgggaacggaaattggcggacatttattatctggtcatatttattgcaccgcaaaaatttcagatattatcgctagtgaaaataaccgacaaatttggtttgaactgccaagtgcggatgtgatgaaatatattttaacgaaaggatttgttgcggtagatggcattagcctcactattggcgaagtaagagacactcaattctgtgtaaatttaatccctgaaactttacaacgaaccttaatggggcggcgtaaagtgggcgatattgtgaatatcgaaattgatccacaaacgcaagctattgtagatacggtagaaaattatttgcagtcaaaaaatttctag

SEQ ID NO: 7167 - DNA, 1299 bp, Haemophilus influenzae
  CDS (1)...(1299)
atgggaaaaagcgttgttatcttaggcgcacaatggggcgatgaaggtaaaggaaaaatcgttgatcttttgacggatcgcgtaaaatacgtagttcgttatcaaggcggccataacgcaggtcacacacttattatcaatggcgaaaaaaccgtattacgtttaattccatctggtatgttacatccaaacgtaacttgcttaattggtaatggcgttgtggtttcgcctgaagcattaatgaaagaaatgggcgaacttgaaagccgaggtattaaagttcgtgaacgtttattaatttcagaagcttgtcctttgattctgccttatcatgtggctatggatcacgcgcgcgaagcagcccttggcaaaaaagctataggtacaactggtcgtggtattggcccagcttatgaagataaagtagctcgtcgtggtttacgcgtaggcgatttatttaataaagaagcctttgccgaaaaactcaaaaacatccttgaatactataatttccaattggtgaactactacaaagttgaacctgtcgattatcaaaaaaccttagatgatgtaatggcaattgccgatgtaatcacaggtatggtggcagacatcactacaattcttgatactgcgcgcaaaaatggcgaacatattttatttgaaggcgcacaagggacaatgttagatatcgaccacggtacttatccgtatgtaaccagctcaaacacaacggctggtggtgttgcaacaggttctggttttggcccgcgtaatcttgattatgtacttggtatcattaaggcttactgtactcgtgtaggtggtggcccattcacgacggaattatttgatgatgtgggtgctgaaattgcgcgtaaaggtaacgaatttggtgcggtaacaggtcgtccacgtcgctgtggttggtttgatgccgtcgccattcgtcgtgcaatccaacttaactctatttctggtttctgtatgactaaattagacgtattagatggttttgatgaagtaaaaatctgtgttgcttacaaaatgccaaatggcgaaatcgttgaatatgcaccgttagcggcgaaagattgggaaggtgtagaaccgatttatgaaacattacctggttggaaagaaaatactttccgtatcaccgatgtaaataaattaccacaaaactgcattaactatattaaacgtattgaagaagtgactggcgtaccaattgatattctttcaactggccctgatcgtgtggaaacaatgattttacgtgaaccgttcgctgcttaa

SEQ ID NO: 7168 - DNA, 1011 bp, Haemophilus influenzae
  CDS (1)...(1011)
atggcaacaattaaagatgtggcaaaaatggctggtgtgtccaccacaaccgtatctcacgtaattaataaaacccgtttcgttgcaaaagatacggaagaagcggtgttatccgcaattaaacaacttaattattcccctagtgctgtggcacgcagtttaaaagtcaataccaccaaatccattggtatgattgtgacaaccagtgaagcaccgtattttgccgaaataatccattctgttgaagaacattgctatcgacaaggttattctttattttgtgtaacacacaaaatggatcctgaaaaagtcaaaaatcatttagaaatgttggcaaaaaaaagggtcgatggtttgcttgtaatgtgttctgaatatactcaggattcattggatttactttcatcattttccactattccaatggttgtaatggattggggcccaaatgcgaataccgatgtgattgatgatcatagttttgatggcggttatttagcaaccaaacatcttatagagtgcggtcataaaaaaatcgggattatctgcggcgaactcaataaaactaccgcaagaacgcgttatgaaggctttgaaaaagcaatggaagaagctaaattaacaatcaatccgtcttgggtactagagggtgcatttgagcctgaagatggctatgaatgtatgaatcgtttactgactcaagagaaattaccaaccgccctattctgctgtaacgatgtgatggcgctcggtgcaatatcagcactaacagaaaaaggcttgcgtgtgccagaggatatgtcaattatcggctatgatgatattcacgcctcacgtttctacgcgccaccattaaccaccattcatcaatcaaaactacgtttaggcagacaggcaataaatattctgttagaacgaattactcacaaagatgaaggtgttcaacaatatagtcgtatcgatataacccctgagcttatcattcgaaaatccgttaaatcgattttataa

SEQ ID NO: 7169 - DNA, 876 bp, Haemophilus influenzae
  CDS (1)...(876)
atggctgaaaatcgttatgaactaaataaaaacttagcacagatgctcaaaggtggtgttatcatggatgttcaaaaccctgaacaagctcgcattgcagaagctgctggtgcagctgcagtgatggctttggaacgaattcctgcagatattcgtgctgttggaggtgtctctcgaatgagcgatcctaagatgatcaaggaaatccaaggagcagttagcattccagttatggcaaaagttagaattggacatttcgttgaggctcagattttggaagctattgaaattgactatatcgatgagagtgaagtgctttctccagctgacaaccgtttccatgtggacaagaaagaattccaagtaccttttgtatgtggtgccaaggatttgggcgaggccttgcgtcgtatcgctgaaggggcttcaatgattcgtacaaaaggagaaccaggaacaggagatatcgtccaagctgttcgccatatgcgcatgatgagtcaagaaattcgtcgcattcaaaatttacgtgaggacgagctctatgttgcggccaaagatttacaagttcctgtagaattggttcaatacgtccataagcatgggaaattgccagttgtcaacttcgcagctggaggaattgcaactccagcagatgcggccttgatgatgcaacttggcgcagagggtgtctttgttggttcaggtatttttaagtcaggagatcctataaaacgtgcgagcgctattgtcaaagctgtaactaactatcgaaatccacaaatcctagcacaaatctccgaagatttaggtgaagccatggttggtatcaatgaaaatgaaatccaaattctcatggctgagcgaggaaaataa

SEQ ID NO: 7170 - DNA, 528 bp, Haemophilus influenzae
  CDS (1)...(528)
atgctagaaaaattaggaattgaaagtgtcgaactgagaaatttaaaaaattttcaacaacattacagtgatttatcaggtttgattctacctggcggtgagtcaaccgccataggaaaacttttaagagagctgtatatgctggaaccgataaaacaagctatctcttctggctttcctgtctttggaacttgtgctggtttgattctgttggctaaagagattacttctcagaaagagagtcattttggaacaatggacattgtggttgagaggaatgcctatggacgccaattgggaagtttctatacagaagcagattgcaaaggggttggtaaaattcctatgacttttatcagaggacctatcatcagtagtgttggtaaaaaagtcaatattcttgcaacggtaaataataaaatcgttgcagcccaagaaaagaatatgctggtaacatcatttcatcctgaattaacaaataacttgagtttgcataaatactttatcgatatatgtaaagtagcataa

SEQ ID NO: 7171 - DNA, 852 bp, Haemophilus influenzae
  CDS (1)...(852)
atgactgatttaaccggaattttatacattgttgccacgcccattggcaatttacaagatattacccaacgtgctttagagacttttgctcaagtggatttaattgcagcagaagatactcgccatagtggacttttattgagccattacggcattaagaagccattttttgctttgcacgatcataacgaacaagaaaaagcgcatattttggtggaaaagctcaagcaggggagtaatattgccttgatttctgatgcggggacgccattaatcagtgaccctggttttcatttagtacgccaatgccgtgaagctggcattcgagttgtgcctttgccaggagcttgtgcggcaattaccgctctttgtgcatcggggattgcttctgatagattttgttttgaaggctttttacctgcgaaaagtaaagcacgcaaagataaattagaaaatatcgcagaagaagaccgcactttgattttttatgaatccactcaccgtattttagatacactagaagatatgcaagcggtgctaggggaagaacgatacattgtgttagcccgtgaaatgactaaaacttgggaaacgattacggggaatacgattaaaaatttacgcgaatggcttttagaagatcccaatcgtacaaaaggcgagatggttttgattgtggaaggcaaaccaaagtctgacaataacgatgaaatttcgccgcaagcggtaaaggcacttgagttaattgcagaagaattgccacttaaaaaagcagcagctatagttgctgagttgtatggttataagaagaatgctttgtatcaatttggattagcgcatttggaaaaataa

SEQ ID NO: 7172 - DNA, 2346 bp, Haemophilus influenzae
  CDS (1)...(2346)
gtggatcgttttcataaaaacactatatcttgtgttttaaatcctgttttaaataacaacaagaaggctcatacaatgaataaaagtttaatggttacaaagcgtgacggtacgcaagaacaaatcaatcttgataaaatccatcgtgtgattacgtgggctgctgaaggactagacaatgtttctgtttctcaagtagaacttcgttcacatattcaattttatgaaggcattcgcacttcagacatccacgaaaccattattaaagcagccgcagatttaatcagcaaagattcgccagattatcaatatttagctgctcgtttagcgattttccatttacgtaaaaaagcctatggtcatttcgatccccctcgtttatacgatcacgtcaaaaaactagtacgtatggaaaaatatgatcaagcgttattagatgattatactcgtgaagaatgggacacaatggacggcttcatcgatcattggcgtgatatgacgttttcttatgcagcagtgaagcaattggagggtaaatatttagtacaaaaccgtgtgacgggagaaatctacgagtctgcacaattcttatatttgctggtttccgcaagtctattctctaaatatccaaaagaaacacgtttggattatgtaaaacgtttctacgatgccacatcgactttcaaaatttccttacctacaccaattatggcgggcgtgcgtacaccaactcgtcagttcagctcttgcgtattaattgaatgtgatgacagtttagattctatcaatgcaacagcatcagctattgtaaaatatgtttcacaacgtgcagggattggtattaatgcaggggctattcgtgcattaggtagcgaaattcgtggtggagaagcattccatacaggttgtattccattctataaatatttccaaactgcagttaaatcttgctcacaaggtggcgttcgtggcggtgcagcaacactttattacccaatttggcacttagaagcagaaaacttgctcgtattaaaaaataaccgtggtgtagaagacaaccgtgttcgtcatatggattatggcgtgcaattaaacaaattaatgtatcaacgcttaattaaaggcagcgagattactttatttagtccatcagatgtacctggactttatgaagcattctttgcggatcaagacaaatttgaagaactttacgtaaaatacgaacaagatccaactatccgtaagcgtactgttaaagcagttgaaatcttttctttattaatgcaagaacgggcatcaacgggtcgaatttacattcaaaacgtggatcactgtaatacccactctccgtttgatccacaagttgcaccagttcgtcaatctaacttatgcttagaaattgcattaccaactaaaccgcttcagcacattaacgatgaaaatggggaaattgcactttgtacactttccgcctttaacttaggtaaaattgaaaacttagatgaattagaagaacttgcggatcttgctgttcgttctcttgatgccttattagactatcaagattatcctgttgtggcagcaaaacgtagctcacttgcacgccgttcactcggtattggggtcattaactatgcgtattaccttgcgaaaaatggtgttcgctattctgatggttcagccaacgatttaacacaccgtacttttgaagccattcaatattatttattgaaagcctctatgaacttagcaaaagagcaaggtgcgtgtgaatacttcaatgaaaccacttatgcaaaaggcattttaccgattgatacctataagaaagatttagattccttaacacaagagcctctacattatgattgggaaagtttacgtaaagatattcaagaatttggtttacgtaactcaacattaactgccttaatgccatcagaaacatcatcgcagatttccaatgcgactaatggtattgagccaccacgcggtcacgtaagtattaaagcatcaaaagatggtatcttaaaacaagttgtacctgaatatgaaaatttaatggataactatgaattactttgggatattccaagtaatgacggctacttacacttagtcggtattatgcaaaaattcgtggatcaagcgatctctgcaaacacaaactatgatccaaaacgttttgaagacggcaaagtaccaatgaaagtgttgttaaaagatttattaaccgcttacaaatacggtttaaaaaccctttactatcaaaatacccgcgacggtgccgaagatgttcaagaagatcttgatgacggctgtgctggtggtgcttgcaaaatttaa

SEQ ID NO: 7173 - DNA, 1230 bp, Haemophilus influenzae
  CDS (1)...(1230)
atggcaatcgaaattcttgttccagacctacctgaatcagttgcagatgcaactgttgccacttggcataaaaaactgggcgatactgtgaaacgtgatgaggttattgtggaaattgaaacggataaagtcgtgctagaagttcccgcactttctgatggtgtactggctgaagttgttcaagctgagggcgaaacagtggtgagtaaacagttgctaggcaaaatttctacggctcaagaaggagatgtcagttcagcgacgttaaaagcaacgaatgaacccacaccatctgatcgtcaaaatgcagcgattgaaaatagtcataatcataatgcggatcagagccctgtaattcgtcgtttattagcagaacatgatttacaagcagatcaaattcaaggttcgggtgtgggtggtcgtttaacacgtgaagatattgaacgtgaaattgcaaaacgacaagcacagcaagtgaaacaagaagctgccactgagcaaaatacaattagtacggtggcttatagcgcacgttctgaaaaacgtgtgccaatgacccgtttgcgtaaacgtattgctgaacgtttacttgaagccaaaaatagtacggcgatgcttaccactttcaatgaagtggatatgcagccgataatgactctgcgtaaaacctacggcgaaaaatttgaaaaacaacattcagtacgtttaggatttatgtctttttatattaaagcggttgtggaagcattaaaacgttatcctgaagttaatgcttctattgatggggatgatgttgtttaccataactattttgatattagtattgcagtttcaacaccacgtggattagtcacaccagtgcttcgtgattgcgataagctcagtatggcagagatcgaaaaacaaattaaagcattagctgaaaaaggtcgtgatggcaaattaacagtagaagatcttactggcggcaattttactattacaaatggtggcgtgttcggttctcttatgtccactccaattatcaatccaccacaaagtgcgattttaggaatgcacgctattaaagaacgcccgattgcgcttaatggtcaagttgtgattcgtccgatgatgtatcttgccttatcttatgatcatcgcctaattgacggccgtgaatctgttggtttcttggtaacgattaaagaattattggaagatccaacaagattgttattagaaatctaa

SEQ ID NO: 7174 - DNA, 2853 bp, Haemophilus influenzae
  CDS (1)...(2853)
atggagcgaaaatattgcttcaaatatcataataaagaggtaattatgcagcaaaacaaggcgtttgatgattggttagccagcacagcattaggcggtgcaaatcaatcttatatagaagaactttatgaaagctatttgagtgatccacagtcggtggaggaaagctggcgaaaaacctttgattctttgccaaaaaccaccgcacttgaacagccccatactccagtgcgagattattttcgtcgcttagcgcgagaaaatcataatgaagcggtgacagtgatagatcctgcagctggtgcaaaattggtgaaagttctacaatttatcaatgcctatcgttttcgtggccatttagaggctaatcttgatcctctcaattattatcgttggaaagtatctttcgtccctgaattagattatcgccatcacggttttactgaacaagatctcaacgaaactttcaatataaatcattacgtttataaacgcgataccattaaacttggcgaattagctcaaatgttgaaagaaacatattgtggctcaattggcttggagtttatgcacgtgcaggatatggagcagaaaatgtggctccagagcaagatggaaagcctgttagataaaccgctttttacatctgaagaacgtgtcaattttcttcgtgaacttacggcagcagacggtttagaacgttatcttggtgcgaaattccctggggcgaaacgcttttctttagaaggaagtgatgcgtttattccattgatgaaagaaattattcgccattctagtcgtcaaggggtaaatgatgtggtaatgggaatggcacaccgtgggcgtttgaatatgctcgtgaatgtattaggtaaaaagcctgaaaatttattcgatgaatttgcaggtaaacattccagtgaacgtacgggggatgtgaaatatcatcaaggtttttcttctgatttcgccgtagatgataagcgagttcacttaacgttggcatttaatccctcccatttggaaatcgtaagccctgttgtgattggttctgttcgatctcgacaaactcgtatgaatgatacggaacatagcaaagtgcttgctattactgtccacggagattcagctgtggcaggacagggggttgttcaagaaacattgaatatgtcaaatacccgtggttatagtgtgggcggtactattcgcatcgtgattaataaccaaattggttttacgacatctaatcctaatgatacgcgctctacagaatattgcaccgatattgcaaaaatgattcaagcgccgattattcatgttaatggcgatgatcctgaagcggtggcatttgctgcgcgtatggcggtggaatatcgtaatttattcaaacgagatatttttatcgatttaatttcttatcgccgtcatggtcataacgaggcagatgaaccattagccactcaaccaatgatgtatagcatcatcaaaaaacatcctacacctcgtaaagtttatgcagatcgcttagtttcagaaggtgtgatgactgaagaacaagttaccgagatggcgaatgattatcgcgatgcgctagataatggcgatcgagtcgtatcagaatggcgagaaatggatacggcaaaaatggattggttgcaatatctcaattatgattggacagcaccttatgaaagcaaattttcacaggaacgttttttaacccttgctaaacgtgtatgtgaatatcctgaaagtttacgtgcgcatcctcgcgtagaaaaaatctataatgatcgtaaagcaatgtatcaaggcgaaaaattgctcgactggggtatggctgaaaccatggcttatgcaaccttacttgatgaaggtgttaatgttcgtttatcaggcgaagatgcgggacgaggtacttttttccatcgtcatgccgttgtgcataatcaaaatgatggtacggggtatgtaccattaacacatttacacgccaatcaaggtcgttttgaagtatgggattcggtactttctgaagaatctgttcttgcttttgaatatggctacgcaacaacagatccaaaaacgttaaccatttgggaagcgcaatttggcgattttgctaatggtgcgcaaattgttatcgaccaatttattagctctggcgaacaaaaatggggcagaatgtgtggtttagttatgttattgcctcatggctatgagggacaaggccctgaacattcttccgcacgtcttgaacgttatttgcaactttgcgcagaacaaaatatgcaagtttgcgtgccatcaacacctgcacaggtgtatcacatgttgcgtcgtcagtctttacgtaaaatgcgccgtccattgattgccatttccccaaaatctttactacgtcatccattggcagtgtccagtttagacgagttgattaatggaactttccaaacggtaatcggagaaattgatgagcttgatcctaaagatgtaaaacgtgtggtaatgtgttcaggtaaagtttattacgatttacttgaacaacgtcgtgcaaataatcagaaagatgtagcgattattcgtattgagcagctttatccattcccgcatgaggatgtgaagaaagcgcttgagccttatgcgcatgtcacggattatgtatggtgccaagaagaaccacttaaccaaggggcttggtattgcagcaaacataattttgaatcagcaattccagaatccgttaaactcaaatatgcagggcgtccagcttctgcttcgcctgctgtgggttatatgtcgcttcacactaaacagcaaaaacagttagtggaagatgcgttgagtttttaa

SEQ ID NO: 7175 - DNA, 672 bp, Haemophilus influenzae
  CDS (1)...(672)
atgtcttttgcccaacaaaaacttagcgaactcgctgtttcaattccaggtgcaactaaaatttttcgtgaatatgatttagatttttgctgcggaggttctgtattattagaagtcgcagcacaacaaaagaatcttaaccttgctgaaattgaaaaacgtttaactgatttacaacaaagtaaagcagaaaataatgataaagattggacttcggcatcttatgcggagatgatcgatcacattattactcgttttcataatcgccaccgtgaacaactccctgaattaattacattggcggagaaagtagaaaatatacatggtgatcgtgatgactgtcctataggcgtagtcgcacagttagaaaaaatttatgctgaacttagccagcatttaatgaaagaagaacaaattttgttcccaatgatcaaaatggggaattatgctatggcctcaatgccaattcgtgtaatggaaatggaacacgatgaagcaggacaagatgtggaagtgatcaaatcgcttactaataactgcacgccaccagcagatgcttgtttcagttggaaagccttatatagcggtattaatgaatttattgatgatttaatgcatcatattcatttggaaaataatattttatttccacgtgtattaaacgaaaaataa

SEQ ID NO: 7176 - DNA, 1062 bp, Haemophilus influenzae
  CDS (1)...(1062)
atgaaaaaaattggtttctttataatgaatatcggaagtgccgggggaacggagcgcgtttctattaatgttgctaatgctcttgctaaacagggatatgatgtttcttttattagcattggcggtaacaagccttttttccaagttgatgaaaaaattaatatttacgcaatgaataaattgccctattcattgaaaaaagattatttttctatcactaaaaaattaagagaattagttaaagaattacagctggataccttaattgtggttgatggtgcaattatgcttttttctgctttggcgttggttaatttaaatataaaacatattttatgggagcattattcttttaattttacgggcaatcgtctcgttcgcacgctcggtaaatatttagctgtaacaacttgcgataaaatagttacattgacagaagcagaaaaaacgctgtggcaagaaaaatttaaaacaaataatataattagtattgctaatccaaatacgcttttgccaaagaacaaattagcaaaattggaaaataaaactattctatctgtagggcatttattttcttataaaggttttgattatttattaaaagtttggcaagttttggcaaaaaaatatccagattggaatttaaaaatagtgggttctggcgaggaagaagaaaatttaaaaaatcttgctaaagcattggatattgaagattcagttaattttattcctcgtactaatgatgtttctttttattatgaaagcagttcaatttattgtttaccttcacaaacagaaggcttgcctttagtcgttattgaagcgatggcatttggcttacctattgttgcctttaattgttctcctggcgtaaagcaattagtggaacataaagaaaatggttttctttgtgaacaaaataatattgaagaaatggttaaaggtttagatttattaatcaataatcctgaactttatctacaaatgtcagacaaatctcgtttaatgagtgaagattatggcattgagaaaattattgaagaatggaaagggattttataa

SEQ ID NO: 7177 - DNA, 1476 bp, Haemophilus influenzae
  CDS (1)...(1476)
atgaaatatcaagcaaaaaataccgcactttctcaagccactgattgcattgttttaggcgtctatgaaaataataaattttcaaaaagttttaatgaaatcgatcaattaacccaaggttatttaaacgatttagtcaaatcaggtgagctcactggcaaattagcccaaaccgttttacttcgtgatcttcaaggtttatctgctaaacgcctattaatcgttggctgtggcaaaaaaggagaactcacagagcgtcaatataaacaaatcatccaagctgtattaaagacactaaaagaaaccaacacgcgtgaagtcatttcttatttaactgaaattgaattaaaagatcgcgatctttattggaatatccgctttgccattgaaacgattgaacacaccaattatcaatttgatcatttcaaatctcaaaaagcagaaacctctgttttagaatctttcatcttcaatacggattgtgctcaagcacaacaagctatttctcacgccaatgccattagctcaggcataaaagcagcacgcgacatcgcaaatatgccaccaaatatttgtaatccagcttatcttgctgagcaagcaaaaaatttagcagaaaattctaccgcactttcattgaaagttgtggatgaagaagaaatggcaaaacttggaatgaacgcttatcttgccgtctcaaaaggctctgaaaaccgtgcttatatgtctgttttaacattcaataatgcgccagataaaaacgccaaacccattgtacttgtaggcaagggattaacctttgatgcaggcggtatttcacttaaacccgccgcagatatggatgaaatgaaatatgatatgtgcggtgcagcctctgtcttcggcacaatgaaaaccattgcacagttgaacttgccattaaacgttattggtgttttagcaggttgtgaaaatctgccagatggcaatgcttatcgcccaggcgatattcttaccactatgaatggtttaaccgtagaagttcttaatactgatgcagaaggtcgattagtgctttgtgatacccttacttatgttgagcgttttgaacctgagcttgttattgatgttgcaaccttgactggtgcttgtgtggttgcactagggcaacacaatagcggcttagtttctacagataacaatcttgccaatgcactactccaagccgcaacagaaaccactgacaaagcgtggcgtttaccattaagcgaagaatatcaagagcaacttaaatcgcctttcgccgaccttgccaacattggtggtcgctgggggggcgcaattacagcgggtgcatttttgtctaatttcacgaaaaaatatcgctgggcacatttagacatcgctggtacagcttggttacaaggtgcaaataaaggtgcaacaggtcgccctgtttcgctattaacccaatttttgattaatcaggttaaataa

SEQ ID NO: 7178 - DNA, 1728 bp, Haemophilus influenzae
  CDS (1)...(1728)
atgatttctggcattctcgcatctccaggtattgcctttggtaaggcacttgttcttaaagaagaaaagattgttcttgatacacaaaaaattactgatgatcaaattgacgcagaagtcgctcgattttatgaagggcgtaacgcggcggtagaacaacttaattcaattagagaacgtgcattaatttctttaggcgaagaaaaagcggcaatctttgaaggtcacttgatgattcttgaggatgaagaattagaagaagaaattcttgattatcttcgttcaaataaagtgaatgcaggcgttgcggcgagtaaaattttagatcaacaagtgacaatgttatctgaaattgatgatgaatatttgaaagaacgtgcaggcgatattcgggatattgctaaccgtttagttaaaaatattttgggaatgtacattgttgatcttggtgatattcaggaagaatctattcttgttgcttatgatctgactccctcagaaacagctcaacttaatcttgaaaaagtattaggggttgtcactgatattggtggtagaacctcacatacttctattatggctcgttctttagaattgccagcgattgtcggcacaaataaagtgactaaattagtcaatacgggcgattatttaattttagatgctatcaataaccaagtttatattaatccaacagcatctcagattgatgaattaaaagcacttgaagcgaaaatttctgaggaaaaagcagagttagctaaattaaaagatcttcctgcaatcacattagatggacataaggttgatgtggttgcgaatatcgggacgattcgtgattgtgacggcgcagaacgtaatggagcggaagggattgggttataccgaactgaattcttatttatggatcgtgaacagcttcccacagaagaagaacaatttattgcctataaacaagtggtagaagcaatgaacggacgtttaacagtgattcgtactatggatattggtggcgataaagagctttcatatttagatttaccaaaagaaatgaatccattcttgggatggcgtgcgattcgcattgcattagatcgtcgtgaaattttaaatgcacaattacgtgcggtgttacgtgcttcagcttttggtaaattggcggtgatgttcccgatgattatttctgtagaagaaattcgggaattaaaagcggttattgaaacattaaaagcggaattacgtgaagaggggagactgtttgataataatatccaagttggtgtaatggtcgaaaccccctctgccgcggtaaatgcaaaatttttagcaaaagaagtagatttctttagtatcggtactaacgatttaactcaatatactttggctgtagatcgcggtaatgagtttatttcccatctttataatccgatgcacccctctgtgcttggtttaattaaacaagtgattgatgcctctcacgcagaaggaaaatggacgggaatgtgtggggaattagcaggggatgaacgtgcgactttattattgcttggtatgggattagatgaatttagtatgagtgcgatttctgtacctcgaattaaaaaattaatccgtaatgtaaattttcaagatgcaaaagtgcttgctgatactgcattacaaaaaccgaccgctgcagaaattgatcaattaattgaagaatttttgctggaaaattcattaaattaa

SEQ ID NO: 7179 - DNA, 258 bp, Haemophilus influenzae
  CDS (1)...(258)
atgtattcaaaagatgtggaaattattgcgtcaaacggtttacacacgcgccctgctgcacaatttgtgaaagaagcgaaagcattttcttctgaaattacagtaacctctggggggaaaagtgcaagtgcaaagagcttatttaagttgcaaacattagctttaacgcagggaacaatacttaccatttctgctgatggagaagacgagcaacaggcagttgaacatttagtcgcgttaattccaactttagaataa

SEQ ID NO: 7180 - DNA, 2346 bp, Haemophilus influenzae
  CDS (1)...(2346)
atgacttctcaacactccgctaaaaaatcatcgaaaaacacgccaaaaaataaccgcacttttaaaggttttttacttaaatttagcttcactgcacttgtcttaacgattttttacggcggttatctcgattggcaaattcgttctaaaatggacggtcaaatttggcatttgcctgcggaagtttatagtcgattagaaagtgtgaaaattgccgataatctcgcttttgatgaagtcattcaaattttattagataacgaatatcgccaaacgaccatggttgccgcccctggcgatttcaaattagaagatgatagcattgtagtgcttcgccgcgcttttcctttccccgataaagcagagcctcagcgagttttgcgcttgcgttttagccataataagttatctcgcattgaagatttagtgacggtcaaaactgttgatgaatttcgtcttgcaccaaagttgattgcgatgttgcaatcagacaacgaagatcgccttgctattcctttacaaaattatccccgtttattaattgatacattaattttaacggaagatcgccgcttttatgaacataatggcattaatccagtggggattttacgtgcattaattgcgaatattcgtgctggtcaaacggtacagggcggaagtacgctcactcaacaattagtcaaaaatttatttttatcgcgcgaacgcaccattacacgcaaagccaacgaagccttgatgtcattggttttagattggcgttacgataaaaaccgaattctcgaaacctatctcaatgaaatttatctcgggcaaaatggcgatacgcaaattcacggttttgaattagccagccaattttattttggtcgttcgattcgtgaaattagcttagatcaaattgcccttttagtggggatggtcaaaggcccttcactttataatccgtggcgtaatccacaaaacgcactcgaacgtcgcaacattgttttaaggctaatgcttgaacataaaatgatcggcgatgaactttatcaattattaagtcagcgacctttaggtgtgcaaaagaaagggcaaatctcgcgtaaataccctgcatttattcaaactttacaagcagatttacgccgtaagctgggcgaacacaaaatatcgagcttacttggcgcacgtattttttccacaatggatttaaaacaacaagctcaagcagaaaatgcagtgggcaataccgtttcgcaattacaactgaaaatgaaaaatccccatttagagggagcgatgattataacggattatcgcacaggcgaaattcgtgcagtagttggcggtttacaaacgcaatatgcaggctttaatcgtgcattaatggcaaaacgtcagattggttctttagtaaaaccttctatttatttgaccgcactttctaacccagaacagttccgtttgaataccccaattaataaccaaccaataacaattaatgtcaaaggtagcccgccgtggcagccacgcaactatgacaaaaaatatagtgattctgtaatgttaatggatgccttagcccgttctttaaatattcccactgtaaatattggtatgaaagttggcttgagcaaagtcattgacacgcaaaaagcgatgggctgggacaacgtggaaattcctaaagtgcctgcgatgttgctcggttcttataccatctcgccttatgatgtcacaaaactttatcaaacccttgccaatcaaggtgggagaattgcgcttacaaccgtcgatagtattgcagatcgtcaaggtaacctaatttttcaacacgataaaagtgcaaaacaagtggtgccacaagaagcggcattccaaaccttatttgcaatgcaacaaactgttgaacgtggtacagctcgcagtttgcaaaaggattacgctgatttacatttagcaggcaaaacaggcacaaccaatgaatcacgcgatacgtggtttgtgggaattgacggaaaaaatatcagcaccgtctggcttggtcgcgatgataatggcgaaacaaaactgactggtgcttctggcgcattgcaaatttataaagattatttaaaccgtacaaatattgaaaaattagcaattactccccctacaacagtgaaatgggtggggataaatcaatacggtgactgggattgtgagagttatcgaacaattcctatttggctaaataatggtcagaatttctgtggcgaaacatcatctccctctctcacgccaacaactgaaacagaaacaccaccacaagaaagcctgtgggacgtattggataatcccaatccacccgctcaataa

SEQ ID NO: 7181 - DNA, 774 bp, Haemophilus influenzae
  CDS (1)...(774)
atgaaatataccttgatcaaattaggagaattgttgatgaaaaaaattgatttaaatgcagatattgcagagggttttccttttgatgaaagtttattgcagttgctttcttctgcaaatgttgcctgtggcttacacgctgggggtgcaaaggaaatgcaaagtgcggtcaaatttgcgaaagaaaataaggtgcgtattggtgcgcatcctagttttcctgatcgcgaaaattttggtcgtacggcaatggcgttgtcttcacaggaattaatcgcacatttgcgttatcaattgggggcattaaaagcgatttgtgatggcgagggggcggtaattagttatgttaaacctcacggtgcgttatataaccaagcagcaaaagatgaaaaaatagcgcgtttaattgcacaaaccgtttatcaatttgatccgaatttgaaattaatggggttagcaggcagtttaatgttgcgcatcgcagaggaagaaaaattgcaaacgatttctgaagtttttgccgatcgacattatatgcctgatgggagtttggtgcctcgttctcaaccaaatgcaatggtggaatctgataaggaagccattcaacaagtgttacaaatggtaacaaaggggcaagtcaatgccattgatggaagccttgtgcctgtaaaagcagaaagtatttgcttacacggcgataatcaacattctttacaatttgctaaacgcattgtggaagaattagaaaaaaatcatatcaaaataacggcataa

SEQ ID NO: 7182 - DNA, 888 bp, Haemophilus influenzae
  CDS (1)...(888)
gtgcggttggttttcttagaaatattggtcggctttgtacaaagacaaattttcgcttatactacgcaagttttttacgctaacaacataggaaaaattatgggtttcttaacaggtaaacgcattttagtcacaggtcttgcaagcaatcgttccattgcttacgggatcgcaaaatcaatgaaagaacaaggcgcagaacttgctttcacttatttaaacgataaattacaaccgcgcgtagaagaatttgccaaagaatttggttctgatatcgtgcttcctttagatgtggcaaccgatgaaagcatccaaaactgctttgcagaattaagtaagcgttgggataaatttgatggttttattcacgcaatcgcatttgcaccaggtgatcaattagacggcgattacgtaaatgcggcaactcgtgaaggctaccgtattgctcacgatattagtgcatacagcttcgtggcaatggcacaagcggcacgtccttacttaaatccaaatgctgcattattaacgttgtcttacttaggtgctgagcgcgcaattcctaactacaacgtaatgtgcctagcaaaagcctctcttgaagccgcaacacgcgtaatggcagcagatttaggcaaagaaggtattcgtgtgaatgcaatctctgcaggcccaatccgcaccctagccgcatcaggcattaaaaacttcaagaaaatgctttccacctttgaaaaaaccgccgcattacgtcgcactgtcactatcgaagatgtgggtaactcagcggcatttttatgctctgacttagcctctggcattactggcgaaatcgttcacgttgatgcaggtttcagcattactgcaatgggcgaattaggcgaagaataa

SEQ ID NO: 7183 - DNA, 1146 bp, Haemophilus influenzae
  CDS (1)...(1146)
atgattatttcatcagctagcgattatcgtgaagcggcgcgtcgccgtgttcctccctttatgttccattatgccgatggcggttcttatgccgagcaaacacttgcgcgtaatgtgagtgatttggaaaatattgctttaagacaacgtgtcttaaaagatatgtctgaattggatactagtatagaattatttggtgaaaaactttcaatgccaactattcttgcaccagttggggcgtgcggaatgtatgcgcgtcgtggagaagtacaagcagcacaagcggcggacaataaaggtgtgccgtttaccctttcaacagtatcaatttgtccaattgaagaagtcgcccctgcgattaagcgtccaatgtggtttcagctttatgtgttaaaagatcgtggttttatgaaaaacgcgcttgagcgtgcgaaagcagcaggctgttctactttagtgtttacggtcgatatgcctactccaggtgcacgttatcgtgatatgcactcaggtatgagcgggccttacaaagaaattcgccgtgtattacaaggctttacacacccattctgggcgtatgatgtgggtatcaaaggcaaaccgcacaccttgggtaatgtttcaacttatatgggtagacaaataggtttagatgactatattggctggctaacagaaaactttgatccatcaatttcgtggaaagatttagagtggatccgtgagttttgggaaggtccaatggtcattaaaggtattctcgaccctgaagatgcgaaagatgcggtgcgtttcggtgctgatggaattgttgtttcaaatcacggtggccgtcagttagatggcgtgctttcaagtgcaagagcgttgccaccaattgccgatgcagtgaaaggggatattaaaattattgccgattcaggtattcgcaatggtttagacatagtccgtatgttggcattaggggcagatgcaacaatgttaggtcgagcatttgtttatgctttaggggcagaaggtcgtcaaggtgttgaaaatatgctcgacattttcaaaaaagagatgcacgtagcgatgacattaaccagcaatcgtactattgccgatattaaaccagaggctttggttgatctaagtaaactttaa

SEQ ID NO: 7184 - DNA, 357 bp, Helicobacter pylori
  CDS (1)...(357)
atgaagtttcagccattaggagaaagggtcttagtagaaagacttgaagaagagaacaaaaccagttcaggcatcatcatccctgataacgctaaggaaaagcctttaatgggcgtagtcaaagcggttagccataaaatcagtgagggttgcaaatgcgttaaagaaggcgatgtgatcgcttttggcaaatacaaaggcgcagaaatcgttttagacggcactgaatacatggtgctagaactagaagacattctaggcattgtgggctcaggctcttgttgtcatacaggtaatcatgaccataaacatgctaaagagcatgaagcttgctgtcatgatcacaaaaaacactaa

SEQ ID NO: 7185 - DNA, 1281 bp, Helicobacter pylori
  CDS (1)...(1281)
atgtctgtcactttagtcaataatgaaaataatgaacgctatgaatttgaaacgattgaaagcactcgtgggcctaaagcggtggatttttccaagctttttgaaacgaccgggtttttttcttacgatccagggtattcttctaccgctggatgccaatctaagatcagctatgtcaatggcaaaaaaggcgaattgtattacagagggcataggatagaagatttagtcgccaaatacaaatatgtagatgtgtgcaaattactcctcacaggggaattacccaaaaatcaagatgaaagcttggaatttgaattggaattgcgccacaggagctttgtgcatgagagcttactcaacatgttttcagccttccctagcaacgcccaccctatggcgaaactctctagcggagtgtctatcttatccaccctttattccacgcaccaaaacatgcacactgaagaagattaccaaactatggccagaaggattgtcgctaaaatccccacgcttgcggctatttgctatcgtaatgaagtgggagcgcctatcatttatccggacatcgcacgctcttatgtggaaaatatccttttcatgctgagagggtatccttatagtcgcttaaaacacaccactcaaggcgaagtggaaatcacgcccctagaagtggaagcctttgataaaatcctaaccttgcacgctgatcacagccaaaacgcctcttctaccacggtaaggaatgtcgctagcaccggcgtgcatccttatgccgccattagcgcgggcattagcgctttatgggggcatttgcatggcggagcgaatgaaaaagtccttttacaattagaagaaatcggcgatgtgaaaaatgtggataaatacatcgcgcgagtgaaagacaaaaacgacaatttcaaactcatgggctttgggcatagggtgtataaaagctacgatccgcgcgctaaaatcttaaaaggcttgaaagacgaactgcaccaaaaaggcgttaaaatggacgagaggttgagcgaaatcgccgcgaaagtggaagaaatcgcgctaaaagacgagtatttcattgaaaggaatctctaccctaatgtggatttttactccggcaccattttaagggctttaaaaatcccggtgcgttttttcacgccggtgtttgtcattggccgaaccgtaggctggtgcgctcagcttttagagcatgtcaaaagcccgcaagccaggatcacacgcccaagacaagtctatgtaggggattaa

SEQ ID NO: 7186 - DNA, 1278 bp, Helicobacter pylori
  CDS (1)...(1278)
gtggcttacaaccctaaaattttacaaaagcctaaagagggcgaagaaattacgattaaagacaacaaattgcatgtgccaaaccaccccattatccccttcattgagggcgatggcattggatcagatattaccccggcgatgattaaagtcgtggatagcgcggttcaaaaagcgtataagggcgagaaaaaaatcgcatggtatgaggtgtttgtgggcgaaaaatgctatcaaaaatttaaagattataaagaattaagcccagaagagcaatggctcttaccggacactattgaagcgattaaccattataaagtttctattaaagggcctttgacaacgcctattggtgaagggtttagatctttgaatgtagcgttacgccaaaaaatggatttgtatgtgtgcttgaggccggtaaggtggtatgggagtcctagcccggtgaaagaaccacaaaaagtggatatggtgatttttagagaaaattctgaagacatttatgcgggcattgaatggcaagaaggcagtgcggaagcgaaaaaactcatccattttttacaaaatgaactaaaggttaaaaaaatccgcttccctgaaagcagcggcataggggtaaaacccatcagtaaagaaggcacagagaggctagtgagaaaggcgattgaatacgcaattgataacgacaagccaagcgtgacttttgtgcataaaggtaacatcatgaaatacaccgaaggggcgttcatgaaatggggctatgcgctcgctcaaaaagaatttaacgctcaagtcattgataaaggcccatggtgttctttgaaaaaccctaaaaacggtaaagaaatcatcattaaagacatgatcgctgacgcgtttttgcaacaaatcttattgcgccctagcgaatacagcgtcattgcgaccatgaatttgaacggggattatatctctgatgcgttagcggcgatggtggggggtattggtatcgctcctggggctaatctcaatgacacggtgggcatgtttgaagccacccatggcaccgctcctaaatatgccgggctggataaagtcaatccggggtctattattttgagcgcggaaatgatgttaaggcatatgggttgggtggaagcggctgatttgatcgtttctgcgatggaaaaagcgattaaaagcaagaaagtaacttacgatttcgctcgtttaatggatggggctaaagaagtgaaatgctctgaatttgctagcgtgatgattgaaaacatgtga

SEQ ID NO: 7187 - DNA, 294 bp, Helicobacter pylori
  CDS (1)...(294)
atggattttagtcaattgggcgggttgttagacggcatgaaaaaagagttttcccaactagaagaaaagaataaagacacgatccacacttccaaaagcggtgggggaatggtgagcgtgagttttaatgggttgggggagttggtggatttgcaaattgatgacagcctgttagaagataaagaagcgatgcaaatctatttgatgagcgctttgaatgacgggtataaagccgtagaagaaaaccgaaaaaatttagcctttaacatgctggggaattttgctaaattgtga

SEQ ID NO: 7188 - DNA, 600 bp, Helicobacter pylori
  CDS (1)...(600)
atggtaaaaattggagtttgtggtcctgtaggaagcggtaaaaccgccttgattgaagctttaacgcgccacatgtcaaaagattatgacatggcggtcatcactaatgatatttacacgaaagaagacgcagagtttatgtgtaaaaattcggtgatgccacgagagaggatcattggcgtagaaacaggaggctgtccgcacacggctattagagaagacgcttctatgaatttagaagccgtagaagaaatgcatggccgtttccctaatttggaattgcttttgattgaaagcggaggcgataacctttcagcgacattcaacccagagctagcggactttacgatctttgtgattgatgtggctgagggcgataaaatcccccgaaaaggcgggccaggaatcacgcgctcagacttgcttgtcatcaataagattgatttagccccctatgtgggagcggacttgaaagtcatggaaagggattctaaaaaaatgcgcggcgaaaagccctttatttttacgaatatccgtgctaaagaaggcttagacgatgtgatcgcttggatcaagcgcaacgctttattggaagattga

SEQ ID NO: 7189 - DNA, 717 bp, Helicobacter pylori
  CDS (1)...(717)
atgaaactcaccccaaaagagttagacaagttgatgctccactatgctggagaattggctaaaaaacgcaaagaaaaaggcattaagcttaactatgtagaagcggtagctttgattagtgcccatattatggaagaagcgagagctggtaaaaagactgcggctgaattgatgcaagaagggcgcactcttttaaaaccggatgatgtgatggatggcgtggcaagcatgatccatgaagtgggtattgaagcgatgtttcctgatgggacaaaactcgtaaccgtgcatacccctattgaggccaatggtaaattagttcctggtgagttgttcttaaaaaatgaagacatcactatcaacgaaggcaaaaaagccgttagcgtgaaagttaaaaatgttggcgacagaccggttcaaatcggctcacacttccatttctttgaagtgaatagatgcttagactttgacagagaaaaaactttcggtaaacgcttagacattgcgagcgggacagcggtaaggtttgagcctggcgaagaaaaatccgtagaattgattgacattggcggtaacagaagaatctttggatttaacgcgttggttgataggcaagcagacaacgaaagcaaaaaaattgctttacacagagctaaagagcgtggttttcatggcgctaaaagcgatgacaactatgtaaaaacaattaaggagtaa

SEQ ID NO: 7190 - DNA, 1059 bp, Helicobacter pylori
  CDS (1)...(1059)
atgtccattctagccgaaaagctttcttccattctcaaacgatacgacgaactcacggcgttgctttctagcgctgaagtggttagcgatattaaaaaactcaccgaattgagtaaagagcaaagctccattgaagaaatctccatagcgagtaaagagtatttgagcgttttagagaacattaaagaaaataaggagcttttagaagacaaggaattgagcgaactggctaaagaagagttaaaaattttagaaatccaaaaaagcgatctagaaactgccattaagcaactccttatccccaaagaccctaatgacgataaaaacatctatttagagttaagggccggcacagggggcgatgaagcgggcatttttgtaggggatttgtttaaggcgtattgccgttatgcggatttgaaaaaatggaaagtagagattgtaagctctagcgaaaacagcgtagggggctataaagaaatcatcgctttgattaagggcaagggcgtgtattcaaggctcaaatttgaagcaggcacgcatcgagtccaaagagtccctgaaacagaatctcaagggcgcatccacacttccgctatcacagtagcgatcatgcctgaagtggatgatgtggaagtttctatcaaccctagcgatttaaagattgaagtgtttcgcgctggcgggcatggggggcaatgcgtcaatactacagactctgcggtgcgtatcacgcaccttcccaccaatatcagcgtgagcatgcaagatgaaaaatcccaacataaaaacaaggataaagccctaaaaatcttaaaagcgcgcctttatgaaaaacaaattgaagagcagcaactcgctaacgccaaagaccgaaaggagcaagtgggtagtggggataggagcgaacggatccgcacttataattacccgcaaaaccgcttgagcgaacatagaatcaatttaactctgtatagtttagaagaaatcatgctttcagggaatttagatgaagtgattaaccctttaatcgcccacgcccaaagccagtttgaataa

SEQ ID NO: 7191 - DNA, 390 bp, Helicobacter pylori
  CDS (1)...(390)
atgagaaaaatctatgctaccggtaaaagaaaaaccgctatcgctaaagtgtggctcactccgggtaaaggcgaattgagtatcaatgagcagagcttgaatcaatggttgggcggacatgaagccattaaaatgaaagtcatgcagcccttgcttttaaccaaacaagagcaatctgtggatattaaagcggtggtttttggtgggggctactcagcgcaagcggaagccttaaggcatggcatttctaaggctttgaacgcttatgatattgcttttagagccattttaaaacctaaaggcttgctcactagggattcaagggtggttgaacgcaaaaaatatggtaaaagaaaggccagaagaagcccacaattctccaaaaggtaa

SEQ ID NO: 7192 - DNA, 426 bp, Helicobacter pylori
  CDS (1)...(426)
atgacaaagaccgctaaagtcaatgacatcgttcgtgattgggtcgttttagacgccaaagacaaggtttttggccgcttgatcactgaaatcgctgtgcttttaagagggaaacaccgccctttttacacccctaatgtggattgtggggattttgtggtggttatcaacgctaataaggttaaattttcaggcatgaaattagaggataaagagtattttacccattcaggctattttggcagcactaagagcaagactctccaagaaatgctagaaaaagcccctgaaaagctctaccacttagccgttaggggcatgctccctaaaacgaaattagggaaagcgatgattaaaaaactcaaagtttatcgtgatgataagcaccctcacaccgcacaaactagcaaaaaggacgctaaatga

SEQ ID NO: 7193 - DNA, 930 bp, Helicobacter pylori
  CDS (1)...(930)
atgcaatacgcgctattatttccagggcaaggctcgcaatgtgtaggaatggggaaatcattctatgagagccacactctagctaaagaattgtttgaaagggcttctaacgcacttaaagtggatatgaaaaaaacgctttttgaagaaaatgagcttttaaaagagagcgcttacacccagcctgccatttatttagtgagctatatcgcttaccaattgctcaacaagcaagtaaatggggggttaaaacccgtttttgctttagggcattcgctcggcgaagtgagcgcggtgtctttgagtggggcgttagattttgaaaaagcccttaaactcacgcaccaaagaggcaaaatgatgcaagaagcgtgcgcgaataaagacgcttccatgatggtcgttttgggcgtttctgaagaaagccttttgagtttgtgtcaaagaaccaaaaatgtgtggtgcgcgaatttcaatggcggcatgcaagtggttttagccgggattaaagacgatttgaaagccctagagccgactttaaaggaaatgggggctaaaagagtggtttttttagaaatgagcgtggcgagccattgcccttttttagagcctatgacttttaaattccaggaattgctagaaaaaagcctgaaagataaattccattttgaaatcatctccaatgcgactaatgaagcgtatcacaacaaagcaaaagccgttgaactattgagcttgcaactcactcagccggtgcgttatcaagactgcgtgaaatccaacaatgaccgagtggatgtcttttttgaattaggctgtgggagtgtgttaaaggggcttaacaagcgattaagcaacaaacccaccataagcgtgggggataataaagggcttgatgaagcgattgagtttttagaagaatacgtgtga

SEQ ID NO: 7194 - DNA, 1143 bp, Helicobacter pylori
  CDS (1)...(1143)
atgcgcatgcaaaccaaattaatccatgggggcattagtgaggacgcaacaacgggggcggtgagcgtgcctatttatcaaacttccacctaccgccaagacgccataggccgccataagggctatgaatactctcgctcaggcaaccccacgcgctttgctttagaagaactcatcgctgatttagaagggggggttaaggggtttgcttttgcctctggattagctggaatccacgccgttttttccctcttgcaatcaggcgatcatgtgttattgggcgatgatgtttatggggggactttccgcttgtttaatcaagtgcttgtcaaaaacgggctttcttgcaccattatagacactagcgatatatcccaaattaaaaaggctatcaagcccaacaccaaagccctttatttagaaacccctagtaaccccttgcttaaaatcacggatttagcgcaatgcgctagtgtcgctaaagatcatggtttgctcactatcgtggataacacctttgccaccccctattatcaaaacccgcttcttttgggagcggacattgtggcacatagcggcaccaaatacttaggcgggcatagcgatgtggtcgccgggcttgtaaccactaataatgaagcgctagcccaagagatcgcttttttccaaaacgctatcggtggggttttaggccctcaagacagctggctgttgcaaagagggattaaaacgctgggattgcgcatggaagcccatcaaaaaaacgctctttgtgtggctgagtttttagaaaaacaccctaaagtggaaagggtttattacccgggccttcccactcaccctaattacgaactagctaaaaaacagatgcgtggctttagcgggatgctctctttcactctcaaaaatgatagcgaggcggttgcttttgtagaaagccttaaactattcattttaggcgagagtttgggcggggtggaaagtttggtggggattccggcatttatgacccatgcgtgcatccctaaaacgcaacgagaagctgctgggattagagatggcctggtgcgcttgtctgtagggattgagcatgaacaggatttgttagaagatttagagcaagcgttcgctaaaataggctaa

SEQ ID NO: 7195 - DNA, 921 bp, Helicobacter pylori
  CDS (1)...(921)
atgatgattatcaccacaatgcaagacgccataggccgcactcccgtttttaaattcactaacaaggattaccccattccgttaaattccgccatttacgccaaactggagcatctaaacccaggggggagcgttaaagatcgcttaggccaataccttataggagaagggtttaaaacgggcaaaatcacttctaaaacaaccatcattgagcctaccgcaggcaataccggcatcgctctagctttagtggcaatcaagcaccatctcaaaaccatctttgttgtcccggaaaaattcagcacagaaaaacaacaaatcatgagggctttgggggctttagtaatcaacacgcctactagcgaggggatttctggcgccattaaaaaaagtaaagagttagccgaaagtatccctgatagctatttgcccttacaatttgaaaaccctgataatcccgccgcttactaccacaccctagcccctgagattgtccaagaattaggcacaaaccttacgagctttgtagccgggatagggagtggtggcacttttgcgggcacggctaggtatttgaaagaacgcatccctgcgattcgcttgattggggtggagccggagggttctattttgaatgggggtgagcctgggcctcatgagattgagggcattggcgtggagttcatccctcctttttttgaaaacttggatattgatggctttgaaacgatctcagatgaagagggttttagctacactaggaagttagccaagaaaaacggcttattagtggggagctctagcggggcagcttttgtggcagcattgaaagaagcgcaacgcctccccgaaggcagccaggttttaaccattttcccggatgttgccgatcgttatctctcaaaaggtatttatttataa

SEQ ID NO: 7196 - DNA, 2211 bp, Helicobacter pylori
  CDS (1)...(2211)
atgaagcaccttattatcgtagaatcccccgcaaaagccaaaaccattaaaaattttttggataaaaattatgaagtcattgcctctaaagggcatgttagggatttatccaaattcgctttaggcattaagattgatgaaaccggcttcactcctaattatgtcgtggataaagaccataaagagcttgtcaaacagatcatagagctttctaaaaaggcatctattacttatatcgctaccgatgaagacagagagggggaagcgataggctatcatgtggcatgtttgattggggggaaattggagagctatcctaggattgtttttcatgagatcacgcaaaatgcgatcttaaacgctctaaaaaccccacgaaaaattgacatgtctaaggtcaacgcccaacaagccagacgctttttagatcgaatcgtgggttttaaactcagctcgttgattgcatcaaaaatcactaaaggtttgagcgctggacgggtgcaaagcgcggctttaaagcttgtgattgataaagagagggagatcaaagcctttaagcctttaacctacttcacgctagacgcttattttgagtcgcatttagaagcgcaactcattagctataagggcaacaaactcaaagcccaagaactcattgatgaaaaaaaagctcaagagattaaaaacgaattagaaaaagaaagctacgctatctccagtatcgttaaaaaatctaaaaaatcccccacgccgccccctttcatgacttctactttacagcaaagcgcttctagtcttttaggcttttcgcccacaaaaaccatgagtatcgctcaaaaattgtatgagggcgtagccaccccacaaggggttatgggggtgatcacttacatgaggaccgatagcttgaatatcgctaaagaggctttagaagaagcgaggaataagattttaaaagactatggcaaagactatttaccccctaaagccaaagtctattccagcaagaataaaaacgcccaagaagcccatgaagcgatcaggcccacttctattattttagagccaaacgctttaaaagactaccttaagcctgaagaattaaggctctataccttaatttacaaacgctttttagcttctcaaatgcaagacgctctttttgaaagccaaagcgtggttgtggcttgcgaaaaaggcgagtttaaagcgagtgggagaaagctcctttttgatggctattataaaattttaggcaatgacgataaggacaaattgctccccaatttgaaagaaaatgaccccattaaattagaaaaactagagagcaacgcccatgttacagaacctccagcacgctattctgaagcgagcttgattaaagttttagaaagtttaggcataggcaggcccagcacctacgccccaacgatttcccttttacaaaacagagactacatcaaggtagaaaaaaagcaaatcagtgctttagagagcgcttttaaggtgatagaaattttagaaaagcattttgaagaaatcgtggattccaaattcagcgcttctttagaagaagaattggacaatatcgctcaaaataaagccgactaccagcaagtcttaaaggacttttactacccctttatggataaaattgaagctgggaaaaagaatatcatctctcaaaaagtgcatgaaaaaaccggtcaatcatgccctaaatgcggtggggaattagtcaaaaaaaatagccgttatggggagtttatcgcttgcaacaattaccctaaatgcaaatatgtcaaacaaactgaaagcgctaatgatgaagccgatcaagaattgtgcgaaaaatgcggaggggaaatggtgcaaaaattcagcagaaacggggcgtttttagcttgcaacaattaccctgaatgcaaaaacaccaaatcgttaaaaaacacccctaacgcaaaagaaacaatagaaggcgtgaaatgcccagaatgcggaggggatattgctttaaaaaggagtaagaaaggctcgttttatggctgtaacaattaccctaaatgcaattttttatccaaccataagcccatcaacaagcgttgcgagaaatgccattatttaatgagtgaaagaatctatcgcaaaaaaaaggcgcatgaatgcattaaatgtaaagaacgcgtgtttttagaggaagataatggctaa

SEQ ID NO: 7197 - DNA, 2439 bp, Helicobacter pylori
  CDS (1)...(2439)
gtgcgatatatcaagtttttcaaagagttgaacaataaaaatgtgaatctggttgggggcaagaacgctagtattggtgaaatgtttcaagaattagtgcctattggtattaaagtgcctgatggctttgcgatcaccagcgaagcgtattggtatcttttagagcaaggaggggctaaacaaaaaatcatagagcttttagaaaatgttgatgccaccgaaattgatgtgttaaaaatccgctccaaacaaatcagagagcttatttttggcacgccttttcctagcgatttgagagatgagatttttcaagcttatgagattttaagccagcaataccacatgaaagaagccgatgtggctgtaaggagttccgctactgcagaagatttgccggacgcttcttttgccgggcagcaagacacttatttaaacattaagggtaaaaccgaattgatccactatatcaaatcctgtttagcgtcgctttttaccgatagagcgattagctatagggcgagtcgtgggtttgatcatttaaaagtcgcgctcagcgtgggggtgcaaaaaatggtgcgagcggataaaggcagcgcgggcgtgatgttttctattgacaccgaaaccggttttaaagacgcggtgtttatcacttcagcgtgggggttaggcgaaaatgtggtgggtggcacgataaaccctgatgaattttatgtgtttaagcccactttagagcaaaacaaacgccccattatcaaacgccaactcggcaataaaacgcaaaaaatggtctatgccccaaggggtagcgaacaccccaccagaaacattaaaaccaccaaaaaagaatggcaatccttttcattgagcgatgaagacgtgctgattttagccaaatacgccattgaaattgaaaaacactactctaaagaagccaaacaataccgccctatggatatagaatgggctaaagatggcgagagcggggaaatctttatcgttcaagcgcgcccagaaaccgttcaaagccaaaaaagtaaagaagaaagtcaagtctttgaaaaattcaaattcaaaaaccctaacgaaaagaaagagattatcttacaaggcagagcgattgggagtaaaattggctcaggaaaagtgcgcatcatcaatgatttggagcacatgaattcttttaaagagggcgaaattttagttacggataacaccgatccggactgggagccttgcatgaaaaaagcgagcgcggttatcactaatcgtggagggcgcacttgccatgccgctattgtggcgagagaaattggcgtgccagctatcgttggggtgagcggggcgactgatagcctttataccggcatggaaatcacggtttcttgcgctgagggcgaagagggctatgtgtatgcgggcatttatgagcatgaaattgaaagggtggagctttctaacatgcaagaaactcaaacaaaaatttacatcaatattggaaaccctgaaaaagcctttggcttttctcaactccctaatcacggcgtagggctagccaggatggaaatgattattttaaatcaaatcaaagcccaccctttagctttagtggatttgcaccacaaaaaaagcgtgaaagaaaaaaatgaaattgaaaacctcatggcaggctatgctaaccctaaagatttttttgtgaaaaaaatcgctgaaggcattggcatgatcagtgcagcgttttaccctaaacctgtcattgtgagaacgagcgatttcaaatccaatgaatacatgcgcatgcttggcggctctagctatgagcctaatgaagaaaaccccatgcttggctataggggggctagtcggtattattcagagagctataatgaagcgttttcgtgggagtgtgaagccttagcgttagtgagggaagaaatgggattaaccaacatgaaagtgatgatcccttttttgcgaaccattgaagagggtaaaaaagtcctagaaatcttaagaaaaaacaatttagaatccggtaaaaacgggcttgaaatttatatcatgtgcgaattgccggtgaatgtcattttggctgatgatttcttgagcttgtttgatggcttttctattggatcaaacgatttaacccagctcactttaggcgtggatagagacagcgaattggtcagccatgtctttgatgaaaggaatgaagcgatgctaaagatgtttaaaaaagcgattgaagcttgcaaaaggcacaacaaatattgcgggatttgcgggcaagccccaagcgattaccctgaagtaacagagtttttagtcaaagagggcatcacttccatttctttaaaccctgatagcgtgatccccacttggaacgctgtagccaagttagaaaaagaactaaaagaacatggcttaactgaacattga

SEQ ID NO: 7198 - DNA, 1839 bp, Helicobacter pylori
  CDS (1)...(1839)
atgagtgcggaactgattgctgtttataaagacgagcaaataatagatttagagagcgcgaaagtcttagggctgagcgatgggattaaagcgttaaacgggacagagccgatatattttgatgattcgcctttggctttagaggtgattaggcattcatgcgcgcatttgcttgcgcaaagcttgaaagccctttatccggacgcgaaattttttgtaggccctgtggtagaagaggggttttattacgatttcaagacttcttcaaaaatcagcgaagaggatttgcctaaaattgaagcgaaaatgaaagagtttgcgaagttgaaactcgctatcactaaagagactttaaccagagagcaagctttggagcgttttaagggcgatgaattaaagcatgcggtgatgagtaaaatcggtggcgatgcctttggcgtgtatcaacaaggcgagtttgaagatttgtgtaaggggccgcatctcccaaacacccgttttttaaaccattttaagctcactaaactggctggggcttatttgggcggcgatgaaaacaatgaaatgctcattagaatctatggaatcgcttttgccaccaaagagggtttaaaagactatcttttccaaatagaagaagcgaaaaaacgagatcacagaaagctaggcgtggagctagggctttttagctttgatgatgagataggggcgggcttacctttatggctgcctaaaggggcaaggcttaggaagcgcattgaagatttattgagtcaagcgttacttttaagaggctatgagccggttaaaggtcctgagattttaaagagcgatgtgtggaaaatcagcgggcattatgacaactataaagaaaacatgtatttcaccacgattgatgagcaagaatatggcataaagcctatgaactgcgtggggcatattaaagtctatcaaagcgctttgcacagctacagagatttgcccttaaggttttatgaatacggcgtggtgcatcggcatgaaaaaagcggcgtgttgcatgggcttttaagggttagggaatttacccaagatgatgcacatattttttgctcttttgaacagatccaaagcgaagtgagcgcgattttagattttacgcacaaaatcatgcaagcgtttgattttagctatgaaatggaattatccacaaggccggctaaatccataggcgatgataaagtttgggaaaaggccactaacgctttaaaagaagccttaaaagaacaccgcattgattacaagattgatgaagggggaggggctttctatgggcctaagattgacattaaaatcactgacgctttaaagcgtaaatggcagtgtggcacgattcaagtggatatgaatttgcctgaacgcttcaagctcgctttcactaatgagtataatcacgctgagcagccggtgatgatccacagagcgattttaggctcgtttgaaaggtttattgcgattttgagcgaacattttggggggaatttccctttctttgtcgcgcccactcaaatcgctctcatccctattaatgaagagcatcatgtttttgctttgaaattaaaagaggcgctaaaaaagcgcgatatttttgtagaagtgttagataaaaacgacagcttgaataaaaaggtgcgattagccgaaaagcaaaaaatccctatgattttagtgttagggaatgaagaagtggagaccgaaattttatccattagagacagagaaaaacaagatcaatataaaatgcccttaaaggagtttttaaacatggttgaatctaagatgcaagaggttagtttttga

SEQ ID NO: 7199 - DNA, 195 bp, Helicobacter pylori
  CDS (1)...(195)
atgccaaaaatgaagactaatcgcggcgcgtctaagcgtttcaaagttaaaaaaaacttgattaagcgtggcagtgcttttaaaagccatattttgactaaaaaaagccctaagcgcaaagccaatctaaacgcgccaaaacatgtgcatcacactaacgcgcattctgtcatgtcgttgctttgcagggcttaa

SEQ ID NO: 7200 - DNA, 351 bp, Helicobacter pylori
  CDS (1)...(351)
atgagagttaaaacaggcgttgtgcgcagaagacgccataaaaaagtcttaaaactcgctagagggttttatagtggcagaagaaagcattttagaaaggctaaagaacagcttgaaagaagcatgtattacgcctttagggatcgcaaacaaaagaaaagagagttcaggagtttgtgggtggtaaggattaatgcggcttgcagaatgcacaatacaagttattcgcgcttcatgcatgccctaaaagtggctaacattgaattagaccgcaaggttttagcagacatggcgatgaatgacatgcaagcttttacaagcgtgttagagagcgtgaaagagcatctttaa

SEQ ID NO: 7201 - DNA, 1281 bp, Helicobacter pylori
  CDS (1)...(1281)
atgctaaccattaaagatattcatgctttagaagtgatggatagtaggggcaatcctaccattcaagccagcgtggttttgagcgataacactaaggcgagcgcgattgtgcctagcggggcgagcaccggtaaaagagaagcgttagaattaagggataatgacaaaacccgttttttgggtaaaggggttttaagggcatgcgaaaatgtcaatagcgtgatcaaacaccatttaatagggcttgaagcgatcaatcaagcttttgtagatgagaggttaagggctttagacggcacgcctaattacgctaatttaggggcgaacgctgttttgggcgtttctatggcgttagcaagggctagcgcaaaggctttaaatctgccattataccgctatttagggggggctaacgctctgactttgcctgtgccgatgctcaatatcatcaacggcggaacgcatgcgaataattccatagactttcaagaatacatgatcatgcctttagggtttgaaagttttaaagaagctttaagagcgagcgcagaagtctatcacacgcttaaaaaacttttagatgggaagaatcagctcacaagcgtgggcgatgaggggggctttgcgcctaattttagcaacaatgtagaaccccttgaagtcatttctcaagccattgaaaaagccggctataaattaggcgaagaaatagcgctcgctttagatgtagcgagcagcgaattggtggatgaaaatttcaattaccatttaaagggtgaaaataagattctagattcgcatgaattggtggcttattataaagagttggtggcaaaatacccgattgtatccattgaagatggtttgagcgaagacgattgggagggttgggcgtttttaagcaaggaattagggcgtcagatccagttagtgggcgatgatttgtttgtaacgaacgcaagtctcttgcaaaaaggcattgaaaaaaatattgcgaacgccgttttgatcaaacccaatcaaatcggcaccattagtgagactttggagaccataagattagccaaacaccatgcctatcaatgcgtgatgagccatagaagcggggagagtgaggacagctttatcgctgattttgcagtcgcattgaatacgggagagattaaaaccggatccaccgcaaggagtgaaaggatcgctaaatacaaccgccttttagagattgagcatgaattaaaaggggggatttatatcggtaaagagttgtttaagcatggctag

SEQ ID NO: 7202 - DNA, 762 bp, Helicobacter pylori
  CDS (1)...(762)
atgacacaagaagaattagacgctttgatgaatggtggcgatctagaaaatttggaagccctagagactaaagaggagactaaagaggaagctaaagaggaggctaaagaggaggctaaagaggaggctaaagagaaagaagagattaaagaagaaagctctagccaaaaaatgaccgtcaaaaaagaagacgctgaaaaatacggcaagattagccccaatgaatggcctccccctccccccactgaagagcataaagtcgtgcatcaattagatgatgttacaagagattctgaagtgaaagccacgcaaatttttgatcaattggatttgatcggggctagcgctgaaaagatcgctaaaatggttaaaaagatccaagaacctttgcaaaaacaccaagaaatttttgacaatttgcatggccatttcccccatgtggaatcttttaaaaccgcgctcaatgagcagcaagaaatcctaaacgcccttaaaagcattgaagaagaagccgctaattgctctgatagctccatgcaagcgatggatattatgcagtttcaagacatccaccgccaaaaaattgaacgagtggtcaatgtcatgcgagcgctcagccaatacatgaattcgctttttgagggcaaaattgatgattctaagcgcgtgagttcagcgacttttatcaccggcgatgacgataaagatttagccagcgctgatgatattgaagccttgatcgcttcttttggagccaagtag

SEQ ID NO: 7203 - DNA, 1506 bp, Helicobacter pylori
  CDS (1)...(1506)
atgttttctaaccaatacatccaacaacgcatccataaagccaatagcttgagagaagaagggaaaaacccttatcaaaatggcttgaaacgaagccttacaaacgccgcttttttagaaaaatacgcttatgttaagggtttagaagagcctaaagacaaagaaaaatgcgagagtattgtagggagggtcaagcttttgcgtttaatgggtaaggcatgttttattaaagttgaagatgaaagcacgattttgcaagtttatgtttcgcaaaatgaattgaatgatgagtttaaaagcttgaaaaagcatttagaagtgggcgatattgtgttggtgaaaggcttcccttttgctaccaaaaccggtgaattaagcattcatgccctagaatttcatattttaagcaaaaccattgtgcctttacctgaaaagtttcatggactgagcgatatagaattgcgttaccgccagcgctatttggatttgatcgtcaatcctagcgttaaagatgtgtttaaaaagcgcagtttgattgtctctagcgtgcggaaattctttgaaatggaagggtttttagaagtggaaacccctatgatgcaccccattcctggcggggcgaacgcaaggccttttatcacttaccataacgctttagaggtggagaggtatttaagaatcgccccagaattataccttaaacgcctgattgtaggggggtttgaggcggtgtttgaaatcaatcgtaatttcagaaatgagggcatggatcacagccataaccccgaattcacgatgattgagttttattgggcgtatcacacttatgaagatttgattgaactcagtaagaggctgtttgactacttgctaaagactttaaatttagattcaaaaatcatttataacgatatggaagtggatttcaaccaaacgagcgtgatttcctatttggacgctttagaaacgatagggggcattagtaaggatattttagaaaaagaagacaggcttttggcttatttgttagagcaaggcatcaaagtagagccaaaccttacttatggtaaattgctcgctgaagcgtttgatcattttgtagagcaccaactcattaaccccacttttgtaacccaataccctattgagattagccccttagccagacgcaacgatagtaaccctaatattgctgacaggtttgaattgtttatcgcagggaaagaaatcgctaacggctttagcgagttgaacgatcctttagatcaattagaacgctttaaaaaccaagtggctgaaaaagaaaaaggcgatgaagaagcccaatacatggatgaagattacgtgtgggccctagcccatggaatgcccccaaccgcagggcaaggcataggcattgaccgattagtgatgctactcactggagctaaaagcattaaagatgtgattttattcccagcgatgcgtcctgttaaaaacgattttaatgtggagagtgaagaataa

SEQ ID NO: 7204 - DNA, 1251 bp, Helicobacter pylori
  CDS (1)...(1251)
atggcgtattttttagaacaaacggatagtgaaatttttgagcttatctttgaagaatacaagcggcaaaatgagcatttagaaatgatagcgagcgagaattacacttttgcaagcgttatggaggctatggggagtgttttaacgaataaatacgctgaaggctaccctaacaagcgctattatggaggctgtgaagtggtggataaaatagaaagcctagccatagaaagggctaaaaagctttttaattgccagttcgctaacgtgcaagcgcattcaggctcacaagccaataacgctgtctatcacgctcttttaaagccttatgacaagattttaggcatggatttaagctgtggagggcatttaacgcatggcgctaaagtgagtttaaccggcaagcattatcagagcttttcttatggcgtgaatttggatggctatattgattatgaagaggcgctaaaaatcgctcaaagcgttaagccagaaatcatcgtgtgcgggttttcagcctatccaagggagattgattttaagaaatttagagaaatcgctgatgaagtgggggcgttactattaggcgatatagcccatgtggcagggcttgtggtaaccggtgagcatgcccatcctttcccgcattgccatgtggtttcaagcaccactcataagaccttaagagggcctagaggggggattattttaactaatgatgaagagatagcggctaagattgacaaagcgatttttccaggaactcaaggcgggcctttgatgcatgtgattgctgctaaagcggtgggttttaaagagaatctaaaaccagaatttaaagcttatgcacaattagtgaaatctaacatgcaagttttggctaaagcgttaaaagaaaaaaaccataagttagtgagtggtggcacttctaaccatttgcttttaatggattttttagataagccttatagcgggaaagacgctgatattgcattagggaatgccggaatcaccgtgaataaaaacaccattcctggtgaaacgcgcagcccttttgtaacgagcgggataaggattggctcagcggcattgagcgcaaggggcatgggagctaaggaatttgaaatcatagggaataaaatatcagatattttgaatgatattaataatgttagtttgcaattgcatgtgaaagaagaattgaaagccatggtcaatcaattccctgtgtaccaccaacctattttttaa

SEQ ID NO: 7205 - DNA, 828 bp, Helicobacter pylori
  CDS (1)...(828)
atgggatttttaaaaggtaaaaaagggcttattgtaggggtggcgaacaataaatccatcgcttatgggatcgctcaatcttgtttcaatcaaggggctactttggctttcacttatttgaatgagagtttagaaaagcgcgtaaggcctatcgcgcaggaattgaatagcccctatgtgtatgaattggatgtgagcaaagaagagcatttcaagtcgctatacaatagcgttaaaaaggatttaggctcattggattttattgttcatagcgtggcctttgcccctaaagaggctttagaggggagcttgttggaaacttctaaaagcgcgtttaacaccgctatggaaatttctgtttattctttaatagagctgacaaacaccctaaaacctttattgaataacggagcgtctgttttgactctaagctatttgggtagcaccaaatacatggcgcattacaatgtgatggggttggctaaagcggccctagagagtgcggtgcgttatttagcggtggatttaggcaaacaccatataagagtgaatgccctatcggccgggcctattaggacgctcgcttctagcgggatcgctgattttagaatgattttaaaatggaatgaaatcaacgcccctttaagaaaaaatgtgagtttagaagaagtgggcaatgccgggatgtatttgctctctagtttgtctagcggggtgagtggggaagtgcattttgtggatgctggctatcatgttatgggcatgggggctgtggaagaaaaagataataaagctacgctactgtgggatttgcataaagaacaataa

SEQ ID NO: 7206 - DNA, 1866 bp, Helicobacter pylori
  CDS (1)...(1866)
gtggtaaaagaaagtgatattttagtggttggtggggggcatgcaggcattgaagcgagcttgattgcggctaaaatgggggctagggtgcatttaatcaccatgctcatagacacgatcggtttagcgagctgtaatccggcgattgggggcttgggtaaagggcatttgactaaagaagtggatgttttagggggggctatggggattattacggatcatagcggtttgcaatatcgtgtgttaaacgcttctaaagggccggcggttagggggactagagcgcaaattgatatggacacttaccgcattttggcaagaaatctcgttttaaacacccctaatttgagcgtctctcaagaaatgaccgaaagtttaatccttgaaaacgatgaggtagtgggcgtaaccacgaacattaacaacacttatagagctaaaaaagtgatcatcaccacaggcacttttttaaaaggggtggtgcatattggcgagcaccaaaaccaaaacgggcgctttggggaaaacgcttctaattctttagccttgaatttaagggagcttggctttaaggtggatcgcctaaaaaccggcacttgcccaagagtggcgggcaatagcattgattttgaaggcttagaagagcattttggggacacaaaccctccctatttcagctataaaaccaaagattttaaccccacccaactctcatgttttatcacttacactaaccccattacccaccaaatcattagggataatttccaccgagcccccctttttagcggtcaaattgaaggcataggcccaaggtattgccctagcattgaagataaaatcaaccgctttagcgaaaaagaacgccaccagctgtttttagagcctcaaaccatccataaaagcgaatattatatcaacggcttaagcacctctttgcccctagatgtgcaagaaaaggtcatccattctatcaaaggcttagaaaacgcgctcatcacgcgctatggctatgcgatagagtatgattttatccagcccacggaattgacccacactttagaaaccaaaaaaatcaaagggctttatttggccgggcaaatcaatgggactaccggctatgaagaagcggcggctcaagggcttatggctgggattaatgcggtattagccctaaagaatcaagccccctttattttaaagcgcaatgaagcttatatcggcgttttgattgatgatttaatcactaaaggcacgaatgaaccttacagaatgtttaccagccgagccgaataccgcttgcttttaagagaagacaacacgctttttagattaggcgaacatgcctatcgtttagggcttatggaagaggatttttataaggaattaaaaaaagataaacaagagatacaagacaatctcaaacgccttaaagaatacatccttacccctagtaaagaagtgttaaaacgcttggatgaattagacgaaaaccctatcaatgacaaggttgatggcgttagtttgttagcgcgcgatagttttaatgcagaaaaaatgcgctcctttttcagctttttagcccccttgaacgagcgggttttagagcagattaagattgaatgcaaatataatatttatattgaaaagcaacacgaaaatatcgctaaaatggatagcatgctcaaagtttctatccctaaaggttttgtgtttaaaggcattccaggcttaagcttagaagcggtagaaaagttagaaaaattccgccccaaaagcctttttgaagcctcagaaatcagcgggatcaccccagcgaatttagacgttttgcatttgtatattcatttgcggaaaaactcttaa

SEQ ID NO: 7207 - DNA, 1371 bp, Helicobacter pylori
  CDS (1)...(1371)
gtgattttaaaaaagagtggtatcttggctaaaaaaacttctttatttgagtgtcagcattgtggttttacaagccctaagtggttgggtaagtgcgttcaatgcaacgcatgggagagttttatagaattgaaccaagcccaaaaggaagttttaaacacgcttaaaaaaccgatcccacaagcgcaaaaaagcgtttctatcgctgcaattgagcatgaagaagtgattaagttttcttccactcaaagcgaattggatattgttttgggtggggggatcgctaaaggggggctgtatttagtgggggggagtcctggggtggggaaatccactctgcttttaaaagtggcttctggcttagccaaaaaccagcagaaggttttgtatgtgagcggggaagagagcttgagccagattaaaatgcgtgccattagattggattgcatagaaaaagaattgtatctgctcaatgaaatcaattggcctgtgattaaggcgaatattgagagcgaaaattattttgcgtgcgtgattgattccattcaaacgctctattcgccagagatttcttcagcgcccggctctatttcgcaagtgcgagagatcacttttgagctcatgcgtttagccaaaacaagagatattgctatttttatcatcggtcatatcactaaagaagggagcattgcagggcctagagtgttagagcatatggtggatagcgtgctgtattttgaaggcgatcccagtagggaattaaggattttaaggagttttaaaaaccgctttggccctacgagtgaaatcggcttgtttgagatgaaagagcagggtttggtgagcgctaaagaagcttcaagcttgtttttttctaaagaagagcctatggaggggagtgcgattactatcactttagaaggctcaagagcgttgattttagagattcaggcgttggtgagcgagtgcagtttcggatcacccaaacgattagcgaacgggtttgacaccaaccgccttaacatgcttattgctttgttagaaaaaaagctagaaatccccttaaaccgccatgatgtgtttattaatgtgagcggaggcattaagattagcgagccggcttgcgatttagcggtcattgccagtatcctttcaagctttaaaaacagaaaaattgacaataaaacggcgtttttgggcgaagtgagtttgaatggcaggattttagaagcccctaatttgaacgctagattgaaagaaatggaaaattacggctttttaaaagccattttgcctaaaaaacccagccaaaaaacctctatcaaatgctatgaagccaatgcggtgggcaagattgttgaatggatgtga

SEQ ID NO: 7208 - DNA, 1734 bp, Helicobacter pylori
  CDS (1)...(1734)
atgctattttcaaaactctttgcccccactctcaaagaaccccctaaagatgccgtgttaaaaagccataaacacttagctcaagcaggatacatttatcaagtaggcagcgggatttataattttttgcctttagctaaaaaagtgctagacaagatagaaaacatcacgcacaaacgcatgcaagagcatggggcgcaaaatattttaatgagttttgtggttttggcgagcttgtgggaaaaatcaggccgtttggataaatacggcaaggaattattggtttttaaagaccgaaaagacaatgattttgttttaagccccactttagaagaaaatatcaccgaaattgccgctaatttcattaaaagttacaagcaattgcccgtccatctctatcaaatccacacgaaattccgtgatgaaatccgcccaagatttgggctggtgagagcgagggaatttatcatgaaagatggttacagctttcatgaagacgctgagagcttggataaggaatttttaaacacgcaaagcgcttataaagagattttaagcgatttgggtttggattttcgcattgtggaagcggatagcggggcgattggagggagtaaaagcagggaatttgtcgttttaaccgaatgcggggaagacacgatcgtggtgtgtcaaaattgcgattatgccgctaacattgaaatcgctaaacgctctaaaaggcctgagcctttaaatgtcccaaaagcgcaattagcgaaattccctacccctaataccactagcgcgcaaagcgtggcggagttttttaaaacagagccttattttgtcttaaaagcgcttgttagaaaagtgatccataaagataaagaaaccctagcgtgcttttttgtcaggggcgatgacaatttagaggaagttaaagccctaaacgccttgaacattataggagcgaatgctttagaattgagagaggcgagtcaaaaagatttggataatgtggggttaatagcgggttttatagggccttatggcttgaaaaagcatgtttcttacattatttttgatgaagatttaaaagagggcgattgcttgatcgctggggctaatgaaaaggattttcatgcggtgggcgtggatttaaaagggtttgaaaatcttgtttatgcggatattgtccaggttaaagagagcgatcgttgccctaattgtcaaggagcgttgaaataccataagagtttggaggtggggcatattttcaaactcgggcaaggctatgctaaaagcttgaaggctagtttcttggataagaatggtaaagagcaattttttgaaatggggtgctatgggataggcattagccggttgctcagcgcgattttagagcaaaaaagcgatgatttaggctgtgtgtggacgaaaaataccgccccttttgatgtggtgatcgtggtttctaattggaaagatgaagcgcaaaaaaaactcgcttttgaagtgtatgaaaggctgctccaaaagggcgttgatgcgctgctagatgacagagacgcgcgttttggggcgaagatgagggattttgaattgattggggaacgattggcgctcattattgggaagcaaactttagagagcaaagaatttgaatgcatcaaacgcgctaatttggaaaaacaaacgattaaagacattgaattagaagaaaaaattttagaaatgttagaaagcgaataa

SEQ ID NO: 7209 - DNA, 924 bp, Helicobacter pylori
  CDS (1)...(924)
atgcaagaaaaacaacttaaaaccattcaaaataagatcgcttcctggatcaaagaaatagaaagtgcctttatagatgaattattttctaagattggcccttcaaaaatgctgcgctccaaactcatgctcgctttattaaatgaaaaaacagacgctattttattggataaagcattcaatttgtgcgcgattgtagaaatgatacagaccgcttctttattgcatgatgatgtgattgacaaagcggccatgcgccgaaaactccccagcattaacgctctttttggtaattttaacgccgtgatgcttggggatgtgttttattctaaagccttttttgaactctctaaaatgggtgaatccatcgccaaatctctctctaatgcggttttaaggctctctagaggcgagattgaagatgtgtttgtggggggaagttttaatagcgacaaacaaaaatactggcgcattttagaagacaagaccgctcatttcatagaagcgagtttaaagagcatggcgattcttttaaataaagacgcaaaaatgtatgcggattttggattaaattttggcatggcatttcaaatcattgatgatttattagacatcactcaagacgccaaaactttaggtaagcccaattttagcgattttaaagagggcaaaaccactttaccctacttgcttttatatgaaaaattaaatcagcgcgatcaagggcttttaatttcttattttaaacaagatagccatgaaatcatagaatggactaaggaaaaattcaagcaatatggtaccatagaagaaacccttaagatcgctcaagtttattctaaaaaggcccttgaagccattaaaggggagaacaatttgattttagaaaaactagcgcaagacgtcatttataggactttttaa

SEQ ID NO: 7210 - DNA, 435 bp, Helicobacter pylori
  CDS (1)...(435)
atgaaaacatttgaaattctaaaacatttgcaagcggatgcgatcgtgttatttatgaaagtgcataacttccattggaatgtgaaaggcaccgattttttcaatgtgcataaagccactgaagaaatttatgaagagtttgcggacatgtttgacgatctcgctgaaaggatcgttcaattagggcatcaccccttagtcactttatccgaagcgatcaaactcactcgtgttaaagaagaaactaaaacgagcttccactctaaagacatctttaaagaaattctagaggactacaaatatctagaaaaagaatttaaagagctctctaacaccgctgaaaaagaaggcgataaagttaccgtaacttatgcggatgatcaattagccaagttgcaaaaatccatttggatgctgcaagcccatttggcttaa

SEQ ID NO: 7211 - DNA, 1479 bp, Helicobacter pylori
  CDS (1)...(1479)
atggaattgaatcaaccaccactccctacagaaattgatggtgacgcttatcataagccgagttttaatgatttgggcttaaaagaatcggttttaaaatccgtttatgaagccggcttcacttccccaagccccattcaagaaaaggccattccggctgttttgcaaggccgagatgtcatcgcacaagcccaaacaggcacaggaaaaaccgccgctttcgctctgcccattatcaacaaccttaaaaacaaccacaccatagaagccctagtgatcacgcccaccagagaattagccatgcaaattagcgatgagattttcaaattgggcaaacacaccaggactaaaaccgtgtgcgtgtatggaggccagagcgttaaaaagcaatgcgaattcattaagaaaaatccccaagtgatgatcgctacaccaggaaggctgctcgatcacttaaaaaacgaacgcatccataaatttgtgcctaaagtggtcgttttagatgaaagcgatgaaatgctggatatggggtttttagacgatattgaagagatttttgactacctccctagcgaagcgcagattttgcttttttcagccacgatgccagagccgattaaaagactagcggataagattttagaaaaccctattaaaatccatatcgctccttctaatatcactaacaccgacatcacccaacgcttttatgtgatcaatgagcatgagagggccgaagcgatcatgcgccttttagacacccaagcacccaaaaagagcattgttttcacgcgcactaaaaaagaagccgatgaattgcaccaattccttgcttctaaaaattacaaaagcaccgccttgcatggggatatggatcaaagggatcggcgctcttctatcatggcgtttaaaaaaaatgacgctgatgtgttggtggctacagatgtggcgagtcgtgggctagatattagcggtgtaagccatgtgtttaattaccacttgcccctaaacactgagagctatatccatcgcatcgggagaaccgggcgagcgggcaaaaaaggcatggcgatcactttagtaacccctttagaatacaaagagcttttacgcatgcaaaaagaaattgattcagagattgaactttttgaaatccccaccattaacgaaaatcagatcatcaaaaccttgcatgacgctaaagtgtctgaagggatcatcagcctttatgaacagcttaccgaaatttttgagccgtctcaattggttttaaaacttttgagtttgcagtttgaaaccagcaaaattggcttaaaccagcaagaaattgacgcgattcaaaaccctaaagaaaaaacgccaaaaccctctaacaaaaaaacgccccaacatgagcgagcgcgttctttcaaaaagggtcagcacagagacagacaccctaaaacaaaccattattctaaaaaacccaaacgccgttaa

SEQ ID NO: 7212 - DNA, 1551 bp, Helicobacter pylori
  CDS (1)...(1551)
atgctagaaatcaaaaacttgaactgcgttttaaacgcgcatttttcgctccaaaacatcaatatttcgttaaatcctagcgaaagggtggcgatcgtgggcgagagcgggagcgggaaaagctctatcgctaatatcatcatgcgtttaaaccccagattcaaaccccataatggcgaagtgctgtttgaaacaaccaaccttttaaaagaaagcgaagaatttatgcaacatttaaggggtaatgcgatcgcttacatcgctcaagaccccctatccagcctgaaccccttgcataaaatcggcaaacaaatgagtgaagcctattttttacactataaaaacgcttctaaaacgctccttaaagaacaagttttaaacgccatgaaacaagtccaattagatgaaaaatttttggatcgttacccttatgagttgagcggagggcagcgccaaagggtgtgtatcgctatgggcattattaatgcacccaaattgctcatttgcgatgagcctaccaccgcattagatgcgcaaatccaaaaccagattttagacttgcccaagcaattgagtgcggaaaaaaacatcgctcttttattcattagccatgatttgaaagcagtcaaacgcttggctgatagggtttatgtgctaaaaaaaggcgagatagtagaaaccaatttgactaaagatctttttaatgaccccaagcacgaatattcaaaactcttgattcaagcttcaaacttgcccgctaaaaatttaaaagcgctagatgaaacgcttttagaagtgaaggattttagcgtttattacttgcaaaaacgcttttttaggccttctttaaaaaagccccttatcgcatcagtcaatttttctctcaaagccaaagaaaacatcggcatcattggcgaaagcgggagcgggaaaagctctttagcgttggggcttttaaaactcgctttaaacagtggggaagaaaagattttaggccaaagcgtagggtctttaaattctaaagcgttcaaaccctaccgcaagattttgcaaatggtgtttcaagacccttacgcttcattaaaccctcgcttaagcattcaaagcattttaacagaggctttgcgctttgcttaccctaaagcttccaaagaagaatggcaccatctcgcaaaactttgtttagaagaagtgtgtttaagccatgaattgcttaactcttacgcttatgaactcagcggtggggaacgccaaagagtggcgatcgctagagcgattgctttaaaacctaaaatcattcttttagatgaacccacttctgctttagataaaagcattcaaaaaagcgtgttggaattgctgttggatttgcaagaaaagcaggatttgagctatttgtttatcagccatgatttagatgtgatcaaagcgttttgcgataaggtgttagtgataagtgaggggaaagtcgtagaaatgaacactattaaagaggtgtttgataaccccaaacacgcttatacaaagcgtttgttagaatccaggctttaa

SEQ ID NO: 7213 - DNA, 2571 bp, Helicobacter pylori
  CDS (1)...(2571)
atgaatttatttgaaaaaatgactgaccaattgcatgagactttagacagcgcgctcgctttagccttacaccataaaaacgctgaagtaacgcccatgcacatgctttttgccatgctcaataattcccaaggcattctcattcaagccttacaaaaaatgcctgtggatattcaagctttaaggcttagcgttcaaagcgagttgaataagttcgctaaagtttcacaaatcagcaagcaaaatatccaattaaaccaagctttaatccaaagtttagaaaacgctcaaggcttgatggctaaaaggggcgattctttcatcgctaccgatgtgtatcttttggcgaatatgggtctttttgaaagcgttctaaagccttatttagacgctaaggaattgcaaaaaactttagaatctttaagaaaaggcaggactattcaggataaaaacgacgattccaatttggaaagtttggaaaaatttggcattgatttgacgcaaaaagccctagaaaataagctggatcccgtgatcggaagagatgaagaaatcattcgcatgatgcaaattttgataagaaaaacaaaaaataaccctattttactgggcgagcctggagtggggaaaacggcggttgtggaagggttagcccaacgcattatgaataaagaagtgcctaaaacgcttttaaacaaacgagttattgctttagatctaagcttattggtggctggagcgaaatacagaggcgagtttgaagagcgcttgaaaaaggtgattgaagaagttaaaaaaagcgcgaatgtgattttatttattgatgaaatccacacgatcgtgggggctggggctagtgaggggggcatggatgcggctaacattttaaaacccgcgctcgctaggggggaattgcacacgattggagcgaccactttaaaagaataccgcaagtattttgaaaaagacatggcattgcaaaggcgtttccaacccattttactcaatgagcctagcatcaatgaagctttacagattttaagagggttaaaagaaactttagaaacgcaccataatatcactatcaatgactccgcgctcatagcgagcgctaaactctctagccgttatattaccgataggtttttacccgataaggcgattgatttgattgatgagggggcggctcaattaaaaatgcaaatggaatcagagccggcaaaactctctagcgttaaacgctccatccaaagattagaaatggaaaaacaagcccttgaaatggaaaaaaaagagagcaatgccaaacgcatgcaagaaatccttaaagaattgagcgatttgaaagaagaaaaaatccaattagaagcgcaatttgaaaacgaaaaagaagtgtttaaagaaatttcacgcttgaaaatggaaatggaaagtttgaaaaaagaggctgagaggtttaagcgcaatggggattaccagcaagcgggtgaaattgaatactctaaaatccctgaaaataaaaagaaagaagaagaattgcaacgtaaatgggaagcgatgcaacaaaacggggcgttattgcaaaacgctttaaccgaaaacaacatcgctgagatcgtgagccaatggacgcacatccccgtccaaaaaatgctccaaagcgaaaaaaatagggttttaaacattgaaagcgaattgcaaaaaagggtggtagggcaagaaaaagcgatcaaagcgatcgctaaagcgattaaaaggaataaggccggccttagcgatagcaacaagcccatagggagtttcctctttttagggccaacaggcgtgggtaaaaccgagagcgctaaagctttggcgcaattcttgtttgatagcgataaaaatcttatacgaattgacatgagcgaatacctagaaaagcatgccatgagccgtcttattggggccgctcctgggtatgtgggctatgaagaaggcgggcaattgaccgaagcggtacgcagaaaaccttatagcgtggtgctgttagacgaagtggaaaaagcccatccggatgtgtttaacctcttgttgcaggttttagatgaaggacatttaaccgatagtaagggcgtgagggtggatttcaaaaacacgattttgatcttaaccagcaatgtggctagtggtgcgcttttggaagaaaatttgagtgaagccgagaagcaaaaagcgattaaagagagcttgaggcaattctttaagccggaatttttaaaccgcttagatgaaatcatctcctttaacgccctagatagtcatgctgtcattaatatcgtggggatactttttgaaaacattcaaaaaaaagcgcttgaaaggggcattaatataaccctagacgaagaggcaaaagaattgatcgccgaagcgggatttgacagattctatggcgctagacccttaaagcgcgcgctctatgaaatggtagaagacaagctcgctgaactcattttagaggataaagttaaagagaatgacagcgtggcatttgtggtagaaaataacgagattgtgcctaagattaagtga

SEQ ID NO: 7214 - DNA, 1116 bp, Helicobacter pylori
  CDS (1)...(1116)
atggattttcaactccaagcgactgacaataacgcgcgagctggtcttttaaatttagcccattctcaagtggcaacgcctgtttttatgcccgtaggcacgcaaggctgcatcaaatctttagacgctacagatgcgcaagaaattttaggcgctaaactcattttagccaacacctatcacatgtatttaaggccgggtgaaaaggtcgttgaggagttagggggcttgcatcgtttcgctcaattttatgggagttttttaaccgatagtggagggtttcaagcctttagtttgagcgataatgtcaaattgcaagaagatgggatcgtttttaaatcccatattgatgggagcaagcatctattcacgcccgctaaagttttggacattcaatattctttgaatagcgatattatgatggttttagacgatttagtgggcttgcccgctcccttaaaacgccttgaagaatccattaaaagaagtgctaaatgggcgaatatgagcctagaataccacaaagaaaaaaaccgcccgagcaacaacctttttgccattatccagggcgggacgcatttgaaaatgcgcagccttagcgtgggattaacgcatgagggttttgatggctacgctataggcggtttagcggtgggggaaagcgctgatgaaatgctagaaaccatcgcgcacaccgcccccttgctccccaaagacaagcctcgctacttaatgggcgtaggcacgcctgaaaatatcctagacgctatcagtttgggggtggatatgtttgattgcgtgatgcccaccagaaacgccagaaacgccacccttttcacgcattctggcaaaatttctatcaaaaacgcgccctataaattggataatacccctattgaagaaaattgcgcatgttatgcttgcaaacgctattctaaagcctatttgcaccatttatttagggctaaagaactcacttacgctcgtttggccagcttgcacaatttgcatttttatttagagctggtgaagaacgccagaaacgccattttagaaaagcggtttttgagttttaaaaaagaatttttggagaaatacaactcccgctctcattga

SEQ ID NO: 7215 - DNA, 315 bp, Helicobacter pylori
  CDS (1)...(315)
atgtcatacgcaatattcaagcatggcggtaagcaatataaagtcgttgaaggcgatattgttttattggacaaaatggataaagagcctaaggctttagtggaattagtggaagtgttagccgtatccaaagagggcaaactctcttgcgggaaaccctttgtgaatggggctaaaattgaagcggaagtgatcaatgaagggcgcggcaaaaaagtcatcactttcaaaaaacgccgccgaaaagacagcaaaaccaagcgtggttttagaagagatttcactcgtgttagaatcactaaaattgtagcataa

SEQ ID NO: 7216 - DNA, 1650 bp, Helicobacter pylori
  CDS (1)...(1650)
atgaataatgtttttgttaagggtttgtttttttttcttttattgtttgggttttttttgaaagcttcagaaagcccaaacgctactcttaatccatctaaagaaaatgtttctgttgaagagcaaaagcgttttggaggcgttttagtttttgcaagaggcgctgatggctcgagcatggatcctgctttagtgactgatggcgaaagctatgtagcaacgggcaatatttatgacacgctcgtgcaattcagatacggcaccacagaagttgaacccgccttagcgacaagctgggacatatccccagatggtcttgtatatacctttcatttacgcaaaggggtttatttccaccaaacgaagtattggaataaaaaagtagagtttagcgctaaagatgtgctgttttcgtttgaacgccagatggataaagctaaacgatattatagcccgggggctaaaagctataagtattgggaaggcatgggcatgtctcatattattaagagcattgaagctttagatgactataccattagattcacacttaatgggccagaagccccgtttttagcgaatttgggcatggactttttgagcattttgagtaaggattacgctgattacctggctcaaaataataaaaaagacgagttggctaaaaaacctattgggacagggcctttcaaattctttttgtggaataaagatgaaaaaatcattcttttaaaaaatcaagattattgggggcctaaagcgtatttggataaggtggtggtgcgcaccattcctaattcttccactcgcgctttagcgttgcgcaccggcgaaatcatgctcatgactgggcctaatctcaatgaagtggagcaattagaaaaagtccctaatatcgtggtggacaaaagtgctgggttgttggcgagttggctttcgttgaacacgcaaaaaaagtattttgacaaccctttggtgcgtttggctatcaatcatgcgatcaatgcagatgattacatcaaagtgctttatgaaggctttgctcaaaaaatggtcaatcctttcccgcccaccatatggggttataactacaatatcaaaccctatgaatacgatttgaaaaaggctaaggagttgttgaaacaagcgggctatcctaacggctttaaaaccactatttttaccactgccactcgtaacccaaaaggagcggtgttcatacaggcgagcctggctaaaattggcattgatgtgaaaattgaagtgtatgagtggggggcttatttgaaaagaacgggtctgggcgaacatgaaatggcgttttcaggctggatggcagacattgcggatccggataatttcttatacaccttatggagcgagcaagccgcctcagctatacccactcaaaaccattccttttataaaaataaggagttttccaatctgctcataaaggctaaacgcgtttcggatcaaaaagagagggaagccctttatttaaaggcacaagaaattatccataaagacgcgccttatgtgcctttagcctatccttattcggtggtgccgcatttgtctaaagttaagggttataaaacgaccggagtgagcgtgaatcgcttctttaaggtgtatttagaaaaataa

SEQ ID NO: 7217 - DNA, 807 bp, Helicobacter pylori
  CDS (1)...(807)
atgaagctcttagaaattaaagaattgaaaaaatcctatgcgatagacagggggttattcaagcctaaaagagtgatccatgcgctcaatgggatcagttttgaagtggaacaaaatgaagttttgagcattgtgggggagagcggttgcgggaaaagcacgacagccaaaattttagccgggattgaaaggcaagatagcggggcgatttatttcaatggtaagcgccatttgcattttagcaaacaggattggtttgattaccgcaaaaaggtgcaaatgatttttcaagacccttattctagcctaaaccctcggtggaaagtgggcgagatcatcgctgaacccttgcttttaaattctcatttttcaaaaaaagaaatcaaaacaaaagtgctagagatcatgcaaaaagtgggcttgaaattagaatggatcgatcgttacccccaccaattttcaggcggtcaaaggcaacgaatcggcattgctagggcgctcattttgcatcctagcgtggtgatttgcgatgagcctgtgtctgcgctagacgtgtccattcaagcgcaagtgttgaatttgctcttggatttgcaaaaagaaatggggctgacttatatttttatcagccatgatttaggggtggtggagcatataagcgataaaatcatcgtaatgaatcaggggcaaatcgtagaaacgggggatgtggatagcgtgataagcgctccaaagcacccttatacgcagaaattactcaatgcggtgccgcatttggaaaaatccatgcaaagatttgccaaataa

SEQ ID NO: 7218 - DNA, 1293 bp, Helicobacter pylori
  CDS (1)...(1293)
atggagttgttgcacagcattaatgatttcaatgaagctaagcaggtgatcgctgggggggtcaattcacctgttagggcgtttaagagcgttaaaggcactcccccctttattttaaaaggcaagggggcgtatctttatgatgtggataacaaccattatatagattttgtgcaaagctgggggcctttgatttttgggcatgctgatgaagagattgaagaaaatattattaatgcattaaaaaaaggcacttcttttggcgctcccacagaattagaaaccactttagctaaggaaatcatttcttgttatgaaggcttagataaggtgcgtttagtcagtagcggcacagaagcgaccatgagcgcgatacgactcgctagagcttatagccaaaaagatgatttgatcaagtttgaagggtgctaccatgggcatagcgactccttattggtgaaagcgggtagcgggtgtgctacttttggatcgccttcttctttaggcgtgccgaacgattttagcaaacacactctagtggctcgttataacgatttaaactccacagaagaatgctttaaaaaaggcaatgtgggttgcgtcatcattgaacccattgccgggaatatggggttagtgccggctcaaaaagagtttttattgggcttaaaggccttgtgtgaaaaataccaagcggtgctgattttagatgaagtgatgagcggttttagagcgagcttgagcggttcgcaagaattttatggcgtggtgccggatttggtaacctttggtaaggtgataggtgctgggcttcctttggcgtgttttggagggcgtgcagaaattatggacttgctttcgcccattggaagcgtgtatcaagcaggcactttgagcggtaaccccctagcggtgtgcgcggggttgagtgcgctttataaaatcaaaagagacaaaaccctttatactcgcttagacgctttagctattcgtttgactcaaggcttacaaaagagcgctcaaaactataacatcgctttagagacgcttaacatggggagcatgtttggctttttctttaacgaaaatgcggtgcacgattttgatgacgctttaaaaagcgatacggagatgtttgcaaaattccaccaaaaaatgctctttaagggcgtgtatttggcgtgctcaagctttgaaaccggctttatttgtgagcctatgactgaagagatgattgatttaacgatcgcaaaagccgatgaaagttttgatgaaatcataaaaggtgtgtga

SEQ ID NO: 7219 - DNA, 1626 bp, Helicobacter pylori
  CDS (1)...(1626)
atgcacactctcattaagggcattttagaagagattttagaagaagaagtcattgttgaataccctaaagacagagagcatgggcattacgctacgcccattgctttcaatctcgccaaagtttttaaaaaatcgcccttagccatcgctgaagagttagcccttaaaatcagcacgcatgaaaaaactcaagggctttttgacagcgtagtggcttgtaagggctatatcaatttcacgctttctttagattttttggagcgtttcacccaaaaagctttggaattgaaagaaaaatttggctctcaagttaaaagcgaacgttctcaaaaaatctttttagaatttgtgagcgctaaccccacagggcctttacacatagggcatgctagaggggcggtgtttggcgatagtttggctaaaatcgctcgctttttagggcatgaagttttatgcgagtattatgtcaatgacatgggatctcaaatccgcttgttagggctttctgtatggctcgcttacagagaacatgttttaaaagaaagcgtaacttacccagaagtcttttacaaaggcgaatacatcattgaaatcgctaaaaaggcgaacaacgatttagaaccaagccttttaaaagaaaacgaagaaacgattattgaagttttaagcggctatgctagggatctaatgcttttagaaattaaagataatttagacgctttaggcattcattttgattcctatgcgagcgaaaaagaagtttttaaacataaagatgcggtgtttgaacaattagaaaaagcgaacgccctttatgaaaaggattctaaaatctggctcaaatcttcactctaccaggatgaaagcgatcgggtgctcattaaagaagataaaagctacacttatttagcgggcgatattgtctatcatgatgaaaaattcaagcaagattataccaaatacatcaacatttggggggcagaccaccacggctatatcgctagagtgaaagccagccttgagtttttgggctatgattccaacaagcttgaagtcttgctcgctcaaatggtgcgcttgctcaaagataacgagccttacaagatgagtaaaagagcgggtaattttattttgattaaagatgtggttgatgatgtgggtaaggacgctttgaggtttatttttttgagcaaacggcttgacactcatttagaatttgatgtcaatactttaaaaaagcaagacagctcaaaccccatttactatatccattacgctaattcgcgcatccacaccatgctagaaaaatcgcccttttctaaagaagaggttttgcaaacccctttaaccaatttaaacgctgaagaaaaatacttgctttttagcgctttaagcttgcctaaagcaattgaatcctcttttgaagaatacggcttgcaaaaaatgtgcgaatacgcaaaaaccctcgcatcagaattccaccgcttctataacgctggcaaaatcttagacacccctaaagctaaagagcttttaaaaatttgtttaatagtaagcttgagcttaagcaacgcttttaaacttttaggcatagagataaagaccaaaatttccgctagagattaa

SEQ ID NO: 7220 - DNA, 1518 bp, Helicobacter pylori
  CDS (1)...(1518)
atgaaaatgattctattcaaccaaaaccccatgatcacaaagctgcttgagagtgtctctaagaaattagaattgcctatagaaaattttaaccattatcaagagctgtccgcacgccttaaagaaaatcaggaatggcttttgatagccgatgatgaatgtttggaaaaactagaccaagtggattggctagaattaaaagaaaccatctctcaaaataaaaacagcgtgtgtatgtataaaaaaggcaatgaagcgcagccctttttagagggctttgaggtgaaaatcaaaaaaccttttttacccactgaaatgttgaaagtccttcaaaaaaagcttggttctaacgcaagcgagctagaacctagccagaatttagacccaactcaagaagttttagaaaccaattgggacgaattagaaaatttaggcgatttagaagccctagtgcaagaagagcctaacaatgaagagcaactgctccccactttaaacgatcaagaagaaaaagaagaggttaaagaagaagaaaaagaagaggttaaagaagaagaaaaagaagaggttaaagaagaagaaaaagaagaggttaaagaaactccccaagaagaaaaaaagcctaaagatgatgaaacgcaagagggtgaaactctcaaagataaagaagtttctaaagagttggaagcaccccaagaattagaaatccctaaagaagaaacgcaagaacaagatccaatcaaagaagaaacgcaagaaaataaggaggaaaaacaagaaaaaacacaagattccccaagtgcacaagaattagaggccatgcaagaattagtcaaagaaatccaagaaaactctaacggccaagagaataaagaaaaaacgcaagaaagcgcagaaattccacaagataaagaaatccaagaagttgttaccgaaaaaacccaagcgcaagaattagaagttcctaaagaaaaaacgcaagaaagtgcagaagctctccaagaaacccaagcgcacgagttagaaaaacaagaaatcgcagaaaccccgcaagatgtagaaatcccccaatcacaagataaagaagtgcaagaattagaaatccctaaagaagaaacccaagaaaatacagaaacaccgcaagatgtagaaacaccgcaagaaaaagaaacccaagaagatcattacgaaagcattgaagacattcctgagccggtgatggctaaagcgatgggggaagaattgccctttttgaatgaagccgttgcaaaaattcctaataatgagaacgacacagaaacccctaaagagagcgttacagaaacctccaagaatgagaacaacacagaaaccccgcaagaaaaagaagaaagcgataaaacttctagccccctagaattgcgcttgaatttgcaagatttattaaaaagcctgaatcaagagtccttaaaaagccttttagaaaacaaaaccttaagcattaaaatcactttagaggataaaaaacctaatgcataa

SEQ ID NO: 7221 - DNA, 783 bp, Helicobacter pylori
  CDS (1)...(783)
atgcaaaaagattaccaaaaactcatcgtttatttatgcgattttttagaaaaagaagtgcaaaaacgcggctttaaaaaagtcgtttacgggctgagcggggggctagatagcgcggtcgttggggtgctgtgtcaaaaagtttttaaagaaaacgctcatgcccttttaatgccctcttcagtctctatgccagaaaataaaacagacgccctaaatttgtgcgaaaaattttctatcccttatacagaatattctatcgctccctatgacgccatctttagctctcactttaaagacgcaagccttactaggaaggggaatttttgcgcaagattgcgcatggcttttttatacgattattctttaaaaagcgattctttagtcattggcacgagcaataaaagcgaaagaatgctaggctatggcactttatttggggatttggcgtgcgcgattaacccgattggggaattatttaaaaccgaagtttatgaactcgctcgccgtttaaatatccctaaaaagattttaaataagccccctagcgcagatttatttgtggggcaaagcgatgaaaaagatttgggctatccttatagcgtgatcgatcctttattgaaggatattgaagcgttgtttcaaacaaagcccattgatacagaaacgctcgctcaattaggctatgatgaaattttagtgaaaaacatcacaagccgtatccaaaaaaacgcttttaaattagaattacccgccatcgccaaacgatttaaccctgaatga

SEQ ID NO: 7222 - DNA, 993 bp, Helicobacter pylori
  CDS (1)...(993)
ttggcattacccgtttattatgataaagacattgatttaggcgttatccaatccttacaagtgggcattattggctatggcgcgcaaggagaagcccaagcgctcaatttgagggactctaaagtaaaagcgcgtattggcttgtatcaagggagtttgagcgtttcaaaagcaaaaaaagagggctttgaagtgttagaagtcaaagagctagtccaaaattctgatgtgatcatggcactactcccagatgaattgcataaggaagtgttagaaaaagaagtgatcccttttttaaaagaggggcaaattgtgggctttgcccatggttttagcgtgcatttcaatcaggttgttcttccaaaaggcgtgggcgcgattttagtcgcgccaaaagggcctgggagcgctttaagagaagaataccttaaaaataggggcttataccatctaatcgccatagagcaagaaagctcaattcataacgctaaagcggtggctttaagctatgctaaagcgatgggcggagggagaatgggggttttagaaacgagctttaaagaagaatgcgagagcgatttattcggcgagcaagcggttttgtgcggggggttagaagcgattgtgagaatggggtttgaaactttaattaaggcaggataccctgaagaattagcctattttgaatgcgtgcatgaagtgaaattagtggcggatttattgcattataagggggtagagggcttaaggaaacacatttctaacaccgctgaattcggggcgattaaagctagagagcctatgggaaagctgctaaaaaaacgcatgcaaaaaatcttaaaaaagattcaaaacggctcattcgctaaggattttttactagaaaagagcttgaattaccccaggttaaacacagagaggaaagcccttaaagagactaaaatagaacaaattggggaaattttacgcgccccattcaatcataaaaaataa

SEQ ID NO: 7223 - DNA, 1617 bp, Helicobacter pylori
  CDS (1)...(1617)
atggatagagccaaatttatattcgttacagggggtgtgttaagctctctagggaaagggatttcatcttcttcaatcgctacgcttttacagcattgcaattaccaggtttctattttgaagatcgacccttatatcaatattgatccaggcaccatgagccctttagagcatggggaagtgtttgtaactagcgatggcgctgaaacggatttagacatagggcattatgaacgctttttgaacaggaatttaacgaggttgaataatttcactactgggcagattttttcaagcgtgatagaaaatgaaaggaaaggggaatatttaggcaaaaccattcaaatcgtcccccatgtaaccgatgaaatcaaaaggcgcattaaaagcgcggctaaggggttggattttttaatcgtggaagtgggcggaaccgtgggcgatatggagggcatgttttatttggaagcgatccgccagcttaaattggaattagggaatgaaaaagtcatcaatgtgcatgtaaccctgatcccctatatccaaaccactaacgaactaaaaaccaaacccacgcaacattccgtccaagaattaagacgccttggcgtaacccctcaaatcattttggcgcgatcgcctaagcctttggataaagagttgaaaaataaaatcgctttgagttgcgatgtggagcaagacagcgtgattgtcgccacagacactaaaagcatttacgcatgccctattcttttcttgcaagaaggcattttaacccccattgccagacgctttaatttgaataaactacaccccaaaatggcggcttggaacactttagtagaaaagattatcgctcctaaacacaaagtcaaaattggttttgtgggcaagtatttaagcttgaaagaatcttataaatccttgattgaagccctaatccatgcgggcgcgcatctggatacgcaagtcaatattgaatggctggatagcgagaattttaatgaaaagacggatttagagggcgttgatgcgattttagtgcctgggggctttggagaaagggggattgagggcaaaatttgcgccattcaaagggctaggttagaaaaactcccctttttagggatttgtttgggcatgcaattagcgatcgttgaattttgtcgcaatgttttgggtttaaaaggggctaactctacggagtttaaccaacgctgcgaataccctgtggtgtatttgattggagattttatggatcaaaaccaccaaaaacaggtgcgcacctataattcgcctttaggaggcaccatgcgattaggcgaatacgaatgcgaaattatgccaaacagcttgttagaaaaagcttataaaaagcctagcattaaagaaagacaccgccatcgttatgaaatcaaccccaaataccgccaagagtgggaaaataagggcttgaaagtggtgggttttggatcgaatcatttgattgaagcgattgaattagaagatcacccgttctttgtgggggtgcaattccacccagaattcacctccaggttgcaaagccctaaccctattattttagatttcattaagagcgctctttctaaatcctaa

SEQ ID NO: 7224 - DNA, 1377 bp, Helicobacter pylori
  CDS (1)...(1377)
atgaataaagtgaataaagaaaataaaaaggtagaaaaaaaagagctttcacgcattttgatcgctaatagaggcgagatcgctttaagagcgatccaaaccattcaagaaatgggtaaagaatccatagccatttattctatcgctgacaaggacgcccactacctcaatacggctagcgcaaaagtgtgtatagggggggccaaatccagcgagagctacttgaatatccctgcgatcattagcgcggcggaattgtttgaagcggatgcgattttccccgggtatgggtttttgagcgagaatcagaattttgtagagatttgctcgcaccattctttagaatttattggtccaagcgcgaaggtcatggctttaatgagcgataaatccaaggccaaaagcgtgatgaaggaagccggcatgcctgtgattgagggcagtgatgggttgcttaaaagctatcaagaagctgaagaaatcgctgataaaatcggctaccctgtcatcattaaagcagccgctggtgggggcgggagaggcatgcgtgtcgtaggagataaatccaagcttaaaaacctttatttagccgcagaaacggaagctttgagcgcgtttggcgatgggagcgtgtatttagaaaagttcatcaacaagcccaagcacattgaagtccaaattctagccgataagcatggcaatgtcattcatgtgggcgaaagggattgctcggtgcaaagacgccaacaaaagctcattgaagaaaccccggcagtggttttagaagagggcgtgcgtgagcgtttgctagaaacagcgatcaaggccgctaaatatatcggctatgtgggggcggggacttttgaatttttgttggattctaacatgaaagatttttatttcatggagatgaacactcgtttgcaagtggaacacaccattagcgaaatggtgagcgggttaaacctcattgagtggatgattaaaatcgctcaaggcgaaaaattgcccaagcaagaaagcttttctctcaaagggcatgcgatagaatgccgaatcacggcagaagatcctaaaaaattctacccaagcccgggcaaaattaccgaatggatcgctcctggtggggtgaatgtgcgccttgattcgcacgcgcatgccaattatgtcgtgcctacgcactatgattcgatgattggcaagctcattgtgtggggtgaaaacagagaaagagcgatcgctaagatgaaaagggctttaaaggaatttaaagtagaaggcattaaaacgaccattcctttccaccttgaaatgcttgaaaatgcggatttcaggcaagcaaaaatccacacgaagtatttagaagaaaatttttaa

SEQ ID NO: 7225 - DNA, 471 bp, Helicobacter pylori
  CDS (1)...(471)
atgaacctttctgaaattgaagagttgatcaaagaatttaaagcttctgatttggggcatttgaaattaaagcatgagcattttgagttggttttggataaagaatccgcttatgcgaaaaaaagtgcgttaaatcccgcccattctccagcccccattatggtagaagcgagcatgccaagcgtccaaacccctgtgcctatggtatgcacccctattgtggataaaaaagaagatttcgtgctttcgcctatggtaggcactttttatcatgcaccctcccctggggctgagccttatgtcaaagcgggcgatacgcttaaaaaagggcaaatcgtgggcattgtagaagcgatgaaaatcatgaatgaaattgaagtggaatacccttgcaaggtggtttctgttgaagtgggagacgctcaaccggtagaatacggcacaaaactcatcaaagttgaaaagctttaa

SEQ ID NO: 7226 - DNA, 669 bp, Helicobacter pylori
  CDS (1)...(669)
atgttagattatcgccaaaaaattgatgctctcatcaccaaaatagaaaaggctcgcaccgcctattcaaggcaccacattgtcaaaatcgtggctgtttcaaaaaacgcttccccagaagctatccaacattattataactgctctcaaagggcttttggagaaaataaagttcaagatttaaaaactaaaatgcattctttagagcatttgccccttgaatggcacatgataggctctttacaagaaaataaaatcaatgcgcttttgagtttaaagcccgctcttttgcattctttagactctttaaaactcgctttgaaaatagaaaagcgttgcgaaatattgggcgtcaatttaaacgctcttttacaggttaatagcgcgtatgaggaaagtaaaagcggggtggtgcctgaagaagcgctagaaatttattctcaaatcagtgaaacttgcaagcacctcaagcttaaggggcttatgtgtataggggcacacacagatgatgaaaaggaaattgaaaaatcctttatcaccaccaaaaagctttttgaccaaataaagaatgcgagcgttctttcaatgggcatgagtgatgattttgaattagcgattgcttgcggggcgaatcttttaaggattggctcttttttgttcaaagagtaa

SEQ ID NO: 7227 - DNA, 987 bp, Helicobacter pylori
  CDS (1)...(987)
ttgcacaccttaatagagcgattagaaaaggttactaatagcaaagagttagaagaagcgcgcttgaatgctttgggtaaaaaaggggtttttgcggataaattcaaccagctcaaacatctgaacggcgaagaaaaaaacgcctttgctaaagaaatccaccattataaacaagcgtttgaaaaagcctttgaatggaaaaaaaaggctattatagagcttgaattagaagaacgcttgaaaaaagaaaaaattgatgtgagcttgtttaacgctatcaaaacaagctcttctcaccctttaaactacactaaaaataaaatcattgaatttttcaccccattaggatacaagcttgaaatcggctctttagtggaagatgatttccataatttcagcgctttaaacttgcccccttaccatcctgcaagagacatgcaagacactttttattttaaagatcacaagcttttaaggacccacacttcgcccgtgcaaatccacaccatgcaagaacaaaccccacccattaagatgatttgtttaggcgaaacctttaggcgcgattatgatttgacccacacgcccatgttccaccaaattgaagggcttgtcgtggatcaaaaagggaatatccgtttcacacatttaaaaggtgtgatcgaagactttttgcattatttctttgggggcgtgaagttaaggtggcgctctagctttttccctttcacagagccaagcgctgaagtggatattagttgcgtgttttgcaagcaagaaggctgtagggtttgctcgcacacaggctggttagaagtgttgggctgtggcatggtcaataatgcggtgtttgaagccatagggtatgagaatgtgagcgggtttgcttttggcatggggattgaaagattagccatgctgacttgccagatcaatgatttgcgcagtttctttgaaactgatttgagagtgttggagagcttttaa

SEQ ID NO: 7228 - DNA, 1392 bp, Helicobacter pylori
  CDS (1)...(1392)
atgagtttgatcgttacgcgcttcgctccatcgcccactggctacctccacataggaggcttaagaacagccattttcaattatctttttgcacgagccaatcaaggaaaattttttttacgcattgaagacacggatttgagccgtaactctatagaagcggctaacgccattatagaagctttcaaatgggtagggctagaatacgatggcgaaatcctctaccaatccaaacgctttgagatttataaagaatacattcaaaaactcttagatgaagacaaagcctattattgttacatgagcaaagaagagttggacgctttgagagaagagcaaaaagccaggaaagaaaccccacgctatgacaatcgctatcgtgattttaaaggcacgcctcctaaaggcatagagcctgtggtaaggattaaagtcccccaaaatgaggtgattggttttaatgacggggttaaaggcgaagtgaaagtgaatactaacgaattagacgattttattatcgccaggagcgatgggacacccacttataactttgtggttactattgatgacgctttaatggggattactgatgtgattagaggcgatgatcacctttctaacacccctaaacaaatcgttctttataaggctttgaattttaaaatccctaattttttccatgtgccgatgattttgaatgaagaagggcaaaaattaagcaaacgccatggggccactaatgtgatggactatcaagaaatgggctatcttaaggaagctttagtgaattttttagcgcgtttggggtggagctatcaggataaagaggtttttagcatgcaagaattgctagaattatttgatcctaaagatttgaattcttcgcccagttgcttcagctggcacaagcttaattggctcaacgctcattatttaaaaaaccaaagtgtgcaagaattgttaaaacttttaaagccttttagttttagcgatctctcgcatttaaaccccactcaattggatcgcttgttagacgctctcaaagaaagatctcaaacactaaaagaattagcccttaaaatagatgaggttttaatcgcccctgtggagtatgaagaaaaggtttttaaaaaactcaatcaagcgctcgttatgcccttgttagaaaagtttaagctagaattaaacaaagccaatttcaacgatgaaagcgcgctagaaaacgccatgcgccaaatcattgaagaagaaaagattaaagcgggtagttttatgcagcctttaagattggcccttttgggtaagggaggcgggataggccttaaagaagcgctttttattttaggcaaaacagagagcgtcaaaagaatagaggattttttgaaaaactaa

SEQ ID NO: 7229 - DNA, 1800 bp, Helicobacter pylori
  CDS (1)...(1800)
atgaaaaatattagaaatatcgctgtaatcgcgcatgttgatcatgggaaaaccactctagtagatggcttactttctcaatctggcacatttagtgagagggaaaaagtggatgaaagggtgatggatagcaatgatttggaaagagaaagagggattactatcctgtctaaaaacaccgctatttattacaaagacactaaaatcaatatcattgacactcccgggcatgctgattttgggggcgaagtggagcgcgttttaaaaatggtggatggggtgttgcttttagtggacgctcaagaaggggtcatgcctcaaactaaattcgtggttaaaaaggctttgagttttgggatttgccctattgtggtggtgaataaaattgataagcctgccgctgaaccggacagagtggtggatgaagtttttgacttgttcgtagccatgggggctagcgataagcaattggatttccctgtggtgtatgccgccgcacgagatggctatgcgatgaaaagtttagacgatgaaaagaaaaatttagagcctttgtttgaaacgattttagagcatgtgccaagccctagcgggagcgttgatgagcctttgcaaatgcaaattttcacgcttgattatgacaattatgtgggcaaaatcggtatcgctagggtgtttaatggctcggttaaaaagaatgaaagcgtgctgttgatgaaaagcgatgggagtaaagaaaatggccgtatcactaagcttataggttttttagggctggctaggactgagattgaaaacgcttatgcgggcgatattgtagcgattgccgggtttaatgcaatggatgtgggcgatagcgtcgttgatcctgctaaccccatgcctttagatcccatgcatttagaagagcctacgatgagcgtgtattttgctgtcaatgattcacccttagccgggttagaaggaaagcatgttactgctaataaattgaaagacaggctcttaaaagaaatgcaaaccaatatcgctatgaaatgcgaagaaatgggcgagggcaagtttaaagtgagtgggcgtggggaattgcaaatcactattttagctgaaaacttgcgccgtgaagggtttgaatttagcatttcacgccctgaagtcatcattaaagaagaaaatggcgttaaatgcgagccttttgagcatttagtgattgacacgccccaagattttagtggggctatcattgagagattgggcaaaagaaaagctgagatgaaagcgatgaatcccatgagtgatggctatacaagattagaatttgaaattcctgcaagagggcttatcggttataggagcgagtttttaaccgacaccaagggcgaaggcgtgatgaatcatagctttttagaattccgccctttcagcgggagcgtggaatcgcgcaaaaatggggcgctaatcagcatggaaaatggcgaagcgaccgctttttcccttttcaatatccaagaaagaggcacgctttttatcaacccccaaacgaaggtttatgtgggcatggtcattggcgagcacagccgggataatgatttagatgtcaatcctattaaatccaagcatttaaccaacatgagagcgagcgggagcgatgatgcgatcaaactcaccccgcctaggactatggtgttagaaagagcgttagaatggattgaagaagatgagattttggaagttacccccttgaatttaaggatcaggaaaaagattttagaccctaacatgaggaaaagggcgaaaaaataa

SEQ ID NO: 7230 - DNA, 189 bp, Helicobacter pylori
  CDS (1)...(189)
atggcaaaaagatgcgctttaacttttaaagggcctatgataggcaatcatgtcagtcatgcgaacaacaaaaataaacgccgtttactccctaacttgcgatcgattaagatccaattagacgacggcacgactaaacgcattaaagtggctgcttccactttaagaaccatgcgtaaaggggcttag

SEQ ID NO: 7231 - DNA, 1062 bp, Helicobacter pylori
  CDS (1)...(1062)
atgctctattctttactatatggctatttcaatatcaatcttttccagtatttgacttttagagcagggttagggtttttcatagctttttttctcacgctttttttaatgcctaaattcattctatgggccaaggctaaaaaggctaaccagcccatttctagcttcgtgccaagccaccagaataaaaaagatacccctacgatgggggggattgtgtttgtttttgcaaccattgttgcgagcgtgttgtgcgcgtctttgggcaatctttatgtgttgttagggttaattgtgttagtgggttttagttttgtgggttttagagatgattacaccaaaatcaaccagcaaagtaatgccggtatgagcgcgaaaatgaaatttggcatgctttttatcctttcgcttatagtgtctgttttattgagccttaaggggttagacacttttttatacgcaccttttttgaaaaaccccttgtttgaaatgcctacgatgttagcggttggtttttgggtgttggtttttttatccacaagtaatgcagtgaatttaaccgacgggttagacggcttagcgagcgtgcctagcattttcactctcttaagcctttctatctttgtgtatgtggcagggaatgcggaattttctaaatatttgctttatcctaaagtcatagatgtgggggaattgtttgttgtctcgctggcgttagtgggatcgctctttggctttttgtggtataactgcaacccggcaagcgtgtttatgggcgatagcgggagtttggctttgggggggtttatcgcttataacgctatcgtttcgcacaatgaaatcttactcgttttaatgggatctatttttgtaatagaaactttgtcggtgatcttgcaagtagggagttataaaacccgtaaaaaacgcctttttttaatggcgcctatccatcatcattttgagcaaaagggttgggcagaaaataaggtgatcgtgcgtttttggatcatttctatgctgagtaatttagtcgctcttttaagcttgaaggtgcgttaa

SEQ ID NO: 7232 - DNA, 1269 bp, Helicobacter pylori
  CDS (1)...(1269)
atgaaaatctctttattggggcatggcaaaaccactctagccctagggcgtttttttaaaaaaaaccataacgaagtcaaattttttgatgataaattcctttcatcttttaaagatagcgagggttttctttgttatcctagtaaggattttaaccctaatgattcccaactagaaatagtcagccctggcattagtttcacgcaccctttagtcataaaagccaagcatttagtgagcgaatacgattatattaatagcttgtttgatttggttttcacgcctactataatcagtattagcggcactaacgggaaaaccaccacgacagaaatgctcaccatgcttttagaagattttaaggctgtgagtggggggaatatcggcacgcccttgattgaattgtttgaaaaacgatcgcccttgtgggtgctagaaacaagctccttttctttgcattacaccaataaggcttaccctttaatctacttgcttatcaacatagaagccgatcatttgacttggcattgcaattttgaaaattatttgaacgctaaactcaaggttctaacattgatgcctaaaacttcgctcgctatcctccctttaaaattcaaagaacaccccattattcaaaactcgcaagcgcaaaaaatcttttttgacaaaagtgaagaggttttagagcgtttaaaaatcccttctaacgctcttttttttaagggagcgtttttattagacgcggctttagcccttttagtttatgagcaatttttaaaaataaagaatttaaaatggcaagattatagagaaaacgcccttaaaaggctgaacgcttttaaaattggctcgcataaaatggaagaatttagggataaacaagggcgtttgtgggtagatgacagcaaagccacgaacattgatgccaccttgcaagccctaaaaacctttaaaaaccaaaaaatccatttgattttagggggcgatattaaaggggtcaatttaacccccctttttgaagagtttaaaaactataaaataagtctttatgccataggttcaagcgcttttatcatccaagccttagcgttagaatttaatgtttcttgtcaggtttgtttggagttagaaaaagcggttcaagaaattaaaagcgttttatcgcaaaatgaaatcgctttgctttcacctagtgcagccagtttggatcaattttcttcgtataaagaaaggggtgaaaaatttaaagcgtttgttttaaaggattaa

SEQ ID NO: 7233 - DNA, 2322 bp, Helicobacter pylori
  CDS (1)...(2322)
atgcaaaattaccagagccatagtattaaggttttaaaaggcttagagggggttaggaaacgccctggaatgtatattggtgataccaatgtgggtgggttgcaccacatggtgtatgaagtcgtggataacgctgtagatgagagcatggcgggtttttgcgatacgattaatatcactttgaccgatgagggttcatgcatcgtagaagataacgggcgaggcattcctgtagatattcaccccacggaaaaaatccccgcttgcaccgtggttttaacgattttgcatgcggggggcaagtttgataacgatacttataaagtttcaggcggtttgcatggcgtgggcgtttcggttgtgaacgctttgagcaaacgcttgattatgaccattaaaaaagagggtcaaatttatcgccaagagtttgaaaagggtattcctactagcgagcttgaaatcattggcaaaaccaaaagcgctaaagaaagcggcacgactattgaatttttccctgatgaaagcgtgatggaagtcgttgaatttcaagcgggtattttacaaaaacgctttaaagaaatggcgtatcttaacgatggcttaaaaatttctttcaaagaagaaaaaacccaactgcaagagacttatttctatgaagacggcttgaaacaattcgttaaagacagcgctaaaaaagaattgctcacccccattatttcgtttaaaagcatggatgaagaaacgcgcacttctatagaagtcgctctagcgtatgctgatgattataatgaaaacactttaagctttgtgaataacattaaaacttctgaaggtggcacgcatgaggcgggctttaaaatgggcttgtctaaagcaattttgcaatatattggcaataatattaaaaccaaagagtcacgccccatctctgaagatattaaagaggggttgatcgctgttgtgagcttgaaaatgagcgagcctttgtttgaagggcagactaaatccaaactcggcagttcgtatgcgcgcgcgttggtttcaaaattagtctatgataaaatccatcaatttttagaagaaaaccctaacgaagccaaaatcattgccaataaagccctactagctgcaaaagccagagaagccagtaagaaagccagagagcttacaaggaaaaaagataatttgagtgtcggcactttgcctggaaaattagccgattgccagagtaaagaccccttagagagtgaaatctttttagtggagggcgatagtgcgggcgggagcgctaaacaagggcgcgatagggttttccaagcgatcttgcccctaaaaggtaagattttaaatgtggaaaaaagccatttatcaaaaatcctaaaatcagaagaaattaaaaacatgatcacggcttttgggtgcggcattcaagagagttttgatatagaaagattgcgctatcataaaatcattatcatgaccgatgctgatgtggatgggagccatatccaaaccttgctgatgacttttttctatcgttatttgcgcccgctgattgaacaagggcatgtttatatcgctcaagcccctctttacaaatacaagaagggcaagacagaaatttatcttaaagacagcgtcgctttggatcattttttaattgagcatggcatcaattcggtggatattgaagggattggcaagaacgatttgatgaacttgttaaaagtggcacgccattaccgctatgcgcttttggaattagaaaaacgctacaatttgctagaaattttacgctttctcattgaaactaaggacgccttaagccttgatatgaaagttttagaaaaaagcattttagaaaaattagagggcttgaattatcagatcttacgctcttttgccactgaagaaagcttacatttgcacacgcaaacccctaaaggcttggtggaatttaacctagatgacaatctctttaaagaagtgttgtttgaagaagcgaattacacttaccaaaagcttatggagtataatttagacttcttagaaaataaggatattttggcgtttttagaagaagtggaaaatcacgctaaaaagggagcgaatatccagcgctataaggggctaggcgagatgaaccctaatgatttgtgggaaacgaccatgcataaagaaaaccgcagcttgatcaaactcaaaattgaagatttagaaaaaaccgatgcagtcttttcgctttgcatgggcgatgaagtagagcctagaagagcctttatccaagcgcatgctaaagatgtgaaacaactagatgtgtaa

SEQ ID NO: 7234 - DNA, 765 bp, Helicobacter pylori
  CDS (1)...(765)
atgaaaatcggtgtttatggagcgagcggtcgtatagggaaactgcttttagaagaattaaaaggggggtataagggattagcgctatctagcgtgtttgttaggcaaaaatgcgaaaccgatttcagctctttttcgcacgcccctttagtaaccaacgatttaaaagcgtttgtgagggcatgcgaatgcgtgattgatttttctttacctaaaggcgtggataatttgctagaggctcttttagaatgccctaaaattttagtttctggcacaaccggtttagaaaaagaaacgctagaaaaaatgcaacaattagccttaaaagcaccgcttttgcatgcgcacaacatgtctatagggattatgatgctcaaccaattagcctttttaacttctttgaaattaaaagatgcggatattgaaattatagaaacgcaccacaatctcaaaaaagatatcccgagcggcacggcgttgagtttgtatgaaacttgcgctaaggctagggggtatgatgaaaaaaatgccctaatcactcacagagaaggtttgcgctctaaagaaagcattggcatagccgctttaagggggggcgatgtcgccgggaagcacacgatagggttttatttagagggcgaatacatagagcttagccatacggcgactaaccgatctatttttgctaaaggggctttagaagtggccctgtggcttaaggataaagccgctaaaaaatatgaaatcaacgagatgtttggttga

SEQ ID NO: 7235 - DNA, 453 bp, Helicobacter pylori
  CDS (1)...(453)
atgatgaaagttctattattagaagatgtgaaaaatttaggcaaagcgggtgaagtgtgtgaggttaaagatggctatgggaataactttttaatcgctaaccaaaaagccaaactcgctactaacgaagtgatcaacaaatacaaagccgaagtcaaaaagaaagcggaaaaagaagccctagaaaaggcacaaaaattgcaaatggtagaaaccttacagactatcacgctgactatccataaaaaagtcggcgcgaacggctctttatttggagcgatcacgaaagaagaaatcacggagcgtttgaaagaacagcatgcgagtttaaatttagataaaaaagacattgagctcaaacacccgattaaaagcacagggatttatgagattgaagtcaagcttggatcgggggttgtgggcgtgtttaaaattgatgtggtggctgagtag

SEQ ID NO: 7236 - DNA, 543 bp, Helicobacter pylori
  CDS (1)...(543)
atgtttgaagcgacgacgattttaggctatagaggggaattgaatcataaaaagttcgcgctcattggaggcgatgggcaggtaactttgggtaattgcgtggtcaaagccaatgcgacaaaaatcagaagcttgtatcacaaccaggttttaagcgggtttgccggaagcaccgcggacgcttttagtttgtttgatatgtttgaacgcattttagagagcaaaaagggggatttgtttaaaagcgtggtggatttcagtaaagaatggcgcaaagataagtatttacgccgactggaagcgatgatgatcgttttaaacttcgatcacattttcattttgagcggcatgggcgatgttttagaagctgaagacaataagatcgctgctattgggagtggggggaattacgctttaagcgcggctagggctttagatcatttcgctcatttagagcctagaaaacttgtagaagagtccttaaaaatcgcaggggatctttgcatttacaccaacacgaatattaaaattttggagctttaa

SEQ ID NO: 7237 - DNA, 909 bp, Helicobacter pylori
  CDS (1)...(909)
atgatgaaaactaaggcgggctttgtagctcttataggcaaaccaaacgctggaaaaagcactcttttaaacactttattaaacgctcatttagcccttgtttcgcataaggctaatgcgaccagaaaattgatgaaatgcatcgtgcctttcaaagataaagaatggtatgagagccaaatcatttttttagacacaccagggctccatcatcaagaaaaattactcaaccaatgcatgctctcacaggctttaaaagcgatgggcgatgctgaattgtgcgtttttttagcttctgtgcatgatgatttaaaaggctatgaagagtttttgagtttgtgccaaaaaccccatatcttggctttgagcaagattgacaccgccacgcataagcaggttttgcaaaaattacaagagtatcaacaatacgattcgcaatttttagccctagtgcctttgagcgcgaaaaaatctcaaaatttaaacgcgcttttagaatgcatcagccagcatttaagccctagtgcatggctttttgaaaaggatttgatgagcgatgaaaaaatgcgcgatatttataaggaaatcattagggagagtttgtttgattttttgagcgatgaaatcccttatgaaagcgatgtgatgattgataaatttatagaagaagaacgcatagacaaggtgtatgcgcgcattatcgtagaaaaagaaagccaaaaaaaaatcgtgataggcaaaaacggggtgaatatcaaacgcatcgggactaacgcacgattaaaaatgcaagaagtgggcgaaaaaaaggtttttttaaacttgcaagtgatcgctcaaaaatcatggagtaaggaagaaaagagcttgcaaaaactgggttatatccatagaaggaatagggattga

SEQ ID NO: 7238 - DNA, 768 bp, Helicobacter pylori
  CDS (1)...(768)
atgaaaataggcgtttttgatagcggtgtgggagggtttagcgttttaaaaagccttttaaaagcgcaactatttgatgaaatcatctattatggcgatagcgctagagtgccttatggcactaaagaccccaccacgatcaagcaatttggcttagaggctttggattttttcaaaccgcaccagattaaattattgattgtggcatgcaacaccgcaagcgctctggctttagaagagatgcaaaagcattccaaaatccctgttgtgggcgtgattgagccaagcattttagcgatcaaacggcaagtgaaagataaaaacgcccctattttggtgctagggacaaaagcgacgattcaatccaacgcctatgataacgccctgaaacaacaaggctatttgaatgtttcgcatttagccacttctctttttgtgcctttgattgaagaaagtattttagagggcgaattgctagaaacttgcatgcgttattatttcactccattagagattttacctgaagtggttattttaggttgcacgcattttcccttgatcgctcaaaaaattgagggctattttatggagcattttgccctttcaacgccccccctactcatccattctggcgatgctattgtggaatatttgcaacaaaattacgcccttaagaaaaacgcatgcgcgttccctaaagtggaatttcatgcgagcggcgatgtggtttggctagaaaaacaagctaaagaatggcttaaattgtaa

SEQ ID NO: 7239 - DNA, 204 bp, Helicobacter pylori
  CDS (1)...(204)
atgaaaaaaggcattcaccccgaatatatcccatgcaaagttacttgcgtaacgagcgggaaagaaattgaagttttaagcaccaaacctgaaatgcgtattgatatttctagcttttgccaccctttttatactggtagcgataaaatcgctgacactgcagggagagtagaaaaattcaagcaacgctacaacttgaagtaa

SEQ ID NO: 7240 - DNA, 864 bp, Helicobacter pylori
  CDS (1)...(864)
gtgctgtattttttgcccactcctataggtaatctcgctgacattacgctacgcgccttagaagttttagagcgttgcgaggtttttttatgcgaggatacaagggtgagtaagaggttgttgcacttgctcgcacaaaaccctattattagccattctttccccaatatcgctactaaaaaaagggagtttatcgcattccattcgcacaatgaccaggaatttttaaaccaaataaagccttctttttttgacaaagaaatcgctgtgatgagcgatgcgggcatgccaagtttgagcgatccaggcatgagtttagccgcttacgctttaaaacataacattcaatacgatgttttgcccggagctaacgcgctcactacggcgttttgcgcgagcgggtttttagaagggcggtttttttatgctggctttttaccccataaaagcaaggaaaggcgcttaaaaatcgctaaaattttaaacgctttagcgtatttggaagaaaaaaccccggtggttttttatgaaagcccgcaccgattgttggagactttaaaggatttaaacgatctggctaaaggcatgcatttgtttgcggctaaagagcttaccaaactccaccaacaatattatttaggagaggtttctcaaatcatagagcggttgcaacaaagcactatccaaggggagtgggttttagtgcttttgaatgagaaaaaaatagagccttgcatggggctatcggcgttattggagttggatttacctcctaaaattaaggctaaaattgaagccgttatgacacaaaaaaacgctaaagagctttatttccagcgtttgttagaagaaaaaaatcaataa

SEQ ID NO: 7241 - DNA, 684 bp, Helicobacter pylori
  CDS (1)...(684)
atgcaagcagtaatttatggcaagcaagtgattatgcaccttctaaactctcatcaagaaaaattgcaagaaatctatctttctaaagaaatagacaagaaactttttttcgcgctcaaaaaagcatgccctaatatcatcaaagtggataataaaaaagcgcaaagcttggctaagggggggaatcatcaaggggttttggctaaggtggaactgcccttagcggtttctttaaaagaggttaaaaaagctcaaaaacttttggtgctttgcgggattacggatgtggggaatattggaggtatttttaggagcgcgtattgcttaggaatgggtggcgttattttagattttgctaaagaattggcttatgaggggattgtgcgatccagcttggggcttatgtatgatttgccttttagcgttatgcctaacacgctggatttaatcaatgaattgaaaacgagcgggtttttatgtttgggcgcgagcatgcaaggctctagtcaaatagaaaatctatccttaaaaaaatgcgctctttttttggggagcgagcatgaggggttgtctaaaaaaatccttgctaaaatggatactatattgagcgtaaaaatgcgaagagattttgattcgctcaatgtgagcgtggcagcagggatcttaatggataaaatcaactag

SEQ ID NO: 7242 - DNA, 939 bp, Helicobacter pylori
  CDS (1)...(939)
atggccgtttatttagattttgaaaatcatattaaagagattcaaaatgaaattgaattagcccttattagaggcgatgaggacgctaaagaaatcttagaaaaaagattggataaggaggttaaaagcatttattccaatctcactgattttcaaaaactccaattagcaagacaccctgacagaccctacgctatggattacattgatctcatcttaaaagataaatatgaagtctttggggataggcattataacgatgataaagcgatcgtgtgctttgtagggaaaattgataatgtcccagttgtggtgatcggagaagaaaagggcagagggactaaaaacaaactcttaagaaattttggcatgcctaacccttgtggctatcgtaaggctttgaaaatggcaaagtttgctgaaaagtttaatttgcctattttaatgcttgtggatacagccggggcgtatccggggattggtgcagaagaaagggggcaaagtgaagcgatcgctaaaaatctccaagagttcgcctctttaaaagtccctactatttctgtaattatcggtgaggggggcagtggtggtgcgctagcgattgcagtggctgacaaattggctatgatggaatattccatttttagcgttatatccccagaaggttgtgcggcgattctttgggatgaccctagcaagactgaagtggctattaaagcgatgaaaatcacgcctagagacttaaaggaggcggggcttattgatgatattatcttagagcctagcaaaggggctcatagagacaaattttcagccgctaacacgatcaaagagtattttttagacgctctaagaactatccaacaagaccctcatttccttgacaaccgctatcaaaaattaatgtcgcttggttcgtttgtggagagcatgaattag

SEQ ID NO: 7243 - DNA, 1239 bp, Helicobacter pylori
  CDS (1)...(1239)
gtgcgtcggattgtagtaactggaatgggaatgatcaattcgctaggtttaaataaagaagattcttttttagcgatcgctaaaggggaatgcggtatcaaacacatagaaagttttgatgcgagcgcgtttcctgtgcgtattgctggagaaatcactgactttgaccctacagaggtgatgaatcccaaagatgttaaaaaggcgggtcgtttcattcaattagccttgaaagccacaagagaggcgatgaaagatagtgggattttagacgctcacaatagatgccctgaagaattggcaaatcgcatgggcgtaagctctggctctgggattggcgggttaggcaatattgaagcgaattccattttttgttttgaaaaaggccctagaaaagtcaatccctttttcatcacttctgcgttagtgaatatgattggtggtttcacttccattgagtttggcattaaagggcctaatctctctagcgtaacggcttgtgcagcaggcactcatgccattattgaagccgttaaaaccattttgcttaatggggctgataaaatgctagtcgtgggagcggaatccaccatttgtcctgtagggattggggggtttgcgagcattaaagccctttctacaaggaatgatgatcctaaaaaagcttcaagaccttttgataaggatcgcaatggctttgtgatgggcgaaggcgctggggctttggtgcttgaagaatacgagagcgcgaaaagaagaggggcaaaaatttatgcagaatttgccgggtatggcgagagtggcgatgctaaccatatcacagccccagcccctgagggcgaaggggcttttagagccatgaagatggctttagaaatggcgaaagtggaaataggctatgtgaacgctcatgggactagcacgcattataacgatctatatgaaagcatcgctctaaaaaatgtgtttggttctaaagaaaaagtccctcctgtcagctccactaaagggcagattgggcattgcttgggtgctgcgggcgcgttagaagccgttatttctatcatggccatgaatcaaggaatcttacctcctaccatcaatcaagaaatgcctgacccagaatgcgatttggattatatccctaatgcggccagagaaaagcgagtggatgcagtgatgagtaactcatttggttttggtggcactaatggtgttgtgattttcaaaaaagcctag

SEQ ID NO: 7244 - DNA, 237 bp, Helicobacter pylori
  CDS (1)...(237)
atggctttatttgaagatattcaggcagttattgctgagcagttgaatgtggatgcggtgcaagttacgccagaggcggaatttgtgaaggatttgggtgcagactctttagatgtcgtggaattaatcatggcgttagaagaaaagtttggcgttgagattcctgatgagcaagcggaaaaaatcatcaatgtgggcgatgtggtgaagtatattgaggataataaactggcttaa

SEQ ID NO: 7245 - DNA, 744 bp, Helicobacter pylori
  CDS (1)...(744)
atgcaattcacagggaaaaatgttctcattactggggcttctaaaggcattggggctgaaatcgccaaaactctcgcttctatggggctgaaagtttggatcaattaccgcagtaatgctgaagtggctgacgctttgaaaaatgagcttgaagaaaaaggctataaggcagctgtcattaaatttgatgcggcttctgaaagcgattttattgaagcgatacaaaccatcgtccaaagcgatggggggttgtcttacttggtgaataacgccggtgtggtgcgcgataaattagcgatcaaaatgaaaacagaagactttcaccatgtcatagacaataacctcacttcagcctttataggttgccgagaggctttaaaggtgatgagcaagagtcgttttgggagcgtggtcaatgtcgcttctatcattggtgaaagaggcaatatggggcagacaaactactcagcgagtaaggggggaatgattgcaatgagcaagtcctttgcttatgagggagctttaaggaatattcgtttcaactctgtaacgcccggttttatagaaaccgacatgaacgccaatttgaaagacgaactcaaagcggattatgttaaaaacattcctttaaacaggctagggtctgctaaggaagtggcagaagcggtagcgtttcttttgagtgatcactctagttacatcactggagagactctcaaagtcaatggcgggctttatatgtag

SEQ ID NO: 7246 - DNA, 213 bp, Helicobacter pylori
  CDS (1)...(213)
atgccagggattaaggttagagaaggcgatgcgtttgatgaagcttataggagattcaaaaagcaaaccgatcgcaatttagtggtaacagaatgccgtgctagaaggttctttgagtctaagactgaaaaacgcaaaaaacaaaaaatcagcgctaaaaagaaggttttgaagcgtctttatatgttaaggcgttatgagtcaagactataa

SEQ ID NO: 7247 - DNA, 1101 bp, Helicobacter pylori
  CDS (1)...(1101)
atgggcttgtctgtaggcattgtgggtttgcctaatgtgggcaaatccagcacctttaacgcgctcactaaaacccaaaacgcccaaagcgcgaactaccctttttgcaccattgaacccaataaagccattgtgaatgtgcctgataggcggcttgatgcgttggctcaaatcgtaaagcctgaacgcattttgcattctgtggtggaatttgtggatattgccggattgattaagggagcgagcaagggggagggtttaggcaatcagtttttagccaatatcaaggaatgcgaagtgatcttgcaagtggtgcgttgttttgaagatgataatatcacgcatgtgaacgacaagattgatcctttgaatgatatagaaactattgaattggagttgattttagcggatattgccgctttagacaaaaggatcgatcgcttgcaaaaagccttaaaaagctcaaaagacgctaaaaatcttttagaatgcgctttgagtttaaaaacgcatttagaagaattaaaaccggcgaaaactttccccttgaatacaagcgaggcttttttggagttggacaaggaattgcgttttttatctcataaaaaaatgatctatgtcgctaatgtgggcgaagaagatttaaacgcgctcaatgagcatgccaaaaaagtcaaaaaccatgcgaaagaacaaaatagcgagtttgttgccttgtgtgctaaattagaagaagaaatggtttctatgagtggagatgaagtcaaagaatttttgcaaagtttgggcgtagaagaaagcgggctagaaaagaccattcgtttgagttttaaggaattaggtttgatcaattattttaccgctggagtcaaggaagtgcgatcatggacgattaaaaaaggctctagtgcgcctgtggctgctggggtgatccataaggattttgaaaaaggcttcattagagctgaaaccatcagttatgatgactttatcgcttataagggcgaagccggagcgaaagaaaagggagcgttacgcattgaaggtaaggattatatcgttcaagatggcgatgtgttgcattttcgcttcaatatctag

SEQ ID NO: 7248 - DNA, 975 bp, Helicobacter pylori
  CDS (1)...(975)
atgccggaaaattctaaactacaacctgctaagttagggaaaaattttgaccctgtggatcattctaacaggaattttttcttttctctcattctgtctgtattgttacactggttgatttattttttatttgaacacagagaagatttttttccttcaaaacccaagcttgttaaattaaatcctgaaaatttattggttttaaaaagaggccattcgcaagatcccagtaaaaacacccagggcgctcctaaacccacgctggctggcccccaaaaacctccaacgcctcccacacccccaactccgccaaccccgccaaccccgccaaaacctatagaaaagcctaagcctgagcctaaaccaaaacccaaacctgaacccaaaaagcccaatcataaacacaaggctcttaaaaaagtggaaaaagtggaagagaaaaaagtagtagaggagaaaaaagaagagaaaaaaatcgtagagcagaaagtagaacaaaaagtagagcagaaaaaaatagaagagaaaaaacctgtcaaaaaagaatttgaccctaaccagctttctttcttgcctaaagaagttgcgccacccagacaagaaaataataaaggcttggataaccaaaccagaagggatattgatgaattgtatggcgaagaatttggggatttaggcacagccgaaaaagatttcatcaggaataatttaagggatattgggcgcatcacgcaaaaatatttagaataccctcaagtagcggcttatttagggcaggacgggacgaatgcggtagagttttacttgcaccctaatggcgatattaccgatcttaaaatcatcattggctctgaatacaaaatgcttgatgacaacaccttaaagaccattcagatcgcttataaggattacccacgccccaaaactaaaaccctcattcgcatcagagtgcgttattacttagggggcaattaa

SEQ ID NO: 7249 - DNA, 1122 bp, Helicobacter pylori
  CDS (1)...(1122)
atgttttctaaatctttagaagccctacaccatgccaaacgctaccgcaaaagagagttgtttgaccctttattaaaggattacgcttctaatgattatttgggtttgagcgttaaaaaagacttgcttcaaaacgcttttaataagctccaatcctttgtttctcattcccccaaggcttccatgctagtgaatggctaccaccctttgcatgcagaattggaagagcgattagccaatttgttggggtttgaaagcgctcttttagtggggagtggttttttgggcaatctggctttaatagacacccttttagtcaaaaacgccctcttattcatggatgcacactaccatgcgagcgggatctttagcaccaagattaagcctaatcaagtgatctttttttcacacaatgatattaaagatttgaaacaaaaactctttaacgcccctaaaaataagatcaaattcatcgccattgagggggtttattctatggatgcgagcgtcgctccttatgatttttatgcaatcattcaagagattcctaacgcttttttaatcgttgatgaagcccatagttttgggactatcggcgagaatttattgggttttttagaatattatcgcatcaaagaaaaggacaaaatcattaaactcagcactttctctaaagcgcttgcgagctatggggcgtgtattttagcccccttacaaaccatagagtttttaaccaatcgcgctaaaagcgtgatttacaccaccgctttaagcctgttagacaccgctttgactttggcccatttagaatactttattgtgcaaaaacaagaattaaaaaatgagcttagcaaacaccaacagattatttttgaaactttaggtattagaacgctcgcaggattttttactttagaatttgaaagcaatcccgctcttttaaacgctcatcattttttgaaagaaaaggggtttttagtgggagctatccgccctcctacggtttctaaaccccttttacgagtctctttatccctcaaaaacagcttagaagacactaaagagcttgcgaacacccttttaaattattctaaaatacaatcttcttttaagagtggttaa

SEQ ID NO: 7250 - DNA, 1734 bp, Helicobacter pylori
  CDS (1)...(1734)
atgcgaagtcatttttgcacagaaattagtgaaaaagatgtgggtaaaatagtcaaagtggccgggtggtgtaacacttatagagaccatggaggcgtggtttttattgatttaagggataaaagcggtttagtgcaattagtctgtgatcctagctctaaggcttatgaaaaggctttagaagtcaggagtgaatttgtgctagtggctaaaggaaaagtgcgtttgagaggcgctgggttagaaaaccctaaactaaaaacgggtaaaattgaaatcgttttagaagagttaattattgaaaataaaagcgctaccccaccgattgaaattggcaacaaacatgtgaatgaggatttgcgcttgaaataccgctatttggatttgcgctctcctaattcttatgaaatttttaaattgcgcagcgaagtggctttaatcactcgtaacactctagcccaaaagggctttttagagattgaaacccccattttgtctaaaactacgcctgagggggctagggattatttagtgccaagcagggtgcatgagggcgaatttttcgcgcttccccaaagtccgcaattgttcaaacagcttttaatggtggggggaatggataggtattttcaaatcgctcgttgctttagagatgaagatttaagagcggacaggcagccagaattcacgcagattgatgcagaaatgagtttttgtgatgaaaacgatgtgatgggcgtggtggaagatttgttgcaagagatttttaaagcggttgggcatactatttctaaaccttttaaacgcatgccttataaggaagcgatggaaaattacgggagcgacaagccggatttacgctttgaattgcctttaatagaagtgggggattgttttagggacagctcaaacgctattttttctaataccgcaaaagatcctaaaaacaaacgcatcaaagctttaaacgttaagggggctgatgcgctttttagccgcagcgttttaaaagaattagaagaatttgtgcgccaatttggggctaaaggcttagcgtatttgcaaattaaagaagatgaaattaaaggacctttagttaaatttttaagcgaaaaggggcttaagaatattttagaaaggactgatgcgcaagttggggatattgtcttttttggagccggggataaaaaaatcgtgttagattacatggggcgtttgcgcttgaaggtggctgaaacgcttgatctgattgataaagacgctttgaatttcttatgggtagtcaatttccccatgtttgaaaaaaccgaaaacggctatcatgccgcgcaccacccttttacgatgcctaaaaatatagaatgcgaagatatagaagaggttgaagcgcatgcgtatgatgtggtgcttaatggcgtggagcttggtggggggagcataaggattcataaagaagaaatgcaaaaaaaagtctttgaaaaaatcaatatccatgaagaagaagcgcaaaaaaaatttggctttttattagaagcgctaaaatttggcgctcctcctcatggaggctttgcgataggatttgatcgcttgatcatgttaatgactaaatctcatagcattagagacgtgatcgctttccctaaaacgcaaaaagcttcatgcttattgacgaacgcgcctagccccattaatgaagagcaactaagagaattacacattcgcttgagaaaataa

SEQ ID NO: 7251 - DNA, 576 bp, Helicobacter pylori
  CDS (1)...(576)
atgaaacaactatttttgatcattggagccccagggagtggtaaaaccactgatgcagagcttatcgctaaaaataacagcgaaacaatcgctcatttttctaccggggatttactcagggctgagagcgctaaaaagaccgagcgaggcttattgattgaaaaattcacttctcaaggcgaattagtgcctttagaaattgtggtagaaacgatcctttcagcgattaaaagctctggtaaagggatcattttaattgatggttatcctaggagcgtggaacaaatgcaggctttggataaggaattgaacgctcaaaacgaagtgatcttaaaaagcgtgattgaagtagaagtgagtgaaaacactgctaaagaaagggttttagggcgctctaggggggctgatgataatgaaaaggtgtttcataaccgcatgcgggtgtttttggatccgttgggcgagatccaaaatttttacaagaataagaaggtgtataaagcgatcgatggggagaggagcattgaagagattgtgggcgaaatgcaagagtatatcttgtctttcggtaattaa

SEQ ID NO: 7252 - DNA, 1350 bp, Helicobacter pylori
  CDS (1)...(1350)
atgcttgaaaccccaaaagttttactcaaaaacctgcaagattgcaagatccattttatcggtataggggggattggcatttcaggcttggccaaataccttaaagcgcaaggggctacaatcagcggctctgatattgccataagccctagcgttaagtatttgaaagctttaggcgtagaaattaatatcccgcatgatccaaaagcgatcaacaatcaagatgtcattatccattcagccattattaaagaagacaataaagaaatacaaagggctaaggaattagaaatccctattttgtctcgtaaagacgctttgtattctatccttaaagacaagcgcgtttttagcgtgtgtggggctcatggaaagagcagtatcacggccatgttgagcgcgatttgcccatcgtttggagcgattattggggcgcattctaaagaatttgattccaatgtgcgagagagcgcgaatgatagcttagtttttgaagccgatgagagcgattcgagttttttattttccaacccttatgctgcgattgtgcctaacacagagccagaacatttggagcattatggccacgatttagagcgttttttctttgcttatgagtattttttagaccatgctcaaaaaagagtgatctataaagaagatccttttttaaaaaactattctaaaaacgctattgttttagaaaaaaaagacatttataatatccaatacattttaaaagacggcgagccttacacttcatttgaattgaaagatttgggggcttttttggtgtgggggttaggcgaacataacgctacgaatgcgagtttggcgattttaagcgctttagatgaattgcatttagaagaaattagaaataatttattgaatttcaaaggcattaaaaaacgctttgatattttgcaaaaaaacgcgctcatcctcattgatgattacgcccaccaccccactgaaatcagtgccactttaaaaagcgctaggatttatgctaacttattgaacacgcaagaaaaaattatagtgatctggcaagcgcacaaatattctcgcttaatggataatttagaagagtttaaaaaatgtttttcagagcattgcgacagattgatcattttacccgtttatagcgcgagtgaagtcaaaagagacattgatttgaaagcccattttaaacattataaccccacctttatagacagggtgcgtaaaaagggggattttttagagctcttagtcaatgataatgtggtagaaacgattgaaaaaggctttgtgataggttttggagcgggggatattacctatcaattaagaggcgaaatgtaa

SEQ ID NO: 7253 - DNA, 1209 bp, Helicobacter pylori
  CDS (1)...(1209)
gtgtttgagttagaagaaggattaaaagaattgtttgacatttatgaaaaatcctctcatgagctttacttggtaggggggtgcgtgcgcgattatttaatgggcattaccccaaaagattacgatttaacctcaaacgctttagtcaatgaaagcaaagagcttcttttaaagcgccattttagggtgctagaaaccggtatcaaacatggtacgatcacggctcttaaaaaccatcaaagctatgaaatcacaacttttagaattgaaaaggggcatatcaaacaccgaaagcctaaagaattggtttttagcgttcatttaacagacgatttaaagcggcgcgattttagcatgaatgcgatcgcttatagccctacaaaagggctgattgatccttttaaagggcagaatgcgattgaaaatcaaatgattgaatgcgtgggggaagcgcgattaaggttttttgaagacgctttaaggattttaagatcgctgcgattcagtgcaactttaggctttaagatagcgccaaacaccaaagaagcggtttttgcgtgtaaggatttgttaaaacacctttctaaagaacgcttacaaagtgaattgaataagcttcttatggggaaaaacgcctatgaagtggctaaagaatatcaagaaattttagagttggttattcaagaaaaaatagaaaatttagggtttttaaaaaacgcgcctttcaatctggaattaagattgttagggttttttaagcatcaaaaaagtttagaaagtttacgctaccctaaaaaaacgatcgttttattttccaaagctaaagaatgccataaatcttttttaaatattcataacaaaacagagttaaaatttttattgaaaaactacgatttagagccttttaatttggctttagatttttatgcgctcaaaaaccccaaacatgctttaaaaattaaaggcttgttaaaagaaatctttgattctaacgagccttttaaaaaagaacacttggcccttaagggcggtgcgcttcaaagcttgggttaccagcaccaaaaaatcggcgaaattttaaacgcatgcttagatttagtcatcgctaaccctaaaaataacgctttagaatggctgattgaatgggttaagggtcattatttacctaatgatactataaatctttcgccaataggcagaagaaattaa

SEQ ID NO: 7254 - DNA, 1269 bp, Helicobacter pylori
  CDS (1)...(1269)
ttggattttttagagattgtaggacaagtccctttaaaaggagaggtagaaatttcaggggcgaaaaactccgcgctccccattttagccgccacgcttttaagccgccaagaagtcaaaatcaaatccttgccccaagtggtggatataaaggcgatggcgttattgttgcaaaatttaggcgcaagcttagaatggcttaatcctaacacgctccaaattggcgccaaatccttgaaccacaccgaagccacttacgatttggtgcgtaaaatgcgcgcttccattttggtgttaggcccactattagcgcgttttaaagaatgcttggtgagtttgcccggtgggtgcgctataggagcaaggccagtagatttgcacttaaaagcgatgcaacaattaggggctaaaatcactattgagcaaggctatatccatgcgaaagcccctaaaggcttgaaagggaatgatattttatttgataaaatcagcgttacaggcacagaaaacgctctcatggcagccagtcttgccaaagggatcacgcgcatcattaacgctgctaaagagccagaaatcgctcaattgtgcgcgtttttacagagtgggggggtagaaattcatggcattggcagtagcgagttaaagattaggggggttgaaaatgacgctttgaatttaaaagacattcaaatcatacccgataggattgaagcaggcacttatttatgcgtgggggctatcactaatagccagcttaaaatcaatcatatcatccctaaccatcttcaagcgatcaccgataagctcatagaaattggtttttcgctagacattcaagaaaattctatagaaattcatccggctaaaaaacgccaagcctttgaaatcaccacgaaagaatacccaggctttcccacagacatgcaagcgcaattcatggcgttagccacgcagtgtttggggacgagcgtgattgaagagacgctttttgaaaaccgcttcatgcatgcaagcgaattgcaacgcttgggggctaatatcagcctaaaaaccaatgttgctaccattagcggatccacagagcttaccggaagcgatgtgatggcgaccgatttaagggcttcttcggctctcgttttagccgctttagtggctaagggcgtgagtagggtgcataggatttaccacttggataggggttatgagagattagaggataaaatcaacgctttaggggcaaaagttgcgcgcttaaaagaaaaataa

SEQ ID NO: 7255 - DNA, 1089 bp, Helicobacter pylori
  CDS (1)...(1089)
atgaaacaccccctagaagaattgaaagaccctacagaaaatcttttgctatggattgggcgctttttgcgttacaaatgcacgagcctgtctaattcccaagtgaaagaccaaaataaggtttttgaatgcttgaacgaactaaatcaagcgtgcagctcaagccaattagaaaaagtttgtaaaaaagcgcgtaatgccggattgcttgggatcaacacctacgcattgcccctactcaaatttcatgaatacttcagcaaagctagactaataactgaaaggcttgcttttaattcgctcaaaaacattgatgaagtcatgctagctgaatttttgagcgtttataccgggggtttgagtttagccactaagaaaaattacaggatcgccctactcgggctttttagctatatagacaagcaaaatcaagatgaaaatgaaaaatcttatatttataatatcacgcttaaaaacatcagtggagtcaatcaaagcgcaggcaataagctccctactcatttaaataatgaagaattagaaaaatttttagagagcattgataaaatagaaatgtccgctaaagtgcgtgcacgaaaccgcttgctcattaaaatcatcgtttttacaggcatgcgatctaatgaagccttgcagcttaaaataaaggattttactttagaaaatggctgttatacgattttgattaaaggtaagggcgataaatacagagcggtgatgctcaaagctttccacattgagagccttttgaaagaatggctgatagaaagggaattgtatcctgttaaaaacgatttattgttttgcaaccaaaaaggcagtgctttaacgcaagcttatttgtataagcaagtggagcgcatcatcaattttgcaggactcaggcgagagaaaaatggggcgcacatgttaaggcattcttttgcgaccttgctttatcaaaaacgccatgatttgattttagttcaagaagctctagggcatgcgagcttgaataccagtaggatttacacgcattttgacaagcagcgtttagaagaagcggcgagcatttgggaagaaaattaa

SEQ ID NO: 7256 - DNA, 507 bp, Helicobacter pylori
  CDS (1)...(507)
atggttttataccactactattttaagacccctaagagtttccctttagagtatttgcatttgtgcgctaatgagagccatttattgagattggattttgatgcggccaatttttctcataacacccctatgaataccccattaaaactcagcgttcaagccttggagcgttatttcttaggacaactttttgaatttaatacgcctttggatttgatagggactttttttcaaaaacaagtttggtctgcgttaatgactatcccttatggtaaaacaaaaagttacgatgaaatcgcaaagctcattaataaccctagatcttgcagagctgttggcaacgccaatcgcaataaccctatttctttgatcgtgccttgtcatagagtggtgcgtaaaaatggcactttaggggggtataatgggggcatagaagtcaaaaagtggctgttagaatttgaaagcaaaattttaaaccagcaagctaaaaactctttaatttcttaa

SEQ ID NO: 7257 - DNA, 2367 bp, Helicobacter pylori
  CDS (1)...(2367)
ttgattacagtggttaaacgaaacgggcgcattgagcctttggacattaccaaaatccaaaaatacactaaggacgctacggacaatttagagggcgtgagccaaagtgagctggaagtggatgcgaggttgcaattcagggacaagatcactactgaagaaatccaacaaactttgattaaaaccgctgtggataagatagatattgacacgcctaattggagttttgtcgcctcaaggctttttttgtatgatttataccataaagtaagtggttttacagggtataggcatttgaaagagtattttgaaaacgctgaagaaaagggccgcatccttaagggctttaaggaaaaatttgatctagagtttttaaatagccagatcaagcctgaaagggatttccaattcaattatttagggattaaaaccttgtatgatcgctatttgttaaaagacgctaacaacaaccctattgaattgccccaacacatgtttatgagcattgcgatgtttttagcacaaaacgaacaagaacccaataaaatcgccttagaattttatgaagttttgagcaagtttgaagcgatgtgcgcgacccccactctagcgaacgcccgcaccaccaaacaccagctcagctcatgctatattggcagcacgccggataatattgaggggatttttgacagctataaggaaatggcgctgttgtccaaatacggcggagggattggctgggatttttctttggtgcgctctattgggagttatattgatgggcataaaaatgcgagcgctggcacgatcccttttttaaaaatcgctaacgatgtggcgattgcggtggatcaattaggcacacgaaagggcgcgattgcggtgtatttggaaatttggcacattgatgtgatggagttcattgatttaaggaaaaatagcggcgatgaaaggcgaagagcgcatgatttattcccggctctttgggtgtgcgatttgtttttgaaaagggttttagaagatgcgatgtggactttatttgacccttatgagtgtaaggatttgactgagctttatgggcaggattttgaaaaacgctatttagagtatgaaaaagatcccaagatcattaaggaatacattaacgctaaagatttatggaaaaaaatcttaatgaattattttgaagccggtttgcctttcttagcctttaaagataacgccaatcggtgcaacccaaacgctcatgcaggaatcattcgatccagcaatctatgcacggagattttccaaaataccgcgcctaaccactactacatgcaaatagaatacaccgacggcaccatagagttttttgaagaaaaagagttggtaacgacagatagtaatatcactaaatgcgctaacaagctcactagcaccgatattctaaagggcaagccaatctatatcgctactaaagtcgctaaagacgggcaaacggcggtgtgcaatctggcgagcatcaatttaagcaaaatcaacactgaagaagacattaaaagggttgtgccgatcatggtcaggcttttagacaatgtgattgatttgaatttctaccctaaccgcaaagtcaaagccactaatttacaaaatagggccatagggttaggggttatgggtgaagcgcaaatgctcgcagaacaccaaatcgcttgggggtctaaagagcatttagaaaaaattgacgctttaatggagcaaatcagctaccatgcgattgacacgagcgcgaatttagcgaaagaaaaaggggtttataaggattttgaaaattcagaatggagtaaggggattttccccattgataaagccaataatgaagccttaaagctcaccgaaaaagggctttttaatcacgcttgcgattggcaaggtttgagggaaaaagtcaaagccaatggcatgcgtaatggctatttaatggcgatcgctcccacaagctccatttctattttagtaggcacaacccaaacgattgaacccatttataagaaaaaatggtttgaagaaaatttgagcgggcttattcctgttgtggtgcctaatttgaatgtagaaacctggaatttttacacatcagcctatgatattgacgctaaagatttgattaaagcagcggccgtgcgccaaaagtggattgatcaaggccaaagccttaatgtgtttttacgcatagaaaacgccagcggtaaaaccttgcatgacatctacacgctcgcttggaaattaggactcaaatccacttattatttgcgcagcgaaagccctagcatagatgaaaaaagcgtgttggatcgatcggtggagtgttttaattgccaataa

SEQ ID NO: 7258 - DNA, 1302 bp, Helicobacter pylori
  CDS (1)...(1302)
atgctttctgtcatcatactggccgctggtaaaggcactcgcatgcgttctagcctgcctaaaactttacacaccatttgtggggagcctatgttgttttacattttagaaacggctttttcaatcagcgatgatgtgcatcttatcttacaccaccaacaagaacgcattaaagaagcggtgttggagcgttttaagggcgtcatttttcacactcaaattgtggaaaaatattcagggacaggtggggctatcatgcaaaaagataaaacgcctatttctacgaaacatgagcgggttttgattttgaatgcggacatgcctttaatcactaaagacgctctcgcccccttattagaaagcaagaataacgctataggcttactccatttagctgaccctaaaggttatgggcgcgttgttttagaaaaccatcaggttaaaaagattgtagaagaaaaggacgctaatgatgaagaaaaagaaattaaaagcgtgaatgctggcgtgtatgggtttgaaagggattttttagaaaaatacttacccaagctccatgaccaaaacgcccaaaaagaatactacctcacggatttaatcgctctagggatcaatgaaaacgaaacaattgacgctattttcttaaaagaagagtgttttttaggggtgaatagccaaacagaaagggcgaaagctgaagaaatcatgctagaaagactgcgcaaaaacgccatggacttgggggtagtgatgcaattgcctaatagcatttatttagaaaaaggcgtgagttttaagggggagtgcgttttagagcaaggggtgcgtttgattgggaattgtttgatagaaaacgcgcatattaaggcttatagcgtgatagaagagagccagattgttaatagcagtgtggggccgtttgcccatgcgcgccctaaaagcgtgatttgtaatagccatgtggggaattttgtagagactaaaaacgctaaacttcaaggcactaaagcagggcatttgagctatttaggggattgtgagatagggaaaaacacaaatgtaggggctggcgtgatcacttgcaattacgatggtaaaaagaaacaccaaacaatcatcggtgaaaatgtctttatagggagcgatagccagctagtcgcccccataaatatcggctctaatgtcttaatcggcagcggcaccactatcactaaagacattcctagcggttcgttgagcctttcacgcgcccctcaaaccaacattgaaaacgggtattttaagttttttaagaaaccttaa

SEQ ID NO: 7259 - DNA, 1176 bp, Helicobacter pylori
  CDS (1)...(1176)
atgaatgaagtggttgtagtggcggcaaaacgaagcgctgtagggagttttttaggctctctaaagagcgtgggcgctagagaaatgggtgttagcgtgcttaaagacgctttgaatgcgagcggccttaagcctagcgatgtggattctgtcattttaggcaatgttttaggcgctggtttgggtcaaaatatcgccaggcagatccaactagacgccggcatccctaatgacaaaaacgcttttagcgtcaatatggtttgcggatcgtctatgaaagctatccagttagcgcatgacagcatcatgcttgggcgcgatgagatggtggtgtgcggtggcgtggagaacatgagcgcagcaccctatttgtcgtttgacatgcgagatgggaaaagaatggggaatgcgaacatgatagattccatgatacatgatggattgtgggatgcgttcaataattaccacatggggatcaccgctgataatgtcgctcaagcataccacataagccgagaagatcaagataatttcgcgctccagtcgcaactcaaagcaagagccgccattaatgcagggaaattccaagaagaaatcacgcctattgaaatagcgaataaaaaaggcgtggtggtttttaaagaagacgaataccctagagaaacgacgctagaatcccttgcaaagctcaaacccgctttcaaaaaagacggatcggtaacggcgggaaattcatcagggatcaatgatggcgcgagtattatcattttatgcagcactaaaaaagcgcaaacattggggttaaaagccatggcgactatcaaggggtttggtttgggtggttgcagtccggatataatgggtatatgccctagcatcgcgattaaaaacaaccttaaaaatgtcaaaatgaatctcaatgacatccatctttttgaactcaatgaagcctttgccgcgcaaagcctagccgtgttaaaagagcttgaattaaaccccaatatcgtgaatgtgaatggaggcgcgatagcgattggccaccctattggcgcgagcggtgctaggatattggtaactttattgcatgaaatgaaaaggagcgggcatggcgtgggttgtgcgtcattgtgtgtgggcggcgggcaaggtctttctgtggtagttgaacaaaaataa

SEQ ID NO: 7260 - DNA, 2484 bp, Helicobacter pylori
  CDS (1)...(2484)
atgcaagataattcagtcaatgaaacaaaaaatattgtagaagtggggattgattcttctattgaagagagctatttagcttattccatgagcgtgatcatagggcgcgctttaccggacgctagagatggcttaaagcccgtgcataggcgtattttgtatgcgatgcatgaattaggccttacttcaaaagtcgcttacaaaaaaagcgctaggatcgtgggtgatgtgattggtaaataccacccccatggcgataatgcggtttatgatgcgctagtgagaatggcgcaagatttttccatgcgtttggaattagtggatgggcagggcaactttggctctattgatggcgataacgccgcagcgatgcgttacactgaagccagaatgactaaggcgagtgaagaaattttaagggatattgataaagacaccattgattttgtgcctaattatgacgataccttaaaagagccagatattttaccaagccgtctgcctaaccttttagtcaatggggctaatgggatcgctgtggggatggcgacttctatcccccctcacaggatggatgaaatcatagacgctttagtgcatgtcttagaaaaccctaacgctggattagatgaaatcttagaatttgtcaaagggcctgattttcccactggtgggatcatttatggcaaggcgggtattattgaagcctataaaacggggcgaggacgcgtgaaagtgcgggccaaagtgcatgtggaaaaaacaaaaaataaagaaatcatcgttttagatgaaatgccttttcaaaccaataaagccaaattagtggaacaaatcagcgatttagcgcgagaaaagcaaattgaaggcattagtgaagtgcgcgatgagagcgatagagagggcattagagtggtgattgaattaaaaagagacgcgatgagtgaaattgtcttaaaccacctctacaaactcaccactatggaaaccacttttagcatcattttactcgctatttacaataaagagcctaagattttcacgcttttagagttgttgcaccttttcttaaaccacagaaaaaccattattataagacgcacgatttttgaattagaaaaggctaaggccagagcgcatattttagagggctatttgatcgcactagacaatattgatgaaatcgtgcgactcattaaaacaagccaaagcccagaagcggctaaaaacgccttaatggagcgtttcactttgagcgagattcaaagcaaggccattttagaaatgcgtttgcaacgcttaacaggccttgaaagggataagatcaaagaagaataccaaaacttgttggagcttattgatgatctcaatggcattttaaagagcgaagatcgcttgaatggagtcgtcaaaacagagcttttagaagtcaaagagcaattttcttctccaaggcgcactgaaattcaagaatcttatgaaaatattgacatagaagatttgatcgctaatgagcctatggtagtgagcatgagttataaaggctatgtgaaaagagtggatttaaaagcttatgaaaagcaaaatcgtggtggtaaaggcaagctttcaggcagcacttatgaagacgatttcattgaaaacttttttgtggctaacacgcatgatattttgctctttatcaccaataaggggcaattgtatcatttgaaagtctataaaatcccagaagcgagccggatcgctatgggtaaagccattgtaaatttaatctcgctcgctccggatgaaaagatcatggcgactctaagcaccaaagactttagcgatgaacgctctttggccttcttcacgaaaaatggcgtggtgaagcgcaccaatttgagcgaatttgaaagcaacaggagttgtggtatcagagcgattgttttagatgaaggcgatgaattagtgagcgcaaaagttgtggataaaaacgctaagcatttgctcatcgcatcgcatttgggcattttcattaaattccctttagaagaggtgcgcgagatcggaagaactactcgtggggttataggcatcaagctgaatgaaaacgattttgttgtcggtgcggtcgttattagcgatgatggcaacaagcttttgagcgtgagtgaaaacgggcttggcaagcaaactttagccgaagcgtatagagggcaatctcgtggaggtaagggggtcattggcatgaagctcactcaaaaaaccggcaatctagtgggcgttatcagcgtggatgatgaaaatttggatttgatgatccttactgcaagcgcaaaaatgatcagagtttctattaaagatattagagaaaccggaagaaacgctagtggggtaaagctcataaacaccgccgataaagtcatgtatgtcaattcttgccctaaagaagaagagccagaaaatttagaaacctcttcggcacaaaatttgtttgagtga

SEQ ID NO: 7261 - DNA, 2808 bp, Helicobacter pylori
  CDS (1)...(2808)
atggataagatcattattcaaggggctagggaaaacaatctcaaaaatatttttttagaaatccctaaaaaccagtttgttgtttttaccggattgagcggttcgggtaaatccactttagcgtttgacactttatacgctgaaggccaaaggcgctatttagagagtttgtccagctatgctaggcaatttttagacaaagtgggtaagcctaatgtggataaaattgaaggcctaacccctgcgatcgctattgatcaaaaaaccacttctaaaaaccccagatccactgtggggacgatcactgaaatttatgattatttaaggttgttgtttgcaagggttggggagcaattttgccccacatgtttagagcctattagttctatgagcacgagcgatattatttctcaaatctgtcatttagaagaaaattctaaaatcattattctcgcccccattattaaagataaaaaaggttcgtttaatgataaattagagagcttgcgtttgaaggggtatgtgagggcttttgttgatggggtgatggtgcgtttagatgaagaaatccatttgcacaaaaccaaaaaacacaccattgaagcggtggtggatagggtggtagttaataatgaaaacgcttcacggatcgctagcgcaatagaaaaagcccttaaagaaagctatggggaattagaagtggaaatcttgcaagacaacgcgccaagcatcagaaagcattacagcgaacataaggcatgctttaaatgcaagatgagttttgaagaattagagcctttgagtttttccttcaattcgcctaaaggggcgtgcgaaagttgcttgggtttggggacaaaatttagcctagatattagtaagattttagatcctaacacgcctttaaatcaaggagcgattaaagtgatttttgggtataaccgcagttattacgctcaaatgtttgaaggtttttgcgaatataatggcattgacagtgcactttgttttaacgaattgaataaagagcagcaagacgctcttttgtatgggaatggcactgaaatcagctttcattttaaaaacagccctttaaaacgcccttggaaaggcatcattcaaatcgcttatgacatgtttaaagagcaaaaggatttgagcgattacatgagcgaaaaaacctgttcttcgtgcgaggggcatcgtttgaaagcctccagtttgagcgtccaagtcgctggcttgaaaatggcggattttttaactaagcccattgaagaagtttatcacttttttaatgatcccacgcattttagctatcttaacgagcaagaaaaaaagatcgctgaacccattttaaaagagattttagaaagggtgttttttttatacgatgtggggttagggtatttgactttagggagggatgcgcgaacgattagcggaggggagagccaaaggatacgaatcgctagtcaaatcgggagtggtttgacaggggttttgtatgttttagacgagcctagcattggcttgcatgaaaaagatacgctcaaactcattaacacccttaggaatttacaaaaaaaagggaacacgctcattgtcgtagagcatgacaaagagacgattaagcatgcggattttgttgtggatattgggccaaaggctggaaggcatgggggtgaagtggtttttagcgggagcgtgaaagaattattgcaaaataaccattctaccgccttgtatctcaacggcactaaaaagattgagcgccctaaatttgaactccctaaagaaaagcattttttagaaattaaaaatgtcaatatcaataacattaagaatttgagcgttcaaatccctttaaaacaattggtgtgcattactggggtgagcgggagcggtaaaagctcgttgattttacaaacccttttacccaccgctcaaacccttttaaaccatgctaaaaaaactcaaagcttgaatggggtggagattgtagggttggagcatttggataaagtgatttatttagatcaagcccccataggcaaaaccccacgaagcaaccctgccacttacacgggagtgatggatgaaatcaggattttatttgccgagcaaaaagaagctaaaattttaggctatagtgcgagccgttttagctttaatgttaaaggagggcggtgcgagaaatgccaaggcgatggggacattaaaatagaaatgcactttttgcctgatgtgttagtccaatgcgatagctgtaagggcgctaaatacaacccccaaactttagaaatcaaggtgaaaggcaaatccattgccgatgtgttgaacatgagcgtggaagaggcttatgaattttttgctaaattccctaaaatcgccgtgaagttaaaaacgcttatggatgtgggcttaggctatatcactttagggcaaaacgctacgactttaagtgggggggaggctcaaaggatcaaattagctaaagaattgagtaaaaaagacacaggcaaaaccctttatattttagatgagcctactaccggtttgcattttgaagacgtgaatcatcttttacaagtcttgcattctttagtggcgttaggcaattctatgctagtgattgagcataatttagacattatcaaaaacgctgactacattatagacatggggcctgatgggggggataagggcgggaaagtcattgcgagcggcacgcctttagaggtggcgcaaaattgcgaaaaaacccaaagctacacgggaaaatttttagctttggaattgaaatag

SEQ ID NO: 7262 - DNA, 903 bp, Helicobacter pylori
  CDS (1)...(903)
atgagaaaaacgatttcagcgttgtttttatcagcgtgcatagggttatcgtctgtttatgcagataacgctttgattttgcaaaccgattttagtctaaaagatggggccgtctcggcgatgaaaggcgtcgctttcagcgttgattcccatcttaaaatctttgatttaacgcacgaaatccccccgtataacatctgggaaggcgcttaccgcttgtatcagaccgccagttattggccaaaaggttcggtatttgtgagcgtagttgatccgggcgtaggcactaagcgtaaatcggtggtactaaaaactaaaaacggccagtatttcgtctcgccggataacggcacgctgactttggtggcacaaactttggggattgatagcgtgcgtgaaattgatgaaaaagctaaccgcttgaaaggttctgaaaaatcctatactttccatggtcgtgatgtgtatgcttacaccggtgcacgcttggcttctggggcgatcacattcgagcaggtcgggccagagcttcccccaaaagtcgttgaaattccttaccaaaaagcgaaagccacaaaaggggaagtgaaaggtaatatcccgattttggatattcaatatggcaatgtttggagcaacatcagcgataaattactcaatcaagcaaaaatcaaactcaatgacacgctgtgtgtaacgatttttaaaggttctaagaaacaatacgaagggaaaatgccgtatgtcgcaagctttggcgatgtgccagaaggccagccgttagtttatttaaacagcttgttaaatgtttccgtggcgctgaatagggataatttcgcgcaaaaatatcaaatcaaatccggtgctgactggaatattgatataaagaagtgcgctaagtaa

SEQ ID NO: 7263 - DNA, 723 bp, Helicobacter pylori
  CDS (1)...(723)
atggatattttaaaagcagagcatttaaacaaacagattaaaaaaaccaaaatcgtttcagacgtttctttagaagtgaaaagcggcgaagtggtggggcttttagggcctaatggggcgggtaaaaccaccaccttttatatgatatgcgggcttttagagcctagtggggggagcgtttatttaaacgatgtgaatttagctaaataccccttacacaagcgttctaacttaggcataggctacttgccccaagaatccagcatttttaaagaattgagcgtggaagagaatctggccctagcaggggagagcacttttaaaaactctaaagagagcgaagaaaaaatggaaagcttgttagacgctttcaatatccaagctataagagagcgcaagggcatgagcttgagtgggggagaaagaaggcgcgtagaaatcgctagagctttaatgaaaaaccctaaattcgtgctattagatgagccttttgcgggcgtggatccgattgcggtgattgacattcaaaaaatcattgaaagcttgattggattaaacatcggcgtgttgattactgatcacaatgtgcgagagactctgagcgtgtgccatagggcgtatgtgatcaaaagcggcacgcttctagcaagcgggaacgctaatgaaatttatgaaaacgctttggtgcgtaagtattatttaggggaaaattttaaggtatag

SEQ ID NO: 7264 - DNA, 1110 bp, Helicobacter pylori
  CDS (1)...(1110)
atgttgcttttcactccaggccctgtagccattaatgaagagatgcgcacaagcttttctcagccaatgccccaccaccgcactaaagattttgaaaagattttccaaagcgtgcgagaaaatttgaaaaaaatgaccggtttagaagaggttttgcttctaagcagcagcgggacaggggctatggaagcgagcgtgatttccttgtgtcaaaaagagttgctttttgttaatgcgggcaagtttggcgaaaggtttggcaagatcgctaaagcccattctatcaaagcccatgaattagtctatgaatgggacacaccagctcaagtagatgaaatattaagcgttcttaaagccaaccctaacattgatgcgttttgcattcaagcatgcgagtctagtggggggttacgacaccctgtggaaaaaatcgctcaagcgatcaaagaaactaacccgaatgtttttgtaattgtagatgctatcaccgctttaggggttgagcctttagaaataacgcatgttgatgcgctcattggagggagtcaaaaagcgttcatgctgcctcctgcgatgagcctagtcgcattgagccagaatgcaattgagcgtatagaagaacgcaatgtggggttttatttcaatttaaagagcgaattgaaaaaccaaaggaataacaccacaagctacaccgctcctattttacacactttagggttgcaacgctattttgaattggtgcaaaatttagggggctttgaagcgctctatagagagactaaaaaagccgctttggccactcaaaaagccgttttagctttaggtttaaagattttccctaaaagcccaagcttgagcatgacaacgattgttaatgagcatgccaaagaattgagaaaccttttaaaagaaaaataccaggtgcaatttgcgggcggtcaagagccttataaagatgcgctcattcgtatcaaccacatggggatcattcctgtttataaaagcgcttacgctttaaacgccctagagttagccctaaacgacttggatttaagggaatttgatggcgtggcgaacgcaacttttttaaagcaatattatggaatttaa

SEQ ID NO: 7265 - DNA, 957 bp, Helicobacter pylori
  CDS (1)...(957)
atgaaagcgcgtgggtttaaggcaaagatgcgtgggtttaagattttttcagggagcgctcaccctgcatttggcaaagaagtgtcaaagcatttaggctttcccttatccaaagcggtgattgggaaattcagcgatggtgaaatcaatatccaaatcagcgaatcggtgcgcggtaaggatatttttatcatccagcccacttgcgtgccggtcaatgacaatttaatggaattgttagtcatggtagatgctttaaggcgcagttcggccaattctatcacagcggtgttgccgtattttggctatgccagacaggacagaaaagcggctccaagagtgcctatcacggctaaaatggtcgctaatttgatgcaagaagtggggattgaaaggatcattacgatggatttgcatgccgggcaaatccaaggcttttttgatgtgccggtggataatttatacggatctatcgtttttagagactatatccgctctaaagcgttaaaaaatcctgtgatcgctagccctgatgtgggtggggttacaagagctaggtattttgccaatcaaatgggcttagatttaatcatcgtggataagcgccgtgaaaaagctaatgaaagcgaagtgatgaatattatcggctcagccaaggagcgcgatgtgattttagtggatgacatgattgataccgcaggcacgatctgtaaagccgctttggctttaaaagaacaaggggcgacttctgtcatggcgttaggcacgcatgcggttttaagcgggaatgcgatcaagcgcattaaagaaagcgcgttagatgaagtggtggtaactaactctatccctttagttcaaaaatgcgataaaatcaccactttaagcgtagcgcccttatttgcggaagtgatcagaaggatttatcataacgaaagcgtccaatcgcttttcacttaa

SEQ ID NO: 7266 - DNA, 2562 bp, Helicobacter pylori
  CDS (1)...(2562)
atgatgaaagattttttagaagattacaaaaaaagcgtttcagaaagaggaagtgagggtatcccgccactccctttaaacgctaaacaagttcaagccgtcgttgagattttaacaaaagatcccacaaacgccgctttcgctaaagaattactcattcacagagtgagccctggggttgatgagggggcgaaagtgaaagcggaatttttagctaaattgtctcaaaaaaaactagaatgcgtgcacattagtgctttagaagcgaccacccttttaggcacgatgcttggggggtataatgtagagcctttgattatgggcttagagagtcaagacaaaaacatcgctaaagagagtgcgaaagctttaaaaaccactcttttagtctatggatcgtttgataaaattgcggcaatgagcaaaactaacgctctggctaaagaagtgttagagtcttgggcaaacgccgaatggtttttgaataaagagcctttgaatgaatgcattgaagcgtgcgtgtttaagattgatggcgaaaccaataccgatgatttaagcccagcgagcgacgctttcacacgaagcgatattcctttacacgccaaagccatgctaaaaaaccggattgaaaattacgaacaacgcatcaaagccattaaaactaaaggcgttcctgtagcgtatgtgggcgatgtggttggcacaggaagctccagaaaaagcgcgacgaactctatcatgtggcattttggtaaggacattccttttgtgcctaataaaaggagtgggggcattgtgattgggggggtgatcgctccgattttctttgcgacttgtgaagatagcggggcgttacccattgtggctgatgttaaggatctaaaagagggcgatttgattaaaatctatccttataaaggcgaaatcacgctgaacgataaagtggttagcacttttaagttagagcctgaaactttgttagatgaagttagggcttctgggcgtatccctttaatcatcggtaggggtttgacgaataaagcgcgtaaattcttggggctaggcgaatctgaagcgtttaaaaagccatccgctcctaaaagcgacgccaaaggctacactttagcccaaaaaattgtagggcatgcttgtggggtaaaagggatcttacctgggacttattgtgagccaaaggttaccaccgtgggcagtcaagacaccacaggggcgatgactagagatgaggttaaagagttagcgagtttgaagtttgatgcgccttttgtgttgcagagtttttgccataccgccgcttacccaaagcctagcgatgtgagtttgcatgcaaccttgcctggctttatcactcaaagaggcggtgtggcgttgcatccgggcgatggcgtgatccatacatggctgaatcgcatgggattgcctgatactttaggcacagggggggatagccacacccgtttccctttgggcattagtttcccggcagggagtgggctagtcgcttttgcagcggttacaggcacgatgcccttgaacatgccagaatctgtgttggtgcgttttaaaggggaaatgaatcctgggatcaccttaagggatttagtgaatgcaatcccttattatgcgattaaaaaagggttactcacggtggagaaaaagggtaaaatcaatgtctttaacgggcgtattttagaaattgaaggcttgcctgatattaaaatggagcaggcttttgaactaagcgatgcgagtgcggaaagaagtgcagcggcttgcgtggtgcgtttgaataaagagccgatgattgaatacttgaaatccaatatcaagctgattgatgagatgattgcaagcggttatgaagataaagagactttgaaaaaacgccgagatgcgatgcaagcttgggtggataatccggtattgttagagccagatagtaacgctcaatacgccgctgtcattgaaattgatgtggcagaaatcacggagcctattttggcatgccctaatgaccctgatgatgtcgctactttgagcgaagttttagcggatacgaccggcaaaagaccccacgctattgatgaagtgtttattggctcttgcatgacgaatattgggcattttagagcctttggcgaaatcgttaaaaacgctcctcccagtcaagcacgcctttgggtagtgccacccagtaaaatggacgaacaagagcttattaatgagggctattatgcgatttttggggctgccggggcaaggactgaagtcccaggctgtagcttgtgcatgggcaatcaagcgagggttagggataatgcggtcgtcttttccacttccacacgcaattttgataatcgcatgggtagaggggctaaagtgtatttaggcagtgcggagcttggggcggcgtgcgctttactagggcgaatccccactaaagaagaatacatgaatttagtgagtgaaaagctagagagccaaaaagacaagatctatcgctacatgaactttaacttaatggagaatttcaggctctag

SEQ ID NO: 7267 - DNA, 2598 bp, Helicobacter pylori
  CDS (1)...(2598)
atgataaaagcaatcattggaaaaatcattggcaccagaaacgatcgctggatcaaacaatacaaaaaacaagtcctaactatcaacgccttagagcctacttatgaaaaaatgagcgacgatgagctgcaaaacgcttttgaagagttaaaaaaacgagtgcgatccacagaaaaagatttgcaagaaaaaacccttttagaagtcctgcctgaaagttttgcaatcactagagaagcgagcaaaaggatcttaaagatgtgccattttgacgtgcaactcattgggggcatggtcttaaacgatggcaaaatcgctgaaatgaaaactggagagggtaaaactttagtcgctactttagcggtggctttgaacgctttaaagggcgagagcgtgtatgtggtaaccgttaatgattatctagcccatagggattctaaagaaatggagccgttgtatcatttcttaggttatagcgtaggcacgatcactgcaagcgtgcgagatgatgatgagcgcttggaaatttattctaaagacattgtttatggcactaataatgaatttggttttgattatctaagggataacatgaaatattctttagagcataaggtgcaaaaatcgcatgcgttcgctattgttgatgaggtggattccattttaattgatgaagcgagaacccctttaatcatttcagggcctgtggataggcgcatggaaaattacaacaaggctgatgaagtcgctaaaagcatgcaagtggaaatagatttcaccatagatgaaaaaaaccgcgcgattttaatcactgaagaggggattaaaaaagctgaaaatctctttggcgtggataatttatacaagattgaaaacgccgccttatcgcaccatttagaccaagctttgaaagcgaattatctcttttttattgataaagattatattgtagccaataatgaagtggtgattgtagatgaatttaccggccgtttgtctgaggggaggcgctttagtgagggcttacaccaagctttagaggctaaagagggcgtgagcattaaagaagagagccaaaccttagccgatatcactttccaaaattatttcaggatgttttctaaactcgctggcatgacaggcacggctcaaaccgaagccacagaatttttagaaatctacaatttagaagtggtgtccatccctactaatttagcgatcaagcgaaaagatttgaacgatttgatctataagagtgaaaaagaaaaatttgacgctgtgatccttaagattaaagaattacacgataagggtcagcctgttttagtcggcacggctagcattgaaaagagtgaaaccctgcacgctttactcaaaaaagaacgcatccctcacaccgttttaaacgccaagcagcacaccaaagaagctgaaatcatcaaggacgccgggcttaaaggagcggttacgattgcgactaacatggcaggcagaggcgttgatattaaactcaccgatgaaattaaggagcttggggggctgtatatcattggcactgaaaggcatgagagccgcaggattgacaaccaattaagggggcgaagcgggcgccagggcgatccgggaacaagccaattttatttgagtttagaagacaatctgttacgcatttttgggagcgataggattaagggggtgatggaaaaattagggcttaaagacggcgaacacattgaatcaaagcttgtaacaagagcggtggaaaacgcgcaaaaaaaagtggaaaacttgcattttgaaagccgtaagcatttgttagaatacgatgatgtggctaatgagcaacgaaaaagcgtgtataaatttagagatgaattattagatgtcaattacgatattagcgctaaaatcgctgaaaacagagaatacgcgctcaatcaaatcttttctaaactcaaagcctttgaccatcaaaacctgtctgaagaggaacttttagggcttaaaaacatcttaaaagaagattttaacgctcatgtttcattagaagatttaaaaaaagcctctcctattgaaaattttgtagctgaaaaactcaaaagcgattatgaaaacaaaatgaaagttttggatagcgaacaaagaagccggattgaacgcatcgtgtatttgcagattttagacaacgcatggcgagagcacctttacacgatggataatctcaaaaccggcattaatttaagaggctataaccaaaaagaccctctcgtagaatacaaaaaagagagttacaaccttttcttagaattcattgaagacattaaaacggaagcgatcaaaaccttttctaagatccagtttgaaaatgagcaagattctagcgatgcggagcgttatttggataattttagcgaagaaagagagcatgagagcgtaacttaccgccatgaagaagccttagacgaagatctgaatgtggccatgaaagctttcgctaaaacccctaaaagaaacgagccttgcccttgtcaaagcggcaagaaatacaaagattgttgcgctaaaagcgggcctaaaaagggcttatttgccaaatag

SEQ ID NO: 7268 - DNA, 2061 bp, Helicobacter pylori
  CDS (1)...(2061)
atgcaagaataccacattcataatttggattgccctgattgtgcgtctaaattagaaagggatttaaacgaattagactatgtgaaaaaagctcaaatcaatttcagcaccagtaagttgtttttggacacgagcgattttgaaaaagttaaggctttcatcaagcagaatgaaccgcatttgagcctgtcttttaaagaggctacagaaaagcccttgagttttacgccactcatcattacgatcatggtttttttgggcgcgattttaatcttgcacctaaaccctagccctttgattgaaaaggctatgtttttcgtgttggctttagtgtatctagtgagcggtaaagatgtgattttaggggcgtttcgtgggcttaggaaagggcaattttttgatgaaaacgctttgatgctcattgcgactattgcggctttttttgtgggggcttatgaagagagcgtgtctattatggtgttttattcagcgggcgaatttttgcaaaaactcgctgtctctcgctctaaaaaatcccttaaggctttagtggatgtcgctcctaatttggcttatttgaaaaagggcgatgaattagtgagcgttgcgcctgaagatttaagagtcaatgatattgtggtggtgaaagttggcgaaaaagtgcctgtggatggcgtggtagttaagggcgaaagcttgctagatgaaagggcgttgagtggggagtctatgcctgttaatgtcagcgaaaattctaaagttttaggggggagcttgaatttaaaagcggtccttgaaattcaagtggaaaaaatgtataaagattcttctatcgctaaagtggtggatttggtccaacaagccacgaatgaaaagagcgaaaccgagaaatttatcactaaattttcacgctactacaccccaagcgttttattcattgctttaatgatcgctgtattaccgcccttgttttctatggggagctttgatgagtggatttatagggggcttgtggctttaatggtgagctgcccttgcgcgttagtgatttctgtgcctttagggtattttgggggcgtgggagcagcaagcagaaagggcattttaatgaaaggcgtgcatgttttagaggtgcttacccaagctaaaagcatcgcttttgataaaaccggcactttgactaaaggcgtttttaaagtaacggatattgtgccgcaaaatgggcattctaaagaagaagttttgcattacgcttcttgttcgcagctcttatccacgcaccctatcgctttatccattcaaaaagcatgcgaagaaatgttaaaggacgataagcaccaacatgacattaaaaattacgaagaagtgagcgggatgggggttaaagcgcaatgccatacggatttaatcatcgcagggaatgaaaaaatgctcgatcaattccatatcgcgcacagcccttccaaagaaaacggcacgatcgtgcatgtggctttcaatcaaacttatgtgggctatatcgtcattagcgatgagattaaagatgacgccatagagtgcttaagggatttaaaagtgcaagggatagaaaatttttgcattttgagcggggacagaaagagcgcgactgagagcatcgctcaaaccctaggctgtgaataccatgcgagcttgttgcctgaagaaaaaacgagcgtgtttaaaacctttaaagaacgctataaagctccggcgatttttgtaggcgatggcatcaatgacgctccgactctagcgagtgctgatgtggggattggcatggggaaaggatcagaattgagcaagcaaagcgcagacattgtgatcaccaatgactctttaaattcgttagtgaaagttttagcgatcgctaaaaaaactaaaagcattatttggcaaaatatcttgttcgctttagggattaaagccgtttttatcgtgctagggcttatgggggtagcgagcttgtgggaagcggtctttggcgatgtgggggttacgcttttagccttagccaattccatgcgcgcgatgagagcttaa

SEQ ID NO: 7269 - DNA, 1035 bp, Helicobacter pylori
  CDS (1)...(1035)
atgatcttaaaacgagttactgaagctttagaagcgtataaaaatggcgaaatgctcattgttatggacgatgaagacagagaaaatgagggggatttggttttagctgggattttttctacccctgagaaaatcaatttcatggccacgcatgctagggggttgatttgcgtgtctttgaccaaagatttagcgaaaaaatttgaattaccccctatggttagcgtgaatgattctaaccatgagaccgctttcacggtttccattgacgctaaagaagccagaaccgggatttctgcttttgaaaggcatttaacgattgaattattgtgtaaagacaccaccaaaccgagcgattttgtgcgcccggggcatattttccctttgatcgccaaagacgggggcgtgttagcgcgcacgggccatactgaagcgagcgtggatttgtgcaaattagctggattaaagcccgtgagcgtgatttgtgaaatcatgaaagaagatggctctatggcgagaaggggggataaatttttgagcgatttcgccctcaaacataaccttaaaactctctatgtctctgatttgattagctatcgtttggaaaatgaaagtttgctgaaaatgttttgtcaagaagaaagggaatttttaaaacaccaaacgcaatgctacacttttttagatcaccagcaaaaaaaccattacgcttttaagtttaaaggcgcaaaaacccatgatttagcccctttagtgcgtttccaccctatcaaagaggattttgattttttaacgactgatgcgtttgaagtgttttttaaagcgttagaatatttaaagcacgaagggggctatttgatctttatgaacacccattctaaagaaaacaatgtcgttaaagattttgggatcggggcgttggtgttaaaaaatttggggataaaggatttcaggctcttaagctcttgtgaagacaggcagtataaggctttgagcgggtttgggcttaagcttgtagaaacgattagcctttaa

SEQ ID NO: 7270 - DNA, 360 bp, Helicobacter pylori
  CDS (1)...(360)
atgattggcatagatattgtctctattgctaggatagaaaagtgcgtgaaacgctttaaaatgaagtttttagagcgttttttatcgccaagcgagattgttttatgcaaggataaatccagcagtatcgccgggtttttcgcgcttaaagaggcttgttctaaagcccttcaagtgggcattggtaaggaattgagctttttggatataaaaatctctaaaagccctaaaaacgcccccttaatcaccctttccaaagaaaaaatggattatttcaatatccaaagcttgagcgcgagcatcagccatgacgctggttttgcgatagcggtcgtggtggtttcttcgtcaaatgaataa

SEQ ID NO: 7271 - DNA, 681 bp, Helicobacter pylori
  CDS (1)...(681)
atggaacacagagtatttactattgctaatttttttagctccaatcatgattttatcaccgggttttttgtcgttttgacagcggttttgatgtttttaatctcgcttggcgcgtcgcgcaaaatgcagatggtacctatgggtttgcagaatgtgtatgagagcatcattagcgcgattttgagcgtggctaaggatattataggcgaagaattagcccgcaaatacttccccctagctggcacgatcgctttgtatgtctttttttctaacatgataggcatcattcctggctttgaatcccctacggctagctggagctttacgctggttttagcgctgattgtgtttttttattaccattttgaaggcattagagtgcagggcttttttaagtatttcgctcattttgcaggtcctgtgaaatggctcgcccctttcatgttccctattgagatcatctcgcatttttctaggatcgtgtctttatcgtttcgtttgtttgggaatatcaagggcgatgacatgttcttgctcatcatgcttttattagtgccttgggcggttcctgtagcgccttttatggtgttgtttttcatggggattttacaagcttttgtttttatgatcctcacttatgtgtatttggcaggggctgttttaaccgatgaagggcattaa

SEQ ID NO: 7272 - DNA, 1362 bp, Helicobacter pylori
  CDS (1)...(1362)
atgatcactttaaaacaagccctttctttatcccaagatgaattagaaacccttaaaaacgaaattgacgctaaggttagagcttcagatttgaacgcttatattaaagcccctagccttaatggcgctagcgctaaaggggtgccgattctcattaaagacaatatcagcgttaaggggtgggaaatcacttgctccagtaagattttagaaggctatgtcgctccttatcatgcgagcgtgatggaaaacttgcaccaaaacagcatggcagggtttgggctttctaacatggacgagtttgcgatgggaagcaccacggagtctagttgctatgggatcactaaaaacccacgagataaaaacagagtgcctggagggagtagcggagggagtgcggcagccgtggcgggcggcttagcggtagcggctttagggagcgatacgggcgggtctatcaggcagccggcgagctattgcgggtgcgtggggttaaaacccacttatgggagggtgagccgttatggtttgatcgcgtattgctctagttttgatcaaatcgggcctatcacgcaaaatgtagaagacgcttctattttatttgacgctattagcgggtatgatagcaaggactccacgagcgctaatctcaaacccacgcaaacctttaaaaaccttaacagagacaaacgctttaaaatcgctgtcttaatggatcacattaaagacgcgagcaatgaagtgcaactcgcttatgaaaacacccttaaagccttgaaagaaatggggcatgagattgtggaaaaaaagatgttggattcgcattatcaaatctctatttattatattatcagcatggctgaagcgagttcgaatctggccagatttgatggggtgcgttatgggaggagggctcaaaatattaaagatttgaaagaattgtatctcaaaagccgcagtgaaggttttggcgatgaggtgaaacggcgcatcatgttagggaattttgtcttaagcagtgggtattatgacgcttattatttgaaagcccagcaaatgcgtttgataattaaagagcaatacaacaagatttttgaagaagtggatttgattttcacccctgtagctcccacgagtgctcatttattcaattaccatgcaagccctttagaaatgtatttgagcgatatttacacgattggggcgaatttgagcggtttgccagccctttccttgcctgtcgctaaagatcctttaggcttgcccatagggatgcaattcattgctaaggcttttgatgagcaaagccttttagatgtttcttacgctttagagcaagaattagatttaaaattagattaa

SEQ ID NO: 7273 - DNA, 1377 bp, Helicobacter pylori
  CDS (1)...(1377)
atgaatacaagccataaaactttaaaaaccattgcgattttaggccagcctaatgtggggaaaagctcgttatttaaccgcttagctagagaaaggatcgctatcacttcagattttgcaggcactacacgagacattaacaaacgaaaaatcgcattgaatggccatgaagtggaattattagatacagggggcatggctaaagacgctcttttgtctaaagaaatcaaagcccttaatttaaaagccgctcaaatgagcgatttgattttatacgttgtggatggcaagtctatccctagcgatgaagatcttaagctttttagagaagtttttaagatcaaccctaactgctttttggtgatcaataagattgataacgacaaagaaaaagagcgagcttatgcgttttcttcttttggcatgccaaagagttttaatatttccgtttcgcacaatagaggcattagcgcattaattgatgcggtattgagtgcgctggatttaaaccaaatcatagagcaagatttggatgcggatattttagaaagcctagaaacccctaataacgctttagaagaagagatcattcaagtgggcatcattgggagggtgaatgtgggcaaaagctcgctcttaaacgcgctcacgaaaaaagaaaggagccttgtttctagcgtggctggcacgaccattgaccccatagatgaaaccattctcataggcgatcaaaaaatttgctttgtggataccgctggcatcaggcataggggtaagattttaggcattgaaaaatacgcattagaacgcacgcaaaaagccttagagaaatcccacattgcgcttttagttttagacgtgagcgctccttttgtggaattggacgaaaagatcagctctttagcggataaacattctttaggcatcattcttgttttaaacaaatgggacatccgctacgccccttatgaagagatcatagcaactttaaaaaggaaattccgctttttagaatacgcccccgtgatcacaaccagctgcttaaaagcgcgccatatagatgaaatcaagcataaaatcatagaagtctatgagtgtttttccaaacgcattcccacgagcttgctcaatagcgtgatcaatcaagccacccaaaaacaccccttgccaagcgatggcgggaaattagtgaaagtgtattacgccacgcaatttgccaccaaaccccctcaaatctctcttataatgaatcgccctaaagccttgcatttcagttacaaacgctatttgatcaacaccttaaggaaagaatttaattttttaggcacgcctttaatccttaacgctaaagataaaaaaagcgcccaacaaaattaa

SEQ ID NO: 7274 - DNA, 285 bp, Helicobacter pylori
  CDS (1)...(285)
atgaacaaagcggaatttattgatttggttaaagaagcgggtaaatacaacagcaaaagggaagccgaagaagcgatcagtgcctttactttggcagtagaaacagctttaagcaagggtgaaagcgtggagttgatcggttttggcaaatttgaaaccgcagagcaaaaaggcaaagaaggtaaagtgccaggaagcgataaaacttataaaactgaagacaaacgggtgcctaaattcaaacccggtaaaacccttaaacaaaaagttgaagaaggtaagtga

SEQ ID NO: 7275 - DNA, 1002 bp, Helicobacter pylori
  CDS (1)...(1002)
atgccaaatcatcaaaacatgctagacaaccaaacgattttaatcaccggtggcactgggagttttggcaaatgctttgttcgtaaagttttagacaccaccaacgctaaaaaaatcatcgtttatagccgagatgaattgaaacaaagcgaaatggccatggaatttaatgatcctagaatgcgtttttttatcggcgatgtcagggatttagagcgcttgaattacgctttagagggcgtggatatttgtatccatgcggccgcgctcaagcatgtccctatcgctgaatacaaccccctagaatgcattaaaactaacattatgggagcgagcaatgtgattaacgcatgcttaaaaaacgctatcagtcaggttatcgctctaagcaccgataaagccgctaaccccattaacctctacggtgcaaccaaattgtgcagcgacaagctctttgtgagtgcaaacaactttaaaggctcttctcaaacgcaatttagcgtggtgcgttatggtaatgtggtggggagtcgtgggagcgtggtgccgttttttaaaaaattagtccaaaacaaagcgagtgaaatccccattaccgatattcgcatgacacgattttggatcaccttagatgagggggtttcttttgtgcttaaaagcttgaaaagaatgcatgggggggaaatttttgtgcctaaaatccctagcatgaaaatgactgatctcgccaaagccctagcccctaatacccctactaaaatcatagggattcgtccgggcgaaaaactccatgaagtgatgatccctaaagatgaaagccatttagccctagaattcgaagactttttcatcattcagcccaccataagcttccaaacgcctaaagattacacgctcaccaaactccatgaaaaaggccaaaaagtcgcccctgattttgaatacagcagccataataacaaccaatggctagagcctgatgatttgttgaaattattatga

SEQ ID NO: 7276 - DNA, 2601 bp, Helicobacter pylori
  CDS (1)...(2601)
ttgcaagtgatccaccaatacagcaataaaggggggaagtatcaaaaccgctatgatgtgagtatccttgtgaatggcttgcctttagtgcatgtggaattgaaaaaaagaggcgtggcgatcagggaggcgttcaaccagatcaagcgctataaaagggatagttttagcgctgaagacgggctttttgattttgtgcagatttttgtcatcagtaacggcacgagctctaaatactattcaaacaccacaagaatagcccagctggaaaaaaaccataaagccgatacttttgaattcacgaattattgggcggatagcaagaatcacaatattgaggatttaatggattttgctaaggcgttttttgcaaagcgcagccttttgaacgttttaacgtgctattgcgttttcacaagcgaagaggttttattggtgatgcggccttatcaaatcgtggcggccgaaaggattttggaaaagatcaaaaccgcgcaaaatagtaaaacgaaaaatcaaagcaaaggctatatctggcacacgacagggagcggtaaaaccctaacgagctttaaaagcgcaacgttggctaaagaattagagagcgtttcaaaagtcttgttcgtggtggacaggaaggatttggactatcaaaccatgaaagaatacgataaattccaaaaagattgcgctaattccaacacaagcactaagattttaaaagaacagcttgaagattctaacgctaaaatcattatcaccacgatccaaaaattagacaaattcgttaaatcccataaagggcatgcgatttttaatgaagaagttgtgatgatttttgatgaatgccacaggagtcagttaggctctatgcatcaagccatcactaaagcgtttaaaaaataccacctttttggctttactggcacgcccatttttgcagctaattgcgataaaaacaaccctttaggcacgacagagcaaaagtttgggaaatgcctccaccaatacaccattattgatgcgatcagggataaaaacgttttgccctttagagtggaataccacaacaccattaaagctaaagaggacattaaggataataaggttagagcggttgatgaaaaaaacgcccttttggatactaggaggatcaaagaaatcactaaatgcattttagagcgtttcaatcaagccactaaaaataaaaaattcaattccattctggcatgctctagcatagaagcgctgaaaaaatactaccaagcctttaaagaagaaaaacacgatcttaaaatcgctgccatttttagctatagcgctaatgaggaaattgacacgctagaagatgaaaacaatgaaagcgcttgccggctagacaaaagctcaagggattttttagagggcgcgattgcggattataatgggatgtttggcgtttcttttgacacttcggatcaaaaattccaaagttattacaaggatctttctcaaaaaatgaaagagcgtaaaatcgatcttttaatggtggtgaacatgtttttgaccgggtttgacgctacaaggctcaacaccctttgggtggataaaaatctcaaataccatgggctaattcaagctttttcacgcgcaaaccgcattttagatagcgttaaaacgcatgggaatatcgtgtgttttagggatttagaacaggatttgaatgacgctctcatgctttttggcaacaaggacgctcaatctattgcgctgttaagaaaatatgaagattatttgaaaggctacacggataacaacaaagaatacgagggctatgagggtttgattaaaaggcttttaaccgaattcccattaaaagagccaatcgtttcagaaagccagaaaaaggattttattaagctttttggcaagattttgaaattagaaaatattttaaacagctttgaaaatttcaaaaaagacgattacatcaatcccagggattttcaagactatcaaagcaaataccttgatttttacgatgcaatgagatcagaaaaagggaaggataaagaagagattaatgatgatttgatttttgaaattgaactcatcaaacaagtggaagtcaatattgactatattttgaatttgattgaagagttcgctaaagagcatggggtggaaatccaaggcgttaaaaccaaaatagagccaatcatcaactccagcatagagttaaggaataaaaaagatttgatcatggatttcattgacaaatacaacaaagaccaagaagtccatgcgcattttcaagattatatccaccaaaaaagagaagaggaattccaaaatatcatagaagaaaaccgcttgaatgaagaaaaagcctattcgttcatgcagcatgcctttaaagggggcgaaatcagttttagtgggacggaattccctaaaatcattgaagaaaaaccctccatgtttggtaaaaattcgcgctatcaagaggtgaaagaaaaagtcgctgcaagcctttctcgttttttccaccgcttttgtgatctcactagcgctatatttaagaaaaatgaggttaaaaaagatgaggttaatgaaaaatag

SEQ ID NO: 7277 - DNA, 1584 bp, Helicobacter pylori
  CDS (1)...(1584)
atggaaaacaacccaaacaataaccaagcgtcattagaacgcaacgaattgcacaacaccatttggaaagtggctaacgaattgagaggctcagtggatggctgggattttaagcaatacgttttaggcattcttttttaccgctacatttcagaaaacatgactcattacatcaataaagaagagcgaaagcgcgatccgagttttgattacgctaaattaagcgatgaaaaggccgagcgtggaagaaaacaccttattgaacaaaaaggctttttcatcccgccaagcgctttattttgtaatgcgctaaaaaacgcgtgccataacgaagatctcaatgtaaccttacaaaatatttttaacgaaatagaaaaatctagccttggcactccatcagaagaaaatgtcaaaggcttgtttgcggatttagatgtcaatagcaataaattagggagctctcatcaaaatagggtggaaaaattgactaaaatccttgaagccatagggggcatgcaattaggcgattatttaaaaagcgggattgatgtttttggcgacgcttatgaatatttaatggccatgtatgcgagcaacgccggcaaaagcggaggggaatttttcaccccccaagaagtgagcgaactgctcgctaaaatcaccctacacggccaagagagcgtcaataaagtttatgacccatgctgtgggagtgggagcttactcttacaattttctaaagtgttaggcgataaaaatgtctcaaaagggtattttgggcaagaaatcaatttgaccacttacaacctttgccgtatcaacatgtttttgcatgacatcaattattctaaattccatattgcgcacggggacacgcttttagacccaaaacatgaagacgatgagccttttgatgcgatcgtttccaaccctccttattccactaaatgggtgggcgatagcaaccccattttaatcaacgatgagcgctttagcccggctggtgtgctagcgcccaaaaacgccgccgatctcgcattcactatgcacatgctttcttatttatccaatagcggcacggctgcgatcgtggaatttcccggggtgctttataggggaaacgctgaagcaaaaatcagagaatatttagtcaaagagaatgtcattgactgcgtgatcgctttaccagacaacctcttttttggaacgagtatcgctacttgcattttagtgcttaagaaaaacaaacaagacgacaccacgctttttattgatgcgagtaaggaatttgtcaaagagggcaagaaaaacaagctcaaagagcgcaaccgagaaaagattttgcaaacctatattgaaagaaaagagattaagcatttttgcgccctagctaatattgagaaaatcaaagaaaacgattacaatctctccgtgaatcgctatgtggagcaagaagacaccaaagaagccattgacattaaagcgcttaatagtgagattgctcaaatcgtagaaaagcaaagcgctttaaggaaccgtcttgaatccatcatcaaagagttagaaggggggcaaaatgcataa

SEQ ID NO: 7278 - DNA, 684 bp, Helicobacter pylori
  CDS (1)...(684)
atggtatttgacagaacaatcagcgtaagagaaaaaaaagcggctaaaacgcttgggattattgggatcgtcttttttattttgtttggcatcgtgataagcggggtggcttttcaaaaagagtgggtgcaacaattggatttattttttatagacttgatccgcaaccctgcccccattcaaaaaagcgcgtggctttctttcgtgttttttagcacttggtttgcacaaagcaagctcaccactcctatagccttactcattggcttgtggtttgggtttcaaaaacgcatcgctttgggggtgtggtttttctttagcatcttattaggtgaattcaccttaaaatcccttaagcttttagtggcgcgcccacggcctgtaaccaatggcgaattggttttcgcgcatggctttagtttccctagcgggcatgctttggcttcagcgcttttttacggctctttggcgttgttgttatgctattctaacgccaacaatcgcattaaaacgattattgctgtggttttgcttttttggatttttttaatggcgtatgatagggtttatttaggggtgcattaccctagcgatgttttaggagggtttttattagggattgcttggtcgtgctgctctttagcgctttatttagggtttttgaaacgcccttataatcaataa

SEQ ID NO: 7279 - DNA, 1602 bp, Helicobacter pylori
  CDS (1)...(1602)
atgctacaaaccatcaacttaacgcaacgctatgcgactaaaaaattgtttgaaaacgtgaatatcaagctggataaaaacaaacgctacgggcttattggggctaatggcgcaggaaagtccacttttttaaagattttaagcaagagcattgattgtagcagtggggaagtcatcattacaagcggcatgaaaatgggggttttagggcaggatcaatacgcttttgaagatttgagccttaaagatgcggttttgataggcaacaagcgtttgtatgacgctatcaaagaaaaagagcgcttatacaccgaaggcgatttgagcgatgataaagtgaatgccagattaggggagttagaaaccatttgcgtggaagaagatcccatgtatgaatgcgaagtggcgattgaaaaaatcctagaagatttaggcattcctagctctaaacacaacgatttgatgaaaaccctgccaagcagcgataaatttaaaatccttctcgctcaagtcttgttccctaaaccggatattttgcttttagatgagccgaccaacaacctggatttaaacgccattgaatggctagaaaacaacctcaaacgccatgaaggcacgatggtcgtcattagccatgacaggcattttttaaatgcggtatgcacgcatattttggatttggatttccacagcgtgcgcgaatttagcgggaattatgacgattggtatatcgcttccactctgatcgctaaacagcaagaggccgaacgcaataaaaaactcaaagaaaaagaagagctagaaaaattcatcgcgcgctttagcgctaacgcttctaaagccaagcaagccaccagccgccaaaaacaactggataaattagacattcaaagtttagcggtatctagcaggagggatcctagcattatttttaaacccaaacgcaccattggtaatgaagccttagagtgcgaaaacatctctaaaagttatgacgaccaaatcgttttaaatcaagtgagcttgaaagtgatgcctaaagacaagatcgccctcatagggccaaacggcgtgggtaaatccacgctttgtaaaattctagtagaagaattaaagccggataagggcgtggtgaaatggggggcgacggtttcaaaaggctatttccctcaaaacgtgagcgaagaaattagcggggaagagaccttgtatcaatggctctttaacttcaataaaaagattgaaagcgctgaggttaggaacgctttagggaggatgctgtttaatggcgaagagcaagaaaaatgcgtgaacgctttaagtgggggcgaaaaacaccgaatggttttatccaagctcatgctagagggggggaattttttagtcttagatgagccaaccaaccatttggatttagaagcgattatcgctttaggcgaagcgctctttaaatttgatggggcgctgatttgcgtaagccatgacagagagctcattgatgcgtatgctaataggatcattgaattagtcccaagccctaaaggcgcttcaatcattgattttaaaggcagttatgaagagtatttggcgagcaaaaaatga

SEQ ID NO: 7280 - DNA, 741 bp, Helicobacter pylori
  CDS (1)...(741)
atgcaaatgatgcacaatttgagttttttgggcatgtttttagccgctttgagcatgtctttagggcattgtgtgggcatgtgtggggggattgtgagcgcgttcagtcaaataagattttctaaagttacaagcttttcttaccagctcacttgccatgccctttataatgtagggaggatcagcacttacatgcttttaggggctatagcggcaagtttggggcatagtcttagcgtgagcatgggttttaggggtgttttattcattagcatggggattattttgatctgtttagcgttgctaggggcaagaatggaaaaattaagctttcaaatcccttttatttcttttttgatgaaaaaaaccttgcaatctcaaaacattctagggctgtatttcttaggcgtgttgaacgggtttttaccttgcatgatggtgtattcgtttttagcgagcgtgattctcagtcatagcgcgtttatgggagcgatgctaggcctttcttttgggcttggcaccagcatgccgttgtttttaatggggatttttttaagcaaaatttccgtttcttacaggaaatttttcaatcttttgtctaaaattttaatgggggtttttgggctttatatcctttatatggggatcatgctcattaaccacaaaatgcctcatgccatgcatcatcaaaacaacaccactcagcatgatcataaaggagtgcattcgcatgaacactaa

SEQ ID NO: 7281 - DNA, 1083 bp, Helicobacter pylori
  CDS (1)...(1083)
atgcccacgattttagtgagcgctttagaagcgagctctaatgcgcatttagaggaattacgccaaaatttgcctgaagattatcgttttattggcgtgtttgaaggcaaagaggtgctctatagccctagggaattttctatcatgggttttagagatgtgataggccgtttagggtttttactcaaagcccataaagaaatggtccaattagccaaacaagcggatatggtgcttttaatggattcttcttctttcaatatccccctagccaaaaaaatcaaaaaacaagatccgcataaaaaaatcatgtattatattttaccgcaagtttgggcatggaaaaaatggcgcgctaaaagccttgaaaaatactgcgattttttgggagcgattttgccttttgaagtgggctattaccaaaaaaaagcccaatatgtaggacaccctttattagatgagattaaacactataaaaaagatattaagggcgaaactctggtgtttatgccaggaagtaggaaaagcgaaatcgctaaaatgttccctttgtttgtcaaagcggctcaaatgttagaacaaaacgaagggtttaaaaggcgtgtgctggtcgtgccgagtttctttaaggggttggatttgaaagccctttatggagaagacattcaattatttgaaatttcttatgatgcacataagagtttgtttgaagcggagtttgcgttcatttgcagcggcacagcgactttagaggccgctttgattggcacgccttttgtgttagcgtatagggctaaaacgatggattttttgatcgctagaatgttggtcaatttgcattatataggtttagcaaacatcttttataacgccctaaataatgaaactccagggcttggggagagccaattgcacccggaattgatccagcattttttgagcgtagagggtttgttaaaagcgtataaagaaatggacagagaacgctattttaaagaaagtttgagattaagggaatatttaaaacatgggagcgcgagaaaaatcgctaatgaaatggcttttttgctgaatttaacttaa

SEQ ID NO: 7282 - DNA, 768 bp, Helicobacter pylori
  CDS (1)...(768)
atggttttagaagttaaaaacctgtcctttaaatattctcaaaaactcattttggataaattgagttttagcgtgccaaaaaacagcattaccagcattttagcgcctaatggctccggtaaaaccacgcttttaaaatgccttttagggcttttaaagcctttagaagaaaccgaaattaaagcgtgtaacaaagatattttacccttaaagccttatgaaaaagccaaactaatcgcttatatcccccaagtggaatattatgcgttcaatttcagcgtgctagattttgtcttaatggggaaagcgacgcatttgaatttgttcgctatgcctaaagctaagcacattaaagaagcgactagcgttttagagcgcttggatttagagtccttaaaagatcaaggcattaatgatttgtccggcggtcaaaggcaaatggtgcttttagccagaagtttgttgcaaagaacgcccttattgttactggatgagcctacgagcgctttagatttaaaaaaccaagcccttttttttgatgcgattaaagatgagatgaaaaaacgagaattgagcgttttagtcaatatccatgatccgaatttggttgccaggcactccacgcatgtggtcatgctcaaagataaaaaactttttttgcaagcttccacgccaatcgctatgacttcacacaatttaagcgcgctctatgacacgcctttagaagcgatctggcatgataacaagcttgtggtgtatgcgttgtag

SEQ ID NO: 7283 - DNA, 981 bp, Helicobacter pylori
  CDS (1)...(981)
atgcttaaaacctatcatatcgccttagcttgcgtgattttagcggtggtggtgctgttgtttggaggggagtccttgagcttggaagaatggcaagaagtgtgccttaatgtgaaaaaccactttttgcacaatgaagaactgagctctttaagtattattattttagaaatacgactaccacgagtgattttagcgctcctggtgggagcgagtttgtctgggagtggggtggtgatgcaaacgatttttagaaaccccttagtggatccctttttactagggatttctagcggggcgatgctaggcgtggcgatggcgatagcggtagtggagtctaacattgcgattttggcgttttttggggcgattttagctagccttgctgttttggcgatgaatagggttttgggtaattccgtcctttcgttggtgctttcaggggtggtgttgagcgcgtttttaagcgccttagccggagcgataaaattctttgtgatcccccaaaaagcgcaagcgattgtcgtgtggcttttagggagcttgtcgttgagcagttataaggattgcttgatcgctttcatagggctatctttaggctttatcccgctttttttgttaaggtggcgcatcaatttattgagcttgagcgatgcgcaaagtttgagcttggggattaacccggtgctgttgcgatcgctttgtttggtgtgcgtgagcgttgcgagcgctttagcggtgagcgtgtccggcacgattggctggattgggttagtcattccgcatgtggctaggttgttttttggggcgaatttgcaaaaactgcttttaagttctttgttaatgggagcgtttttcttgcttctagcggatgtggtggctaaaaccattaccccctatgatttaccggtaggcattgcgacaagcgttttaggagcgcctttcttcttgtggcttttgtttagaactaggggggtgtga

SEQ ID NO: 7284 - DNA, 582 bp, Helicobacter pylori
  CDS (1)...(582)
atgaatacttataaaaacagcttgaatcactttttaaatttagtggattgtttagaaaaaatccccaatgtgggtaaaaagtccgcctttaaaatggcgtatcatttgggtttagaaaacccctatctggcgctaaaaatcacgcacgctttagagaacgccctagaaaaccttaaaacatgttcatcttgtaacgcgctcagcgagagtgaggtttgtgagatttgctctgatgaaagccgacaaaattctcagctttgcatggttttacacccaagagatgtgtttattttagaagatttaaaggattttttagggcgctattatgtgttaaactccatagaagaagtggattttaacgccctagaaaaacgcctgattgaagaaaacattaaagaaatcatttttgctttccctcccactttagctaatgattctctaatgctttatattgaagacaaattacagcatttccacctcactttcactaaaatcgctcaaggcgtgcctactggagtgaattttgaaaacattgactcagtttcgctctcaagggcgtttaattcaaggatcaaagcatga

SEQ ID NO: 7285 - DNA, 912 bp, Helicobacter pylori
  CDS (1)...(912)
atgagtagccctaatttatccttttattataatgagtgcgagcgttttgaaagctttttaaaaaaccatcatttacaccttgaaagcttccacccttatttggaaaaagccttttttgaaatggtgcttaatggaggcaaaaggttccgccctaagctttttttagccgtgctttgcgcgttagtgggtcaaaaagattattctaaccaacaaacagaatattttaaaatcgctttaagcattgaatgcttgcacacttattcgctcatccatgacgatttgccatgcatggataacgccgctttaaggagaaaccaccccactttacacgctaaatacgatgaaaccacagccgttttaatcggcgatgcgctcaacacttactcttttgaattgctctcaaacgctttattagaaagccatatcattgtggaattaatcaaaatcttaagcgctaatggggggattaaaggcatgatcttagggcaggctttggattgctattttgaaaacacgcccttaaatttagaacaactcactttcttacacgagcataaaaccgctaaattgattagcgcaagtctgattatggggcttgttgcgagcggtattaaagatgaagagctttttaaatggcttcaggcttttgggttaaaaatgggtctttgctttcaagtgctagatgatattatagatgttacgcaagatgaagaagaaagcggtaaaaccactcatttagacagcgctaaaaacagctttgtgaatttattggggctagagagggcgaataattacgctcaaactttaaaaacagaggttttaaatgatttagatgcattgaaacccgcttatcctttattgcaagaaaatttaaacgcattattgaacactctatttaaaggcaagacatga

SEQ ID NO: 7286 - DNA, 771 bp, Helicobacter pylori
  CDS (1)...(771)
atgaaaaaagttttatttttgttggtaataagcttttttgggggttttttgaacgcttctagcttgtatgaaaaactgattaataaagaaacgatcagcgttggcacagaaggcatttacccccctttcacttaccacaataaagaaggcaagctcaccggctatgatgtggaagtggctagggagttggccaaagagcttggcgtgaagatcaaattccacgaaacttcatgggatatcatgctgacaggtttgaaatcggggcgttttgatatggtcgctaaccaagtgagtttggcgactaaaaaacgccaagcggcttttgataaaagcttgccttatagctattcaggcacgatcatgctggtcaggaaagatgaaaaccgcattaaagatattaaagacatcaagggtttgagagcggctaacactttaagctccacttatggggaaatcgcttttaaatacgacgctcaaatcgtttcggtggattctatggcgcaagctttgttgctggtggcgcaaaaacgagccgatttgaccttaaatagttctttagcgatcttaaactaccttaacacccacaaagataacccctttaaaatcgcatgggagtccaaagaaaaagatgggggcgcttcctttgttattaacaagcaccaagaaaaagccttagagcttatcaaccaagcgatgcaaagattgatcaacaaaggggttttaaaacgcttaggcgaacaattttttggaaaagatgtcagccagccctaa

SEQ ID NO: 7287 - DNA, 1353 bp, Helicobacter pylori
  CDS (1)...(1353)
atggaaacgattgattcggtggtgcgtttgttatctaatttggtgtgggggattcccatgcaaattttattagtaggcaccggcttgtttttaaccttttatcttaggggtttgcaattcagtaagattttttatgcgatcaaaatcctttttgacaaagagtcccaatctaagggcgacatttcacaattttccgctctcatgctctctttgggggcgactgtaggcattgggagtatcgtaggcgtagcgaccgctattagcatcgcagggccaggagcggtgttttggatgtgggttactgggcttgttggcatggcgactaagtattctgaggggattttagcggtgaaataccgggaaaaaggggcgtttggatacaacggagggcccatgtattacatcaaaaacggtcttaacatgcccaaactcgccatggcgtttgcgatttttacgattattgcaagcattggcaccggtaacatgacgcaatctaatgcggtttcttccattttaagcgaacaagcgaacctgcctaattgggtttcaggtttattgctcactcttttaaccgctttcattgtcataggggggatcaaatccattggtaaattcacttcttacttagctcctgttatggtgcttttatatttgatcgctattatttatattattgttagccattttgatttagcccttcaagcgatcaaactcatttttgaagaagcctttaaccctaaacccgttgtgggcggagcgagcggcgcgttgatagcgacgatgataaaaacgggcgtggctagggggttgtattctaatgaagcggggttagggagctcagccattattgccgcgagcgctcaaacacgccacccggtgcgccaagccttagtgtccatgctccaaacttttattgtaaccttaatagtgtgttcggcaacagcgagcgtgattttaatggctccagaatacaacaccttgctccctaatggggaaaaattaagcgctaatttgctcactctaaaaagcacggagtattttctaggctcattagggacggtggtgatttttacaaccatgatcttttttgcctactctacgatcattggttgggcttattatggggaaaaatgcactgaatacgcctttggtgaaaaaaaagtgaaatattaccgcttgatctttttagcgagtgtgatggtgggggctatggccaaaattgattttgtgtggaatttagcggatctttctaacgggcttatggctatccctaatttaatcgctttgattttattgcataaagtggtttattctgaaactcgttggtattttagcaagcattctaacaagtaa

SEQ ID NO: 7288 - DNA, 870 bp, Helicobacter pylori
  CDS (1)...(870)
atgggatttgcagatttctttaaaaattttaagatcaataaattgcggacagcgccaagtaaggaagaacagccaagccattgggtgaaatgccctaaatgttatgcgttaatgtatcataaagaagtgtttagtaaatacagcgtgtgtttgaaatgccattaccatttccgcatgaaagcggctgaaaggattgaatttttatgcgatgtggggagttttgaagagtttgacaagcatttacggcctaatgatcctttaaatttcgtggataaagagagctataaacaacgcattaaaaaatacgaaaaaaggactaaccgcccaagctcagtgatcagcggtgaggctaaaatcaaccgcatgcctttgcagatcgtggtgtttgattttagctttatgggggggagtttaggctctgtggagggcgaaaagatcgtaagagcaatcaatcgcgcggtcgctaaaagagaagcgttattgattgtttcagcgagtgggggggctaggatgcaagaatccacttattcgctcatgcaaatggctaaaacgagcgcggctttgaaccgattgagtgaggccaaactccctttcatttcgctcttaagcgatcccacttatgggggcgttagcgcatcttttgcttttttaggggatctcattatcgcagagccaggggcgatgataggctttgcggggcctagggtgattaagcaaactataggggcggatttgcctgagggctttcaaacagcggaatttttattagagcatggcttgattgatatgattgtgcacaggaaggatttgaagaagactttgagcgatctcatcgctatgatgacgcataagacttcaaagattttttaa

SEQ ID NO: 7289 - DNA, 1311 bp, Helicobacter pylori
  CDS (1)...(1311)
atgaattttcaagaaaatttagccgctttggatttggagtatctttggcacccttgttcgcaaatgcaagagcatcaaaatttccccattatccccattaaaaaggctcaagggatttacctctatgattttaatgataacgcttacatggatttgatcagctcatggtgggtgaatctttttgggcataataacgcctacatcagccagcaactcaaaaatcaaattgatgatttagagcatgtccttttggcttcttttagccataagcccattatcacgctctctcaaaggctttgccagctcactcatatggataaatgcttttatgcggataacggctcatcttgtgttgaaatcgctttgaaaatgagctatcacgcccattttttaaagaatcaaacgcgccgcaaaaagctttttttatcgctctctaattcctatcatggcgagactttgggagcgttaagcgtgggcgatgtgaaactttataaagacacttacacccctttattgctcaaaaatctcaccacacctgtgcctaaaaacgaccatgaaatagaaaatagtttgaacgctttaaagcgtttgttagacaagcatagtgaagaaatttgcgctttcattgcagagcctcttttgcaatgcgcagggaatatgcatatttatagcgcaagatatttaaaacaagccgttttattgtgcaagcaaaaaaacatccacattatttttgatgaaatcgctaccgggtttgggcgcacagggagcatgtttgcttatgaacaatgcgaaattaagccggattttttatgcttgtctaaggggattagtggggggtatttgcctttaagcgcactattaacccataatgaaatctataaccaattttacgccccctatgaagaaaataaagcgtttttgcattcgcacagctacacaggaaacgctttggcatgcgcatgcgcgaacgctacgctggatatttttgaaaaagaaaatgttattgaaaagaacaaggctttaagcgggtttatttttaatacgctccaaaacgcattaaaacccttgatggagcaacaagtggtgtctgatttaaggcatttgggcatggtctttgcctttgaagtctttattcaaaccaaagagcgtttgagtttggcggtttttaaaaaaactctaaaaaaaggcctgttattacgccctttaaacaacaccatttacctcatgcccccttacattatcacgcatgaagaagtcaaaaaggcggttgcggggctagtggaaattcttgatgagttaagaaaaggctga

SEQ ID NO: 7290 - DNA, 789 bp, Helicobacter pylori
  CDS (1)...(789)
atgaatggttccaatcacatgaaaaataaaaccctagtgatcagcggcgcgactagagggattggcaaggcgatatttgtacgcttcgctcaaagcggcgtgaatatcgctttcacttacaataaaaatgttgaagaagccaacaaaatcatagaagatgtggagcaaaaatattccattaaagccaaagcctactctcttaatgttttagagcctgagcaatacacggagcttttcaagcaaattgacgctgattttgacagagtggatttttttatttctaacgctattatttatgggcgttctgtcgtggggggatttgcaccgtttatgcgattaaaacctaaggggttaaacaacatttacacagccaccgtgttagcgttcgtcgtaggggctcaagaagcggcaaaacgcatgcaaaaaataggcggtggggcgatcgtgagcttaagttctaccgggaatctagtttatatgcctaattacgccgggcatggcaattccaaaaacgccgtagaaaccatggtcaaatacgctgccgtggatttaggcgaatttaacattagagtgaatgcggttagtggcgggcctattgatacggacgctttgaaagccttccctgattatgtggagattaaagaaaaagtagaagagcaatcgcccctaaaacgcatgggcaatcctaacgatctagccggagcggcttattttttatgcgatgagacccaaagcggttggcttacagggcaaacgatcgttgtagatggcgggactacttttaaataa

SEQ ID NO: 7291 - DNA, 1560 bp, Helicobacter pylori
  CDS (1)...(1560)
atgcttttgatcgttttttttaaattttattttcaatattcaattaaaaaaaaatcattttattttatttttgttataattcaagctatttttattttcaatctaaggaggtgtcgcatggacaatcaaaagataacgcatcaaaatatcacgcaaaaacaaggcgagcttaaaagagacatgaaaatgcgccatctcttaatgattgcatttggaggagcgatcggcacagggctttttgtaggcactgggggtaatattgcgagcgctggccctttagggaccttgatcgcttattgttttggagggcttgtggtctattgtatcatgctctctttaggcgaattggctagcgtttatcccactacaggaagttttggggattatgcggctaaattcataggccctggcacgggctatatggttttttggatgtattggcttggctgggtgatcacggtggcgttagaatacatcgctataggcatgctcatgcaacgctggtttgcggatattcccatccattattgggttattttatgcattgcgttagtttttttattgaactttttttcggttaaaatttttgccgagggcgagtttttctttagcctgattaaagttttagcggtgatcgcttttataggcattggcgcgattgggattatttatcaaatctattcgcatgggtttggttctatttttgataatttccattttggcgataaggggtttttccctaatgggagcgcagcggtttttagcgcgatgctcgctgttatttttgctttcactggcacagaggtgattggggtggctgtgggagagactaaaaacgctagcgaagtgatgcccaaagcgattaaagcgaccttgtggcggattgtctttttctttttaggctctgtgtttgtcatttctgtttttttacccatgaatgattcttctatcacgcaaagcccttttgtgagcgttttagaacgcattaatttgccctttattggcatgggtatcccttatgtggctgatataatgaacgctgttatcattacggcgatgttttctaccgctaattcagggctttatggagcgagccgcatgatttatgggctgtccaaacaaaagatgttttttaaggttttttcccaactcaaccgacaaggcacgcccacttatgcgatgtttttttccctttctttttctctcatagggcttttagtccaaatttatgccaaagaaaatgtcgtggaagctttgattaatgtgatcagtttcacggtgattattgtgtgggttagcgtgtctgtttcgcaatattctttccgcaagcaatacttaaaagccgggcattctttagaggatttgccttataaagccccctttctaccctttttgcaactcatagggatcactgggtgtgccatcggcgtgattggttcggctatggataaggatcaacgcattgggatgattttaacgattgttttcgctgttatttgttacattggatactattttacacaaaaagctaatgaaaataacaaaaaagatttgatataa

SEQ ID NO: 7292 - DNA, 1074 bp, Helicobacter pylori
  CDS (1)...(1074)
atgaaaggattagaaagagaatcgcatttcacgctcaatgagaatgcgatgttttttgagtgtgcttatagttgcgataacgctttgtttttgcaattagacgatcgctcgttttttatcactgattctcgctacactcaagaagctaaagaaagcgttcagcctaaaaatggcgttttagcggaagtggtagaatctagcgatttagtgcaaagcgcgattgatttgattgttaaaagttcggttaaaaaactcttttttgaccccaatcaagtgaatttacaaacctacaagcgtttaaattcagcgcttggggataaggttgctttagagggcgtgcctagttaccaccgccaaaaacgcatcattaaaaacgagcatgaaatccaacttctcaaaaaatctcaagcgctgaatgttgaagcttttgaaaattttgccgagtatgtgaaaaagatttttgatgaaaaagagtcgttgagcgagcggtatttgcagcataaggttaaggactttttgactagagagggggtttatgatctgagctttgagcctattttagccttgaatgcgaacgcgagcaagccccatgctttgcctagtgcgaaggattttttaaaagcggagcacagcattcttttggatatggggatcaaatacgaacgctattgctctgataggactcgcacggctttttttgaccctaaagattttgtctttaaaagagagcagagtttcaaggataaagagcgtcaaaagatttatgacattgtgaaagaagcgcaagaaaaggctatttcaggcattagagcgggcatgaccggtaaagaagcggacagcttggctaggggagtgattagcgattatggttatgggcaatatttcactcacagcaccgggcatggcattggcttagacatccatgagcttccctatatttcatcgcgcagtgaaaccattttagaagagggcatggtgttttctgtagagcctgggatttatatccctgggttttttggggtgcgcattgaagatttagtggtgatcaaaaattctaggtctgagcttttgtga

SEQ ID NO: 7293 - DNA, 1989 bp, Helicobacter pylori
  CDS (1)...(1989)
atgcaattagacgaagatttagaattcgctaaaaaaatctttaaccctaacagagcgtttgccaagcaagccaggattaaaaacatgtgcgaatataaagatttagtgcatgaagccaatgaagattatgaacatttttggggcgatttagccaagcagaaactcacatggtttaaaccttttgataaggttttaaacagcgataacgccccttttttcaaatggtttgaaaacggcaaaatcaatgtttcttacaattgcatagacaggcatttaaaagacaaaaaaaataaagtggcgatcatttttgaaggggaaatgggggattataatgtcatcacttacagaaaactccactctgaagtcaataaaacagccaaccttttaaaaaacgaattcaatgtcaaaaaaggcgatagggtcattatctatatgcccatgattgtagaaagcgtttatatgatgctcgcatgcactaggattggagcgatccatagcatcgtttttgctgggtttagccctgaagccttaagggataggatcaacgacgctcaagctaaattagttatcacagcggatgggacttttagaaaaggcaaaccttacatgctcaagccagcccttgacaaggctctagaaaataacgcctgccctagcgtggaaaaagcgctcattgtgatacgaaacgccaaagagattgactatgtgagagggcgcgattttgtctataatgaaatggtcaattaccaatccgacaaatgcgaacctgaaatgatggactctgaagatcctttattcttgctctatacaagcggatcaaccggaaagcctaaaggcgttcaacacagcagtgcggggtatttgttatgggcgcaaatgacgatggagtgggtttttgatattagagataacgataatttttggtgcaccgccgatattggctggatcacagggcacacttatgtggtttatggacctttagcttgtggggcgacgactttgatactagaaggcacgatgtcttatccggattatgggagatggtggaggatgatagaagaataccgtgtggataaattctacacttcccctaccgctataagaatgttgcatgccaaaggtgaaaacgaaccctcaaagtataatttagagtcgctcaaagttttaggaacggtgggagagcccattaaccctacagcatggaaatggttttatgaaaaaatcggcaactcaaaatgcagcatcgtggatacttggtggcagacagaaacaggcgggcacatcatcagccctttaccgggagctacgcctataagggccagttgcgcgactttacctttgcctggaatccatgcggaagttttaaacgaagacggcactaaaacaaagcctggagagcaagggtttttatgcatcactaagccatggccttctatgataagaaacatttggggcgatgaaaaacgatacattgatagctatttttctcagatcaagttgaatggggaatatgtctacctctctggagatggcgctatcgtggatgaaaacggatacattactattattgggcgcacagatgatattgtgaatgtgagtgggcataggattggcacggctgaagtggagagcgctatttccaagcatgaaatggtggctgaatgcgcggtggtgggtatccctgatgcgattaaaggagagggcttgtttgcgtttgtggtgctgtgcgatggggctaaatgcaatcttggcgagagtttagaattgctaaaagaaatgaaccatatcttatccattgagattggaaagatcgcgaaattagacaatgtcatgtatgtgccaggtttgcctaaaaccaggagcgggaaaatcatgagaaggcttttgaaatccatcgccaaaaaagagcctatcactcaagatttaagcacgctagaagatgtgaatgtggttaaagaaataatgagcatcgctcaaatggaggagtaa

SEQ ID NO: 7294 - DNA, 2835 bp, Helicobacter pylori
  CDS (1)...(2835)
atgagtggtatggttgatttaaaagaatttttagccgagcttggtaagacccaaaaagagcttaaaaatgtgatcgagcaagccaaagacattggtttagagcttaagacaaattctaaaatgaccccagagcaagcaggcaagctatacaaatacattgtggatggcattaaagaacaaatacaagccaatcaacccgctaaaaatcctgaacaagacaataaagacgatttgaatacagccgtagcgtctaaatctcttaacaaaaaggtttccaaaacgcctaaaaaagaagaaacaaaaagccagccaaagcccaaaaaaactaaagaaaagaaaaaagaagctcccacgcccattgctaaaaagaagggagggatagagattgtcaacacttttgaaaaccaaacgccccctacagaaaacacccctaaagtggttagccattctcaaatagaaaaagccaagcaaaaactccaagaaatccaaaaaagccgagaagccctaaacaagctcacccaaagcaacgctaacaacgccagtaacgctaacaacgctaaaaaagaaatcagcgaagttaaaaagcaagagcaagagatcaaacgccatgaaaacattaaaagacgcaccggttttagggtgattaaacgcaacgatgaagtagaaaatgaaagtgaaaacagcgtaacagaaagcaaaaaacccactcaaagcgcggcggctatttttgaagacattaaaaaagaatggcaagaaaaagacaaacaagaggctaaaaaagccaaaaaacccagtaagcccaaagccacccccaccgccaaaaacaacaaatcccataaaattgattttagcgatgcgagggattttaagggcaatgatatttatgatgatgaaaccgatgaaatcttattgtttgatttgcatgaacaagataatttcaataaggaagaagaagaaaaagaaatccgccaaaatatcaacgacagggtgcgcgtccaaagaaaaaacccttggatgaatgaaagcgggatcaaacgacaatccaagaaaaaacgcgcattccgtaacgataacagccaaaaagtgatccaaagcacgactgcaatccctgaagaagtgcgcgtctatgaattcgcgcaaaaagcgaatttgaatctagctgatgtgattaaaaccctctttaatttagggcttatggtaactaaaaacgactttttggataaggatagcatagaaattttagccgaagagttccatttagaaatttctgttcaaaacactttagaagaatttgaagtagaagaagtgctagagggggtgaaaaaagagcgcccgcctgtggttactatcatggggcatgttgatcatggtaaaacttcactgctggataaaatccgtgataaaagagtcgctcacacggaagctggggggatcactcagcacattggcgcttacatggtagaaaaaaatgacaaatgggtgtctttcattgacaccccagggcatgaagcctttagccagatgcgtaatcgtggggctcaagtaacagatattgcagtgattgtgatagcggctgatgatggggtgaagcagcagactattgaagctttagagcatgcaaaggccgctaatgtgcctgtgatttttgcgatgaataaaatggataagcctaatgtgaatccggacaaactcaaagccgaatgcgctgagcttggctataaccctgtggattggggcggggagcatgagtttatccctgtttcagctaaaacgggcgatggcattgacaatttattagaaaccattctcattcaagcgggtattatggaattaaaagccatagaagagggcagcgctagagcggttgttttagaagggagcgtggaaaaagggcgtggggcagtagccacggtgattgtccaaagcgggactttaagcgtgggagatagtttttttgctgaaacggcgtttggtaaagtaagaaccatgactgacgatcaaggcaagagcattcaaaatttaaaaccctctatggtggctctcatcacaggcttaagcgaagtgccgcctgcgggatctgttttaataggggtagaaaacgattccatcgcgcgcttgcaagctcaaaagagggcgacttatttacgccaaaaagcgttgagtaaaagcactaaagtgtcttttgatgagctttcagaaatggtcgctaataaggaattgaaaaatattcctgtagtcattaaagcggatacgcaaggaagcctagaggccattaaaaacagcttgttagagcttaataacgaagaagtggcgatccaagtgatccactcaggggtggggggtattactgagaatgatttgagcctggtttctagcagtgagcatgcggtgattttaggctttaatatccgccccaccggtaatgtgaagaataaggctaaagaatacaatgtgagcattaaaacttacacggtgatttatgccttgattgaagaaatgcgatcgctgttattaggcttgatgagccctattattgaagaagagcataccgggcaagcggaagtgagggaaacctttaatatccctaaagtgggtacgatagccgggtgtgtggtgagcgatggggtgatcgctcgtggcattaaggcgcgtttgattagggatggcgtggtgattcataccggcgaaatcctttctttgaaacgctttaaagacgatgtgaaagaagtttctaagggttatgagtgcgggatcatgctagacaattataatgagattaaagtgggtgatgtgtttgaaacctataaagaaatccataaaaaaagaactctctaa

SEQ ID NO: 7295 - DNA, 813 bp, Helicobacter pylori
  CDS (1)...(813)
atgagcatgcaaaccgccccaattaaaaagatcactctcaaccacctccaagctaaaaaaaatcaagaaaaaatcatcgctattaccgcttatgatgcgctgttcgctcaaatatttgatccgctagtggatgtgattttagtgggcgatagtttgaatatgagttttttcaatcaaaacgacactttaagcgcgagtgtggaaatgatgctctatcacaccaaagccgtgtgcgcgggcgctaagactccttttatcatcacagacatgccttttggaagctataaagatgaaaaaacagccctaaaaaacgccattagggtttataaagaaacccaagcgagcgcaatcaaattagagggggggaaagaaaaagcgaaactggttaaaacgctcactaatgagggcgttattgtggtagggcatattggcttgatgccccaattcgtgcgccttgatggaggttataagattaagggcaaaaatgaagaacaacaaaaaaagcttttagaagacgccttgagtttagaagaagctggggtgggtttgttggttttagagggtataaccacccctatcgctcaaaaaatcacgcaaaaaatcaaaatccccacgatcggcatagggagcggtaaagattgcgatgggcagattttagtgtggagcgatatgttaggcttttttgatagctttaagcctaaattcgtgcgagaataccttaaggggaaagaattgattcaaaacgctatcaaacaatacgctgatgatgtgaaaaagggaaacttccctaacgaattagaaagttatcattaa

SEQ ID NO: 7296 - DNA, 1899 bp, Helicobacter pylori
  CDS (1)...(1899)
atgaaaccaacgaacgaacctaaaaaacctttttttcaaagtcccattatccttgcggttcttggagggattttactcatcttttttctacgctctttcaattctgatggcagtttttcggacaatttcttagcttctagcactaaaaatgtgagctaccatgaaatcaaacagctcatcagcaataatgaagtggaaaatgtgagtatcggtcaaactttgatcaaagccagccataaagagggcaacaatcgtgtgatctatatcgctaaacgggtgcctgatttgaccttagtgcctttgttagacgagaaaaaaatcaattattctggttttagcgagtctaacttttttacggacatgctagggtggctcatgcctattttagtgattttagggctatggatgtttatggcgaaccgcatgcaaaaaaatatgggtgggggtatttttggcatggggagcgcgaaaaaactcattaacgctgaaaaacccaatgtgcgttttaatgacatggcaggcaatgaagaagccaaagaagaagtggtagaaatcgtagatttcttaaaataccctgaacgatacgccaatttaggggctaaaatccctaaaggcgtgttattagtagggcctccaggaaccggtaaaacccttttagccaaagcggtagccggcgaagcgcatgtgccgtttttctctatgggagggagcagtttcattgaaatgtttgtgggcttaggggcaagcagggttagggatttatttgaaaccgctaaaaaacaagcccctagcatcatttttattgatgaaattgatgccataggtaagagccgagcggctggaggcgtggtgagcgggaacgatgaaagagagcaaaccttaaaccagctcttagccgaaatggatggttttgggagcgaaaatgcgcctgtaattgtcttagccgcaacgaaccgccccgaaatcttagatccggcgttaatgcgtccagggcgctttgacaggcaggttttagtggataagcctgattttaatggtagggtagaaatcttaaaagtgcatattaaaggcgtgaaacttgctaatgatgtgaatttgcaagaagtcgccaaactcactgcagggcttgcaggagcggatttggcgaatattatcaatgaagccgcacttttagcaggaagaaacaaccaaaaagaagtcaggcagcaacatttaaaagaagcggttgaaagagggattgcagggttagaaaagaaaagcaggcgcatcagtcctaaagaaaagaaaatcgtcgcctaccatgaaagcgggcatgccgtgatttctgaaatgactaaagggagtgctagggtgaataaagtctctatcattccaaggggcatggcggctttgggctacacccttaacacgcctgaagaaaacaaatacttgatgcaaaagcacgaactcatcgctgaaattgatgtgcttttaggcgggagagcggctgaagatgtctttttggaagaaatttctaccggtgcgagcaacgatttagaaagggcgactgatattattaaaggcatggtgagttactacggcatgagtagtgtcagtgggcttatggtattagaaaaacaacggaacgcctttttaggaggcggttatggaagcagtagggaatttagcgaaaagaccgcagaagaaatggatcttttcattaaaaacctgttagaagaacgctataagcatgtcaaacaaaccttaagcgactatagagaagcgattgaaatcatggtcaaagaattgtttgacaaagaagtcattacaggcgaaagggtgcgtgaaatcatcagcgaatacgaagtcgccaacaatttagaaagccgtttgatccctttagaagagcaagcgagttaa

SEQ ID NO: 7297 - DNA, 1656 bp, Helicobacter pylori
  CDS (1)...(1656)
ttgaaactctttttcaagcgttattctaaataccttaaagagcattataaaagttttatagtggttttattttcttctttagtggtggctttaagcacggcttgggggacttatttagtcaagcccactttagatgaaatttttatcaataaagacactcacatgctcaaaatcctgccttttttagtgattttggcgtatttgggtaagagtgggggcatgtatttaggcacttatttcaccaacttcattgggcttgatattgtcaaaaaaatacgcaacactatgctagaaagccttcttaaaatggaaatggatttttttaacaggacgaaaaagggcgaattgatcgcaaggatcaccaatgatataggtttgattagagcgagtttgtccaattacctttcagagagcataagagaggggctaacgattgttgggttagtgggggtggtgatctatcaaagccctaaattagcgttagtggggttagtcatcatgccgttagctgctattcctatcagtaaaatcattcgtaaggttaaaaaactcgctaaatcccatcaagagagtaacgccaaaatcaccgctcgtttgagtgaagtttttaacaacgtggaagcgattaaaatctctaatggcgaaaaattagagcataaggcttttgtgaaagaaaatgaagcgttttttaaaatcggtatcaaaaacatcgccgtggctgaaatttcttcgcctttaatggagtttttaggttcaatcgctatagcgctagtgatttatttaggggggaatgaagtgattagaggccatattagcgtgggggcgtttttttctttcattacggccctttttatgctctatacgccgattaaacgcttaactaggattgtttctaattttcaagaagccttagtcgctagcgacaggatccatgagattttagaaagagagccggctattgttgatggggaattgacgctaaataacgccatacacaccatagaatttaaaaaggtatggctggcttatacgctagacaatcaagagcgttatgttttaaacgatattagtttgaagttccaacaaaatgaaatcatcgctttaaagggcgaaagcgggagcggtaaaagctcattagtgaatctgatcttacgcctttatgagccaagcaaaggcgaaattttcatcaacgatcaaaaaatagagagcatcactcaaaaatccttaagagaaaagattagcgttgtcactcaaagggtgtttatttttaacgggagcgtggctgaaaatgtggcgtatggtttagaaattgatgaggtaaaaatcaaagaatgcctaaaaaaagctcaagccttagattttgttgaaaaaatgcctcatgggatagagagcgttttagatgaatttggcgctaatcttagcggcggccaacgccaaagaatcgccattgcaagagctttgtataaagacgttcaagttttaatctttgatgaagccacttccgctttagacaataacacagaagagagcgttaaacaaagcattttagaattgaaacaaaaccgcttgatcattcttatttcgcacaacccaagcacgctaaaattagccactaagcatgtgaaattagagcatgggcgtttgacagaatgctaa

SEQ ID NO: 7298 - DNA, 1926 bp, Helicobacter pylori
  CDS (1)...(1926)
atgcgattgagtaacgctgacttagaacgattaaaaagcatggcgaatgcacttcgctttttgtgtgcggacatgatagataaggctaatagcgggcatccgggcgtgtgcttgggattagctgatgtgatggtggttttaagcttgcacctaaacctaaaccccactaaccctaaatggctcaatagggataggctggtttttagcggagggcatgcgagcgcgttagcgtatagtttgttgcatttgtggggctttgatttgagtttagaagatttaaagcgtttcaggcaattacactctaaaaccccaggacaccccgaattgcaccacaccgaaggcattgagatcaccacaggtcctttggggcaaggttttgctaacgctgtgggctttagcatggcgagccaatacgctcaaaaccttttggataaagaagccatttctcataaagtctattgcttgtgtggggatggggatttgcaagaaggcattagttatgagagcgcttctttagccgggcaccttcgccttgataacctcattgtgatttacgacagcaaccagatcagcattgaaggcgctatcaatattagttttagcgaacaggttaaaacgcggtttgtggcgcaaaattgggaagtgctagaatgcgatgggcatgactatcaagcgattcataacgctttagaagaagccaaaaaatccaccaaacccacgcttttaatcgctcatacgattattggtaagggggctgttggcttagaggggagtgaaaaaacgcatggctcgcctttaaataaagaagtgttaaaacaatccaaagaaaacgctcaaatcaatcctaacgaaagctttatcattagcccaaaaaacaaaatgcattttgaagaagtgaaagttaggggcgttagtttagaagccttatgggaaaaatccttaagccctaaaataaaagaaaagatccatgcgttaaaggattttgattttagcgccatccattaccccacctttaaaaaaggcgaatctctagccacgagagtgagtaacggcatgattttaaacgctatcgctaaagaatgcgagggctttttaggggggagcgcggatctagccccctctaacaacacgcagttaaaacactctggcgatttccctttagggcaaaacttgcattttgggatcagagagcatgccatgggggctatcactaacgctttagcggcgtatggcttgtttgtgcctttttgcgcgaccttttttgtgtttagcgattacttgatgcccagcattcgtttgagcgctttaatgaaactgaaagccctttttatcttcacgcatgacagcattggcgtgggtgaagatggagcgacgcaccagcccatagagcaattgaaccatttacgcgctttgcccaatttctatgctttcagacccagcgacgcttttgaaaatacggcttgcatgcaaatagcgttaagtttgaacgctcctagtgggcttattttatcacgccagaatttacccgtgcttgatgaggtttctaaagagcgggttttaaaaggggcgtatgttaaacaccattctaaagatcccattatcacgcttgttgcgagcgggagcgaagtgtctttggctttagagagcgctaaaattttagagcgagaaaatatccaaacgcaagtcatcagcgcgccatgctttgacttgttgatagagcaagatgaaagctatcttaaagaactttttaagggtaaagtcttagtcattgaagcgagccgcgcgatagagtggtatcgttttgcggataaaatcattggcatggattcttttgggagctcagcaaagggcgataaactctttgaaaaatttggctttagcgttgaaaacattaccgctcaagcgaaaagattactcaacgcatga

SEQ ID NO: 7299 - DNA, 2577 bp, Helicobacter pylori
  CDS (1)...(2577)
gtgcaaccgatgaaatctaaaaaactttatttggctttaatcataggggttttattagcgtttttaaccctatcttcatggctgggtaatagcggtttagtggggcgttttggggtgtggtttgccgcactcaataaaaaatattttgggcatctttcattcattaatttaccctatttagcatgggttttattccttttatacaagactaaaaacccttttacagaaatcgttttagaaaaaactttagggcatctattaggcattttatctttgctctttttacaatctagcctattaaatcaaggggaaatcggcaacagcgcgcgtttgtttttacgcccttttataggggattttgggctttatgcgctgataacgcttatggtagttatttcttatttgattctattcaaactaccccctaaaagcgttttttatccttatatgaacaaaacacaaaaccttttaaaagagatttacaaacaatgcttacaagcctttagccctaattttagcccaaaaaaagagggttttgaaaacaccccatcagatattcaaaaaaaagaaaccaaaaacgacaaagaaaaagaaaaccgcaaagaaaaccctattaatgaaaaccacaaaacccctaacgaagaaccgtttttagcgatccctaccccctataacacgactttaaatgattcagagccgcaagaaggcttagtccaaatttcctcccacccccctacccattacaccatttaccctaaaagaaaccgatttgatgatttgactaaccccactaacccccctttaaaagaaattaaacaagaaactaaagaaagagaacccacgcctacaaaagaaactcttacgcccaccacgcccaaacctatcatgcccacacttgcacccataatagaaaatgacaacaaaacagaaaaccaaaaaacccccaaccaccctaaaaaagaagaaaacccacaagaaaacacgcaagaagaaatgatagaaggaaggatagaagaaatgataaaggaaaatctaaaaaaagaagaaaaagaagtgcaaaacgctccaaactttagcccagtaacccccacaagcgctaaaaaacccgttatggttaaagaattgagcgaaaataaagagatattagacggattggattatggcgaagtgcaaaaacccaaagattatgagcttcccaccacgcaattattgaatgcggtttgtttgaaagacacttctttagacgaaaacgagattgaccaaaaaatccaggatctattgagcaaactgcgcacctttaaaattgatggcgatattatccgcacttattcaggccctattgtaaccacttttgaattccgcccagcccctaacgttaaggtgagtcgtattttaggcttgagcgatgatttagcgatgactttatgcgctgaatccatccgcattcaagcccctattaagggtaaagatgtcgttggcattgaaatccctaacagccaaagccaaattatttatttaagagaaattctagagagcgaattgtttcaaaaatccagctcgcccttaactctagctttaggcaaagacattgtgggtaaccctttcatcacggatttaaaaaagctcccccatttgctcatcgctggcacgacaggaagcggtaagagcgtgggcgtgaatgcgatgattttatccttactttataaaaaccctcccgatcaactcaaattagtgatgatcgatcccaaaatggtagaatttagtatttatgcggatatccctcatttgctcacgcccattatcaccgaccctaaaaaagctattggggctttgcaaagcgtggctaaagaaatggaacgccggtattctttaatgagcgaatacaaggttaaaaccattgattcttataatgaacaagccccaagtaacggcgttgaagcgttcccctatttgattgtggtgattgatgaattagcggatttaatgatgacagggggcaaagaagcggagtttcctatcgctagaatcgctcaaatggggcgcgcgagcggcttacacctcattgtagcgacccaacgcccaagcgtggatgtcgtaaccggcttgattaaaaccaacttgccttcaagggtgagttttagggtaggcactaagattgattctaaagtgattttagacactgatggggcgcaaagcttgttaggaagaggcgatatgctctttacccccccaggagcgaacgggttagtgcgcttgcatgccccctttgccactgaagatgaaatcaaaaaaatcgtggattttattaaagcccaaaaagaagtacaatacgataaagatttcttgctagaagaatcacgcatgcctttagacacccctaattatcaaggcgatgacattttagaaagggctaaagcggtgattttagaaaaaaagatcacttctacgagttttttacaacgccaattaaaaatcggctacaaccaagccgctaccattactgacgaattagaagctcaaggctttttatccccaagaaacgctaaaggcaacagagagattttgcaaaacttttag

SEQ ID NO: 7300 - DNA, 1827 bp, Helicobacter pylori
  CDS (1)...(1827)
atgcctaagcattctttagaacaaatcaaagaaaaaattacagagcgtagcaaaaaaaccagagagctttatttagaaaatatctttaaccctaaaaaccagcccaagattgagagcttgggttgcgcgaatattgcgcatgttacggcgagcatgccagagcatttaaaaatgcctttaggttcgcataaaagaaagcattttgcgattatcacggcttataatgacatgctttcagcccaccaaccttttaaaaattaccctgacttgattaaaaaagaattgcaagagcataacgcttatgcgagcgttgctagtggggtgccagcgatgtgtgatggtatcacgcaaggttatgatggcatggaattgagcttattcagtagagatgtgatcgctctaagcaccgccgtggggttaagccataatgtttttgacggggcgttttttttgggcgtttgcgataaaatcgtgccaggcttactcataggagcgttaagctttgggaatttagcgagcgtgtttgtgccaagcgggcctatggtgagcgggatagaaaattataaaaaagccaaagcacgccaagattttgcaatgggaaagatcaacagagaagagcttttaaaagtggaaatgcaaagctatcatgatgtgggtacttgcactttttatggcacggctaattctaatcaaatgatgatggagtttatggggttacatgtggctaattctagctttatcaaccctaacaaccccttacggaaggttttagtagaagagagcgctaaaagattagcgagcgggaaggttctgcctttagctaaactcattgatgaaaaaagcattcttaacgctcttataggcttaatggcaaccggaggttctaccaaccacactttgcatttgatcgctatcgctagatcgtgtggggtgattctcaattgggacgattttgacgctgtttctaatctcataccccttttagctaaagtctatcctaacggatcagcggatgtgaacgcttttgaagcctgtgggggcttagtgtttgtgatcaaggaattattaaaagaggggcttttatttgaagacactcataccatcatggatacagaaacgcaaaaaggcatgcaaaattacaccaaaaccccctttttagaaaacaaccaattggtgtataaagacgccatcaatcatagcctgaatacggatattttacgccctgttagtgatccttttgccgctaatggggggcttaaaattttaaagggtaatttagggagggccgtgattaaaatctcagccattaaagatgagcataggaaagttaaggctagagcgattgtttttaaaacccaaagcgagtttttagaacgctttaaaaataaagaattagaaagggactttgtggcggtcttgcctttccaagggcctaagtctaacggcatgccagaattgcacaaactcaccacgaatttaggggctttgcaagatatgggctataaggtcgcgctggttacggatgggcgcatgagcggggcgagcgggaaagtgcctagcgcgatccatttaagccctgagggagcgttaaatggggcgatcattaagattaaagatggcgatttgatagaattagacgctcctaataacgctttgaatgtgcttgaaaaggattttgaaaagagaggtatcaaccccttgtttttagaaaccttagaaaatttagaaaagccgagttttgggttgggtagggaattgtttacgagtttgagattgaatgttaatacggctgaagagggcggcatgagttttggtataaaggtataa

SEQ ID NO: 7301 - DNA, 1278 bp, Helicobacter pylori
  CDS (1)...(1278)
atgttagattttgatttggttctttttggcgcgactggggatttagccatgcgaaagctctttgtttcgctctatgaaatttatactcattatggttttaaaaacgattctaggattatcgcatcggggcgtaaggagctatccaatgaagaatttttaacactcctttgtgagaaaacacaactgcattcaagagaaaagggtagggaatttttagcccatatcagttatttgtgcgttcgtttggataaccctaaagactttgaagaattgagtaaaatcgctacaaaaaataaacccttgattttctacttttctatctcgcctagtttttttgcaacgaccgcccaacatttggccaaaaacgcgctcaatcacgccaacacacgcttgattttagaaaagcctttagggcatgatttaaagacatgtaaagagattttccaaagcattagcgttttttttaaagaagaacaaatctttagaatcgatcattatttagggaaaaagggcgttcaaaatatccttgaattgcgcctgaataaccctattttaaatattttatgggatcaaatcagcgcagttgaaatctgcgtgtatgagactttgggggtggaagaaagaggcgaattttacgataaaatcggggctttaagggatatggttcaaaaccatctcttgcaagttttatcccttatcgctacagatttacccaacaatttaaaggatttgaggaaagaaaaaatcaaagttttaaaaaccttacaaccccctaaagattttaaaaaacaggttattcgggcccaatatcaaggctatagagatgaaaataaggtccataaagagagccagacagagacttttgttgctattaaagcctttttggatacgcccaaatttaaaggcgtgcctttctaccttaagcacgctaaaaaaatgccccacaaccaagcgagcgtgaaaatccattttaacgcggtcaatacgctagaatttttcctctctcaagataaaatcaccctcaccctaaaagatcatcaaaacccccttattttagaaacccataacaaacaagaatttttacggccctacgctaaattgctctatgatgcgatacaaaataaccacaataatttcgcccaccagttggaattagaagcgtcatgggtttttattgacacgctcatagagggttttatgaataacgccacgcccttatattcctatgaaagccaccatctaaacgaatcagaatttttaaaaccactctatcaataa

SEQ ID NO: 7302 - DNA, 1323 bp, Helicobacter pylori
  CDS (1)...(1323)
gtgttagaacgctatgcgaatgaagaaatgaaagccctatggaatgagcaaaccaagtttgaaacctatttagaagtggaaaaagctgtcgttagggcgtggaacaagcttgggcaaatccaagatagcgattgtgaaaaaatctgtgcgaaagcggcattcaatcttgaacgcatcaaagaaattgaaaaaaccactaagcatgatttaatcgctttcactacttgcgtggctgaaagcttgggcgaagaatcccgctttttccattatgggatcacttctagcgattgcattgatacggctatggcgttattgatgacaaaaagcttaaaactcattcaaaaaggcgttaaaaacctttatgaaacccttaaaaacagggctttagagcataaagacacgctgatggtgggcagaagccatggggtgtttggcgaacccattacttttggcttagtgttagccctttttgctgacgaaatcaaacggcatttaaaagccttggatttaacgatggaatttatcagcgtgggagcgatcagtggggctatggggaatttcgcacacgcccctttagaattagaagaattagcgtgcgaatttttaggcttaaaaaccgccaatatcagcaatcaagtcattcaaagggaccgctacgctaggcttgcatgcgatctggctcttttggcgagcagttgtgaaaaaatcgctgtcaatatccgccatttgcaacgcagtgaagtctatgaagtggaagaagctttttcaacagggcaaaaagggagctctgcgatgcctcacaaaagaaaccccatattgagcgagaatatcaccgggctttgcagggtgattcgctcttttacgacccctatgctagaaaatgtcgccttatggcatgaaagagacatgagccatagctctgtggagcgttttgccttgcccgatctgtttatcactagcgattttatgctcagccgcctgaatagcgtgattaaaaatttggtggtttatcctaaaaacatgcttaaaaatttagctttgagtggagggttagttttttcgcaacgggtgttattggaattgcccaaaaaaggtttgagccgagaagaaagctattctatcgtgcaagaaaatgcgatgaaaatatgggaggttttgcaacaaggcgcttttaaaaacactgatgaaaatttgtttttaaacgccctactcaacgatgaacgcttgaaaaaatatttgagcgaagatgaaatcaaagcatgttttgattacaattattacactaaaaatgtgggggcgatttttaaaagggtgtttgaataa

SEQ ID NO: 7303 - DNA, 1512 bp, Helicobacter pylori
  CDS (1)...(1512)
atgtcccaactaaaattggaagaaatcagctcggttattgaagaaaaaatcaagaattttgaacttgattgcgatatggctgaagtaggaaaagtcgtttcatacgctgatggtgtggctaaggtttatggcttaaatggtgtgatgtcgtatgaagtgctggagtttgaaacaggggataaaggcgttgcggctaacttagaagaagatagcgttggcgtgattgtgtttggttttggcaacaatattaaagaggggactagcgttaaacgcacgaagagtttgatgaaagttcctgttggcgatgcggttgtagggcgtgtgctaaacgctttgggtgagcctattgatggcaagggtgagatagaaacgaatgagtttagcctaatagagcaaaaagccccgggcattatggacagaaaatctgtgcatgagcctttgcaaacaggcattaaagccattgatgcgttagtgcctattgggcgcgggcaaagggaattgattattggggataaacaaaccggtaaaaccaccgtagcgatcgatgcgatcattaaccaaaaagggcaaaatgtgatctgtatctatgtggctattgggcaaaaagaatccactgtcgcgcaagtggtccgcaaattagaagaatatggggcgatggaatacagtgtcgtgatcaacgcttcggcttcagattcagctgcaatgcaatatttagccccttattcaggtgtggctatgggggaatactttagagatcatgcccgccatgccctaatcatttatgacgatttgagtaaacatgctgtcgcttacagagagatttctttgattttgaggagacccccaggtagggaggcttttcctggagatgtgttttatatccactcacggcttttagaaagagcggctaaactttgcgatgaaaagggtgccggctctttgaccgcactccctattgtggaaactcaagcgggcgatgtttcagcttatatccctacgaatatcatttctattacagacgggcaaattttcttagaaacggatttgttttattcagggattcgcccggctattaatgtgggcttgtcggtttcaagggttggaggggccgctcaaatcaaagcgaccaagcaggtttcagggactttgcgcctggatttagcgcaatacagagagttgcaagccttcacgcaattcgcttctgatttagatgaagcgagtaaaaagcaattagaaagggggcaacgcatggtggaagtgctgaaacaagccccttattcgcccttgcccattgaaaagcaagtggtcattatttatgctggggctaagggctttttagatagcgtgagcgtgaaaaaagtcgtggattttgaagagcaactgcaccctttcttggaagcaaaatacccccaagttttagaagaaatccacactaaaaaagcgctagataaggatttagaagccatgctaagaaaagtcttagaggaatttaagctcacttatagcgagtag

SEQ ID NO: 7304 - DNA, 357 bp, Helicobacter pylori
  CDS (1)...(357)
atgaaaaaccgctacattcagcagtttgaagacgctcaattaaaagacaagaccatgccagcatttaaagccggcgatactttgaggcttggtatcaccattaaagaaggcgaaaaaacacgaactcagtattttgaaggcgtgtgcattgcgattagaggcaatggtgtggataagactttttgcgtgcgtaaaataggggctaacaatatcggcgtggagaaaattttccctttttatagcgaaagtttggcgagcgttgaggtgttgcgtgtgggtagggtgcgccgtgcgaagctctactacttgcgcgataggagaggtaaggcagcaaggattaaagaagtccgccattaa

SEQ ID NO: 7305 - DNA, 690 bp, Helicobacter pylori
  CDS (1)...(690)
gtgaaattcagcgttttaacccttttcccgcaactcgtatggccttattttgaagattctattttaaaaagagcgttagaaaaaaatctttttgaattggaagtgttaaaccttagggattttagcgctaataaatatcaaaaagcggatcacacgctcattggtgggggtgcagggcagattttagaccctgagatggtagaaaacgcgctccactctgttaaaaaccctaaacacacgatttttttaagcgcggtgggcaagcctttcaagcaaacagatgcgatgcgtttggctcaaaaaaagcatgtcgttttggtgtgcgggcgttatgagggctttgatgaacgctctattgaacttggtgctgatgaggttttttgtataggcgattttattttaacagggggcgagcttggggcgttgtgcttgatagatagtatcgctcgccacattcaaggggttttgggtaacgctcaatctttagaaaatgagagctttgaaaaccattatttggaagcccctaatttcgctaacgctgtttttaaatccaaagaaatcaataaaatccctgcacctttagaatattctaaaggaaatcatgctaaaatcaagcaactgaaacttgatttgtcaaaattaaggacgaaattttaccgccttgatttattcaaacagcacaaatcatga

SEQ ID NO: 7306 - DNA, 231 bp, Helicobacter pylori
  CDS (1)...(231)
atgacagtcattagactcactcgtatcgggagaaagaaaaagcctttttacagagtggtggtaaccgattctaggaaaagaagggatggaggctggattgaatccattgggtattacaaccctttaagcgagcctaaagatattaaaattgataaggagcgcttgaattactggaaaggcgtgggggctaaaatgagcgagagggtggaaaaactttctcaaaaagcctaa

SEQ ID NO: 7307 - DNA, 747 bp, Helicobacter pylori
  CDS (1)...(747)
atgagcgtgattttagaaaccaaagggttaaaaaaaacctatcaaaaccatttggttttagacggcatcaatttcactttaaataagggtgaagtggcagtgattttagggcctagcgggtgcgggaaaagcacttttttaaaatgcctaaacgggcttgaaaagattaatgaaggtgaaatcctttttgaaaacactaaccttaacaataaggccactaactggaatcaaatgcgccaaaaaataggcatggtgtttcaaaattatgaattgttcccgcatttaaatgtgttagataatatcttactcgctcctatgaaagtgcaaaaacgatccaaagatgaggttatttctcaagccatagagcttttaaagcgagtgggtttggagcataaacaacaagcttaccctaaagaattgagcggcggacaaaaacaacgagtagcgatcgtgcgctctttatgcatgcgaccaaaaatcatgctttttgatgaagtaaccgcctctttagaccctgaaatggttaaagaagttttagaagtgattttagaattagccacaacaggcatgagcatggtgattgtaacgcatgaaatgaaattcgcgcaaaaaatcgctcataaaatcgtgttttttgatagcggtaaaatcgctgaagaaaacaacgctaaagaattttttaaccacccgaaatctcaaagagcgcaaaaatttttagaaactttccattttttagggagctgttaa

SEQ ID NO: 7308 - DNA, 1257 bp, Helicobacter pylori
  CDS (1)...(1257)
atgatttttagctctctttttagtgttgtagggatggcggtgctttttcttattgcttgggtgttttctagcaataaaagggctattaattatcgcacgattgtcagtgcctttgtgattcaagtggctttaggggcgttggctttatatgtgcctttgggtagggaaatgctgcaaggcttagccagcggcatacaaagcgtgatttcttacggctatgagggggtgcgttttttatttggcaatctcgctccaaacgctaagggcgatcaagggataggggggtttgtctttgcgatcaatgttttagcgatcattatcttttttgctagcttgatttcacttctatattatttaaaaatcatgcctttatttatcaatctcatcggtggggcgttgcaaaaatgcttaggcacttctagagcagaaagcatgagtgcagcggctaatatttttgtagcgcacaccgaagcgcccttagtcattaaaccttatttgaaaagcatgagcgattcagagatttttgcggtcatgtgcgtgggcatggctagcgttgcggggcctgtgttagccgggtatgcgagcatgggcattcctttgccttatttgatcgccgcttcgtttatgtccgctcctggggggttgttgttcgctaaaatcatttacccacaaaacgaaaccatttctagccatgcagatgtttctatagaaaagcatgtcaatgccatagaagctatcgctaatggggcaagcacagggctaaatttagccttgcatgtgggagcgatgcttttagcctttgtggggatgctcgcgctcattaacgggcttttaggggttgtagggggttttttaggcatggagcatttgtctttagggttgattttaggcacgctcttaaaacccttagcctttatgttaggcattccttggagccaggccgggattgccggagaaatcataggcattaaaatcgcgctcaatgaatttgtgggctatatgcagttattgccttatttgggcgataaccctcctttaatcttgagcgagaaaactaaagcgatcatcacttttgcgttgtgcgggtttgctaatttaagctcagtcgctatgctcattggagggcttggcagtttagtgcctaaaaagaaggatctcattgtaaggcttgctttaaaagcggtgcttgtaggcacgctttctaatttcatgagcgcgactatcgccgggttattcatagggctaaacgctcattaa

SEQ ID NO: 7309 - DNA, 1329 bp, Helicobacter pylori
  CDS (1)...(1329)
atgattacccctaaagtgttgagcgggtttaaagaccgcttgcctaaagatgcgatacaaaaagcccagttgcttgcgaaagtttcagtcgtgtttcaaagttttggttttgtgccgattgaaacccctcatttggaatacgctcaaacgttattgcctgatgcgagcagtgatattcaaaaagaaatttatcgttttaaagaccatggggatagagatgtggctttaaggtttgatttgactgtgccattagcccgctttgtctctttgcaccaccaaacgctaggcatgccctttaaacgctacgctataggcaatgtctttaggggcgaaagggcgcaaaaagggcgttatagggaatttacgcaatgcgattttgattttatagggagcgagagtttggtgtgcgatgctgagatcattcaagtgattgtcgcttctttaaaagccctagatttagaagatttttgcgtctctatcaaccacagaaaaattttgaacgggatatgcgaatattttgggatctctcaagtgaatgaagcgttgcgcattgtggataaattggaaaaaattggcttgaatggggttgaagaagaattaaaaaaagagtgcggtttaaattcaaacaccattaaagagcttttagaattaattcaaatcaaacaaaacgatttaagccatgcggaattttttgaaaaaattgcttatttgaaagactataatgaaaatctaaaaaaaggcatacaggatttagaaaggctataccagttgctaggggatttgcaaatttctcaaaacctgtataaaattgatttttctatcgctaggggattagggtattatacagggattgtgtatgaaaccacgcttaatgaaatgaagtctttagggagcgtgtgttcaggggggcgttatgatcatttgactaaaaatttttctaaagagaatttacaaggggtaggggcttctattgggattgatcgattgattgtggctttgagtgaaatgcaattattagacgagcgctccacccaagccaaagttttaatcgcttgcatgcatgaagagtatttttcttacgccaaccgcttagcggagtctttaaggcaaagcgggatttttagtgaagtctatccagaagctcaaaaaatcaaaaaacccttttcttatgccaaccataaagggcatgagtttgtggctgtcattggcgaagaagaatttaaaagcgaaactttaagcttgaaaaacatgcattcaggcatgcagttgaattgcttgagttttttaaaagcccttgaaatcattggagaaaacgatgaagacttataa

SEQ ID NO: 7310 - DNA, 990 bp, Helicobacter pylori
  CDS (1)...(990)
atgcaacagcgtcatttaggccctttaaaagtgggtgcattagctctagggtgcatgggcatgacttatgggtatggggaagtccatgataaaaagcagatggttaaacttatccataaggctttggaattgggtattaacttttttgacactgcagaggcttatggggaagataatgaaaagcttttaggcgaagcgatcaagccttttaaagacaaggttgtggtagcgagcaagtttgggatttactacgcagatcctaatgacaaatacgcaaccatgtttttagactccagtcctaaccgcattaagagcgccattgaagggagtttgaaacgcttaaaagtagaatgcattgatttatactaccaacaccgcatggatactaacacgcccataggagaagtggcagaagttatgcagcttcttattaaagaaggaaaaattaaagcttgggggatgagtgaggcagggttatctagcatccaaaaagcccatcaaatttgccctttaagcgcgttgcagagcgaatattccttgtggtggcgcgaacctgaaaaagagattttaggttttttagaaaaagaaaaaattggatttgtcgctttttcgcctttgggtaaggggtttttaggcgcgaaatttgaaaaaaatgccactttcgctagtgaggattttagaagcgtttctcctaggtttaatcaagaaaatctagccaaaaattacgccttggtggaattaatccaagatcatgcacacgctaaaggcgttacaccagcccaactggctctctcatggattttgcacacgcaaaaaatcattgtccctctctttggcaccaccaaagaatctaggctcatagaaaatataggggctttgcaggtttcttggagtcaaaaagaattggagattttccaaaaagaattgactgcaatcaaaatagaaggggcccgctaccctgaaagaatcaatgaaatggtgaatcaataa

SEQ ID NO: 7311 - DNA, 468 bp, Helicobacter pylori
  CDS (1)...(468)
atgagaagaagaaaagcacccgttagggaggttttgggcgatcctgtttatgggaacaaagtggttactaagtttatcaataagatgatgttcgacggcaagaaaagcgtagcggaaaaaatcatctacaaagcttttaataagattgaagaaaaaagcggtgaaaaagggattgaagtgtttgaaaaagccctagaaagagtgcgtcctttagtggaagtgcgcagcagaagagtgggtggggctacctatcaagtgccggtagaagtgagagcgagccgccagcagtcgctatctattcgttggattttagaagcgaccagaaaacgcaatgaaagaatgatggtggatagattggctaacgagcttatggatgcggctagcgataagggtgcggcttttaagaaaaaagaagatgtgcataaaatggcagaagcgaataaagcgttcgcacactaccgctggtaa

SEQ ID NO: 7312 - DNA, 408 bp, Helicobacter pylori
  CDS (1)...(408)
gtgcctactatcaatcagctgattagaaaagaaaggaaaaaggtggttaaaaaaaccaaatcacctgcattagtggaatgccctcaaaggagaggggtttgtactagggtttatacgactacccctaaaaagcctaactcggctttaagaaaggttgccaaagttcgtttgaccagtaaatttgaagtgatcagttatatccctggtgaagggcataacttgcaagaacactctattgtgttagtgcgtgggggtagggttaaggatttacccggtgtgaaataccacatcgttcgtggcgctttagacactgcaggggtcaataaaagaacggtttcacgctctaagtatgggactaaaaaagctaaagcgaccgacaagaaagcaaccgacaacaagaaaaaataa

SEQ ID NO: 7313 - DNA, 8673 bp, Helicobacter pylori
  CDS (1)...(8673)
atgtcaaaaaaaattcccctaaaaaaccgcttgagagctgattttacaaaaaccccaacagatttagaagtccctaatttattattattacaacgagacagctatgattctttcttgtattctaaagagggtaaagagagcgggattgaaaaggtttttaaatccattttccctatccaagatgagcataaccgcatcactttagaatacgcgggttgcgaatttggcaagtctaaatacaccgttagagaagcgatggagaggggcattacctactctatccctctcaaaattaaggtgcgcttgatcttgtgggaaaaagataccaagagtggcgaaaagaacggcattaaggatattaaagaacaaagcattttcattcgtgagatccctttgatgacagaacgcacttcatttattattaatggggtggagcgcgtggtggtcaatcaactccacagaagccccggtgtgattttcaaagaagaagagtctagcacttctttaaacaagctcatttacacagggcaaatcattcctgataggggttcgtggttgtattttgaatacgattctaaagatgttttatacgctcgtatcaataaacgccgtaaagtgcctgttaccattttattcagggcgatggattatcaaaaacaagacatcatcaaaatgttctacccgcttgttaaagtgcgttatgaaaacgataaatatttgatcccgtttgcttcattagacgccaatcaaagaatggaatttgacttgaaagatcctcaaggcaaggttattcttttagcgggtaaaaagctcacttcaagaaagattaaagagcttaaagaaaaccatttagaatgggtggaataccctatggatattttactcaatcgccatttagctgagcctgttatggtagggaaagaagtcttattggacatgctcactcagctagataaaaacaaattagaaaaaatccacgatttaggcgtgcaagaatttgtgatcatcaacgatctggcgttagggcatgacgcttccattatccaatctttttcagccgattctgagtctttgaaattactcaagcaaaccgaaaaaattgatgatgaaaacgctctagcggcgattcgtatccataaggttatgaaaccaggcgatcccgttacgactgaagtggctaagcagtttgtcaaaaaacttttctttgatccagaacgctatgatttgaccatggtgggccgcatgaaaatgaatcacaagttaggcttgcatgtgcctgattacattacgactttaacgcatgaagatattatcaccaccgttaaatacctcatgaagatcaaaaacaatcaaggcaagattgatgacagggaccacttgggcaatcgtaggattagggcggtaggggaattgttggccaatgaattgcattcaggtttagtgaaaatgcaaaagaccattaaagacaagctcactaccatgagcggggcttttgattcgctcatgccccatgacttggtcaattctaaaatgatcacaagcaccatcatggaatttttcatgggcggtcagctctcgcaatttatggatcaaacgaatcccttgagtgaggttacgcacaagcgccgcctttcagcgctcggcgaaggggggttggtgaaagacagagtggggtttgaagccagggatgtgcaccccacgcattatggccgaatttgtcccattgagaccccagaaggtcaaaatatcggtctgatcaacaccctttccactttcacaagagtgaatgatttaggctttattgaagccccttataaaaaggttgtggatggcaaggtcgtgggtgagacgatttatttgaccgctattcaagaagacagccacatcatcgctcccgcaagcacccccattgatgaagaggggaatattttgggcgatttgattgaaacgcgcgtggaaggcgagatcgttttaaacgaaaaaagcaaagtaaccttaatggatttaagctctagcatgctagtgggggtagccgcatcgctcattcctttcttagagcatgatgacgccaaccgtgccttaatggggactaacatgcagcgccaagcggtgcccttattaagaagcgacgctcccattgtaggcacggggattgaaaaaattattgctagggattcttggggagcgatcaaagccaatcgcgcaggcgttgtagaaaaaattgattctaaaaatatttatattttaggcgaaagcaaagaagaagcctatattgatgcgtattctttgcaaaaaaacttgcgcaccaaccaaaacaccagtttcaatcaagtccctatcgttaaagtgggcgataaagtgggagccgggcaaatcatcgctgatggccctagcatggatagaggcgagttggcgttagggaaaaatgtgcgcgtggcgttcatgccttggaatggctataactttgaagacgcgatcgtggtgagtgagtgcatcactaaagatgatattttcacttccacccacatttatgaaaaagaagtggatgctagggagcttaagcatggtgtggaagaatttaccgctgatattcctgatgtgaaagaagaagcgctcgctcatcttgatgaaagcgggatcgttaaagtcggtacttatgtgagcgctggcatgattttggtgggcaaaacttctcctaaaggcgagattaaaagcacgcctgaagagcggcttttaagggctatttttggggataaagccgggcatgtggtcaataagagtttgtattgccctcccagtttggaaggcacggtgattgatgtgaaagtcttcactaaaaaaggctatgagaaagacgcgcgagttttgagcgcgtatgaagaagaaaaagccaagcttgatatggagcattttgatcgcttgaccatgctcaatagagaagaattgttgcgcgttagctcgctcctttctcaagcgattttagaagagcctttcagccataacggcaaggattataaagaaggcgatcaaatccctaaagaagaaatcgcttcaatcaaccgcttcactttggctagtttggtcaaaaagtattctaaagaagtgcaaaaccactatgaaatcactaaaaacaatttcttagagcaaaagaaagttttgggcgaagagcatgaagaaaagctttctattttagaaaaagatgatattttgcctaatggcgtgatcaaaaaagtcaagctctatatcgctacaaaacgaaagcttaaagtgggcgataaaatggcaggaaggcatgggaataaagggattgtgtctaatatcgtgccggttgcggatatgccttataccgctgatggcgagcctgtagatattgttttaaaccctttaggcgtgccaagccgcatgaatatcgggcagattttagaaatgcatttaggcttagtggggaaagaatttgggaagcaaatcgctcgcatgctagaggataaaaccaaagattttgccaaagaattgcgtgctaaaatgctagaaatcgctaacgctattaatgaaaaagaccccttgacaatccatgcgcttgagaattgttctgatgaagagcttttggaatacgcaaaagattggagcaagggcgttaagatggctatccctgtgtttgaaggcatctcgcaagaaaaattttataagctatttgaattagctaagatcgctatggatggcaaaatggatctgtatgacggacgcacaggcgagaaaatgagggagcgcgtgaatgtgggctacatgtatatgatcaaactccaccatttagtggatgaaaaagtccatgccagaagcacaggcccttatagcttagtaacgcaccagcccgtggggggtaaagcgctctttgggggtcaaaggtttggggaaatggaagtgtgggccttggaagcttatggcgcagcgcacactctaaaagaaatgctcaccattaaatccgatgatattagaggcagagagaacgcttatagggctatcgctaaaggtgagcaagtgggcgagagtgaaatccctgagactttctatgttttgactaaagaattgcaatcgctcgctttggatattaatatttttggggacgatgtggatgaggatggagcacctaaacccattgtcattaaagaagatgacaggcctaaagactttagctctttccagctcacactagctagccctgaaaaaatccattcttggagttatggggaagttaaaaagccagaaacgatcaattatcgcaccctaaaacctgaacgagacggcttgttttgcatgaaaatctttggccccactaaagattatgaatgcttgtgcggcaaatacaaaaagcctcgcttcaaagacattggcacatgcgaaaaatgcggcgtggcgatcacgcactccaaagtcaggcgttttagaatggggcatattgaattggccactcctgtagcgcatatctggtatgttaattccttgcctagccgtatcggcacgcttttaggcgttaagatgaaagacttagagcgcgtgttgtattatgaagcttatatcgttaaagaaccaggcgaagccgcttatgacaatgaaggcactaagcttgtgatgaaatacgatattttgaatgaagagcagtatcaaaatatctcacgaagatacgaagacaggggctttgtagcgcaaatgggcggtgaagcgatcaaggatttgttagaagaaattgatttgatcaccttattgcagagtttgaaagaagaagtgaaagacaccaattctgatgcgaaaaagaaaaaactcattaagcgtttgaaagtggtagaaagctttttaaattctggtaataggcctgaatggatgatgctcacggttttaccggtattgccaccggatttaaggcctttagtcgcgctagatggcgggaagtttgcagtcagcgatgtgaatgaattgtatcgtcgtgtcatcaatcgtaaccaacgcttgaaacgcttaatggagcttggagcgccagaaatcattgtgcgcaatgaaaaaaggatgttgcaagaagccgtggatgtgctttttgataacggccgcagcactaatgcggttaaaggggctaacaaacgccctttaaaatcgctcagtgaaatcattaaaggcaagcaggggcgtttcaggcaaaaccttttaggtaagcgcgtggatttttcaggcagaagcgtgattgtggttgggcctaatctcaaaatggatgaatgcgggttgcctaaaaacatggcgttagaactcttcaaaccgcatttgttatccaagcttgaagagagaggctatgccaccacgctcaaacaggctaaacgcatgattgagcaaaaaagcaatgaagtatgggagtgcttgcaagaaatcacagaggggtatccggtgctactcaaccgcgctcctaccttgcacaagcaatccattcaagcgttccatccaaagctgattgacggcaaagcgatccaattgcacccgttagtgtgttcagcgttcaacgccgattttgacggggaccaaatggcggtgcatgtgcctttaagccaggaagcgatcgctgaatgcaaggtgctgatgctaagctctatgaatatccttttgcctgctagcggtaaggccgtagccattcctagccaagatatggttttagggctttattatctttctttagaaaagagcggggtcaagggcgagcataagcttttttctagcgtgaatgaaatcatcaccgccattgacacgaaagaattagacatccacgcaaagattagggttttagatcaagggaatattatcgctacgagtgcagggcgcatgatcattaagtccattttgcctgattttatccctacggatttgtggaacagacccatgaagaaaaaagatattggcgtgcttgtggattatgtgcataaagttggcggtatcggtattactgcaacctttttggataatttaaaaacgcttggctttaggtatgcgactaaggctggtatttctatctctatggaggatattatcacgccaaaagacaagcaaaaaatggtggaaaaagccaaagtagaggttaaaaaaatccagcaacaatacgatcaagggctgctcactgaccaagagcgttacaataagatcattgacacttggactgaagtcaatgacaaaatgagtaaagaaatgatgaccgctatcgcgcaagataaagagggctttaactctatttatatgatggcagatagcggcgcaaggggtagcgcggcgcaaatccgtcagctttcagcgatgaggggtcttatgacaaagccggacggcagtatcattgaaacgcccattatttctaactttaaagaggggttgaatgtcttagaatacttcaattccacgcatggcgctagaaagggcttagcggatacagcgctaaaaacagccaatgcggggtatttgaccagaaagctcattgatgtttcgcaaaatgtcaaggtggtgtctgatgattgcggcacgcatgaagggattgaaatcacggatattgcggtggggagtgagctgattgaacctttagaagagcgtatttttgggcgcgttttattagaagatgtgatcgatcccattacgaatgaaatcttgctttatgcggacactttgattgatgaagagggtgctaaaaaggtggttgaagccgggattaaatccattacgatccgcaccccagtaacttgtaaagcgccaaagggcgtgtgcgcgaaatgctatggcttgaatttgggcgaaggcaagatgagttatccgggtgaagcggtgggcgtggtagccgcgcaatctattggggagcctggaacgcagctcactttaaggactttccatgtgggcgggacagcgagcaggagtcaggatgagcgcgaaatcgtagcgagcaaagaaggttttgtgcgtttttacaaccttaggacttacacgaataaagagggtaaaaacattatcgctaaccgccgtaacgcttctattttagtggtagagcctaagattaaagcgccttttgatggggaattacgcattgaaacggtttatgaagaagtcgttgtgagcgtgaaaaatggcgatcaagaagctaaatttgttttaaggagaagcgatattgtcaagccaagcgaattagccggcgttggcggtaagattgaggggaaagtgtatttgccttatgctagtgggcataaggtgcataaggggggaagtatcgctgatattatccaagagggctggaatgtgcctaatcgcatcccttatgcgagcgaattgctagtcaaggataatgaccctattgcgcaagatgtgtatgccaaagaaaaaggcgtaatcaaatactatgttttagaggctaaccatttagagcgcacccatgggatcaaaaagggcgatatggtgagtgaaaaaggcttgtttgcggtgatagctgatgataatggtagggaagccgctcgccattatatcgctaggggttctgagatcttgattgatgataatagtgaagtgagcactaatagcgtgatttctaaacccacgactaacactttcaaaacgattgccacatgggatccttacaacacccctatcattgcggactttaaaggtaaggtgggttttgtggatgttatcgcaggggttacggtcgctgaaaaagaagacgaaaataccggtatcacaagcttagtggtgaatgattacattccaagcggatacaaaccaagcttgtttttagagggggctaatggcgaagagatgcgttatttcctagagccaaaaacctctatcgccattagcgatggctctagcgtggagcaagctgaagtgttagcgaaaatccctaaagcgaccgttaaatctagggatattaccgggggtctcccaagggtttcggaactctttgaagcgagaaaacccaagcctaaagatgtggcgatcctttctgaagttgatgggattgtgagttttggcaaacccattcgcaataaagaacacatcatcgtaacttctaaagatggccgttccatggattattttgtggataaaggcaagcaaattttagtgcatgccgatgaatttgtgcatgcgggagaagcgatgacggacggagtaatttcaagccatgatattttaaggatcagtggcgaaaaagagctttataaatacattgtgagcgaagtccagcaagtgtatcgcaggcagggggtgagcattgcggacaagcacattgaaatcattgtttctcaaatgctaagacaggtgcgtattttagacagcggggatagcaagtttattgaaggggatttagtcagtaaaaaacttttcaaagaagaaaacgctcgtgtgatcgctttaaaaggcgagccagcgattgctgaaccggtgcttttagggatcactagagcggctattgggagcgatagcatcatctcagcggcctctttccaagaaacgactaaagttttaacagaagccagtatcgctatgaaaaaagactttttagaggatttgaaagagaatgtggtgttggggaggatgatccctgtgggaacaggcatgtataagaataaaaaaatcgtgttaagagcgcttgaggataactctaaattttga

SEQ ID NO: 7314 - DNA, 495 bp, Helicobacter pylori
  CDS (1)...(495)
atgcaaaaacaacatcaaaggcagcataaagtagagctagtcgctaacttaaagtcgcaatttgcagatgccaaagcccttttaatttgcgattataagggtcttagcgtgagaaaattggaagctttaaggaataaggctcgcaatcaaggcattaaagtgcaagtgattaagaacactcttgctcatattgccatgaaagagaccggctattctgatttggatttgaaagaaaccaatgtgtttttgtggggcggtgatcaaatcgctctctctaaactcgtgtttgatttccaaaaagagcataaagatcactttgtgttgaaagcgggcttgtttgataaagaaagcgttagcgtagctcatgtggaagcggtttcaaaactcccgagcaaagaagagcttatgggaatgttgctttctgtttggacggctccagcacgctattttgtgaccggtttagacaatttgcgtaaagcgaaagaagaaaactaa

SEQ ID NO: 7315 - DNA, 705 bp, Helicobacter pylori
  CDS (1)...(705)
gtggcaaaaaaagtatttaaaagattggaaaaacttttttctaaaattcaaaacgataaagcgtatggcgtagagcagggtgtagaggtggttaaatctctcgcttcagccaaatttgatgaaaccgtggaagtagcgttaaggctaggggttgatccaaggcatgcggatcaaatggtacgcggtgcggtggtgcttcctcatggaacagggaaaaaagtaagagtggccgtttttgcaaaagacattaagcaagatgaagccaaaaacgctggggctgatgtcgttggcggagacgatttggctgaagaaatcaaaaatggtcgtattgattttgacatggtgatcgcaacgcctgatatgatggcggttgtcggtaaagtgggtaggattttaggccctaaaggtttgatgccaaaccctaaaaccggaaccgttacgatggatattgctaaagcggtcagtaacgctaaaagcggtcaagtgaatttcagggtggataaaaagggcaatgttcatgcccctattggtaaggcgagttttcctgaagaaaaaatcaaagaaaacatgcttgagttggttaaaacgatcaaccgcctaaaacccagtagcgcgaaaggcaagtatattagaaacgccgctctttcgctcaccatgtccccttcagtgagtttggacgcgcaagaattgatggatattaaatag

SEQ ID NO: 7316 - DNA, 426 bp, Helicobacter pylori
  CDS (1)...(426)
atggctaaaaaagtagtcggagaaatcaaacttcaaatccctgccggtaaggcaaacccttcacctcccgtagggccagcgttgggtcaaagaggggttaatatcatggaattttgtaaggcttttaatgagagaactaaagacatggggagttttaatatcccggtgattatcacggtttatcaagacaaaagttttacctttatcactaaaaagcctccggtaacggatttgatcaaaaaagcttctggggttgaaaaaggttctgacaacccgctcaaaaataaaattgcaaagctcacccacaagcaagtggaagagatcgcgcaattgaaaatggaagatttaaacacaagcaccatggaagcggccaaaaaaatcgttatgggcagcgctaggagcatgggcgtagaagttgtggattga

SEQ ID NO: 7317 - DNA, 531 bp, Helicobacter pylori
  CDS (1)...(531)
atgatggattggtatgccatacaaacttattcagggagcgagcagtccgttaagaaagcgattgagaatctagcgaacgaccataatataagagataggatacaagagatcattgtgcctactgaagatattatagaggtttctaaaaaaagcaagacgaaagtaacggaacgaagcctttatcctgggtatgtttttattaaggtggatttagatacggttttgtggcataagatacaatctttgccaagagtgagtcgttttattggagaaaacaaaaagccaaccccattgagtgaagcggatattgggcatattttagaaaaaatgaataaccgagcagcccccaagcccaaaatcttttttgagcaaggcgaagtggtgcgcgtggtggaaggcccttttgcaaactttaccgctacggtggaagagtatgatgtggaacatcgcaagctcaagctcaatgtttctatttttggtaggaacactccaatagagattttgcattcgcaagtggaaaaaattatataa

SEQ ID NO: 7318 - DNA, 1200 bp, Helicobacter pylori
  CDS (1)...(1200)
atggcaaaagaaaagtttaacagaactaagccgcatgttaatattggaaccattgggcatgtagaccatggtaaaacgactttgagtgcagcgatttcagcggtgctttctttgaaaggtcttgcagaaatgaaagactatgataatattgataacgcccctgaagaaaaagaaagagggatcactatcgctacttctcacattgaatatgagactgaaaacagacactatgcgcatgtggattgcccaggacacgctgactatgtaaaaaacatgatcaccggtgcggcgcaaatggacggagcgattttggttgtttctgcagctgatggccctatgcctcaaactagggagcatatcttattgtctcgtcaagtaggcgtgcctcacatcgttgttttcttaaacaaacaagacatggtagatgaccaagaattgttagaacttgtagaaatggaagtgcgcgaattgttgagcgcgtatgaatttcctggcgatgacactcctatcgtagcgggttcagctttaagagctttagaagaagcaaaggctggtaatgtgggtgaatggggtgaaaaagtgcttaaacttatggctgaagtggatgcctatatccctactccagaaagagacactgaaaaaactttcttgatgccggttgaagatgtgttctctattgcgggtagagggactgtggttacaggtaggattgaaagaggcgtggtgaaagtaggcgatgaagtggaaatcgttggtatcagacctacacaaaaaacgactgtaaccggtgtagaaatgtttaggaaagagttggaaaaaggtgaagccggcgataatgtgggcgtgcttttgagaggaactaaaaaagaagaagtggaacgcggtatggttctatgcaaaccaggttctatcactccgcacaagaaatttgagggagaaatttatgtcctttctaaagaagaaggcgggagacacactccattcttcaccaattaccgcccgcaattctatgtgcgcacaactgatgtgactggctctatcacccttcctgaaggcgtagaaatggttatgcctggcgataatgtgaaaatcactgtagagttgattagccctgttgcgttagagttgggaactaaatttgcgattcgtgaaggcggtaggaccgttggtgctggtgttgtgagcaatattattgaataa

SEQ ID NO: 7319 - DNA, 2067 bp, Helicobacter pylori
  CDS (1)...(2067)
atggattttatcaccatcaattctagtaacaaaaccgaagagttcgctctcaaacaagtggccaaacaagccaccagctctcttttataccgattaggaaaaaccattattttagcgagcgtgtgcgtggaaagagagcctgtgagtgaagattttctgcctttagtggtgcagtttttagaaaaatcttatgcagccggaaagatcccgggcggttttgttaaaagagaaggcagggcgcaagattttgaaatcttaacctctaggctcatagacaggactttacgccctttattccctaaagactaccgctaccctacacagatcactttaatggttttaagccatgatattgaaaatgacttgcaggtttctgctttaaacgccgcttcagccgctctctttttggcccatatcgctcctattaaaagcgtgagcgcttgcaggatcgctaggatggataacgaatttatcattaaccctagcgcaagccttttgaatcaatccagtttggatttgttcgtgtctggaacgaaagagagtttgaacatgatagaaatgcgctctttggggcaaaaattgaacgctttagaagagcctttaatgttagaagctttagaattggctcaaaaaagtttggaagaaacttgcacgctttatgaagagattttcacgccccaccaaaacgagctgtttttcaaagagagccaaggaatagtctttaatgaaaggctgttagatttattgaaaaatcagtattttgatgaaatcatcaaaggcattgaaagttctgctttgagcgagcgagaaaatgttttcaatgaaattgccagaaaaatcagtgaagcccactcagaattcagtttagaagaaattgaattgtctttagaaaaagtgaaaaagactgagataagacgcatgatcattaaggataaaatccgcccggataagcgcgcgttagaagaagtgcggcccattttgatagagagcgatttgctccctatggcgcatagctccattttattcactagggggcaaactcaaagcttagtggtaggggttttaggcacggataatgacgctcaaacccatgagagtttggagcataaagctcccattaaagagcgcttcatgtttcattataatttccctcctttctgcgtgggcgaagcgagttctattggcgcggcttcaaggcgtgaattagggcatgggaatttggctaaaagagccttagaaacgagcattaaaaataaagagcaggtgatacgattggtttctgagattttagaaagcaatggttcaagctcaatggcgagcgtgtgcgcaggctctttagccctttatgcaagcggtgtggaaatttacgatttagtcgctggggtggctatgggcatggtgagcgaagggcaagatcacgctattttaagcgatattagcggcttagaagacgcagaaggcgatatggattttaagattgctgggaatttagaaggcattacggccatgcaaatggataccaaaatgagcggtatcaagctagaaattttataccaagccttactccaagccaaagaagcacggaaacatattttaaaaatcatgcatgaagcgaaagaaaagattgtgatcaatttttcccatttgcccacaacggagatttttaatgtcgcacccgataaaattgtagaaattatcggtcaaggggggcgtgtgattaaagagatagtagaaaagtttgaagttaaaattgatttgaacaaaccgagcggtgaagtgaaaatcatggggaataaagagcgcgttttaaagactaaggaatttattttaaactacttgcattctttagatcaagaattggagcaatacgctattgatgaggtattagaagctcaagtgaaacgaatcgtggattttggggcgtttttaagcttgcctaaggggggcgaaggcttgttaagaaagcaaaacatggacaagtgtcaagtggttttaaaagaaggcgatagcatcaggtgtagggtgattagcttcaataagggtaaaatcgctttagatttggcttaa

SEQ ID NO: 7320 - DNA, 705 bp, Helicobacter pylori
  CDS (1)...(705)
ttggacaacactctcaaacatcttgccattattatggatggtaatggcaggtgggctaaattaaagaataaagctagggcttatggccataaaaagggcgtaaaaacccttaaagatatcacgatctggtgcgctaaccataagctagaatgcttgactttatacgctttttctacggaaaattggaaacgccctaagagtgaagtggattttttaatgaaaatgcttaaaaaataccttaaagatgagcgatccacttatttaaataataacatacgcttcagggcgataggggatttagagggcttttctaaagaattacgagatacgattttgcagcttgaaaacgataccaggcattttaaggattttacgcaagttttagcccttaattacggatctaaaaacgaactttcaagggcgtttaaaagcttgctagaaagcccgcctagccatataaaccttttagaaagtttagaaaatgaaatttctaatcgtttagacacgcatgatttgccggaagtggatttgttgttacggacagggggggaaatgcgcttgtctaattttttattgtggcagtccagctatgcggaattgtttttcacgccgattttatggcctgatttcacccctaaagatttagaaaacatcattagcgatttttacaaaagagtgcgcaaattcggggaattaaaatgctag

SEQ ID NO: 7321 - DNA, 1143 bp, Helicobacter pylori
  CDS (1)...(1143)
atgattgtaaaacgccttaaccctgatgcgctcaaaaacgctctgcaaaaaataggcccagaaaagatcgcgcaagatcgcatgcaccaaaaaggcgttagctttgtttttgaaatccaacatctgcccttaagcgcaacgctcattttaaagcaagaggccataagcgttgggggcgattttgccacgccaagagattgtattttagccaaagagcctttttatgatggggtgttgattgcgagcgctaagcaattagaacgcctgattgttaagtgccactcccaaccctttgggcttaaacatttagcgcaagaattaaaaagccacctcaaagcccctaagcctaacaccccacagatcatggcagttttaaacttgactccggatagcttctatgaaaagagccggtttgatagcaaaaaagcgcttgaagaaatctatcaatggctagaaaagggtatcacgctcattgatataggcgcggccagttcaaggccagagagtgaaatcattgatccaaaaatagagcaagatcgcttaaaagaaattttattagaaatcaaatcccaaaaactctaccaatgcgccaaattcagcatagacacctaccatgccacaaccgcccaaatggctttggagcattatttttccatccttaatgatgtgagcggttttaatagcgctgaaatgctagaagtcgcaaaagattacaagcccacttgcattttaatgcacactcaaaaaacccccaaagacatgcaagaaaatgttttttaccacaatttatttgatgaaatggatcgcttctttaaggaaaaactagaagttttagaaaaatacgtgctccaagatattattttagatattgggtttggattcgctaaattaaaagagcataatttagccttaatcaagcatttaagccactttctcaaattcaaaaaacccttattggtgggcgcgagtcgtaaaaacacgatcgggcttatcactgggcgtgaagttcaagaccggctcgccggcactttgagtttgcatttaatggcgttgcaaaatggagcgagcgttttaagagtgcatgatattgatgagcatatagatttaatcaaagtgtttaagagtttggaagaaacggattga

SEQ ID NO: 7322 - DNA, 2544 bp, Helicobacter pylori
  CDS (1)...(2544)
atggatattcgcaacgaatttttacaattttttcaaaataaagggcatgccgtttatcctagcatgcctttagtgcctaatgacgctaccttgctttttaccaatgccggcatggtgcaatttaaagatatttttaccgggattgtgccacgccctagcattcctagagcggcaagctcgcaattgtgcatgcgcgcaggcggcaagcataacgatttggaaaatgtcggttataccgcaaggcaccacacgctttttgaaatgctagggaatttctcttttggggattatttcaaagaagaagcgatcttgtttgcgtgggaatttgtaaccaagaatttagggtttaagcctaaagatttatacatcagcgtgcatgaaaaggacgatgaagccgttaaattatgggaaaagtttgtgcctgttgataggattaaaaaaatgggcgataaagataatttttggcaaatgggcgatagcgggccttgcgggccttgcagtgaaatttacattgatcagggcgaaaaacactttaaggggagcgaggattattttgggggcgagggcgataggtttttagaaatttggaatctggtgttcatgcaatacgaacgctctaatgatggcgttttatcccccttgccaaagcctagcattgatacaggcatgggattagaaagggtgcaagcgctattagaacataagctcaataattttgattcttcattatttgcgcccctaatggaagaaatcagcgagcttacaagcctagattatgcgagcgagttccagccaagctttagggtagtggccgatcacgcaagagcggtagcattcttgctcgctcaaggggtgcatttcaataaggaaggccgtggctatgttttaaggcgcattttaaggcgagccttaaggcatgggtatttaatgggcttgaaagaagcgtttttatacaaagtcgtgggcgtggtgtgcgagcaatttgctaacacgcatgcgtatttgaaagagtctaaagaaatggtggtaaaagaatgttttgaagaagaagagcactttttagagactttggaatcgggcatggaattgtttaacttgtctttaaagcatttgaatgaaaataaaatctttgatggcaagatcgctttcaagctttatgacacttttggtttccctttggatttaacaaacgacatgttaagaagtcatggggcgtgtgcggatatgcaaggctttgaattgtgcatgcaagagcaagtgaaacgctctaaagcttcatggaaaggcaaacaaaacaacgccgattttagcgctattttaaacgcttatgcacctaatgtttttgtggggtatgaaacgacagaatgttctgctaaagttttagggttttttgatagcgattttaaagaaataaccgatgcaaatcctaaccaagaagtctgggtgttgttagaaaaaacccctttttatgcagaaggtggaggggctataggcgataggggcgcgctttttaaagacaatggagaagtggctatcgtgttagatacaaaaaacttttttgggcttaatttttcactccttgaaatcaaaaaagcgctaaaaaaaggcgatcaagtgatcgcgcaagtgagcgatgagcgctttgaaatcgccaaacaccatagtgcgactcatttattgcagagcgctttaagagaagttttaggctcgcatgtgagtcaagcggggagtttagtggaatccaagcgattgcgctttgatttctcgcatgctaaagcgctcaatgatgaagagctagaaaaagtagaagatttagtcaacgctcaaattttcaagcacctaaatagccaggtggagcatatgcctttaaaccaagccaaagataagggagcgttagcgttattcagtgaaaaatacgctgaaaatgtgcgggtggtgagctttaaagaagcgtccattgaattgtgtgggggcattcatgtggaaaatactgggcttattggggggtttaggattgtaaaagaaagcggggtgagtagtggggtcagacgcattgaagcggtgtgcgggaaagccttttaccaactggctaaagaagaaaataaagagcttaaaaacgctaagactttattgaaaaataacgatgtgatcgccggtatcaataagcttaaagagagcgtgaaaaacagccaaaaagcccccgtttctatggatttaccggttgaaaaaatccatggcgtgaatttggtggtgggcgtagtggaacaaggcgacattaaagaaatgattgaccgattgaaaagtaagcatgaaagattgctcgctatggtgtttaaaaaagaaaatgagcgaatcactctcgcatgcggggtgaaaaacgcgcccataaaagcgaatgtgtgggctaatgaagtggcgcaaattttagggggcaaagggggcgggagaggtgattttgcgagcgctggaggcaaggatattgaaaatttgcaagccgcactcaatttagcgaaaaataccgctcttaaagctttagagggatag

SEQ ID NO: 7323 - DNA, 258 bp, Helicobacter pylori
  CDS (1)...(258)
atggaaagaaaacgctattcaaaacgctattgcaaatacactgaagctaaaatcagctttattgactataaagatttagacatgctcaagcacacgctatcagagcgctataaaatcatgccaaggagattgacaggcaatagcaaaaagtggcaagaaagggtggaagtagcgatcaaaagagcccgccacatggctttaatcccctacattgtggacaggaaaaaagtcgtggatagcccttttaaacagcactaa

SEQ ID NO: 7324 - DNA, 429 bp, Helicobacter pylori
  CDS (1)...(429)
atgaggcattatgaaacgatgtttattctcaaacctactttagtagaagaagagattaaatccaagattgagttttataaagaagtgatcactaagcatcacggcgtgattgaaacgagcctggatatgggcatgcgtaatttagcttatgaaatcaaaaagcacaaaagaggctattattatgtggcgtatttcaaagcggagccgtcaatgattgtagagcttgaacgattgtatcgcatcaatgaagacgtgttgcgtttcattgtgatcaaatacgaaagcaagaaagaagtggaagcgtggcatgcgttggtggatagggctaataaaaagccatcgcacgccaaagaaaaacacgaaaaaaccgaacacacgcattctcaccacacagaggaagcagaaagcgtaggatctcatagcgaataa

SEQ ID NO: 7325 - DNA, 1020 bp, Helicobacter pylori
  CDS (1)...(1020)
gtggttacaataacactaactaaaacaacgagaaacaacatgcataaaaaacgagtcttttcaggcatccaacctactgggcaaatccatttgggcaactatttaggagcgatcaagcattgggtagagatgcaagatgaatatgaaaaccttttttgcgtcgtcaattcgcatgcgatcaccctacccatagatcctgcatttttaaaatcccaaagctatgagctagtcaaattgcttttggcttgcgggattgatcctaagcaatcggggttattcattcaaagtgaagtggatgagcacccggctttagcatggctattaaattgtcaggtgtctatgggggaaatgcaaagaatgacgcaattcaaagacaagtctttaaaaaaccctaaaagcgtgaacgtggggcttttcaattaccctattttgatggcgtcagatattttgttataccaaagcgatttagtgccagtgggcgaagatcaaaaacagcatttagagctcacgcgaaacattgcagaaaaatttaacagggattttgggaactgctttaaagtgccagagcctttgatcgctaaagtgggggcaagggttatggggctagatgatccaaaagtgaagatgagtaaatcgcatcaaggggctaaccatgcgatttttcttctagatgagccagacattattgtaaaaaaaatcaaaaaagcggccactgattctatgggcgttattgcatttgatgaaaaaagagagggcatttttaaccttttaaatatctacatgcttttgagcaatgaaagcccagaaaacatagaagagcgttttaaaaataagggctatggggattttaaaaaggaattggctgaagtaatgattcaggctttaaaacccatccaagaaagatacaaagaaatcagcgatgatgaagtgaaagccattttaaatggcggagccgaaaaagccaggcctttagcgagagcgacttaccaaaaggctaaagaattgatggggttaatttga

SEQ ID NO: 7326 - DNA, 558 bp, Helicobacter pylori
  CDS (1)...(558)
atgttacaggccatttataacgaaaccaaagatctgatgcaaaaaagcattcaagctttaaacagggatttttccactctaaggagcgcgaaagtttcagtcaatattttagatcacatcaaagtggattattacggcacgcccacggcattaaatcaagtcggatccgtgatgagcttggatgcgaccacccttcaaatcagcccatgggaaaaaaacctgctcaaagaaattgaaagatccattcaagaagccaatattggtgtcaatcctaataacgacggcgaaacgatcaagctttttttcccgcccatgacaagtgagcaaagaaaactcatcgcaaaagacgccaaagcgatgggtgaaaaggctaaagtggctgtgaggaatatccgccaagatgctaacaaccaggtgaaaaaattagaaaaagacaaagaaatcagcgaagatgaaagcaaaaaagcccaagagcagatccaaaaaatcaccgatgaagccattaaaaaaattgatgaaagcgtgaaaaacaaagaagacgcgatcttaaaggtctaa

SEQ ID NO: 7327 - DNA, 549 bp, Helicobacter pylori
  CDS (1)...(549)
atgaaaaaagcgttaatatccaccctttttggtgttagtttggcgtttgcaaaaccttatacgattgataaggcaaactctagcgtgtggtttgaggtcaaacacttcacgttcaatgaaacaagaggcgcgtttgataattttgatggcaaaattgatctagagcccaacactaaaatgctcagcgtttttgaaggcaatattgatgtgaaaagcgtcaatactagggatagaaaaagagataaccacttgaaaacagcggacttttttgatgtggtaaaataccccaaagggagctttaaaatgaccaaatacgaagatggtaaaatctatggggatttgactcttcgtggcgtaaccaagcctgtcgtattggaagccaaaatccaagcccccttacaaaaccccatgaataaaaaagaattcatggtgttacaagctgaaggcaaaatcaaccgcaaggattttggtatcggtaaaacctttagcgatgctgtcgttggagatgaggtaaagattgagctcaaactagaagcttacgcccaataa

SEQ ID NO: 7328 - DNA, 627 bp, Helicobacter pylori
  CDS (1)...(627)
atggcaagatatagaggtgcagtagaaagactagaaaggcgttttggggtttctttagccttaaaaggtgaaaggcgattgagcgggaagagcgcgctagataaaagggcttatgggccaggccagcatgggcaaagacgcgctaagacttctgattacgggttgcaattgaaagaaaagcaaaaagctaaaatgatgtatggcatttctgaaaagcaattcaggagtattttcgtggaagccaatcgcttggacggcaatacgggtgaaaaccttatccgtttgattgaaagaagattggataatgtcgtctatcgcatggggtttgcgaccactagaagctctgctaggcaattggtaacgcatgggcatgtgcttgtggatggtaagcgtttggacattccctcttatttcgtgcgttcagggcaaaaaattgagatcaaagaaaaaaccaagagcaactctcaagtggtgcgcgcgatggaattgacagctcaaacagggattgtgccatggattgatgtggaaaaagataaaaaatacggcatcttcacccgctaccctgaaagagaagaagtggttgtccctattgaagaaagactcattgtagaattgtattctaagtaa

SEQ ID NO: 7329 - DNA, 396 bp, Helicobacter pylori
  CDS (1)...(396)
atggctaagagaaatgtaacggctaaaaagaaagtagtcaaaaagaatattgcgagaggggttgtttatatttcagcgacctttaacaacaccaacatcactatcactgatgaaatgggcaatgtgatttgctggagcacggcgggcggtttagggtttaaaggctctaaaaaatccaccccttatgcggcccaacaggctgtagaaagcgctctaagcaaggctaaagagcatggcgttaaagaagtgggcattaaggttcaagggccaggcagtgggcgtgagaccgccattaagagcgtgggcgcgacagagggcattaaagtgctttggattaaagacatcaccccgctccctcataatggttgcagaccccctaaaagaagaagagtgtaa

SEQ ID NO: 7330 - DNA, 363 bp, Helicobacter pylori
  CDS (1)...(363)
atggcaaggattgctggtgtagatttaccaaaaaagaagagagtggagtatgcccttacctatatttatgggattgggcttaagagttccagagagattttagaagcggtaggcatttcttttgacaagcgcgtgcatgaattgagcgaagatgaagtgtctagcatcgctaaaaaaatccaacaaagctacctagtagagggcgatttgcgtaaaaaagttcaaatggatattaaatctttaatggacttggggaattatcgtgggatcaggcatcgtaagggtcttcctgtgagaggtcaaaccactaaaaataacgctaggactcgtaagggtaagaaaaaaaccgtgggtagcaagtag

SEQ ID NO: 7331 - DNA, 114 bp, Helicobacter pylori
  CDS (1)...(114)
atgaaagtcaggccatcagtgaaaaagatgtgcgataactgcaaaatcattaaaagaaggggcgttattagagtgatctgcgctacccctaaacacaaacaaagacaaggataa

SEQ ID NO: 7332 - DNA, 219 bp, Helicobacter pylori
  CDS (1)...(219)
atggcaagagatgatgttatagaagtggatgggaaagtgattgaggcgttgcctaacgctacttttaaggtggagttagacaataagcatgtggtgttgtgccgtatttctggaaagatgcgcatgcactatattaggattgctttaggcgatagggttaagctagagcttacgccctatagcttagacaaaggtcggataacttttagatataaatga

SEQ ID NO: 7333 - DNA, 1263 bp, Helicobacter pylori
  CDS (1)...(1263)
atgaataaagctattgctagtaagatactcatcactttgggttttttatttctctacagagtcttagcttatatccccattcctggcgtagatttagcagcgatcaaggctttttttgacagcaattccaacaacgctttggggttgtttaatatgtttagcgggaatgcggtttctcgcttgagcatcatctcgttgggtatcatgccctatatcacttcttcaattatcatggagcttttgagcgcgactttccctaacctggctaaaatgaaaaaagagcgggatggcatgcaaaaatacatgcaaatcgtgcgttatttgaccattttaatcaccctaatccaagcggtgagcgtttcagtaggcttaaggagcattagtggaggagccaatggggcgatcatgattgatatgcaagtttttatgatcgtttcagcgttttctatgcttacaggaacgatgctactcatgtggataggggagcaaatcacgcaaaggggcgtggggaatgggatcagtctcattatttttgccgggattgtttcagggatcccatcagctatttcaggcacattcaatttggtcaatacgggcgttattaatatcttaatgctcattggtattgtgctgattgttttagcgactatttttgcgattatctatgtggaattagctgagcgcaggatccctatttcttatgcgcgtaaagtggtgatgcaaaaccaaaacaagcgcatcatgaattacattcctattaagttgaatttaagtggggtgatcccccctattttcgcttcagctttgctcgtgttcccttctacgattttgcagcaagccacaagcaacaaaaccttgcaagcggttgcggattttttaagcccgcaagggtatgcgtataatattttgatgttcttgctcatcatcttttttgcttacttttattcttctattgtgttcaattctaaggatattgcggataatttgaggcgtaatggcgggtatattccagggcttaggcctggagaggggacttcatcgtttttaaattctgtagcgagtaagctcactttgtggggttcattgtatttagcgctcatttctaccgtgccttggattttggttaaggctatgggcgtgcctttttactttggaggcacagcggtgctgattgtggttcaagtcgctattgacaccatgaaaaagattgaagcgcaaatttatatgagcaagtataaaactttaagcgcggtaggcttttaa

SEQ ID NO: 7334 - DNA, 408 bp, Helicobacter pylori
  CDS (1)...(408)
atgataatgggattagaaaatttaaaaccggctaaaggtagcgttaagaaaatcaaacgagtgggccgtggtcaaggaagcggcatgggaaaaacggccacaagaggcggtaaaggccaaaccgcaaggacaggctataaggctaaaagaggctttgaaggagggcaacaacccttacaacgccgtttgcctaaaataggttttaggactaaagattctcatatctattctatcaatgtggaaaagaatgaagcgattaaaaatttagaagaaatcactttttcaagcttgcgtgctttacaccatttccccctttatattgaaggcgtgaagttgatcggtaaagacgctaaaaacttggcttctaagattaaagatgagagaatcaaaacaagcgggcagaagtaa

SEQ ID NO: 7335 - DNA, 462 bp, Helicobacter pylori
  CDS (1)...(462)
atgacagaaaggaaaggtatggaagagattaacagagaagagtttcaagaagtcgttgtgaatattggtcgtgtaaccaaagtggttaagggcggtaggcggtttcgttttaacgctctagtggttgtgggcaataaaaatgggcttgtaggctttggtttgggcaaggctaaggaagtccctgatgcgattaagaaagcggtagatgatgcgtttaaaaacctaatccatgtaaccattaaaggcacgactatcgctcatgatattgagcataaatacaacgcaagccgtattttactcaaaccggcaagtgagggaacgggagtgattgctgggggttcaacgcgccctatcgtggaattagcaggcattaaggatattctcaccaaatctttaggctccaacaacccctataatgtggtgcgcgcgacttttgacgctttagcgaaaatcaaggcgtag

SEQ ID NO: 7336 - DNA, 360 bp, Helicobacter pylori
  CDS (1)...(360)
gtgatgaacgcgaaagcattgtataaaaagaaagccttaagagatcgccgaaaattaaggatcaaaagcaagctcttgggcgatgcgttaaggcctagggtgagcgtttttcgttcgaatcgctatttctatgcgcaagcgattgatgatgttaaacaaagcaccataacgcatattgatggcaggaaaatgggctttaaaaacacgcaagaagacgctaaaaaattaggtgctctctttgctgaagaattgaaaaaagcagggattgagcgagcggtttatgacaggaatggttatctctatcatggcgtggtggcagcgtttgctgaaagcttgagagagaacgggatcgctctatga

SEQ ID NO: 7337 - DNA, 537 bp, Helicobacter pylori
  CDS (1)...(537)
atgtcaagaatcgggaaaagaatcattgaaatcccaagctctgtgcaagcgagcgttgaagggagcaagcttctttttaaaaacagcaaagaaaagcatgagctagaaactcacaaccgggtgaaaatcacgcttgaaaacaaccaattgagcttccagcctgtgggcgaagacgcgcagtctagggcttattgggggacctatggggcgttagccaacaacattgtaataggcttaagcaccggctttagtaagactttagaagtcaatggcgtgggctataaggtggctttgggcaataaaactttggatttgagtttgggttttagccacccggtgaaataccccattccagcagggattgaaatggtggtggaaaaaaacacgatcacgatcaaagggagcgataagcaaaaagtagggcaagtcgccgctgaaatcaggagcttcagacccccagagccatacaagggcaagggcgtgaaatacagcgatgaagtcattattagaaaagctggtaaaacagctaaaaaataa

SEQ ID NO: 7338 - DNA, 396 bp, Helicobacter pylori
  CDS (1)...(396)
atggtaaatgatataattgcagattcattaactcgtttgagaaacgcttctatgcgccgcttagaattcacacagctttattacgcaaagatcgtggtttctattttagagatttttaaagaaaagggtttcattaaagatttcaatgtcaaagataaagacaagaaacaatcggtttatgtgcaattggcttatgatgaaaaagggcattcaaaaatcagcgaagtgaagcgcctaagcaagcccggtcgtcgtgtgtataagcaaaaaaacgagttgaagcgctttaaaaatggctatggcgtgattgtggtaagcacttctaaaggggtgatcaccaacgaagaagcttacagacagaatgtcggtggcgaagtgctttgtagcatttggtaa

SEQ ID NO: 7339 - DNA, 369 bp, Helicobacter pylori
  CDS (1)...(369)
atgatacagagttttacaagattgaatgtcgctgacaatagcggcgctaaagaaatcatgtgcattaaggtgttaggaggcagccacaaacgctatgcgagcgtgggtagcgtgatcgtggcttccgtgaaaaaagctatccctaatggtaaggtgaagcgcggtcaagtcgtcaaagccgttgtggtgagaacgaaaaaagaaatccaaagaaaaaatggttctttggtgcgttttgatgacaatgcagcagtgatcttggacgctaaaaaagatccggttggcacaaggatttttgggccagtgagccgagaagtgcgttacgctaatttcatgaaaattatttctctagcaccggaggttgtataa

SEQ ID NO: 7340 - DNA, 261 bp, Helicobacter pylori
  CDS (1)...(261)
atgaatacaaaagagccgcataaaaggctggtgcaaggcaaggttatcagcaagtttgctgaaaaaagcgctgtgattcttgtggaaagaaaagtggtgcatgaaaaataccgcaagattgttaaaaaattcaaaaaatacaccatccatgatgaaaacaatcaggtgaaagtaggggattttgtgagcgcgattgagtgcagaccgctttctaaaaccaagtctttcacgcttaaagaaattttagtagtgggagtataa

SEQ ID NO: 7341 - DNA, 201 bp, Helicobacter pylori
  CDS (1)...(201)
atgaaatatactgaattgaaagataaaagtatcaaggaattagaagagttgttgcatgctaaaaaagcggagctttttgagttgcgcgttaagttaaaggctatgcaattgagtaatcctaacgagattaagaaagctagaagaaatatcgctcgcattaacacggccatcaatgcgcattattcttctagcgttgagtaa

SEQ ID NO: 7342 - DNA, 426 bp, Helicobacter pylori
  CDS (1)...(426)
atgttaatgccaaaaagaacaaaatacagaaagcaaatgaaagggcgcaatcgtgggaaagcccatcggggtaactccattgcgtttggggatattgcgattaaagccatagagcatgggaggattgattcacgccaaattgaatccgcaagggtggccatgacaaggcacattaaaagagcgggtaaggtgtggattagagtattccctgataagcctttgaccgctaaacccttagaaaccaggatgggtaaaggtaaaggctctgtggaaaaatgggtgatgaatatcaagccgggcagaatcgtttatgaaatgctaggcattgaagaaggattagcgagagaagctttagcgttagctcagagcaaacttccttttaaaaccaaaattgtaacttgtgagagcgaaaatgaaatatactga

SEQ ID NO: 7343 - DNA, 369 bp, Helicobacter pylori
  CDS (1)...(369)
atgagtaaagcgttattaagatttgtgcggttatctcctactaaagccagattgattgcaagacagattcaaggcatgaacgctgaattagcgatcgctagtttggaatttacgcccaataaagcggccagagtgctttcaaaagtggtggcttctgcggtcgctaacggctctttagacgccaagagtgctctgattgtttcttgcagagtggatgctggccctgtgcttagacgctccattccaagggctaaaggcagagccacagccattagaaagccaacatctcatgtattcgtagaagtagcagaagggaaagaaatgaaatcttctaaaagccataaaaaaaatcaagcagaaggtaagtag

SEQ ID NO: 7344 - DNA, 831 bp, Helicobacter pylori
  CDS (1)...(831)
atggcgattaaaacttataagccctacaccccaagcagacgcttcatgtcggtgttggactctaaagacattaccgcaaaaagcagtgtcaaaggcttactcactaagcttaaagcaacagcagggagaaacaataacgggcgcatcaccagccgccacaaagagagaggggctaaaaaactctatcgcattattgatttcaagcgcaataaatacaatattgaagggaaagtggctgcgattgagtatgatccttacagaaatgcgcgcatcgctcttgtagtctatcctgatggggacaaacgctatattttacagccaagcggtttgaaagtgggcgatagcgttatcgctgctgaaggcggtttggatattaaagtgggctttgcgatgaagttaaaaaatatccccataggaacggtggtgcataatattgaaatgcatccaggggctggcgggcaattagccagaagcgcaggaatgagcgctcaaatcatgggtagagaaaataaatacaccattattaggatgccaagctctgaaatgcgctacattctaagcgaatgtatggcgagtgttggcgtggtagggaatgaggattttatcaatgtctctatcggtaaggcagggcgtaaccgccacagagggatccgcccacaaactcgtggtagcgcgatgaacccagtggatcacccgcatggtgggggtgagggtaaaacagggacaagcggtcatcctgtatcgccttggggcactccagctaagggctataaaacgagaaagaaaaaagctagcgacaagctcatcatttccagaaagaaacataaataa

SEQ ID NO: 7345 - DNA, 576 bp, Helicobacter pylori
  CDS (1)...(576)
atggaatttttagttcaaaagataggcatgagccgcaccattgacgctaacagcacgcctgtaaccttgcttaaagtcttgcaagcgaaagtgtgccagctagaaaacgggaaagctttagtggcctatgcgatgcataaaaaacacaataaggcgattgaaggccagcaaaagaaataccagctcagcaaagagttcaaccattttgctaccttaaaagcttcccaacaaaaagagcttggcgatttggatttgagcgctttagaaacgcttaaaagggttaaagcgagctttaaaacgaagggaagaggctttgcgggggtgatgaagcgttggaatttccaaggcgggcctgcagcgcatgggagccgtttccatcgccgtcctggttctattggtaacagagaatggccaggaagagtgcaaaagggtaggaaaatggcagggcattatggcaatgagctagttacttgccaaaacgaggtgctctcttttgataaagaaagtatggtgttagtgctaaagggttcagtggccggcttttctggggcttatggacgcattagagcggtataa

SEQ ID NO: 7346 - DNA, 315 bp, Helicobacter pylori
  CDS (1)...(315)
atggaaaaaatcaggttgaagctcaaagcttatgaccatagagtgttggatcgctctgttgtggctatcgtggaagccgtaaagcgctcaggttctgaaattagagggcctatccctttaccgactaagaataagcgttacaccgttttacgctccccgcatgtcaataaggattcaagagagcagtttgagattagggtttatagccgattgattgatattatctcggccaccccagaaaccgtggatagcttgatgaagttggatttagctcctgaagtggatgtagaagtaacctctatggaaacgaagtag

SEQ ID NO: 7347 - DNA, 1467 bp, Helicobacter pylori
  CDS (1)...(1467)
atggatcatttaaagcatttgcagcaattgcaaaacattgaaaggatcgtgctttcaggcattgtgttggccaatcataagattgaagaggtccatagcgttttagagcctagcgatttttactacccgcctaacggcttattttttgaaatcgctttaaaactgcatgaagaagattgccccattgatgagaattttatccgccaaaaaatgcctaaagacaagcagatcaaagaagaagatctagtcgctatttttgcggcaagccccatagataatattgaagcctatgtggaagagattaaaaacgcttccattaaacgaaaactttttggcttggctaacaccattagagagcaagccctagaaagcgcgcaaaaatccagcgatattttaggcgctgtggagcgagaagtctatgcgttattgaatggcagcaccatagaaggctttaggaatattaaagaagtgcttgaaagcgcaatggatctcattacagaaaaccaaagaaaggggagtttggaagttactggcataccgactggctttgtccaattggataactatacgagcggtttcaataaggggagtttagtcattataggggcaaggccgtctatgggtaaaactagtttgatgatgaacatggtcttaagcgcgctcaatgacgataggggggtagcggtttttagtttagaaatgtccgcagagcaactcgctttaagggcgttatcggatctcacctctattaacatgcatgatttagaaagcgggaggcttgatgatgatcaatgggaaaatttagccaaatgctttgatcacctttcgcaaaaaaaactctttttctacgataaaagttatgtgaggatagagcaaatccgcttgcaactacgaaagcttaaatcccaacacaaggaattgggtatcgcttttattgactatttgcagctcatgtcagggagtaaagccactaaagagcgccatgagcaaatcgctgaaatttcaagggagcttaaaactttagccagagaattagaaatccctatcatagcgttagtgcaactcaaccgcagcctagaaaaccgagacgataaacggcccattctttcggatatcaaagacagcggggggattgaacaagacgctgatattgttttatttttatatagaggctatatctatcaaatgagggctgaagacaacaaaatagacaaactcaaaaaagaaggtaaaattgaagaggcgcaagagttgtacttaaaagttaatgaagaaaggcgtatccacaagcaaaatggcagcattgaagaggctgaaatcattgtggctaaaaacaggaatggggctacaggaacggtttatacgcgctttaacgctcctttcacgcgctatgaagacatgcccatagattcccatttagaagaagggcaagaaactaaagtggattatgatatagttacaacttga

SEQ ID NO: 7348 - DNA, 501 bp, Helicobacter pylori
  CDS (1)...(501)
atgagcgaaccattagaaacattagacaaggataaacaagctatgagtgaagcaattaaaaaagatattgaaaaagacaaagaaaacctcgcacgagtcaaagcagacaaaaaagtcaaagccgatgaaagtgaaaaaggctacgaaaaagacgatgacaaaaaagccgagaatcttgacaaagaaatcgctaaagacaaagctagccctaacgataatgagctttatgaagaggacgatagagttaaacgagacaaagaaagagacgatgccttgcgtgataaagaaaaagccaaagatgacgcatgcatggtaagagcggacgatgacaccatagaggacgatgaggaatatggtgatgatgataagttaagagacgaaatactcggtgttatggaggagttatgcgatacccttaatgataaccttaacttcaaaaaagtcgtctgtatgggcggtaaggtttcaattgcgttcaaatttctaattttttgctcttaa

SEQ ID NO: 7349 - DNA, 2763 bp, Helicobacter pylori
  CDS (1)...(2763)
gtggaagaatacaaagacaccctaaacttaaacacaaccaccttttctatgaaggggaatttgagcgttaatgagcctaaaacttacgccaaatggcaagagcaacaagcgtttaaacgcatgcaagctaggaaagacaaccatggggatttcactttgcatgacgggccgccttatgcgaacgggcatttgcatttggggcatgccttaaataaaattttaaaagacattgtcgttaaaagagaatattttaaggggaagaaaatctattacacgcccggttgggattgccatggtttgcccattgagcagcaaattttagagcgattagaaaaagaaaaaacaagcctagaaaaccccacgctgtttagagaaaagtgccgagatcatgcgaagaaatttttagaaatccaaaagaatgaatttttgcaattgggtgttttgggggattttgaagatccttataaaaccatggattttaaatttgaagcgagcatttatagagccttagtggaagtggctaaaaaagggcttttgaaagagcgccacaagcctatttattggagttatgcatgcgagagcgctttagcggaagctgaagtggaatacaaaatgaaaaaatcgccctccattttcgtggcgtttggtttgaaaaaggagagtttagaaaaattaaaagtcaaaaaagcgagcttggtgatttggacgaccacgccttggactttgtatgcgaatgtagcgatcgctttgaaaaaagacgctgtttatgcgctcacccaaaaaggctatttagtcgctaaagccttgcatgaaaaattagccgctttaggggtggtggataatgagatcacacatgaattcaattccaatgatttagaatatttagtggctacaaacccgctcaatcaaagggattcgctggtggctttaggagagcatgtcggtttagaagatggcacaggagccgtgcataccgcacctgggcatggtgaagaggactattatttaggcttaagatataatttagaagtgttaatgtctgtagatgagaaaggttgctatgatgagggcattatccataaccaactattagatgaaagctatctgggcgagcatgtttttaaggctcaaaaacgcattatagagcaattgggcgattctttattgctagagcaagagattgagcattcttatccgcattgctggaggacgcacaagcctgtgatttacagagcgactacgcaatggtttattttaatggatgagccttttatccaaaatgatggctctcaaaaaaccttaagagaagtggctttagatgcgattgaaaaggtggaatttgtgccaagcagcgggaaaaaccgcctaaaaaccatgatagaaaaccgccctgattggtgcttgagccggcaaagaaaatggggcgtgccactggcctttttcatagacaaacgcacgaataagccttgttttgaaagcgaagttttagagcatgtggccaatctttttgagaaaaaaggctgtgatgtgtggtgggagtatagcgtgaaagatttattgccccctagctatcaagaggacgccaagcattatgagaaaatcatgcacattttagacgtgtggtttgatagtggtagcacctttaaggcggttttagaagactatcatggagaaaaagggcaaagccctagcgatgtgatcttagaagggagcgatcagcatagggggtggtttcaaagctcgcttctaatcggttgtgttttaaacaaccaagccccttttaaaaaggtcattacgcatggctttatcgtagatgaaaagggcgaaaaaatgagtaaatctaagggcaatgtggtgtctttggacaagctgctcaaaacgcatgggagcgatgtggtgcgtttgtgggtagcgtttaatgactatcaaaacgatttgagagtctctcaaacctttttcactcaaacagaacaacattataaaaaattccgcaacaccctgaaattcttactcgctaattttagcgatatggatctcaagaatttagaacgcccccataacttcagccctttagatcattttatgttagagactttagaaaccataagcgctggagtcaatagcgcgtttgaagagcatgattttgtgaaaggcttgaatattttaatggcgtttgttaccaatgaattgagcgggatttatttagacgcttgcaaggatagcttgtattgcgatagcaaaaacaatgaaaaacgccaagccattcaaatggttttactcgctacagctagtaagttgtgctactttttagccccgattttaacgcacacgattgaagaagttttagagcatagccaagcgcttcgcatttttttacaagccaaagatgtgtttgatttaaaagacattagcgtttcagaaaaactccacctcaaagagtttaaaaaaccagaaaattttgaagccgttttagccttgcgttctgcctttaatgaagagttagaccgattgaaaaaagaaggcgtcattaaaaattcgttagagtgcgctattgaagtaaaagaaaaagcgttggatgaaaatttagtagaagagttgctgatggtaagctttgtggggattgcaaaagaaaaattgagtgaaacgccagcattcacgctctttaaagcccccttttataaatgccccaggtgttggcgttttaaaagcgagctagaaaacaccccttgcaagcgttgcgaacaggttttaaaagagcgatga

SEQ ID NO: 7350 - DNA, 255 bp, Helicobacter pylori
  CDS (1)...(255)
atgcgaatagacaaatttttacaatcagtgggtttagtgaagcggcgcgttttagcgacagatatgtgtaatgtgggggcggtatggcttaatgggagttgcgctaaggctagtaaagaagtgaaagcgggcgatacgattagcttgcactatttaaaagggatagaagaatacacgattttacaaatccccgctttaaaaaatgtgccacgaaaagacacgcacctttatatcgctcctaaaacaaaagaataa

SEQ ID NO: 7351 - DNA, 2070 bp, Helicobacter pylori
  CDS (1)...(2070)
atgacggataacaaccaaaacaatgaaaaccatgaaaacagcagtgaaaattcaaaagctgatgagatgcgagccggagcgtttgagcgcttcaccaaccgcaaaaagcgtttcagagaaaacgcgcaaaaaaacgcagagtattcaaaccatgaagcgtcttcgcaccataaaaaagagcatcgccctaacaaaaaaccaaacaaccaccacaaacaaaaacatgccaaaacacgaaattacgcccaagaagaattggatagcaacaaagtagagggcgttacggaaattttgcatgtgaatgagagagggactttaggctttcataaggagttaaaaaagggcgttgaagcgaataacaagatccaagtggagcatttaaacccgcattataagatgaacttaaactctaaagcgagcgttaaaatcacgcctttagggggcttgggtgagattggggggaacatgatggtcattgaaaccccaaaaagcgcgatcgtgattgatgcgggcatgagcttccctaaagaggggctctttggcgtggatattttaatcccggatttttcctacttgcaccaaatcaaggacaaaatcgctggcattatcatcacccatgcccatgaagatcacataggggccacgccttatttgtttaaagagctgcaattccccctttatggcacgcccttgagtttggggctgattgggagcaagtttgatgaacatggtttgaaaaaataccgctcgtattttaaaatcgtagaaaagcgctgtcccattagcgtgggcgaatttatcattgaatggatccacatcacgcattctatcattgacagcagcgctttagcgatccaaactaaagccggaacgatcatccacaccggcgattttaaaatcgatcacaccccggtggataatttgcccacggatttgtatcgtttagcgcactatggcgaaaagggggtgatgcttcttttaagcgattccaccaactcccataaatccgggactacgccgagtgaaagcaccatagcgccggcttttgataccctttttaaagaagcgcaagggagggtgattatgagcaccttctctagcaatatccaccgggtctatcaagccatacaatacggcattaaatacaaccgcaagatcgctgtgatcgggcgctctatggaaaaaaacctagacatcgctagagaattgggctatatccatttgccttatcaatcttttattgaagccaatgaagtcgccaaatacccggacaatgaaatcttaatcgtaacgaccggctcacaaggcgaaaccatgagcgcgctttatcgcatggcgactgatgaacaccgtcatatttctatcaaacccaacgatttagtcatcatttccgctaaagccattcctggcaatgaagcgagcgtttcagcggtgttgaatttcttgatcaaaaaagaagctaaagtggcttatcaagaatttgacaatatccatgtgagcgggcatgccgcccaagaagagcaaaagctcatgttaagactcattaagcctaagtttttcttacccgtgcatggggaatataaccatgtcgcgcgccacaaacaaaccgctatttcttgcggagtgcctgaaaaaaatatctatttaatggaggatggcgatcaggtggaggttggccctgcgttcatcaaaaaagtcggcacgattaaaagcgggaaaagctatgtggataaccaaagcaatttgagtattgatacaagcatcgtgcaacaaagagaagaagtcgctagcgccggggtgtttgtggctacgatttttgtgaataaaaacaagcaagcgcttttagaaagctctcaattttccagtttagggcttgtgggtttcaaagatgaaaagcctttgatcaaagaaattcaagggggcttagaggtgttattgaaatccagcaacgccgaaattttgaataaccctaaaaaattagaagatcacactcgtaatttcatcagaaaagcgctctttaaaaagtttagaaaatacccggctatcatttgtcatgcccattctttttga

SEQ ID NO: 7352 - DNA, 135 bp, Helicobacter pylori
  CDS (1)...(135)
atgaaacgcacttaccaaccacacaacacaccaagaaagcgaacccatggctttcttgtgagaatgaaaaccaaaaacgggcgcaaggtgattaatgccagacgagctaagggcagaaaaaagctttccgtctaa

SEQ ID NO: 7353 - DNA, 1386 bp, Helicobacter pylori
  CDS (1)...(1386)
atgaaaaatacatcgtcatcaacgactttaacaatgaatgacaccattgccgctatcgctacccctttaggcaagggagcgattagcatcattaaaatcagcggccataacgctctaaatatcctcaaacaactcacccaaaaacaagacttcacccccagatacgcttatgtgcacgatattttttctaatggtgttttattggacaaagcgttagtcatttatttcaaagccccttatagtttcactggcgaagatgtgtgcgaaatccaatgccatggaagcccccttttagcgcaaaatatcttacaagcttgtttgaatttaggggctaggcttgctaaagcgggggaatttagtaaaaaagcctttttaaaccataaaatggatttgagcgagattgaagcgagcgttcaactcatcctttgtgaagatgagagcgttttaaacgctctagccaggcagcttaaaggcgagttaaaaatttttattgaagaagctagaggtaatcttttaaagcttttggccagctcagaagttttgattgattatagcgaagaagacattcctagcgattttttagatggagtatctcttaatttagaaaaacaaatcgcctcttttaaagacttattggatttttctaatgctcaaaaacaaaggaataaagggcatgccttaagcattgttggcaaacccaatgctggcaaaagttctttattaaacgccatgcttttagaagaaagggctttagtgagcgatattaaaggcacaacaagagacaccatagaagaagtcattgaactaaaagggcataaggtgcgcttgattgatacggctggcattagagagagcgcggataaaatagagcgtttagggattgaaaaaagccttaaaagtttagaaaattgcgacattattttaggcgtgttcgatctttctaaacccctagaaaaagaagattttaaccttattgacacccttaatcgcgctaaaaagccttgcattgttgttttgaataaaaacgatttagccccaaaactggagcttgaaattttaaaatcttatcttaaaatcccttatactttactagagaccaacaccctaaattccaaggcttgtttgaaagatttgagccaaaaaatcagcgcctttttccccaaactagacactcaaaacaagctcttactcacttccctagcccaaaaaattgccctagaaaacgccattactgaattgcaaaacgctaaaaaccatttagaaactttagagcttttttcttatcacattttaagcgcgatagaaaacttgaacttgctcacccgcccttatgaaaccagccaaatgctagacagcatgttcagcgaattttgcttaggcaaatga

SEQ ID NO: 7354 - DNA, 3636 bp, Helicobacter pylori
  CDS (1)...(3636)
atgaaagagaataaagcttttacgcatttgcacttgcacacagaatattcgcttttagacggggcgaacaagattaaaattctagccaaacgcgttaaagaattgggcatgaaaagcgtgagcgtaactgatcatgggaacatgtttggagcgattgatttttatacgagcatgaaaaaagaaggcattaagcctatcatcggcatggaagcgtatatccataatgatgacaacctttctagcaaagaaaccaagcagcgtttccatttatgcttgttcgctaaaaaccaagagggctatgaaaatttgatgttcttaagctctatggcgtatttagaggggttttattatttcccacgcatcaataaaaagcttctaaaagagcattctaaaggcattatcgcttctagcgcatgcttgcaaggggaagtcaattaccatttgaataccaataatgagagaaaccgcaagtatggggctaaaggctatgatgaagctaaaaaaatcgcttgcgaataccaagagatttttgaagacgatttttatttagagatcatgcgccatggcattttagatcagcgattcattgatgagcaagtcattaaaatgtctttagaaacagggttaaaaatcattgccaccaacgacacccactacaccatgcctaatgacgccaaggctcaagaagtggcgatgtgcgtagcgatgggtaaaaccctaaacgataaggggcgcttgaaacactccgtgcatgagttttacattaaatcccccgaagaaatggcaaagctctttgcagatattccagaagctttagaaaacacccaagaaatcgctgataaatgcgttttagagattgatttaaaagacgataaaaagaaccccccaacccccccaagcttcaaattcactaaagcttacgctcaaaatgaggggctgaattttgaagatgacgcttcttattttgcctataaggctagagaaggcttgaaagagcgcttagttttagtaccaaaagaaaagcatgatcaatataaagagcgcctagaaaaagaaattgaagtcattacgaacatgaaattcccagggtatatgctgattgtgtgggattttatccgttatgctaaggaaatgggcattcctgtagggcctggtagggggagtgcggccgggagcttggtggcttttgctttaaaaatcacggatattgaccctttgaaatacgatttgctctttgaaaggtttttaaaccccgaaagaatcagcatgcctgatattgatacggatttttgccagcgccggcgtaaggaaatcatagaatacatgattgaaaaatacggcaaatacaatgtggcacaagtcatcacttttaataagatgttggctaaaggcgtgatcagagatgtcgcaagggttttggacatgccctataaagaagccgatgattttgccaaactcatacccaaccgcttaggcatcacgcttaagggctatgaaaaaaatggcgagtttatcgagggagcgtgggaattagagcctaaaatcaaggaattagtagagagtaatgaattagccaaacaagtgtgggagtattcgctcaatttagagaatttaaaccgcaacgcaggcgtgcatgccgcagccttagtggtggatagccaaaaagagttgtggcacaaaacccctttgtttgcctctgaaaagaccggcggtatcgttacgcaatattccatgaagtatttggagccggtggatttgatcaagtttgactttttggggcttaaaaccttgaccgtgattgatgatgcgcttaaaatcattaaaacacaacacaaaattagcgtggattttttatcgttggatatggacgatccgaaagtgtataaaacgatccaaagcggggatacggtggggatcttccagattgaatccgggatgtttcaagggcttaacaagcgcttaaggccttcaagctttgaagacattatcgccattatcgcgctaggcagaccagggcctatggaatcaggcatggtagatgattttgtgaacagaaagcatggcgttgagcctatcgcttatgcgtttaaagaattagagccgattttaaagcccacttacggcacgatcgtctatcaagagcaggtgatgcaaatcgtgcaaactatcggcggtttcagtttgggtgaagcggatctcatccgccgcgctatggggaaaaaagacgctcagatcatggcggacaataaggctaagtttgtagaaggcgctaaaaatttagggcatgatggccaaaaggcggctaatttgtgggatttgatcgttaaatttgccggctatggtttcaacaaatcgcattcggccgcttatgcgatgatcactttccaaacggcgtatttaaagacttattacaagcatgagttcatggcagcgatgctcactagcgaatccaataagattgaatccgtggcgcgctatattgatgaggtcagggctttagaaattgaagtgatgcctccgcatatcaattcttctatgcaagatttcagcgtggcggagtttaaaaatcaaaagggcgagttagaaaagaaaatcgtgtttggtttgggagcgattaaaggagttgggggtgagccgattaaaaacatcattgaagaaagggctaaaggggattataagagtttggaagattttatttcacgggtggatttttctaaactcactaaaaaatctttagagccattagtgaaatcagggagcttggataatttaggctacactagaaaaaccatgctcgctaacttggatctgatctgtgatgccgggcgcgctaaagacaaggctaatgaaatgatgcaagggggtaattctctttttggagccatggagggcggaaccaaagagcaggttgttttggacatgattgatttgggcgaacatgacgctaaaacgcttttagaatgcgaatacgaaactttaggcatccatgtttcaggcaaccctttagacgagtttaaagaagaaattaagggttttaaaaatttagtcaaaagcattgatattgaagagttagaaatcggctcgcaagcttatttgctcggtaaaatcatggaagttaaaaagaaaattggcaaacgaagcggtaagccttatggcatagcggacattttggatcgatacggcaagtttgaactcatgctttttgaaaagcaattaaacgccttagaagagttggacattaataagcctttagtgttcaaatgcaagattgaagagcaagaagaagtggtgcgattgaggctttttgaaatcttggatctagagagcgctagagaggttaaaatccctaaagcccgttataaagaccctgaaaagcaaaaagaagaggtgcgcgaaatcccccccatggaaatgcttgcctctagttcttgctctttagcgatcgtgttagaaaacgatgtgaaaaaagagtttttaagacaaatcaaagagagcgctttaaaacaccagggcaaacgccccttgtatttgatcatcaaagataaggataagcaattcaaaatccaaagcgatttaatggtaaatgaaaagattaaggacgattttaaagggttagagtggagggatttagcttga

SEQ ID NO: 7355 - DNA, 2049 bp, Helicobacter pylori
  CDS (1)...(2049)
atgatggattttgaaaaaagcattttagaccatttaaacggagcgcaaaaaatcgctgcaagccacattcaagggccattgctcattttagcgggagctgggagcggtaagactaagactttaacgagccgtttagcgtatttgattggcgtttgtggcgtgcctagcgagaacactttaacgctcactttcaccaataaagcgagtaaagaaatgcaagaaagggctttgaaattgttgaaaaaccaagcccttatcccccccttgctttgcactttccatcgttttggtttgctgtttttaaggcaacacatgaatcttttaaaaagggcatgcgatttttcggtattagatagcgatgaagtcaaaacgctgtgcaaacagctcaaaatttcaaactttagagccagtatttctcaaatcaaaaacggcatgatggatttgagcatgcaagatagcgaatgctataaagcgtatgagctttatcaaaacgcgctcaaaaaagacaatttagtggattttgacgatttgctttttttaagccttaagattttacaagataatgaaaccatcgccaaagagactagcgagcgctaccactacattatggtagatgagtatcaagacacgaacgccttgcaattggagtttttaaaaaaattgagtttcacgcaccataatttgtgcgtggtgggcgatgacgatcagagcatttatgggtttaggggggctgatatttctaacattttaaatttttccaagcattttaaaggggctaaaatagtgaaattagagaccaactaccgctctagcgctgaaattttagcgtgcgctaattctctcatcagccacaaccaacaccgccatattaaaacgcttcaaagtttcaaaggctcgcataaaagcgtggtttgtaaagaatatttgacgcaaaaagaagagagcctggatgtggcttatcaaatcaaagcccttttaaagaagggcgagaatttagaaaatatcgctattttgtatcgcttaaacgggcttagccgcagcattgaagagagcttgaacgctttgaatatcccttataggctcattggggcgctgagtttctatgaaagagccgagattaaagacgctttggcgttcatgcatttagtggctaaaaaagacgatcgcttttttattaagcgcgttttaaacaagcccccaagaggtcttggcaagatcactcaagaatggattttttctcttttagatgaagagggtttgaatttagaagaggcgctaaaacttggggcgtttaaagacaaattaaaccctaaaaacgaatacgctttgaaacaatttatcgctatgatagggcgtttgagggaggcttttgaaatttcagtagaggagttttgctctcggtttttagaagagactaaccttttaaaaagctatgaaaaagaagacaattacgaagaaagagagggctttgttaaagagcttttaaccttagtgaaagaatattttaaaactaaccccacgcattctttactggattttttgaatgaaagcgtgctggatgcccataatacagaaaacgcgcaaaaagtgagttgcatgagcgtgcatatgagtaagggattagagtttaagcatgtgtttgtgatcgggttagaagaagggtttttcccgcatagggggttcaatcaggaaagcgatttagaagaagaaaggcgcttggcttacgtagcgatcactagggctaaagaagaattgcagctctcttatgtgaaagagcgttcgtattttgggaggaaaatttcttgctcgccctctgtgtttttagaggaagcccagttgctcaatcaagacaacccccctaaacaggatcatcaaaaagacgcgcccattaaagtgggggacttgattaggcataagatttttggcactgggagggttttaggcgtagaaaaaggcttgagcggtttgtgcttgaaaatcaattgcggagggaatgtctatgataaaatctcagaaaaatttgtagaaaaagtggataacgggttttga

SEQ ID NO: 7356 - DNA, 789 bp, Helicobacter pylori
  CDS (1)...(789)
atggctagaagtttcaagcattctcaatatcctaaaatttttaagccactataccctaacaacttaacgctttcacttaaaaagcaacatgttataatgatcgctattttatttgaaagggtatttatggaaagcgttttaaatttcctaaccaatatcaatgtgattttcacccttttgggctatttgattggggggattccttttggctatgcgttaatgaaaatcttttacggcatggatattactaaaatcggatcggggggcattggcgcaacgaatgtcttgcgtgctttacaaagtaagggcgtgagtaacgctaaacaaatggccctattagttttaatcttggatctcttcaaaggcatgtttgcagtatttttgagcaaattgtttgggttggattatagtttgcaatggatggtcgctatcgctagcattttagggcattgctattcgccttttttgaatttcaatggaggtaagggcgtttctacgatcatgggctctgtggtgttgctcatccctattgaaagtctcatcggcttaacggtgtggttttttgtgggtaaggtgcttaaaatctcttcactcgctagcattctaggggtaggcacagcgactgttcttatcttttttgtgccttatatgcatatcccagacagcgtcaatatccttaaagaagtcggcacgcaaacgccgatggtgcttatttttattttcacccttatcaagcatgcgggtaatatttttaatttattggccggcaaggaaaagaaagtcttatga

SEQ ID NO: 7357 - DNA, 1188 bp, Helicobacter pylori
  CDS (1)...(1188)
atggaaaaaatcagcgatcttatagaatgcattgcgtatgaaaaaaatttgcctaaagagatgatttcaaaagtgattcaaggctgtttgttaaaaatggcgcaaaatgagttagaccccctagcacgctacttggtggttgaagaaaacaagcagctccagcttatccagttggtagaagttttagaagatggtgatgaaagattggttaacgacccttctaaatacatcagcctgtctaaagccaaagaaatggatccaagcgttaagattaaagacgaattgtcctatagcttgagtttggagagcatgaaacaaggagcgatcaaccgcctttttaaagatttgcaataccagttagaaaaagcgttagaagacagccactttgaagcgtttcaaaagcgtcttaacagcgttttaatggggcaagtgattttagtggatcacaaccaaaacacctttattgagattgagcagcaatttcagggcgttctttccatgcgccatcgcatcaagggcgagagttttaaagtgggcgatagcattaaagcggttttaacgcaagtcaaacgcacgaaaaaaggcttattattagagctgagccgcaccacccctaaaatgcttgaagctttgttggaattggaagtccctgaaattaaagacaaagaaattgaaatcatccattgtgcgcgaatcccaggcaacagagcgaaagtgagctttttttcccataacgctaggattgaccccataggcgcggctgtgggggttaagggcgtgcgcattaatgcgatcagtaacgaattgaataaagaaaacattgattgcatagaatattctaatgtgcctgaaatttacatcactctcgcactcgctccagccaaaattttaagcgttgaaatcaaaaaaatccctatagaagaattgaatgctgaagaaaaagaatccattcaagagcgttttatcgtcaataaccatttgcaaaaggctaaagtgcgtttattggacattgaaaaatctaaggctatcggtaagggcggggtgaatgtgtgcttagcgtccatgcttacaggctatcacatagagtttgaaaccattcctagcgtgaaagaaaacgcagaaaatgaaagcgaaaaagaaacgccaaaagtgggggtagaagctttagagtctttgtttaagaattaa

SEQ ID NO: 7358 - DNA, 1794 bp, Helicobacter pylori
  CDS (1)...(1794)
atgtgtgggattgtaggttatataggggatagcgagaaaaaatccgttcttttagagggattaaaggaattggaatacagaggttatgacagcgcgggtttagccgtattgagtaatgatcgtttggaagtgtttaaaactcaagggaaattagaaaaccttaaactagagcttaaaaataaagagtttttggattttggcgtgagtatcgctcacaccagatgggccacgcacggcaagccaagcagcgcgaacgcccacccgcattttacagaaaatttagccttagtgcataatggtatcattgaaaattacgcgagtttgaaaaaagaattggaaaacaaagggcatgcatttttgagccaaacggacacggaagtcattgcacatttattagaagaaacgcttaaaagcgagagcgatttattgaaagcttttgaaaaaagcatcagccttttaaaagggagttatgcgattttaatgctccataaaagggctaaagagagcctcttttacgctaaatcttcttcgcctttagttgtgggtaagggcaaagaaggggtgttttttgcgtccagtttgagcgtgctagcccctaaagtggatcaatttgtcattttagaagaaaacagcgtggggcggatttctttagaaaattttaaagatttaaacaatattgaaaacatgaaagattacgcttttgaggataaggattattctaaaggcaattttaggaattatttagaaaaagagatttatgagcagcacagcagtttgttggagtgtttagaggggcgcttggaagccttgagtgtgtattgcgagatcgatcctgagtttttgaaaaatgtgagcgaaatcacgctgtgttcttgcgggagcagttaccatgcgagtttagcgagcgtgtatttgtttgaaagattagccaaaataagagcgagagccattttagcgagtgaataccgctacgcccattttaaaagcaaccctaacgagctttttatagcgatttctcaaagcggcgaaaccgctgacactttagaggcgttaaaattagccaaagcccaagggcttaaaaccattagcttatgtaacgctccctttagcatgatgagccgcattagcgatcacacgcttttgattagagcgggggtggaaaggagcgtggcatccactaaggcgttttcttcgcaagtgatgcttttatggcttttgagcgtgtatctaggcaaacagctagggactatctctaaagaagaagaaagaatccaggctaaaaacatgctcaatagcgtgaatgcgatgaaagtagagcctaaattgcatgaaaaaatcaagcgcttatccaaacgctacttgcatgggcatggctttttttatatcgggcgcgatgtgttttacccgctcgctttagaaggggcgttaaagcttaaagaaatcagctacttgcacgctgaggggtatgcgagcgcagagatgaagcatgggcctattgcgttagtggattctaatctttttaccattgctttattgtctaagcacttgttatttgataaaaccaaaagcaatattgaagaattgagcgctagggattctacgatttgcgtgttaagctctgaaattttagagatcgctgatgattttatccaattagaagagagcgaaagctacatggaagaatttttccgcatgaatttagcggtgcagcttttagccttagaaatcgctatgcgtttgaatcacgatgtggatcacccaagaaacttggctaaaagcgttaccgtggaataa

SEQ ID NO: 7359 - DNA, 795 bp, Helicobacter pylori
  CDS (1)...(795)
atggtaaccatgaaagatttattagaatgcggtgtgcattttggacaccaaacaaggcgttggaaccctaaaaccaaaaaattcatttttggcgttaggaaaaatatccatattattgatttgcaaaaaaccttgcgctattttagatacacctataatatcgtgcgcgatgcgagcgctcaaggcaagagcatcatgtttgtaggcactaaaaaacaagccaatgagactttgaaagaatttgctgaaagcattcaagtcccttatgtcaattaccgctggcttggcggcatgctgactaattttagcaccattagaaaatcggttaggaaattagaaatcattgaagaaatggaaaatagcggtcaaattgatttattgactaaaaaagaaaagctcatgattttgaggaaaaaagaaaagctggataaatatcttggtggggtgcgccacatgaaaaaaatccctgatatgatttttgtgattgatgtggctaaagaaaaaatcgctgtcgctgaagcaagaaaactccatatccctatcgtggctcccttagacactaactgcgatcctgatttagtggattaccccattcctggaaatgacgatgcgatccgctctattaggctattttgtaaagaaatgagcgaagcgattttagaggggcgagaactcatgcaagaagaaatcgtccatgcgaatgaaaatagcgaagagatagaatatgtgagccatgaagaaaaagaagaaatgctcgctgaaatccaaaaagaaatcactcaaggagccgaataa

SEQ ID NO: 7360 - DNA, 1068 bp, Helicobacter pylori
  CDS (1)...(1068)
atgtcaggaattagcgctcaattagtcaaaaaattaagggacttaaccgatgcgggcatgatggattgcaaaaaagcccttgtagaagtggctggggatttgcaaaaggctattgatttcttgcgcgaaaaaggcttgagtaaagccgctaaaaaagccgataggatcgctgctgagggcgttgtcgctttagaagtagcgcctgattttaaaagcgcaatgatagtagaaatcaatagcgaaacggattttgtggctaaaaatgagggctttaaggaattggtgaaaaaaactttagaaacgatcaaagcccacaatatccataccacagaagaactgcttaaaagcccgttagacaacaagccttttgaagaatatttgcactctcaaatcgctgtgattggtgaaaacattttagtgagaaaaatcgctcatttaaaagcccccagctctcatatcatcaatggttatgcgcattctaacgctagagtgggcgtgttaatcggtataaaatacgataatgaaaaaaacgctccaaaagtggtggaactggcccgaaacatcgctatgcatgccgcagcgatgaaacctcaagtgctagattgcaaagactttagccttgattttgtcaaaaaagaaactttagccttgatcgctgaaattgaaaaagacaatgaggaagctaaacgcttgggcaaacctttaaaaaacatccccacttttgggagccgcattgaattgagcgatgaagttttagcccatcaaaagaaagcctttgaagacgaattaaaagcacaaggcaagcctgaaaaaatctgggataaaatcgttcctggaaaaatggaaagatttatcgctgataacacccttattgatcaacgcctgactcttttagggcaattctatgtcatggacgataaaaaaactatcgctcaagtggttgctgattgttccaaagaatggaatgatgatttaaaaatcactgagtatgtgcgttttgaattgggcgaaggcattgagaaaaaggcagagaatttcgctgaagaagtggctttgcaaatgaagtga

SEQ ID NO: 7361 - DNA, 1167 bp, Helicobacter pylori
  CDS (1)...(1167)
atgactacagacagaaatttgtttttttgcgcttcgctattgatttttttgggggtattgatgagctattcgctctcaacttacaccacagtggtgctgtatcattatggggagttccattttttcatacgccagcttgtgagcgcgatcatagggattgttatcatgtgggggttgtctagggttgatcctagcaagtggtttagccgtttggggttttttcttctttttgtcccaccattactcattattggcatgttttttttgccagaaagcctttctagcagtgctgggggggcgaagcgatggattcgtttggggtttttttctctagcgcctttggagtttttgaagattggtttcaccttttttcttgcgtggagtttgtctcgcacttttgtggcaaaagaaaaggctaatgttaaagaagaactcatcacttttgtgccttattcagtggtgtttgtagccttagcgattggggtgggggttttgcaaaacgatttggggcagattgttcttttgggggcggttttagcggtgttgttggttttttctggggggagcgtgcatttgtttggcttgattatttcaggggcgtttgcgatcagcgttttagcgattgttacaagcgagcataggattttgcgcctgaaattgtggtggtctaatttgcaaaattcgcttttcacgctcttgccggatagattagcgaacgctcttagaataagcgacttgcccgaatcctatcaggtctttcatgcaggcaatgccatgcataatggggggttgtttgggcaagggcttgggcttgggcaaatcaagcttgggtttttgagcgaagtgcatacggacatggtcttagctgggatcgccgaagaatgggggtttttggggctatgcgtttgttttattttgttttctgttttgattgttttgatttttaggatcgctaaccgcttgaaagagccaaaatattcgctattttgcgtgggcgtggtgctgcttattagtttttctttggtgatcaacgcctttggggtgggcgggattcttccggttaaaggtctagcggtgccgtttttgagctatggagggagttcgcttctagcgaattgtatcgctatagggcttgttctaakcctagcgcgatacacgaaaggctaa

SEQ ID NO: 7362 - DNA, 597 bp, Helicobacter pylori
  CDS (1)...(597)
atgttagttacaaaacttgccccagactttaaagcacctgccgttttaggaaacaatgaggttgatgaacactttgagctttctaaaaatttgggtaagaacggtgcgattcttttcttctggccaaaagattttacttttgtatgccctacagaaatcattgcgtttgacaaaagagtgaaagacttccaagaaaaaggctttaatgtgattggcgtgtctattgacagcgaacaagtgcattttgcatggaaaaacacccctgtagaaaaaggcggtattggtcaagtaactttccctatggtggctgatattaccaaaagcatttctagagactatgatgtgttgtttgaagaagcgatcgctttgagaggagcttttttgattgacaaaaacatgaaagtaaggcatgcggtgatcaatgacttaccattaggcagaaatgcagatgaaatgcttcgcatggtggacgctctcttacactttgaagaacatggtgaagtttgcccagcaggttggagaaaaggcgataaaggcatgaaagcaactcaccaaggcgttgcagagtatctcaaagaaaattccattaagctttaa

SEQ ID NO: 7363 - DNA, 816 bp, Helicobacter pylori
  CDS (1)...(816)
atgaatgcattcaagcgtattattagtgtgggggtaattgctttaggtttgtttaaccttttagacgccaaacaccacaaagagaaaaaagaaaaccacaaaatcactcgtgagcttaaagtgggcgctaaccccgttccgcatgcgcaaatcttgcaatcagtcgtggacgatttgaaagagaaagggatcaaattagtgatcgtatcttttacggattatgtgttgcctaatttagcgctcaatgacggctctttggatgcgaattacttccagcaccgcccttatttggatcggtttaatttggacaggaaaatgcaccttgttggtttggccaatatccatgtggagcctttaagattttattctcaaaaaatcacagatattaaaaatcttaaaaagggttcagtgattgctgtgccaaatgatccggccaatcaaggtagggcgttgattttactccataaacaaggccttatcgccctcaaagacccaagcaatctatacgctacggagtttgatattgtcaaaaatccttacaatatcaaaatcaagcctttagaagccgcgttattgcctaaggttttaggggatgtggatggggctatcataacagggaattatgccttgcaagcaaaactcaccggagctttattttcagaagataaggactcgccttatgccaatctaatagccgctcgtgaggataacgcgcaagatgaagccataaaaacattgattgaagccttacaaagtgaaaagaccaggaaattcattttggatacctataagggggcgattatcccggctttttaa

SEQ ID NO: 7364 - DNA, 765 bp, Helicobacter pylori
  CDS (1)...(765)
atgtttatagacacgcattgccatttggatcacaaggactatgaaaacgatttagaagaagtgttaaaagaaagcctagaaaaaggcgttactcaatgcgtgattcctggcgcggacatgaaggatttgaatagagcaatagaaattagcgaaaaatttgaaggcgtgttttttgccataggcgctcacccttatgatgtggagagttttgatgaaagcctgtttgaaaagttcgttgggcatcaaaaatgcgtggcgataggcgaatgcggactggattactaccgcttgcctgaattgaatgaaagagagaattataaaagcaagcaaaaagaaattttcaccaaacagattgaattttctatccaacacaacaagcccttgattatccatattagagaggcgagttttgatagtttgaatcttttaaaaaactatcctaaggcttttggggtgttgcattgctttaacgctgatggcatgcttttggaattaagcgatcgtttttactatgggataggaggggttagcacttttaaaaacgctaaaagactggtagagatcctccctaaaatccctaaaaacaggcttcttttagaaacggattcgccttatttgaccccacacccttttagaggtactaggaatagccctacttatatccctttaatcgctcaaaaaattgctgaaatcatcaacatagagactgaagaactcgcttctttaagcacgcataacgctcaaatgctctttagtttcccctaa

SEQ ID NO: 7365 - DNA, 621 bp, Helicobacter pylori
  CDS (1)...(621)
atgttcagcggtctaatccatcaaatagctaaagtgaaaagtttccacaacaatattttaaacatagagagtgatctcaatcccaagcttggcgatagcattgcgattaatggggcatgtttgaccgccatagaaagttcaaaaacgcattttagcgtggaattgagccaaaaaacccaaaacagcgtagcgttagaaaattacaaggatttagtccatattgagccagccctaaaagctgatgcgagtttggatgggcattttgtgcaagggcatattgacgctataggggtcattgaaaaaatcattcacaacgctaatcaagtggattttttcatcagcgcttctgaagaaacgcttttattgtgcgttgagcaaggctctattgcagttgatggggtgagtttgactttaagcaaggtagaagaaaaggggttttggctaacgattatcccttacactttagaaaacaccctttttaaggcttataaactcaaacggcgcgtgaatattgaaacggacatgttagtccgcagcgttgcgtctattttgaaaaaaacaaaagggtttgaaaaaaatttctcttggaatgaggctgacgctttgactttagggtattag

SEQ ID NO: 7366 - DNA, 984 bp, Helicobacter pylori
  CDS (1)...(984)
atggtagtagaattaaaaaacattgaaaagatttatgaaaacggattccatgctctaaaaggcgtgaatttggaattgaaaaaaggcgatattttgggcgtgataggctattcaggggcggggaaatccacgctcattcgcttgattaattgtttagagcgtcctagttctggcgaagttttagtcaatggggtcaatctgttaaaattaaagcctaaagaattgcaaaaagcgcgccaaaaaataggcatgattttccagcatttcaatttattgagcgctaaaaacgtgtttgaaaacgttgctttcgctctagaaatcgcccgatgggaaaaaaataagattaaatcaagggtgcatgaattgttggaattggtggggctagaagataaaatgcatttttatcctaaacagctcagcggtgggcaaaaacaacgagtggcgatcgctaggagtttagcgaattgccctgatttattgctttgcgatgaagccacatccgcgctagattctaaaaccacgcattctattttaacgcttttaagcggcattcaaaaaaagcttgatttgagcatcgttttcatcacgcatgaaattgaagtggttaaagaattgtgcaatcaaatgtgcgtgatcagcagcggcgaaatcgtggaaagaggctcggtggaagaaatttttgccaaccctaaacatgccgttactaaagaattgcttggcatcagaaacgagcatgcagataagaaatcgcaagacgtttatcgcatcgtgtttttaggggagcatttagacgagccgatcatttctaatttgattaagcgttttaaaatagacgtgagtatcatttcaggcaatattgaagagcttacgactaaagatatagggtatttagtggtgcggtttttaggcaatactgcagagactcaaagggctttagagtatttaaacgctttaggcttacaagtggaaaaattaaaggattaa

SEQ ID NO: 7367 - DNA, 648 bp, Helicobacter pylori
  CDS (1)...(648)
atgatttctcaaatgctcattcaagccacgctagaaacgctttatatggtgtttgtggcgagctttttggcggttgtttttggcttgcctttgggggttttattgttagtgagtaaaaaagggcatttgttaaacaagccccttttgcataaaattttagacacttccatcaacatgactcgctctttcccttttatcattctcattattttgctcctgcctttatcgcgctttttgattggcacaagcattggctctagcgcgagcattatcccgctagccatttcagccattccttttgtcgcaaagctttttgaaaattctttaatggaagtagagcatggcaagattgaaaccactttaagcttaggagcgtctcacttggaagtcattaaaatgatgcttttagagagcctgccctctttagtgaacaatatcaccatcaccttaatttctttaataggctattcggctatggcaggagcgttaggggctggaggtttgggggatttagccattaggattggctatcaaagttataggggcgatgtgcttttttatgcggtggttgtgattattgttttggtgcaaatcattcaaagcgtaggggattatgtggtgaaacgcctgagaaagcataagtattag

SEQ ID NO: 7368 - DNA, 357 bp, Helicobacter pylori
  CDS (1)...(357)
atgaagtttcaaccattaggagaaagggtcttagtagaaagacttgaagaagagaacaaaaccagttcaggcatcatcatccctgataacgctaaagaaaagcctttaatgggcgtagtcaaagcggttagccataaaatcagtgagggttgcaaatgcgttaaagaaggcgatgtgatcgcttttggcaaatacaaaggcgcagaaatcgttttagacggcactgaatacatggtgttagaactagaagacattctaggtattgtgggctcaggctcttgctgtcatacaggtaatcatgaccataaacatgctaaagagcatgaagcttgctgtcatgatcacaaaaaacactaa

SEQ ID NO: 7369 - DNA, 3558 bp, Helicobacter pylori
  CDS (1)...(3558)
atgcaaaaaatcattgaggattcattagaattagctaaaaaactgcaagatagtatcagtaaccatttgagcgagcaagaaaaagcgttccattttaaaatgcaaaagcttttaaacaaccccgaaaacaaagtcatgcttatagagcttatggatcggagttttaggtgtttggacaataaagcccgctttgaaatgattgagcatgttttagacaaatacaaaagccgtgagattttttcttcgtttgaaaaatggcttttaatggggtttttaagctttgggaaaatgctgcctgatatgagcgtgcctttctttgtcaataaaatcagaagcgacacgaaagcaatggtcttggatcaagaagagagccaattaagagagcggattttaaaaagaaaaaatgagaaaatcattttgaacgtgaattttattggcgaggaagttttaggcgaagaagaagcgtctgcgcgttttgaaaaatactctcaagccctaaaatccaactacatccaatacatttccattaaaatcacaacgattttttctcaaatcaatatccttgattttgaatactctaaaaaagagattgtcaaacgcttagacgctctttatgctttagctttagaagaagaaaaaaagcaaggcatgcctaaattcatcaacttggatatggaggaatttagggatttagagcttacggtggaatcgtttatggagtctatcgccaaatttgatttgaacgccggtattgtgttgcaagcttatatccctgattcttatgaatatttgaaaaaactgcacgctttttctaaagaaagggttttaaaagggttaaagcctattaaaatccgctttgttaagggagcgaacatggagagcgaagagacgatcgcttctatgaaagactgggcgttacccacattttctagtaagcaagacaccgattctaattacaacaaaatgctggattttgttttagagggcgacaattataaatacattcatattggtgcagcgagccataatatttttgaaatcgcctatgtctatacgcgcatccatgcccttaatgaccctgttgtgttagagcattttagctttgaaatgctagagggcatgagcttgcaagcgagccaggaattaaaagagatgcacaaactcattctttatgcgccggtgtgcgatgaagcgcatttcaacaatgcaatcgcttacttggtgaggaggctagatgaaaacacttcaagcgataatttcatgaaagctttctttaacctcaaagtaggcacgagcgaatggaaagaccaagagcaacgctttttaaacagccttaaagggatcgccactttagacaataccacccacaggacccaagacagaaacgccaaacaaaccgggcataccacctacccaaaccactcctttaaaaacgaaagcgataccgattttattttaaaagccaaccgagaatgggctaaaaaagtgcgcgataaaatgcataacgcccctattttagagctttacccagaaatagatgggaggtttgaagatcctaatttaacccctttagaagtctttgatagaatccatcataaaaaaatcgccagcgtgcatttagcggataaagaagcgattttaaaagccctagaagtggctaaaagcgataagagccgtttcagtcaaaaaagcttcacagaaatccatgctttattgagtcaaaccgctcagctttttagagaaagaagaggcgatttaatagggatttccgctttagaagtgggtaagactttcgctgaaacggacgctgaagtgagcgaagccattgactttttagagttttacccttacagcttaagggtgttacaagagcaaaataaaaaaacgaaattcacccccaaaggcgtgggtgtggtcatcgctccatggaatttccctgtgggcatttctgtaggcactatcgctgcccccctagccgctggcaatcgggtgatttacaagccctcaagtttgtctagcgtaacgggttataagctttgcgagtgcttttgggatgcgggcgtgcctagagatgcgctcatttacttgccctctaaagggagcgatattagcgagcatcttttaaaagatgaaagcatcaagtttgccattttaacagggggtgaagacaccgcttataaaatgctcaaggctaaccccactttagccttaagcgctgaaacaggcggtaaaaacgccactattgtgagcaaaatggcagacagagaccaggcgattaagaatgttatccattcagcttttagcaattcggggcaaaaatgctccgccacttcgcttttagtgttagaaaaagaagtctatgaagatgagaatttcaaaaagactctaatagatgcgactctaagccttagcgtgggcgatccttttgatttcaaaaacaaaatcggtgctctagcggacaagcctaatgaaaaggtcatcaaagccatagatgaattgaaaagctatgaaaattacgaaatcccagcaagctttgttgatgataacccctatttgatgaagccaagcatcaaatacggcactaaaaaaggcgatttcacgcaccaaactgagctttttacgcccattttatccgtgatgaaagcaaaagatttagacgaggcgatagaaatagtcaattctaccggttacgggctgactagcgcgttagagtctttggacgaaagggagtgggaatattatttagaacgcattgaagccggtaatatctatatcaacaaacccaccacaggagcgattgtcttgcgccagccttttgggggggttaaaaaatccgctgtggggtttgggaggaaagtaggcattttcaactatatcacgcaatttgtgaatatccatcaagaagaagaagatgaaaacgccttaaaaaaccccttaagcgaagctttagagggcttgactcaaaaaggctatgatgaacacacgcatgagttgaaacgcgcgatttttatggcaaaaagctacgcttatcattataagcatgaattcagccaagctaaagactatgtcaaaatcagaggcgaagacaaccttttttcctacactaaagttacaagcgtgggctatcgcatcaccgaaaaggacactttaagcgacatgttaggcgttgctttagcatgcttaatttctcaaatccctttaacgatcagcatagaaaacgaacgagcgaacaaagatttaaccttttttttagaatgcttaaaagcactccaagcaaacgcccctatcgtttatgaaagcttgcaaaaatttagcgagaagttgaacgctttcaatcgtgtccgttatctcaaaagcgatttggatttattgcacgaacaagcaagcagattagggatggttttagccacggctaaaccctgcttgaatgggcgttttgaattgctgtattaccacttagagcgatcggttagcatttcgtatcatcgttatgggaatttaggctcaagggttttaaggcaacccacttgccacaaatcatgctgtgctgaaaaataa

SEQ ID NO: 7370 - DNA, 600 bp, Helicobacter pylori
  CDS (1)...(600)
atggtaaaaattggagtttgtggtcctgtaggaagcggtaaaaccgccttgattgaagctttaacgcgccacatgtcaaaagattatgacatggcggtcatcactaatgatatttacacgaaagaagacgcagagtttatgtgcaaaaattcggtgatgccacgagataggatcattggcgtagaaacaggaggctgtccgcacacggctattagagaagacgcttctatgaatttagaagcggtagaagaaatgcatggccgtttccctaatttggaattgcttttgattgaaagcggaggcgataacctttcagcgacttttaacccggagttggcggattttacgatttttgtgattgatgtggctgagggcgataaaatccccagaaaaggcgggccaggaatcacgcgctcagacttgcttgtcatcaataagattgatttagccccctatgtgggagcggacttgaaagtcatggaaagggattctaaaaaaatgcgcggcgaaaagccctttatttttacgaatatccgcgctaaagaaggtttagacgatgtgatcgcttggatcaagcgcaacgctttattggaagattga

SEQ ID NO: 7371 - DNA, 717 bp, Helicobacter pylori
  CDS (1)...(717)
atgaaactcaccccaaaagagttagataagttgatgctccactacgctggagaattagctaggaaacgcaaagaaaaaggcattaagcttaactatgtggaagcggtagctttgattagtgcccatattatggaagaagcgagagctggtaaaaagactgcggctgaattgatgcaagaagggcgcactcttttaaaaccggatgatgtgatggatggtgtggcaagcatgatccatgaagtgggtattgaagcgatgtttcctgatgggaccaaactcgtaaccgtgcatacccctattgaggctaatggtaaattggttcctggtgagttgttcttaaaaaatgaagacatcactatcaacgaaggcaaaaaagccgttagcgtgaaagttaaaaacgtgggcgacagaccggttcaaatcggttcacacttccatttctttgaagtgaatagatgcctagactttgacagagaaaaaactttcggcaaacgcttagacattgcgagcgggacagcggtaaggtttgagcctggcgaagaaaaatccgtagaattgattgacattggtggcaacagaagaatctttggatttaacgcattggttgataggcaagcagacaacgaaagcaaaaaaattgctttacacagagctaaagagcgtggttttcatggtgctaaaagcgatgacaactatgtaaaaacaattaaggagtaa

SEQ ID NO: 7372 - DNA, 1338 bp, Helicobacter pylori
  CDS (1)...(1338)
atgaaaatttttgggactgatggcgtgaggggtaaagcaggggtgaaactcacccccatgtttgtgatgcgtttaggcattgctgccggattgtattttaaaaaacattctcaaacgaataaaattctaatcggtaaagacaccagaaagagcggctatatggtagaaaacgctttagtgagcgctctcacttccataggctataatgtgatccaaatagggcctatgcctacccctgcgatcgcttttttaaccgaagacatgcgctgtgatgcgggcattatgataagcgcgagccacaacccttttgaagacaatggcatcaagtttttcaattcctatggttataaactcaaagaagaagaagaaagagcgattgaagaaatctttcatgatgaagaattactgcattctagctataaagtgggcgagagcgtcggtagcgctaaaaggatagacgatgtgatagggcgctatatcgcgcatttgaagcactctttccccaaacatttgaatttacaaaaattaaggatcgtgctagatacggctaatggcgcggcttataaggtggctccggtcgtttttagcgagcttggggctgatgttttagtgatcaatgatgagcctaatgggtgtaacattaatgagcaatgcggggctttacaccctaaccaattgagccaggaagtgaaaaaataccgtgcggatctaggctttgcttttgatggcgatgccgataggctagtggtggtggataatttagggaatatcgtgcatggggataagcttttaggggtgttaggggtttatcaaaaatctaaaaacgccctttcttctcaagcggttgtcgctacgagcatgagcaatttagcccttaaagaatacctgaaatcccaagatttagaattgaagcattgcgcgattggggataagtttgtgagcgaatgcatgcgattgaataaagccaattttgggggcgagcaaagcgggcatatcatttttagcgattacgctaaaacgggcgatggtttggtgtgcgctttgcaagtgagcgcgttagtgttagaaagcaagcttgtaagctctattgcgttaaacccctttgaactatacccccaaagcctagtgaatttgaatatccaaaaaaagccccctttagaaagcctgaaaggttatagcgctcttttaaaagaattagaccaactagagatccgccatttgatccgttatagcggcactgaaaacaaattacgaatccttttagaagctaaagacgaaaaacttttagaatccaaaatgcaagaattaaaagaattttttgaagggcagttgtgctaa

SEQ ID NO: 7373 - DNA, 390 bp, Helicobacter pylori
  CDS (1)...(390)
atgagaaaaatctatgctaccggtaaaagaaaaaccgctatcgctaaagtgtggctcactcccggtaaaggcgaattgagtatcaatgaacagagcttgaatcaatggttaggcgggcatgaagccattaaaatgaaagtcatgcagcccttgcttttaaccaaacaagagcaatctgtggatattaaagcggtggtttttggtgggggctactcagcgcaagcggaagccttaaggcatggcatttctaaagctttgaacgcttatgatattgcttttagagccattttaaaacctaaaggcttgctcactagggattcaagggtggttgaacgcaaaaaatatggtaaaagaaaggccagaagaagcccacaattctccaaaaggtaa

SEQ ID NO: 7374 - DNA, 426 bp, Helicobacter pylori
  CDS (1)...(426)
atgacaaagactgctaaagtcaatgacatcgttcgtgattgggtcgttttagacgctaaagacaaagtttttggccgcttgatcactgaaatcgctgtgcttttaagaggcaaacaccgccctttttacactcctaatgtggattgtggggattttgtggtggttatcaacgccaataaggttaaattttcaggcatgaagttagaggataaagagtattttacccattcaggctattttggcagcactaagagcaagactctccaagaaatgctagaaaaaacccctgaaaagctctaccacttagccgttaggggcatgctccctaaaacgaaattagggaaagcgatgattaaaaaactcaaagtttatcgtgatgacaagcaccctcacaccgcacaaactagcaaaaaggacgctaaatga

SEQ ID NO: 7375 - DNA, 1863 bp, Helicobacter pylori
  CDS (1)...(1863)
atgggaaaagttattggaattgatttagggacaaccaactccgcaatggcggtttatgaaggcaatgaagcgaagattattgcgaataaagagggtaaaaacaccactccttctattgtagcctttacggataagggcgagattttagtgggcgagagcgccaaaagacaagcggtaaccaacccagaaaaaaccatttattctattaaaagaatcatgggtttgatgtttaatgaagataaggctaaagaagctgaaaaacgcttgccttataagattgtggataggaatggggcttgcgcgattgagatttcaggtaaaatttatacccctcaagaaatttcagccaaaattttaatgaagctcaaagaagacgctgaaagttatttaggcgaaagcgttacggaagcggttatcacggttcctgcttattttaacgacagccaaaggaaggcgactaaagaagcgggcacgattgcagggcttaacgttttaaggatcatcaatgagcctaccagcgcggcgttagcttacggcttggataaaaaagagagcgaaaaaatcatggtttatgatttgggtggggggacttttgacgttaccgtgttggaaacgggcgataatgtcgtggaagttttagccacagggggcgatgcgtttttaggaggcgatgattttgacaatcgtgtgatcgatttcttagcggctgagtttaaaaacgaaacgggtattgaaattaaaaacgatgtgatggcgttgcaacgcctgaaagaagcggctgaaaacgctaaaaaagaactgagctctgcgatggagactgaaatcaatttgccctttatcacagcggacgctaccgggcctaaacacttggttaaaaaactcactagggctaaatttgaaagcttgacagaagatctcgtggaagaaacgatttctaaaattgaaagcgtgatcaaagacgcggggctaaccaaaaatgagatttcagaagtggtgatggtgggtggctctactcgtatccctaaagtccaagaaagggtgaaagcgtttattaataaagagttgaataaaagcgtcaaccctgatgaggtcgtagcggtgggagcgagcattcaagggggtgtgttaaaaggcgatgtgaaagatgtgcttttattagacgttacgcctttaagccttgggattgaaactttagggggcgtgatgactaaagtgattgatagaggcacgaccattcctgcgaaaaaatctcaagtgttctcaaccgctgaagacaaccagcccgccgtgtccattatggttttacaaggcgaaagggaattggcaagggataataaatctttgggtaaatttgatttgcaaggcatcgcgccagctccaagaggcatgccgcaaattgaagtaacctttgatattgacgctaatgggattttaaccgtgtcagcgcaagataaaaataccggcaaaagccaagagattaaaatttctggttctagcgggttgtctgatagcgagattgaaaaaatggttaaagacgctgaattgcacaaagaagaagacgccaggaaaaaagaagtgattgaagcgagaaaccatgccgatagtttggcacaccaaacccaaaagagccttgatgagcataaaacgaacttgaatgaaaacgacgctaacgagatccaaaacgccattaacgcccttaaagattgcatcaaaaacgataacgctactaaagcggagcttgaagacaaaaccaaagcgttgacgcaagcggctcaaaaactaggcgaagccatggcgaataaaaacaacgccgagcagcccaagaaaaaagacgatgatgtgattgatgcggaagtggaatga

SEQ ID NO: 7376 - DNA, 2211 bp, Helicobacter pylori
  CDS (1)...(2211)
atgaagcaccttattatcgtagaatccccagcaaaagccaaaaccattaaaaattttttggataaaaattatgaagttgttgcctctaaagggcatgtcagggatttatccaaattcgctttaggcattaagattgatgaaaccggcttcactcctaattatgtcgtggataaagaccacaaagagcttgtcaaacagatcatagagctttctaaaaaggcatctattacttatatcgctaccgatgaagacagagaaggggaagcgataggctatcatgtggcatgtttgattggggggaaattggagagctatcctaggattgtttttcatgagatcacgcaaaatgcgattttaaacgttttaaaaaccccacgaaaaattgacatgtttaaggtcaatgcccaacaagccagacgattattagatcgaatcgtgggttttaagctcagctcgttgattgcatcaaaaatcactaaaggtttgagcgctgggcgggtgcaaagcgcggctttaaagcttgtgattgatagagagaaggaaatcagaccctttaagcctttaacctacttcacgctagacgctttgtttgagccgcatttagaagcgcaactcatcagctataagggcaacaaactcaaagcccaagaactcattgatgaaaaaaaagcccaagagattaaaaacgaattagaaaaagaaagctatattatttctagcattattaaaaaatctaaaaaatcccccacaccgccccctttcatgacttctactttacagcaaagcgcttccagtcttttaggcttttcgcccacaaaaaccatgagcatcgctcaaaaattatatgaaggcgtagccaccccacaaggcgttatgggggtgatcacttacatgaggaccgatagcttgaatatcgctaaagaggctttagaagaagcgagggctaagattttaaaagactatggcaaagactacctaccccctaaagccaaagtctattccagcaagaataaaaacgcccaagaagcccatgaagcgatcaggcccacttctattattttagagccaaacgctttaaaagactaccttaagcctgaagaattaaagctctatactttaatttacaaacgctttttagcttctcaaatgcaagacgctctttttgaaagccaaagcgtggttgtggcttgcgaaaaaggcgagtttaaagcgagtggcagaaaactcctttttgatggccattataaaattttaggcaatgacgataaggacaaattgctccccaatttgaaagaaaatgatcccattaaattagaaaaattagagagcaacgcccatgttacagagcctccagcacgctattcagaagcgagtttgattaaagttttagaaagtttaggcataggcaggcccagcacctacgccccaacgatttctcttttacaaaacagagactacatcaaggtagaaaaaaagcaaatcagcgctttagagagcgcttttaaagtgatagaaattttagaaaagcattttgaagaaatcgtggattctaaattcagcgcttctttagaagaagagcttgataatatcgctcaaaataaagccgactaccagcaagtcttaaaggacttttactacccttttatggataaaattgaagccgggaaaaagaatatcatctctcaaaaagtgcatgaaaaaaccggccaatcatgccctaaatgcgggggggaattagtcaaaaaaaatagccgttatggggagtttatcgcttgcaacaattaccctaaatgcaaatacatcaaacagactgaaaacgctaatgatgaagccaagcaagaattgtgcgaaaaatgtggaggggaaatggtgcaaaaattcagcagaaacggggcgtttttagcttgcaacaactaccctgaatgcaaaaacaccaaatcgttaaaaaacacccctaacgccaaagaaacaatagaaggcgtgaaatgcccagaatgcggaggggatattgccttaaaaaggagtaagaaaggctcgttttatggctgcaacaattaccctaaatgcaattttttatccaaccataagcccatcaacaagcgttgtgagaaatgccattatttgatgagtgaaagaatctatcgcaaaaaaaaggcgcatgaatgcatccaatgcaaagagcgcgtgtttttagaggaagataatggctaa

SEQ ID NO: 7377 - DNA, 612 bp, Helicobacter pylori
  CDS (1)...(612)
ttgagtagaaacgaagtgttgttaaacggagacattaattttaaagaagtgcgttgcgtgggcgataatggcgaagtgtatgggatcatttcttccaaagaagcgctaaaaatcgctcaaaatttaggtttggatttggttttgatttcagcgagcgcgaaacctcccgtgtgtaaggtgatggattataataaattccgctaccaaaatgaaaagaaaatcaaggaagccaagaaaaagcaaaagcaaattgaaatcaaagagatcaagctttccactcaaatcgcgcaaaacgatattaactataaagtcaagcatgcgagagaatttattgaatccaataagcatgtcaaattcaaagtggttttaaagggtagggagagtcaaaactcaaaagccgggcttgatgtgctttttagagtccaaacgatgatgcaagatttagccaaccctgaaaaagagccaaaaaccgaggggcgttttgtttcgtggatgtttgtgcctaaggctaaagaagcccccaaaaatgaaaagaaaaccaaagaaaataacccgccttttaatcgtattaaccttatgaaaggagaaaatcatgccaaaaatgaagactaa

SEQ ID NO: 7378 - DNA, 195 bp, Helicobacter pylori
  CDS (1)...(195)
atgccaaaaatgaagactaatcgcggcgcgtctaagcgtttcaaagttaaaaaaaacttgattaagcgtggcagtgcttttaaaagccatattttgactaaaaaaagccctaagcgtaaagccaatctaaacgcgccaaaacatgtgcatcacactaacgcgcattctgtcatgtcgttgctttgcagggcttaa

SEQ ID NO: 7379 - DNA, 1281 bp, Helicobacter pylori
  CDS (1)...(1281)
atgctaaccattaaagatattcatgctttagaagtgatggatagtaggggcaatcctaccattcaagccagcgtgattttaagcgataacactaaggcgagcgcgattgtgcctagcggggcgagcaccggtaaaagagaagcgttagaattaagggataatgacaaaacccgttttttgggtaaaggggttttaagggcatgcgaaaatgtcaatagcgtgatcaaacaccatttgatagggcttgaagcgactaatcaggcctttgtagatgagaggttaagggctttagacggcacgcctaattacgctaatttaggggcgaacgctgttttgggcgtttctatggcgttagcaagggctagcgcgaaggctttaaatctgccattataccgctatttagggggggctaacgctttgactttgccggtgccgatgctcaatatcatcaacggcggaacgcatgcgaacaattccatagacttccaagaatacatgatcatgcctttagggtttgagagttttaaagaagctttaagagcgagtgcggaagtctatcacacgcttaaaaaacttttagatgaaaagaatcagctcacaagcgtgggcgatgaggggggctttgcgcctaattttaacaacaatgtagaacctcttgaaatcatttctcaagccattgaaaaagccggctataaattaggtgaagaaatagcgctcgctttagatgtggcgagcagtgagttagtggatgaacatttcaattaccatttaaagggcgaaaataagattttagattcgcatgaattagtggcttattataaagagttggtggcaaaatacccgattgtgtccattgaagatggtttgagcgaagacgattgggagggttgggcgtttttaagcaaggaattagggcgtcaaatccaattagtgggcgatgatttgtttgtaacgaacgcgagcatcttgcaaaaaggcattgaaaaaaacgttgcaaacgccattttgatcaaacccaatcaaatcggcaccattagtgaaactttagagaccataagattggccaaacaccatgcctatcaatgcgtgataagccatagaagcggggagagtgaagacagctttatcgctgattttgcggtcgcattgaatacgggagagattaaaaccggatccaccgcaaggagtgaaaggatcgctaaatacaaccgccttttggagattgagcatgaattaaaaggggggatttatatcggcaaagagttgtttaagcatggctag

SEQ ID NO: 7380 - DNA, 972 bp, Helicobacter pylori
  CDS (1)...(972)
atgttcaaacgattgagaagattacgaagcagcgaaaatttaagagcgatggtgagagaaacacgtttaaatattaatgatttcatcgctcccttatttgtcatagaaagcgatagcggtattaaaaacgaaatcagctccatgcctggcgtgtatcaaatgagtatagagcctcttttaaaagaatgcgaagaattagtgggtttaggcataaaagccgttttattgtttggcattcctaaacataaggacgctacaggaagccatgcgttaaataaggatcacattgtcgcaaaagctacgagagaaattaaaaaacgatttaaggatttgatcgttatagcggatttgtgtttttgcgaatacaccgaccatgggcattgcgggattttagaaaacgcttctgtgtctaacgataaaacgctaaagattttaaatcttcaagggcttattttggctgaaagcggtgtggatattctagctccaagcaacatgatggatggcaatgttttaagcttgagaaaagcactggataaggccgggtattttcacacgcccatcatgagttattccactaaatttgcgagcagttattacgggccttttagagatgtagccaattctccgccgagttttggcgatcgcaaaagctatcaaatggattacgctaaccaaaaagaagcgcttttagaaagcttggaagatgaaaaacagggtgcggatattttaatggtgaagccggctttagcgtatctggatattgttaaagaaatcagagatcacactttgctccctttagcgctctataatgtgagtggggaatacgccatgctcaaactcgctcaaaaacacaacctgatcaactatgaaagcgttttattagaaacgatgacttgttttaaaagagcgggagcggatatgattattagctatcatgctaaagaagtggctaacttattacaaaggaattga

SEQ ID NO: 7381 - DNA, 678 bp, Helicobacter pylori
  CDS (1)...(678)
atgatagaagttttaatgatagaagatgatatagaattagccgagtttttgagcgagtttttgctccaacatggcattcatgtaatcaattacgatgagccatacaccggcattagtgcggctaacacacaaaattatgatttgttgttattggatttgactttgcctaatttagacgggcttgaagtgtgtaggcgcatttccaaacaaaaacatatccctattattatttcttcagcgagaagtgatgtggaagataagattaaagcgctagattatggggctgatgattacctccctaaaccctatgatcctaaggaattattagctcgtatccaatccttgctcaggcgttctcataaaaaagaagaggtgagtgagccaggcgatgcgaatatctttagggtagataaggatagccgagaagtgtatatgcatgaaaaaaagctagacttaactagggctgaatatgaaatcctttcgcttctcatcagcaaaaaaggttatgtgtttagccgtgaaagcattgcgattgagagcgagagcatcaaccctgaaagctctaataaaagcattgatgtgatcattggccgtttgcgatccaagattgaaaaaaatcctaaacaaccgcaatacatcatctctgttagagggattggttataaattagaatactga

SEQ ID NO: 7382 - DNA, 1269 bp, Helicobacter pylori
  CDS (1)...(1269)
ttgaaccaagttgaattactctctccagctggtaatttaaaaaaacttaaaatcgctctcaactatggggctgatgcggtttatgggggagtgagccatttttctttacgcaatcgtgcaggcaaggaattcactctagagacctttaaagaagggattgactacgcccatgcgttggataaaaaagtctatgcgaccatcaatggtttccctttcaattcacagctcaaacttttagaagagcacctttataaaatggcagagctagagccagacgcttttattatcgctgcgcctggtgtcatcaagctcgcttcaaaaatcgccccgcatattcctgtccatttatccacgcaagcgaatgttttaaacacgctagatgcgcaagtgttttatgatttaggggttaaacgcattgtgtgcgctagggaattgagcctgaatgatgcggttgagattaaaaaagccttacccgatttagaattagaaatctttgtgcatgggagcatgtgctttgccttttcagggcgttgcttgatttcggctttacaaaaggggcgcgtgcctaatagagggagttgcgcgaatgattgccggtttgattatgaatattatgtgaaaaaccccgataacggcgtgatgatgaggttggttgaagaagagggcgtaggcacgcatatttttaacgctaaagatttgaatctctctggtcatatcgctgaaattttaagttccaacgccattagtgcgcttaagattgaagggcgcaccaagtccagttactacgctgcgcaaaccacgcgcatctatcgtttagcggttgatgatttttaccataacaccttaaagccgagtttttatgctagcgaattgaacacgcttaaaaacaggggttttacggacggctatttgatgcgaaggccttttgaaagattggatactcaaaaccaccaaacagccattagcgaaggggattttcaagtcaatggcgaaataaccgaagacgggcgtttttttgcatgcaaattcaccacgaccactaacaccgcttatgaaatcatcgctcccaaaaatgcggctatcacgcccatagttaatgacattggcaagatttatacctttgaaaaacgctcttatttagtgctttataaaatccttttagaaaataacaccgagttagaaactatccatagcgggaatgtgaatttagtgcgactgcccgcacccttaccggcttttagttttttacgcacccaagtcagagtctaa

SEQ ID NO: 7383 - DNA, 1173 bp, Helicobacter pylori
  CDS (1)...(1173)
atgattagttttaaagaagctctaaaaatccattctaacattcccctaaaacccttagaagtagaggttgtctctttgtttgaaagcgcagggcgcattttggcagaggatattatttgcgttcacgctttgcctaaattcaatcaaagcgctatggacggctatgggtttaaaatgcaagacttgggccaaaaaactcaagttatccaacacatctttgccggggatgatgtgagcgctttagaagtcaaagaaaatgaatgcgttaaaatcatgactggagcgatggtgccaaagggaatagaaacgatcgttcccatagaatgcatgctagagagtcataaagatttcgccctagctcctaaagattttaaaattcacgctaatatccgtcaaaagggcgagaacgcttctttaaacagcgttttagtccctaaaaatacccgtttgaattatggccatatcgcgctcattgcctctcaagggttcaaagaaatcaaagcgtttagaaaattaaaaatcgctctctttagtagcggcgatgaattagtgcctttagggcaaaacgccctagagtgccaggtttatgatgttaattcagtgggtgtttttaacatgcttaaaaactacaacacgcattttctaggggttttaaaagatgataaaaatttacagcttaaaatacttgaattgcaaggctatgatgtcatcctttcaagtgcgggggtgagcgtaggggataaagacttttttaaagacgctttgaaagaaagaaacgcccttttttattacgaaaaagtcaatctcaaacctggaaagccggtaactttagcccaactcaatcaaagcattattataggcttaccgggtaatcctttaagttgcttactggttttacgagttttgattctacccttattggagcgcttatccttaaataaagattttaaattaaaaccctttaaggctcaaatcaatgcccctttaaagcttaataacaaacggacgcatttaatcttaggcaactattcaaaccaccaattcattccttacaacaaccgctatgaatcaggagcgattcaagcccttgcgcaagtggattctatcgctttaattgatgaaggagtgggattggttcagggcgaaattgaaattttaaggtttgaaaattaa

SEQ ID NO: 7384 - DNA, 924 bp, Helicobacter pylori
  CDS (1)...(924)
atgttagttaaaggcaatgaaatcttattgaaagcccataaagaaggttatggggtgggggcgtttaatttcgtgaattttgaaatgctaaacgctatttttgaagcaggaaacgaagaaaattccccgcttttcattcaagcgagtgaaggggcgatcaaatacatggggattgatatggcggtgggcatggtgaaaatcatgtgcgaacgctacccacacattcctgtagccttacacctagatcatggcacgacttttgaaagttgcgaaaaagccgtgaaagcgggtttcacttctgtgatgattgacgcgtctcatcatgcgtttgaagaaaatttggaattgacttctaaagtggtcaaaatggcgcataacgctggagtgagcgtggaagcggagttggggcgtttaatggggattgaagacaatatttcagtggatgaaaaggacgcggtgttagtgaatcctaaagaagcggagcggtttgtcaaagaatctcaagtggattacttagccccagccattgggacaagccatggagcgtttaagtttaagggtgagccaaaattggattttgaacgcttgcaagaagtcaaaaggctcactaatatccctctagttttgcatggagcgagcgcgataccagatgatgtgaggaaatcttatttggacgctggaggcgatttgaaaggttctaagggcgtgccttttgaatttctacaagaatctataaaaggggggatcaataaggtcaataccgatacggatttaaggatcgctttcatcgcagaagtgcgcaaggtggctaatgaagataagagccaatttgatttgaggaagtttttttctccggcccaattagcgcttaaaaatgtggtcaaagagcgcatgaaacttttgggcagcgctaataaaatttaa

SEQ ID NO: 7385 - DNA, 705 bp, Helicobacter pylori
  CDS (1)...(705)
atgacaaaaattgccatggctaatttcaaatccgctatgcctgtttttaaaagccatgcgtatttaaaagaattggaaaaaactttaaagccgcagcattttgatagggtgtttgtattccctgattttttggggttattgcctaacgcgtttttgcatttcactttaggagcgcaaaacgcttaccctagagattgtggggcttttaccggtgaaatcacttccaaacatttagaagaactgaaaatccacacgcttttaatagggcatagcgagaggcgagtgcttttaaaggaaagccctagctttttgaaagaaaaatttgatttttttaaaggtaaaaattttaaaattgtctattgtattggcgaagatttaacgaccagagaaaagggttttagggctgtaaaggaatttttaagcgagcaattagaaaatattgatcttaattattccaatttaattgtggcttatgagcctatttgggcgattggcactaaaaaaagcgcgtctttagaagatatttacctcacgcatggttttttaaagcaaatcttaaatcaaaaaacgcccttattgtatggggggagcgtgaatgcgcaaaacgctaaagaaattttagggattgatagcgtggatggcttattgattgggagcgcgtctttggaattagaaaattttaaaacaatcatttcatttttataa

SEQ ID NO: 7386 - DNA, 1158 bp, Helicobacter pylori
  CDS (1)...(1158)
atgaaagatagttttcttttcacttccgaatcagtaaccgaagggcatcctgataaaatggccgatcagatcagcgatgcggttttagattacattattgagcgggataaaaaagccaaagtcgcatgcgagactttagtttctaatggtttttgcatgatcactggcgagttaaaaacttctgtttatgccccgatgcaagagatcgcaagagaagtggttaaaaaaattggctatacagacgctctttatggctttgattacagaagcgcggcggttttaaatggcattggcgagcaaagccctgatattaatcaaggcgtggatagagaagatggcgagattggggcgggggatcaagggcttatgtttggttatgcatgcaaagagactgaaacgctcatgcctttacccatccatttagcgcaccagctcgctttcgctctagctcaaaaaagaaaagacaacaccttgccttttttaaggcctgatggcaagtctcaagtgagcgtgcgttatgaaaacaacaagcctgtaagcgttgatacgattgtcatttccacccaacattccccagaagtttcacaaaagcatttaaaagaagcggtgattgaagagatcgtgtataaggttttacccaaagaatatttgcatgacaatatcaagttttttataaaccctacaggaaaattcgtcatcggtgggcctcaaggcgatgcgggtttgacaggtagaaaaatcatcgtggatacttatggagggttttgcccgcatggagggggagcgtttagcgggaaagaccctagcaaggtggataggagcgcggcttatgcggcccgctatgtggctaaaaatttggtagcgagcggggtttgcgataaagcgaccgtgcagcttgcttatgcgattggggtgatagagcctgtgtctatttatgtgaacacgcataacacgagcaagcattcaagcgcggagttggaaaaatgcgtgaaatcggttttcaaactcacgccaaaaggcatcattgaaagcttggatttgttaagacccatttattcgctcacttcagcttatgggcattttgggcgcgagttagaagaattcacttgggaaaagactaacaaggttgaagagattaaagcgttctttaagcgttaa

SEQ ID NO: 7387 - DNA, 996 bp, Helicobacter pylori
  CDS (1)...(996)
atggaattttacgcctctcttaaatccattgcgatgcatgttccaagcgagcgtgtgaaaaatgcagagttccagcaatttttggataccagcgatgaatggatagaaaaaaggaccggtatcaaagagcgccgtttcgctaacgatgaagaaaaaagcagcgatttaggggtaatagcggctaagcaggccatagagagagcgcatttgactccacaagacattgatttagtggttgtggccactttaagccctgattttttagccatgccttcaaccgcttgcgtgctgagcgcgaaattaggcattgaaaacaagccggcgtttgatatttcagccgcttgcacgggttttatttatttgttatcggtggctaaggcttatgttgagagcgggatgtatgaaaatgtgctgattgtgggggcagaaaaaacgagtagcgtgttggattttaaggatagggggacttgtattttatttggcgatggggctggggcgtgcgtgataggcaggaccaagcgtttaaaagaaagcgttttagacgtgcagatttcagcgaatgggaatttttctaattatctttatacgccaaggactctaaaacccacgccctttaacgctaaagaagaagctttagagccttttttgcgcatgaaaggcaatgaagtgtttaaactagcggtaaaaacgcttttaaaagatgtggaaacgatcttagaaaaaaacgctctcaaacctgaagatgtgcgtttgttcatcccgcatcaagctaactttaggatcattcaagcggtgcgggagcatttggattttaaagatgagcaagtggttttaaccgtgcataaatacggcaacacttcagcagccagtatccctatggccatgtgtgaagcttatgaagaagggcgtttgaaaaagggcgatttaatgcttttagacgcttttggtgggggattgacttggggttcagcgttggtgtattttggaggaatttaa

SEQ ID NO: 7388 - DNA, 981 bp, Helicobacter pylori
  CDS (1)...(981)
atggcaaaacatgatttagtgggatcggctctctgggacgcgtattctaaagaagttcaaaggcgcatggataaccctacgcatttaggggtcatcacagaagagcaggctaaagccaaaaacgctaagctgattgtggcggattacggcgcagaagcatgcggtgatgcggtgaggttgtattggcttgtagatgaaagcacggatattattattgacgcgaagtttaaaagctttggttgcgggacagcgatcgcaagctcagacatgatggtagaattgtgtttgaataaaagagtccaagatgcggtaaaaatcacgaatttagatgtggaaagaggcttaagggatgatccggacacgccggcggtgcctgggcaaaaaatgcactgctccgtgatggcgtatgatgtgattaaaaaagctgccggcatgtatttggggaaaaacgccgaagattttgaagaagaaatcatcgtgtgcgagtgcgctagggtgagtttaggcacgattaaggaagtgattaggctcaatgatttaaaaagcgttgaagaaatcactaattacaccaaagccggcgcgttttgtaaaagctgcgtgagacccggagggcatgaaaaaagggattattacctggtggatattctcaaagaagtgcgcgaagaaatggaagctgaaaaacttaaagccaccgctaacaaatcccaaaatggggaattggcttttagggaaatgactatggttcaaaagattaaagcggtggataaagtcattgatgaaaatatccgcgctatgcttatgatggacggaggggatttggagattttagacattaaagaaagcgatgattacattgatgtgtatatccgctacatgggggcatgcgatgggtgcatgagcgcgactaccgggacattatttgccattgaaaacgctttgcaggaattattggatcgcagtatcagggtgttaccgatttga

SEQ ID NO: 7389 - DNA, 921 bp, Helicobacter pylori
  CDS (1)...(921)
atggaaaaattagtgattggctctagggggagcgaattggccttatggcaagcgaatcacattaaagaacgcttgaaaaaagaatgctctatggaaagcgaaattcgaatcgttaaaaccacaggcgataagattttagatgcacctttaaataagattggcggtaaggggctattcactaaggaattagaagaattgcttttaaaaggcgcaattgatttggcggtgcattctttaaaagatgtgccggtcgtgtttgaaaaggggttagacttggcatgcatcaccaaaagggctgatgtgagggacacttttttgagcgtgaaattccctgatttgatgagcttacctaaaggggccaaggttggcacgacttctttaaggcgctccatgcagatcaaattcaaacgaaaagatctagacacagaaagtttaagggggaatgtccaaacccgtttgaaaaagcttgaatgcggtgaatttgacgctatcattttggctgaagcggggttgtgccgcttaaacgttcaaggggcgaaataccgcaaggcttttagcgtaaaagaaatgattcctagcatgggtcagggggctttaggggtagaaatgctcaaaaaccacaagcattttattacgcttcaaaaactcaacaatgaagaaagcgcgttttgttgccatttagaaagggaatttatcaaagggcttaatggggggtgtcagatccctattggcgtgcatgcgaatttaatgggcgatgaggttaaaatccgggcggttttgggcttgcctaatgggaaagaagtcattgctaaagaaaagcaaggggataaaactaaagcgtttgatttggttcaagagcttttagaagaatttttacaaagtggggcgaaagagattttagaaaaggcgcagttgttttaa

SEQ ID NO: 7390 - DNA, 1236 bp, Helicobacter pylori
  CDS (1)...(1236)
atggcagatgtcgttgtggggatccagtggggagatgaggggaagggaaaaattgttgataggatcgctaaagattatgactttgtggtgcgctatcaaggcgggcataatgctgggcataccattgtgcataagggggttaagcattctttgcatttaatgccctcaggggttttataccccaaatgcaagaacatcatttctagcgcagtggtcgtgagcgttaaggatttgtgcgaagaaatcagcgcgtttgaggatttagaaaatcgtttgtttatcagcgacagagcccatgtgatcttgccctatcatgccaaaaaagacgcttttaaagaaaaatctcaaaacatcggcacgactaaaaaaggcataggcccttgctatgaggataaaatggccagaagcgggataagaatgggggatttattagacgataaaatcttagaagaaaagctaaacgctcatttcaaagccattgagccttttaaaaaagcgtatgatttaggcgagaattatgaaaaagatttgatggggtattttaaaacttacgctccaaaaatttgcccctttatcaaagacacgacaagcatgctgatagaagcgaaccaaaagggtgaaaaaatcctgctagaaggggcgcaaggcacgcttttagacattgatttagggacttacccttttgtaacaagctctaacaccacgagcgctagcgcttgcgtgagcaccggcttaaaccctaaagcgatcaatgaagtgataggcatcacgaaagcctattccactcgtgtgggtaatgggcctttccctagcgaagacactacacccatgggcgatcatttaaggactaagggcgtagagtttggcacgacaaccaagcgcccaaggcgttgcgggtggctggatttggtggctttaaaatacgcttgcgctttgaatggttgcacgcaattagctttaatgaaattagacgttttagacgggattgatgcgattaaggtgtgcgtggcttatgaaagaaagggcgaaagattggaggctttccctagcgatttgaaagattgcacgccaatctatcaaacttttaaaggctgggaaaaaagcgtgggcgtgagaaaattagacgatttagagccaaacgctagagagtatatccgttttattgaaaaagaagtgggggtgaaaattggccttatttctacaagtcctgaaagagaagacacgatttttctatga

SEQ ID NO: 7391 - DNA, 1263 bp, Helicobacter pylori
  CDS (1)...(1263)
atgcatgtattgagcgtgagcgaaatcaatgcgcaaatcaaagcccttttagaagcgacttttttgcaagttagggttcaaggggaagtgagtaatttgacgatccataaggtgagcggtcatgcgtatttttcgctcaaagacagccagtcagtcatcagatgcgtgctgtttaaagggaacgctaacaggctcaaattcgctttaaaagaagggcaggaaatggttgtttttgggggcattagcgtgtatgctccaaggggggattatcaaatcaattgctttgaaatagagcctaaagagataggttcattaaccctagctttagagcaattgaaagaaaaattacgccttaaaggctattttgatgaagccaataaattacccaaaccaaactttcctaaacgagtggcagtcatcacttctcaaaattcagccgcttgggcggacatgaaaaagatcgcttccaaacgatggccgatgtgcgaattggtttgcatcaatactctaatgcaaggggagggctgcgttcaaagcgtggtggagagcatcgcttatgcggatagtttttatgacacaaaaaacgcttttgatgcgattgtagtggctaggggtggggggagcatggaggatttgtattctttcaatgatgaaaaaatcgctgatgctctgtatttggctaaaaccttcagcatgtcagctattgggcatgagagcgattttttattgagcgattcagtggcggatttaagggcttctacgccttcaaacgcgatggagattttgctccctagtagcgatgagtggttgcaaagacttgatgggtttaatgtgaaattgcaccgctcttttaaaactttgctccatcaaaaaaaggcgcatttagagcatttagcggcttctttgaaacgattgagttttgaaaacaagcaccatttaaacgctttaaaattagagaaattaacaatcgctttagacaataaaaccttagaatttttacgccttaaaaaaacgcttttagaaaaaatctctacccaactatccacaagcccttttttacaaaccaaaacagagcgcttaaacaggctagaaaacgccctcaaactcgcttacgcaaatttgaaactgccccaattcggggcgttggtgagtaaaaaccatcaagcgatagaattagaggcattaaaaaggggcgataaaattgaattgagtaatgaaaaagccagagcgagcgctgaaattttgagcgtggatagggtgtag

SEQ ID NO: 7392 - DNA, 2571 bp, Helicobacter pylori
  CDS (1)...(2571)
atgaatttatttgaaaaaatgactgaccaattgcatgaaactttagacagcgcgatcgctttagccttacaccataaaaacgctgaagtaacgcccatgcacatgctttttgccatgctcaataactcccaaggcattctcattcaagccttacaaaaaatgcctgtggatattgaagctttaaaacttagcgttcaaagcgagttgaataagttcgctaaagtttcacaaatcagcaagcaaaacatccaattaaaccaagctctaatccaaagtttagaaaacgctcaaggcttgatggctaaaaggggcgattctttcatcgctaccgatgcgtatcttttggcgaatatgaatctttttgaaagcgttctaaagccttatttagacactaaggaattgcaaaaaactttagaatctttaagaaaaggcaggactatccaggataaaaacgacgattccaacttggaaagtttggaaaaatttggcattgatttgacgcaaaaagccctagaaaataagctggatcccgtgattggaagggatgaagaaatcattcgcatgatgcaaattttgatcagaaaaacaaaaaataaccctattttactgggcgagcctggagtggggaaaacggctgttgtggaagggttagcccaacgcattgtgaataaggaagtgcctaaaacgcttttaaacaaacgggttgtcgctttagatttgagcttattggtggctggggcgaaatacagaggcgagtttgaagagcgcctgaaaaaggtgattgaagaagttaaaaaaagcgcgaatgtgattttattcattgatgaaatccacacgattgtgggggctggggctagtgaggggggcatggatgcggccaatattttaaaacccgcgctcgctaggggggaattgcacacgattggagcgaccactctaaaagaataccgcaagtattttgaaaaagacatggcgctacaaaggcgtttccaacccattttactcaatgagcctagcatcaatgaagctttacagattttaagggggttgaaagaaactttagaaacgcaccataatatcactatcaatgactccgcgctcatagcgagcgctaaactctctagccgttatatcaccgataggtttttacccgataaagcgattgatttgattgatgagggagcggcccaattaaaaatgcaaatggaatcagagccggccaaactctctagcgtgaagcgctccattcaaagactagaaatggaaaaacaagcccttgaaatggaaaacaaagagagcaaccacaaacgcatgcaagaaatccttaaagaattgagcgatttgaaagaggaaaaaatccaattagaagcgcaatttgaaaacgaaaaagaagtgtttaaggaaatttcacgcttgaaaatggaaatggagggcttgaaaaaagaagccgaaaggtttaaacgcaatggggattaccagcaagcggctgaaattgaatactctaaaatccctgaaaaggaaaagaaagaaaaagaattgcagcataaatgggaaacgatgcaacaaaacggggcgttgttgcaaaacgctttaaccgaaaacaacatcgctgagatcgtgagccaatggacgcacatcccggtccaaaaaatgctccaaagcgaaaaaaatagggttttaaacattgaaagcgaattgcaaaaaagggtggtggggcaagaaaaagcgctcaaagcgatcgctaaagcgattaaaaggaataaggctgggcttagcgatagcaacaagcccatagggagtttcctctttttagggccaacaggcgtgggtaaaaccgagagcgctaaagctttggcgcaattcttgtttgatagcgataaaaatcttatacgaattgacatgagcgaatacatggaaaagcacgctatcagccgtcttattggggccgctcctgggtatgtgggctatgaagaaggcgggcaattgaccgaagcggtgcgcagaaaaccttatagcgtagtgttattagatgaagtggaaaaagcccatccggatgtgtttaacctcttgttacaggttttagatgaggggcatttaaccgatagtaagggcgtgagggtggatttcaaaaacacgattttgattttaaccagcaatgtggctagcggcgcgcttttagaagaggatttgagtgaagccgataaacaaaaagcgatcaaagagagcctgagacaattcttcaagccggaatttttaaaccgcttagatgaaatcatctcctttaacgccctagatagtcatgctatcatcaatatcgtggggatactctttgaaaacgttcaaaaaaaagcgcttgaaaggggcattaatataaccctagacgaaaaagcaaaagaattgatcgccgaagcggggtttgacagattttatggcgctagacccctaaaacgcgcgctctatgaaatggtagaagacaagctcgctgaactcattttagaggataaaattaaagagaatgacagcgtggcgtttgtggtagaaaataacgagattgtgcctaagattaagtga

SEQ ID NO: 7393 - DNA, 1116 bp, Helicobacter pylori
  CDS (1)...(1116)
atggattttcaactccaagctgttgatgataacgcgcgagctggcgttttgaatttagctcattctcaagtagagacacccgttttcatgcccgtaggcacgcaaggctgtatcaaatctttagacgctatggatgcgcaagaaattttaggcgctaaactcattttagccaacacttatcacatgtatttacgaccgggcgagaaagtggttgaacaattagggggcttgcatcgtttcgctcaatttcaggggagttttttaaccgatagcggagggtttcaagcctttagtttgagcgataatgtcaaattgcaagaagatgggatcgtttttaaatcccatattgatgggagcaagcatttattcacgcccattaaagttttggacattcaatattctttgaatagcgatattatgatggttttagacgatttagtgggcttgcccgctcccttaaaacgccttgaagaatccattaaaagaagcgccaaatgggcgaatatgagcctagaataccacaaagaaaataaccgccccaacaacaacctttttgccattatccagggcggaacgcatttgaaaatgcgcagccttagcgtggggttaacgcatgagggttttgatggctatgctataggcggtttagcggtgggggaaagtgtagatgaaatgctagaaaccatcgcgcacaccgcccccttgctccccaaagacaagcctcgctacttaatgggcgtaggcacgcctgaaaatatcctagacgctatcagtttgggggtggatatgtttgattgcgtgatgcccaccagaaacgccagaaacgccacccttttcacgcattctggaaagatttctatcaaaaacgcgccctataaattggatgatacccctattgaagaaaattgtgcttgttatgcttgcaaacgctattctaaagcctatttgcaccatttgtttagagctaaagaactcacttacgctcgtttggccagcttgcacaatttgcatttttatttagagctggttaaaaacgccagaaacgccattttagaaaagcggtttttgagttttaaaaaagaatttttagaaaaataccactcttgttcgcattga

SEQ ID NO: 7394 - DNA, 1218 bp, Helicobacter pylori
  CDS (1)...(1218)
atgtttaattatgaagagctgtttcaaacttataaaacccctttttatctctatgattttgacaagatcaaacaggcttttttgaattataaagaagcgtttaaggggcgtaaatctttgatttgctacgctttaaaggcgaattctaatttgagtatactctctttattggcaaatttagggagtggggcagattgcgtttccataggcgagatacaaagggctttaaaagccgggatcaagccttataaaatcgtgtttagcggggtgggtaagagcgcatttgaaatagagcaagccctaaaactcaacattttatttttgaatgtggaaagttttatggaattaaaaacgattgaaacaatcgctcaatctttagggataaaggctaggatttccattcgaatcaaccctaacattgacgctaaaacgcacccctatatttctaccggtttgaaagaaaataagttcggcgtggaagaaaaagaagctttagaaatgtttctttgggctaaaaaaagcgcgtttttagagcctgttagcgtgcattttcatatcggatcgcaactcttagatttagatccgattacagaagcgagccaaaaggtggctaaaatcgctaaatctttgatcgctttagggattgatttgcgcttttttgatgtgggcggaggcattggcgtgagttatgaaaatgaagaaacgattaagctttatgattacgcgcaagggattttaaattcgcttcaaggcttggatttgaccattatttgtgagccgggccgatcgatcgtggctgagagtggggaattgatcacgcaggttttgtatgaaaaaaaggctcaaaacaagcgctttgtaatcgtagatgcaggcatgaatgattttttacgccccagtttgtatcatgctaagcatgccataagggtcataacgccttgtggggggcgtgagatctcgccttgcgatgtggtagggcctgtgtgtgagagcagcgacacttttttaaaagacgccaatttgccagaattagagccaggcgataaattagccatagaaaaggttggggcttatggctctagcatggccagtcaatacaattcgcgccccaaactcttagaattagccctagaagatcacaaaatcagagtgattagaaaaagagaggctttagaagatttgtggcgtttggaaatagaaggcttagaaggggtttga

SEQ ID NO: 7395 - DNA, 315 bp, Helicobacter pylori
  CDS (1)...(315)
atgtcatacgcaatattcaagcatggcggtaagcaatataaagtcgttgagggcgatattgttttactggataaaatgaataaagagcctaaggctttagtggaattagtggaagtgttagccgtatctaaagagggcaagctttcttgtgggaaaccctttgtgaatggggctaaaattgaagcggaagtgatcaatgaagggcgtagcaaaaaagtcatcactttcaaaaaacgccgccgaaaagacagcaaaaccaagcgtggttttagaagagatttcactcgtgtgagaatcactaaaattgtagcataa

SEQ ID NO: 7396 - DNA, 267 bp, Helicobacter pylori
  CDS (1)...(267)
atggcacacaagaaaggtcaagggagcacgcagaataacagagattctgcaggaagacgcttaggcgtgaaaaaatttggctcagaatttgtgagggctgggaatattatcgtgcgccaaagaggcactaaaatccatcccggtaataatgtgggcatggggaaagaccataccttatacgcgctcatagatggcgttgtgaagtttgagcataaagacagaagccgcaaaaaggtttctgtaattagtgggaattttggggagtag

SEQ ID NO: 7397 - DNA, 864 bp, Helicobacter pylori
  CDS (1)...(864)
atgattttagaagttaaagacttaaaaacttattttttcaccgataagggcgtgaataaagcggtggatggcgtgagttttggcttgaaaaagtctcaaacgctctgcattgtaggggagagcgggagcgggaaaagcatcacttcgctttctattttagggttgattgaaaaacccgggaaaattgttggggggagcattcaatttttagggcaggatttgttgcaactcaaagaaaaacagatgcaaaaagaaatcaggggcaagaaaattggcatgatctttcaagagcctatgacgagcctaaacccttcctacacggtggggtttcaaatcaatgaagtgttgaaaatccaccacccaagccttaataaaaaagaacgattagaaagggtggtctatgagttagagcgcgtgggcattccccatgccggggataaataccatgaataccctttcaatctcagcggagggcagcgccaaagggtgatgatcgctatggctatggtgtgtgagcctgaaatcttgatcgctgatgagccgacgacggcgttagatgtaaccattcaagcacaaattttagaattgatgaaagaattgcaacaaaaaaaaggcacttctattttgtttatcacccacgatttaggcgtggtggcgcaaatcgctgatgaagtggtggtgatgtataaagggcatgtggtggagcaagcgagcgccaaagagctttttgctgacccaagacacccctataccaaggctcttttaaacgccatccctaaaccgggcaaagaataccgcaaaaaacgcttagaaaccgtggatgaaaatgtagattatttaagttttcaaaaggagttacgatga

SEQ ID NO: 7398 - DNA, 807 bp, Helicobacter pylori
  CDS (1)...(807)
atgaagctcttagaaattaaagaattgaaaaaatcctatgcgatagacagggggttattcaagcctaaaagagtgatccatgcgctcaatgggatcagttttgaagtggaacaaaatgaagttttaagcatcgtgggggagagcggttgtgggaaaagcacgacagccaaaattttagccgggattgaaaggcaagatagcggggcgatttatttcaatggcaagcgtcatttgcattttagcaaacaggattggtttgattaccgcaaaaaggtgcaaatgattttccaagacccttattctagcctgaacccaaggtggaaagtgggcgagatcatcgctgaacccttgctgttaaattctcacttttcaaaaaaagaaatcaaaacaaaagtgctagagatcatgcaaaaagtgggcttgaaattagaatggatcgatcgttaccctcaccaattttcaggcggtcaaaggcaacgaatcggcattgctagggcgctcattttgcatcctagcgtggtgatttgcgatgagcctgtgtctgcactagacgtgtccattcaagcgcaagtgttgaatttgctcttggatttgcaaaaagaaatggggctgacttatatttttatcagccatgatttaggggtggtggagcatattagcgataaaatcatcgtaatgaatcaagggcaaatcgtagaaaccggggatgtggatagtgtgataagcgctccaaagcacccttatacgcagaagttactcaatgcggtgccgcatttggaaaaatccatgcaaaggtttgctgaataa

SEQ ID NO: 7399 - DNA, 783 bp, Helicobacter pylori
  CDS (1)...(783)
atgcaaaaagattaccaaaaactcatcgtttatttatgcgattttttagaaaaagaagttcaaaaaaaaggctttaaaaaagtcgtttacgggctgagcggggggctagatagcgcggtcgttggagtgctgtgccaaaaggtttttaaagaaaacgcccatgcccttttaatgccctcttcagtctctatgccagaaagtagaacagacgctttgaatttgtgcgaaaaattttctatcccttatacagaatattctatcgctccctatgataaaatctttggctctcactttaaagacgcaagccttactaggaaggggaatttttgcgcaaggttacgcatggcttttttatacgactattctttaaaaagcgattctttagtcattggcacgagcaataaaagcgaaaggatgctaggctatggcactttatttggggatttggcgtgcgcgattaacccgattggggaattatttaaaaccgaagtttatgaactcgcttattatttaaatatccctaaaaagattttaaacaagccccctagcgcggatttatttgtagggcaaagcgatgaaaaagatttaggctatccttatagcgtgatcgatcctttattaaaagatattgaagcgttattccaaacaaagcccatccatttagaaacgctcattcaattaggctatgctgaaattttagtgaaaaacatcataagccgtatccaaaaaaacgcttttaaattggaattacccactatcgccaaacgatttaaccctgaatga

SEQ ID NO: 7400 - DNA, 2535 bp, Helicobacter pylori
  CDS (1)...(2535)
atgaaatctaaaaaactttatttagctttaatcataggggttttattagcgtttttaaccctatcttcatggctaggtaatagcggtttagtggggcgttttggggtgtggtttgccgcaatcaataaaaaatattttgggtatctttcattgattaatttaccctatttggcgtgggttttattccttttatacagggctaaaaacccttttacagaaatcgttttagaaaaaactttagggcatctattaggcattttatctttactctttttgcaatctagcctgttgaatcaaggggaaatcggcaacagcgcgcgtttgtttttacacccttttataggggactttgggctttatgtgctgataatgcttatggtagttatctcttatttaattttattcaaactgccccctaaaagcgttttttacccttatatgaacaaaacacaaagccttttaaaagagatttacaaacaatgcttgcaggcctttagccctaattttagcctgaaaaaagagggttttgaaaacaccccatcagattctcaaaaaaaagaaaccaacaacgacaaagaaaaagaaaacctcaaagaaaaccctattgatgaaaaccacaacacccctaacgaagaatcgtttttagcgatccctaccccctataacacgaccttaaataattcagagccgcaagaaggcttagtccaaatttccccacacccccctacccattacaccatttaccctaaaagaaaccgatttgatgatttgactaaccccactttaaaagaacctaagcaagaaaccaaagaaagagaacccacgctaaaaaaagaaacgcccaccacactcaaacctatcatgcccatatccgcatccaacacagaaaatcatgacaaaacagaaaaccacaaaacccctaaccaccccataaaagaagatgatttacaagaaagcccacaagaaaacccacaaaaagaaaatatagaagaaaatatagaagaaaaagaaacgcaaaacgctccaagctttagcccactaaccctcaccagcgctaaaaaacccgttatggttaaagaattgagcgaaaataaagagatattagacgggttggattatggcgaagtgcaaaaacccaaagattatgagcttcccacaacgcaattattgaatgcggtttgcttgaaagaaacttctttagacgaaaacgagattgaccaaaaaatccaggatttattgagcaagctgcgcacctttaaaattgatggcgatattatacgcacttattcaggccctattgtaaccacctttgaattccgcccagcccctagcgttaaggtgagccgtattttaggcttgagcgatgatttagcgatgactttatgcgctgaatccatccgcattcaagcccctatcaaaggtaaagatgtcgttggtattgaaatccctaacagccaaagccaaattatttatttaagagaaattttagaaagcgaattgtttcaaaaatccagctcgcctctaaccctagctttaggcaaagacattgtgggtaaccctttcatcacggatttaaaaaagctcccccacttgctcatcgccggcacgacagggagcggtaagagcgtgggcgtgaatgcgatgattttatccttactttataaaaacccccctgatcaactcaaattagtgatgatcgatcccaaaatggtggaatttagcatttatgcggacatccctcatttactcacgcccattatcactgaccctaaaaaagctatcggggctttgcaaagcgtggctaaagaaatggagcgccgatactctttaatgagcgaatacaaggttaaaaccattgattcttataatgaacaagcccaaagtaacggcgttgaagcgttcccctatttgattgtggtgattgatgaattagcggatttgatgatgacagggggcaaagaagcggagtttcctatcgctagaatcgctcaaatggggcgagcgagcggcttgcacctcattgtggcgacccaacgcccgagcgtggatgtcgtaaccggcttgattaaaaccaacttgccttcaagggtgagttttagggtaggcactaagattgattctaaagtgattttagacaccgatggggcgcaaagcttactaggaaggggcgatatgctctttacccccccaggaacaaacgggttagtgcgcttgcatgccccctttgccactgaagatgaaatcaaaaaaatcgtggattttattaaagcccaaaaagaggtggaatacgataaagatttcttgctagaagaatcgcgcatgcctttagacacccctaactatcaaggcgatgacattctagaaagggctaaagcggtgattttagaaaaaaagatcacttctacgagctttttacaacgccaattaaaaatcggctacaaccaagccgccaccattactgacgaattagaagctcaaggctttctatccccaagaaacgccaaaggcaacagagagattttgcaaaatttttag

SEQ ID NO: 7401 - DNA, 2238 bp, Helicobacter pylori
  CDS (1)...(2238)
atgaaagaatctttttacatagagggaatgacttgcacggcgtgttctagcgggattgaacgctctttaggacgtaaaagttttgtgaaaaaaatagaagtgagccttttaaataagagcgctaacattgaatttaacgaaaatgaaaccaatttagacgaaatttttaaactcattgaaaaactgggttatagccctaaaaaaactctagcagaagaaaaaaaagaattttttagccctaatgttaaattagcgttggcggttattttcacgctttttgtggtgtatctttctatgggggcgatgcttagccctagccttttacctgaaagcttgcttacgattaaccatcatagtaattttttaaacgcttgcttacagcttataggcgcgctcattgtcatgcatttggggagggatttttacattcaagggtttaaagccttatggcacagacaacccaacatgagcagccttatcgccataggcacaagtgctgccttaatttcaagcctgtggcaattgtatttggtttataccaatcattataccgatcagtggtcttatgggcattattattttgaaagcgtgtgcgtgattttaatgtttgtgatggtgggcaaacgcattgaaaacgtttctaaagataaagccttagacgccatgcaagctttgatgaaaaacgccccaaaaaccgcccttaaaatgcacaataaccaacagattgaagttttagtggatagcattgtggtgggggatattctaaaagtcctccctggaagtgcgattgcggtggatggcgaaatcatagagggcgaaggggaattagatgagagcatgttaagcggcgaagcgttgccagtttataaaaaagtcggcgataaagtcttttcagggacgctcaatagcaacacgagttttttaatgaaagccacgcaagataacaaaaacagcaccttgtctcaaattatagaaatgatccataacgcccaaagctcaaaggcagagatttctcgcttagcggataaggtttcaagtgtatttgtgccaagcgtgatcgctatcgctgttttagcgtttgtggtgtggctcatcatcgcgcctaagcctgatttttggtggaattttcgcaccgctttagaagtgtttgtatcggttttggtgatttcttgcccttgcgctttggggttggctacgcctatgagtattttagtggcgaaccaaaaagcgagttctttaggcttattttttaaagacgctaaaagtttagaaaaagcaaggctagtcaatacgatcgtttttgataaaaccggcacgctcactaacggcaagcctgtcgttaaaagcatccattctaacatagaattattagagctattgagtttagcgagcagcattgaaaagagcagcgaacatgtcattgctaaggggattgtagaatacgctaaagagcgtaatgcccccttaaaagacattagcgaagttaaagtgaaaacgggctttggcatcagcgctaaagtagattatcaaggcgctaaagaaatcatcaaagtgggcaacagcgaattttttaaccctattaacacgctagaaattaaagaaaacgggattttagtgtttgtgggtagagcgatcaatgaaaaagaagacgagcttttaggggcgtttgttttagaggatttgcccaaaaaaggcgtgaaagagcatatcgctcaaatcaaaaatttaggcattaatacttttcttttgagtggggacaatagggaaaatgtcaaaaaatgcgcgcttgaattagggatagatggttatatcagtaacgctaaaccgcaagacaagctcaataagatcaaagagcttaaggaaaaagggcggatcgtgatgatggtgggcgatggcttgaatgacgcccctagccttgctatgagcgatgtggcggtggtgatggctaaagggagcgatgtgagcgtgcaagcggcggatattgtgagctttaataacgatattaaatcggtttatagcgcgattaaattaagccaggcgaccattaaaaatatcaaagaaaatttgttttgggctttttgttataatagcgtgtttatccctttagcttgtggggttctttataaggctaatatcatgttaagcccggcgattgcgggtttagcgatgagcttaagctctgtgagtgtggtcttaaactcccaaaggctaaggaattttaaaattaaggatcattga

SEQ ID NO: 7402 - DNA, 1038 bp, Helicobacter pylori
  CDS (1)...(1038)
ttgaaagaatttgatttagaaagctatgattatcatttgcctaaggaattgatcgcaaattaccctgttttgcccaaagaaaaagctaaattgctcgtctatgaaaggcgttcgcaaacaatcacgcacaccacttttgagcatgttttagattttttccctaaaaacgcccttgtggtgttgaacgacactaaagtgattaaggctaggctttttggatctaagcatgcctttttaccatcaaaaacgactgaagtgtttttccaccgcttttttaaaggcaacaccgccctaactcaaatcaaaggtaagatcaaagtgggggataagatcttttttgatgcaaattattacgccgaagtcttagaattgcttcataacggtcagcgcttgatcgctttttatgacaatcaaacccccttaaatcaagaaaatatcttaaagcttttagagcaatacgggcatatgcccttacctccttatattaaaagagcggatgaaagtttggatgcgcatgaataccagagcgtgttcgctaaacacatcggcgcggtggctgcccctacggcgtcattgcatttttctcaaaatgccttagaaaaattattgaaagatttcaagcacgcttttttaaccttgcatgtgggggctgggacttttcttagcgtagaaactaaggatattagagagcatcaaatccatacagaagttttgcatattcctaaaaagagccaagaaattttgcaagaatcccaagaggttttatgcatcggcacgaccgctttaaggagcgtggaatactttaagcgtttaaaaaaccctaatcaagaatcgtttgaatgcgacatttttttgcatcttgccaatcctatccaacatgtcaatcacttgctcactaatttccatttgcccaaatcaagccttttaatgcttgtaagcgcgatgataggcttagaaaaaaccaaagaaatctacaaaatagccatagaaaagaagtatcgtttttattcttatggcgatgggatgctgattttatga

SEQ ID NO: 7403 - DNA, 585 bp, Helicobacter pylori
  CDS (1)...(585)
atgttaaaaaccaatcaaaaaaacgtgcatgcgtttgaaattgaaaagcaagagcctgaggcggtcatggaatttttagaaaaaaaccatgcccttttgcaatattttcttattatttttaaatacgatattgaatcagaagtcaaagccgttttgcataaacaccagcttttatttttagaaacgaatcgcgctttaaacgggcgttatatcaaaaccacagaaaaagacgctaaccttttaaagcaaaatagccctaatgcgatagaacccaaaacaacgatttatgagcgcaatatcaggagcggggaagagatttatagcactaaccaccttatttttttgggtaatatccacaacggggcgaagatcatttcagaaggttctgtgtcagtttatggggtttgcgaaggggcgattgtgtgctttggagagtatttgatcttaaaagaagttaagagcgctcaaatcgtttttcaaaacaaaattttgtctctaaaagaggttgaacggcttttagtaaacaaaaatattaaaataatcactaaaaatgacgatatactagacataaaggaagtattatga

SEQ ID NO: 7404 - DNA, 2850 bp, Helicobacter pylori
  CDS (1)...(2850)
atgagtgatatggttgatttaaaaaaatttgtaaccgagcttggcaagacccaaaaagagcttaaaaatgtgatcgagcaagccaaagacattggtttagagcttaagacaaattttaaaatgaccccagagcaagccggcaagctatacaaatacattgtggatggcattaaagaacaaatacaagccaatcaacccactaaaaatcctaaacaagacaataaagacgatttgaatacagccgcaacgcctaagccacttgctaaaaaggcttccaaaacgcctaaaaaagaagaaacaaaagcccagccaaagcccaaaaaaactaaagaaaagaaaaaagaggctcctgcgcctattatcaaaaagaaagaaatagagattgtcaatacttttgaaaaccaaacaccccttgtagaaaacacccctaaagcggttagccactctcaaatagaaaaagccaagcaaaagctccaagaaatccaaaaaagccgagaagccctaaacaaactcacccaaagcaacaccaataccactaacaacgctaacagcgctagtaatgtcagcaacgctaaaaaagaaatcagcgaagttaaaaagcaagagcaagagatcaaacgccatgaaaacattaaaagacgcacgggttttagggtgattaaacgcaacgatgaaactgaaaatgaaactgaaaacagtgtaacagaaagcaaaaaacccactcaaagcgcggcggctatttttgaagatattaaaaaagaatggcaagaaaaagacaagcaagagactaaaaaaactaaaaaacccagtaagcccaaagccacccccaccgccaaaaacaacaaatcccataaaattgattttagcgatgtaagggattttaagggcaatgatatttatgatgatgaaaccgatgaaatcttattgtttgatttgcatgaacaagataatctcaataaggaagaagaagaaaaagaagcacgccaaaatatcaacgacagggtgcgcgtccaaaggaaaaacccttggatgaatgaggcggggatcaaacgacaatccaagaaaaagcgcgtattccgtaacgataacagccaaaaagtgatccaaagcgcgattgcaatccctgaagaagtgcgcgtctatgaattcgcgcaaaaagcgaatttgaatttagccgatgtgattaaaaccctcttcaatttagggcttatggtaactaaaaacgactttttggataaggatagcatagagattttagccgaagagtttcatttagaaatttctgttcaaaacaccttagaagaatttgaagtagaagaggtgctagagggggtgaaaaaagagcgcccgcctgtggttactatcatggggcatgttgatcatggtaaaacctcactactggataaaatccgtgataaaagagtcgcccacactgaagccggggggatcactcagcacattggtgcttacatggtggaaaaaaataacaaatgggtgtctttcattgacaccccagggcatgaagccttcagccagatgcgtaatcgtggggctcaagttacagatattgcagtgattgtgatagcggctgatgatggcgtgaagcaacagactattgaagctttagagcatgcaaaggcggctaatgtgcctgtgatttttgcgatgaataaaatggataagcctaacgtgaatccggacaaactcaaagccgaatgcgctgagcttggttataatcctgtggattggggtggagagcatgagttcatccctgtttcggctaaaacgggcgatggcattgacaatttattagaaaccattctcattcaagcggatattatggaattaaaagccatagaagagggcagcgctagagcggttgttttagaagggagcgtggaaaaagggcgtggggcagtagccacggtgattgtccaaagcgggactttgagcgtgggggatagtttttttgctgaaacggcgtttggtaaagtaagaaccatgactgacgatcaaggcaagagcattcaaaatttaaaaccctctatggtggctctcatcacaggcttgagcgaagtgccgcctgcgggatctgttttaataggggtagaaaacgattctatcgcgcgcttgcaagctcaaaagagggcgacttatttacgccaaaaagcactgagtaaaagcactaaagtgtcttttgatgagctttcagaaatggtcgctaataaggaattaaaaaatattcctgtaatcattaaagcggatacgcaaggaagcctagaagccattaaaaacagcttgttggagcttaataacgaagaggtggcgattcaagtgatccactcaggggtggggggcattactgagaatgatttgagcctggtttctagcagtgagcatgccgtgattttaggctttaatatccgccccaccggtaacgtgaaaaataaggctaaagaatacaatgtgagcatcaaaacttacacggtgatttatgccttgattgagggaatgcgatcgctactattaggcttgatgagtcctatcattgaagaagagcatactgggcaagcggaagtgagggaaacttttaatatccctaaagtaggcacgatagccgggtgtgtggtgagcgatggggagatcgctcgtggcattaaggcgcgtttgattagggatggcgtggtggttcataccggcgaaatcctctctttgaaacgctttaaagacgatgtgaaagaagtttctaagggctatgagtgcgggatcatgctagacaattataatgagattaaagtgggcgatgtgtttgaaacctataaagaaatccataaaaaaagaaccctctaa

SEQ ID NO: 7405 - DNA, 273 bp, Helicobacter pylori
  CDS (1)...(273)
atggctttgaatctggagaaaaaacaagaaatcattaaggcgtttgccactaaagcaaacgatacgggttcttgtgaggtgcaagtggcgttgttgaatgaaaggatcaagcttttaaccgagcatttgaaaactaaccctaaagatcattccagtcgtttagggcttttaaaattagtcgctcaaagacgcaatctgttgaaatacatcaaacgcaccgatcatgtgcgttatgtggttttgattgaaaagctaggcattaaagacagatag

SEQ ID NO: 7406 - DNA, 1428 bp, Helicobacter pylori
  CDS (1)...(1428)
atggaacatcaaaataccacgcaaaaacaaggcgagcttaaaagagacatgaaaatgcgccatctcttgatgattgcctttgggggagcgatcggcacagggctttttgtaggcactgggggtaatattgcgagtgctggccctttagggaccttgatcgcttattgttttggagggcttgtggtctattgcatcatgctctctttaggcgagttggctagcgtttaccccactacgggaagttttggggattatgcggctaaattcataggccctggcacgggctatatggttttttggatgtattggcttggctgggtaatcacggttgcgttagaatacatcgctataggcatgctcatgcaacgctggtttgtaaatattcccatccattattgggtcatttcatgcattgcgttggtttttttattgaactttttttcggttaaaatttttgccgagggcgagtttttctttagcctgattaaagttttagcggtgatcgcttttataagcattggcgtaattgggatcatttatcaaatctatttgcatgggtttagttctatttttgataacttccattttggcgataaggggtttttccctaacgggagcgaggcggtttttagcgcgatgctcgctgttatttttgctttcactggcacagaagtcattggagtggctgtaggcgagactaaaaacgctagcgaagtgatgcccaaagcgattaaagcgactttgtggcggattgtctttttctttttaggctctgtgtttgtcatttctgtttttttacccatgagcgattcttctatcgcgcaaagcccctttgtgagcgttttagaacgcatcaacttgccctttattggcatgggtatcccttatgtggctgatataatgaacgctgttatcattacggcgatgttttctaccgctaattcagggctttatggagcgagccgcatgatttatgggctgtccaaacaaaagatgttttttaaagttttttcccaactcaaccgacaaggcacgcccacttatgcgatgtttttttccctttctttttccctcatagggcttttagtccaaatttatgccaaagaaaatgtcgtggaagctttgattaatgtgatcagtttcacggtgattatcgtgtgggttagcgtgtccatttcgcaatattctttccgcaagcaatatttaaaagccgggcattctttagaggatttgccttataaagcccctttcctgccctttttgcaactcatagggatcactgggtgtattatcggtgtgattggttcggctatggataaggatcaacgcatcgggatgattttaacgattgtttttgctgttgtgtgttacattggatactattttacacaaaaagctaatgaaaataacaaaaaagatttgatataa

SEQ ID NO: 7407 - DNA, 603 bp, Helicobacter pylori
  CDS (1)...(603)
gtgtgtggcgctcagttttttagggcgcgcgttcttgaatttttcacaagtctttttgaaagcatgaaagttttaaaactcctgcctaattttttaacgattttacgcattgtcttatccttatttttattgtttttattgttaaacacgcacacttattttagttttttaaccccctttcacatcaacatgatttcttcattggtttttttgtttgccgcgctcacggatttattggacggctatatcgccagaagctataaagccaaatcgcgctttggggaaatctttgaccctttagcggataaaatccttattttgagcgcgtttttagggttagtttatttggatcgtgtgaatgcgtgggtcccgtttgtgattttagggcgtgaattttttatttcagggcttagggttttagccgctaatgaaaaaaaggatattcctgtcaatgcgttaggcaagtataaaaccgtgtctcaagtcgtggcgattggcgctttattagccaatttaacttactcctatgtgcttgtggctatagcggtttttttaaccctttattcggggatagattacacgattaaatattataaatcttaa

SEQ ID NO: 7408 - DNA, 189 bp, Helicobacter pylori
  CDS (1)...(189)
atggcaaaaagatgtgctttaacttttaaagggcctatgataggcaatcatgtcagtcatgcgaacaacaaaaacaagcgtcgcttgctccctaacttgcgatcgattaagatccaattagacgacggcacgaccaaacgcattaaggtggctgcttccactttaagaaccatgcgtaaaggggcttag

SEQ ID NO: 7409 - DNA, 765 bp, Helicobacter pylori
  CDS (1)...(765)
atgaaagtcggtgtttatggggcgagcggtcgtatagggaaattacttttagaagaattaaaaggggggtataagggattagagttatctagcgtgtttgtcaggcaaaaatgcgaaaccgattttagctctttttcgcacgcccctttagtaaccaatgatttaaaagcgtttgtgaaagcctgcgaatgcgtggttgatttttctttacctaaaggcgtggatcatttgctagacgttcttttagaatgccctaaaattttagtttctggcacgaccggtttagaaaaagaaacgctagaaaaaatgcaaaaattagccttaaaagcgccgcttttgcacgcgcacaacatgtctatagggattatgatgctcaaccaattagcctttttaacttctttgaaattgaaagatgcggatattgaaattgtagaaacgcaccacaatctcaaaaaagacgccccgagcggcacggcgttgagtttgtatgaaacttgcactaaggctagggggtatgatgaaaaaaacgccctcatcactcacagagaaggtttgcgctctaaagaaagcattggtatagccactttaagggggggcgatgtcgccgggaagcacacgatagggttttatttagagggcgaatacatagagcttagccatacggcgactaaccgatctatttttgctaaaggggctttagaagtggccctgtggcttaaggataaagccgctaaaaaatatgaaattagcgaaatgtttggttga

SEQ ID NO: 7410 - DNA, 1446 bp, Helicobacter pylori
  CDS (1)...(1446)
atggtagtaagaactcaaaatagcgaaagcaagatcaaagagttttttgaattttgcaaagaaaatgaagtagaatttgtggattttagattcagcgatattaaaggcacttggaaccatatcgcttattcttttggggctttaacgcatgatatgtttaaagaagggattccttttgatgcgagctcttttaaaggctggcaaggcattgaacactccgatatgattttaacccccgatttggtgcgttatttcattgacccttttagtgcggatgtgagcgcggtcgtgttttgcgatgtgtatgatgtgtataaaaaccagccttatgaaaaatgccctagaagtatcgctaaaaaagccctaaaacatttaagagatttaggcttgggcgatgtggcttattttggcgcggagaatgaattttttatctttgattctattaagattaaagacgcttccaattcccaatactacgaagtggatagcgaagagggcgaatggaatagggataaaagctttgaaaacggcgtgaattttgggcatagaccgggaaagcaaggaggctatatgcctgtgcctccaacggatacgatgatggatattcgcacagaaatcgtgaaagtcttaaaccaagtggggttagaaacttttgtcgttcatcatgaagtcgcgcaagcgcaaggcgaagtgggcgtaaaatttggggatttagtggaagccgctgataatgtccaaaaactcaaatatgtggttaaaatggtcgctcatttaaatgggaaaacggctactttcatgccaaaacccctatatggggataatgggagtgggatgcacacccatgtgagtatttggaagaataacgaaaacctttttggtggcgaaacttacaagggcttgagcgagtttgcgttgtattttttagggggcgtgttgcgccacgctagagggttagccgctttcactaacgcttccaccaattcttacaaacgcctgattccgggatatgaagccccatccattttaacttattcagccagcaataggagcgctagcgtgcgtatcccttatgggatttctaaaaatagtgctaggtttgaattcaggtttcctgacagctcatcaaacccctacctggcttttggggctattttaatggcgggcattgatggcattaaaaataaaatggatcccggcgaagcgatggacattaaccttttcaagctaactttggacgaaatcagagaaaaaggcatcaaacaaatgccccacactttaaggagatcgttagaagaaatgctagccgataagcagtatttaaaagagggtcaggtctttagcgaagaatttatccaggcctatcagtctcttaaattccattctgaagtgttcccatgggagagtaaaccccatccttttgaatttatcaccacttattcatgctaa

SEQ ID NO: 7411 - DNA, 450 bp, Helicobacter pylori
  CDS (1)...(450)
atgaaagttctgttattagaagatgtgaaaaatttaggcaaagcgggtgaagtgtgtgaggttaaagatggctatgggaataactttttaatcgctaaccaaaaagccaaactcgccactaacgaagtgatcaacaaatataaagctgaagttaaaaagaaagcggaaaaagaagccttagaaaaggcgcaaaaattgcaaatggtagaaaccttacaaaccatcacgctgactatccataaaaaagtcggcgcgaacggctctttatttggagcgatcacgaaagaagagatcacggagcgtttgaaagaacagcatgcgagtttaaatttagataaaaaagacattgagctcaaacacccgattaaaagcacagggatttatgagattgaagtcaagcttggatcggggattgcgggcgtgtttaaaattgatgtggtggctgagtag

SEQ ID NO: 7412 - DNA, 1317 bp, Helicobacter pylori
  CDS (1)...(1317)
atgaacgaaaacgcgcctacgcacaaaagttcgcacaaggtcaaaacccacacgccagtgagcggttatcacattgaagatttacgcacctaccctactgaaaagcttttagaaatcgctaacaagctcaaagtggaaaacccccaagaattcaaacgacaagacttgatgtttgaaattttaaaaacccaagtcacgcaaggcggatacattctttttaccgggattttagaaatcatgcctgatggctatggctttttaagagggtttgacgggagtttttcagacgggcataacgacacttatgtcagcccttctcaaatcaggcgttttgctttaaggaatggcgatattgttaccggtcaagtgcgatcccccaaggatcaagaaaaatactacgcccttttaaaaatagaagccattaattacttgccttcagatgagattaaaaaccgccctttgtttgacaatctaacccccctattccctgatgaacagatcaaattagaatacgaacccactaaagttaccggcagaatgctagatttattcagccctgtggggaaaggtcaaagggctttgatcgttgcaccaccaaggactgggaaaacggaactgatgaaagaactcgcccaaggcatcacttctaaccaccctgaagtggaattgattatccttttagtggatgagcgccctgaagaagttacggacatgcaacgaagcgttaaaggtcaagtttttagctccacttttgatttgccagcaaacaaccacataagaatcgctgaattagtcttagaaagggcgaaaaggcgcgtggaaatgggcaaagatgtggtggttttattagattctatcacccgtttagccagagcgtataacgctgtaacgccttcaagcggtaaggttttaagtgggggcgtggatgcaaacgccttgcacaggcccaagcgcttttttggagccgcaaggaatattgaagaaggcgggagcttgacgattatcgctacggcgttgattgaaacgggatctagaatggatgaggtgatttttgaagaatttaaaggcaccgggaatagcgaaatcgttttagcgagaaatattgcggacaggcgtatttacccggcctttgatattttaaaatccggcacacgaaaagataatatcttgcttggaaaagaccgcttgactaaagtgtgggttttaaggaatgtgatgcaacaaatggacgacatagaagccttaagctttgtgtattctaaaatgcaacaaactaaggacaatgaagaatttttaaatttaatgaatgaaaaataa

SEQ ID NO: 7413 - DNA, 204 bp, Helicobacter pylori
  CDS (1)...(204)
atgaaaaaaggcattcaccccgaatatatcccatgcaaagttacttgcgtaacgagcgggaaagaaattgaggttttaagcaccaaacctgaaatgcgtattgatatttctagcttttgccaccctttctataccggtagcgataaaatcgctgacactgcagggagagtagagaaattcaagcaacgctacaatttgaagtaa

SEQ ID NO: 7414 - DNA, 939 bp, Helicobacter pylori
  CDS (1)...(939)
atggcgatctatttagattttgaaaatcatattaaagagattcaaaatgaaattgaattagctctcattagaggcgatgaggacgctaaagaaatcttagaaaaaagattggataaggaagttaaaagcatttattccaatctcactgattttcaaaaactccagttagcaagacaccctgacagaccctacgctatggattacattgatctcatcttaaaagataaatatgaagtctttggcgataggcactataacgatgataaagcgatcgtgtgttttatagggaaaattgataatgttccggttgtggtgatcggagaagaaaagggcagagggactaaaaacaagctcttaaggaattttggcatgcctaacccttgtggctatcgtaaagctttgaaaatggcaaagtttgctgaaaagtttaatttgcctattttaatgcttgtggatacagccggggcgtatccggggattggcgcagaagaaagggggcaaagtgaagcgatcgctaaaaacctccaagagttcgcctctttaaaagtccctactatttctatcattatcggtgaagggggcagtggtggcgcgttagcgattgcggtggctgacaagttggctatgatggaatattccatttttagcgttatatccccagaaggttgtgcggcgattctttgggatgaccctagcaagactgaagtggctattaaagcgatgaaaatcacgcctagagatttaaaggaggcggggcttattgatgatattatcttagagcctagcaaaggggctcatagagacaaattttcagccgccaacacgatcaaagagtattttttagacgctctaaggactatccaacaagaccctcatttccttgacaaccgctatcaaaaattgatgtcgcttggctcgtttgtggagagcatgaattaa

SEQ ID NO: 7415 - DNA, 1239 bp, Helicobacter pylori
  CDS (1)...(1239)
gtgcgtcggattgtagtaactggaatgggaatgatcaattcgctaggtttaaataaagaagattcttttttagcgatcgctaaaggggaatgcggtatcaaaaacatagaaagttttgatgcgaatgcgtttcctgtgcgtatcgctggagaaatcactgactttgaccctacagaggtgatgaatcccaaagatgttaaaaaggcgggtcgtttcattcaattagccttgaaagccacaagagaggcgatgaaagatagtgggattttagacgctcacaatagatgccctgaagaattggcaaatcgcatgggtgtaagttctggctctgggattggcgggttaggcaatattgaagcgaattctattttttgttttgaaaaaggccctagaaaagtcaatccctttttcatcacttctgcgttagtgaacatgattggaggtttcacttccattgagtttggcattaaagggcctaacctctctagcgtaacggcttgtgcagcaggcactcatgcgattattgaagccgttaaaaccattttgctcaatggggctgatagaatgctggtcgtgggagcggaatccaccatttgtcctgtagggattggagggtttgcgagcattaaagccctttctacaaggaatgatgatcctaaaaaagcttcaagaccttttgataaggatcgcaatggctttgtgatgggcgaaggcgctggggctttagtgcttgaagaatacgagagcgcgaaaaaaagaggggctaaaatttatgcagaatttgccgggtatggcgagagcggcgatgctaaccacatcacagccccagcccctgagggtgaaggggcttttagagccatgaaaatggctttagaaatggcgaaagtggaagtaggctatgtgaacgcccatgggacaagcacgcattataacgattggtatgaaagcattgcgttaaaaaatgtgtttggctctaaagaaaaagtccctcctgttagctccactaaagggcagattgggcattgcttgggtgctgcgggcgcgttagaagccgttatttctatcatggccatgaatcaagggatcttacctcctaccattaatcaagaaacgcctgacccagaatgcgatctggattatatccctaatacagccagagaaaagcaagtgaatgcggtgatgagtaactcatttggttttggtggcactaatggtgttgtgattttcaaaaaagcctag

SEQ ID NO: 7416 - DNA, 237 bp, Helicobacter pylori
  CDS (1)...(237)
atggctttatttgaagatattcaggcagttattgctgagcagttgaatgtggatgcggcgcaagttactccagaggcggaatttgtgaaggatttgggtgcggactctttagatgtcgtggaattgatcatggcgttagaagaaaagtttaacattgaaattcctgatgagcaagcggaaaaaatcgtcaatgtgggcgatgtggtgaagtatattgaggataataaactagcttaa

SEQ ID NO: 7417 - DNA, 744 bp, Helicobacter pylori
  CDS (1)...(744)
atgcaattcacagggaaaaatgttcttattactggagcttctaaaggcattggggccgaaatcgccaaaactctcgcttctatggggctgaaagtttggatcaattaccgcagtaatgctgaagtggctgacgctttgaaaaatgggcttgaagaaaaaggctataaagcggctgtcattaaatttgatgcggcttctgaaagcgattttgttgaagcgatacaaaccattgtccaaagcgatgggggtttgtcttacttggtgaataacgccggtgtggtacgcgataaattagcgatcaaaatgaaaacagaagattttcaccatgtcatagaaaataaccttacttcagcttttataggttgcagagaggctttaaaagtgatgagcaagagtcgttttgggagcgtggttaatgtcgcttctatcattggtgaaagaggcaatatggggcagacaaactactcagcgagtaagggggggatgattgcgatgagcaagtcctttgcttatgagggagctttaaggaatattcgtttcaactctgtaacgccaggctttatagaaaccgacatgaacgctaatttgaaagacgaactcaaagcggattacgttaaaaacattcctttaaacaggctagggtctgctaaggaagtggcagaagcggtagcgtttcttttgagtgatcactctagttacatcactggagagactctcaaagtcaatggcgggctttatatgtag

SEQ ID NO: 7418 - DNA, 456 bp, Helicobacter pylori
  CDS (1)...(456)
atgaataagcccttaaataccgctcaagtttttataggaagcgatcatgcagggttacatcttgcagaatttgttaaacattttttagaagacaagcgttttaagatccaagctttcttacccactacaagggtggattaccctgattacgccaaattagtgtgccaaaaggttttagaaaatgcacaaagctatggtattttggtgtgcgccacagggataggcatgagcatgggcgctaatcgctttaaaggtattagagccgctttgtgccttgatgcttacatggctaaaatgactcgcttgcacaataacgccaatgtcttgtgcttgggcgaaaagattagcggtatcggcgtagcagaaagcattttggaagcgtttttctctacagaatttgaacaaggccgtcatgtgttgcgtatccaaaagctagatgaatcgctgaaatcatag

SEQ ID NO: 7419 - DNA, 3087 bp, Helicobacter pylori
  CDS (1)...(3087)
atgtataaaacagcgattaatcgtcctattacgaccttgatgtttgctttggcgattgtcttttttggggtgatgggttttaaaaaattgagcgtggcgcttttccctaaaattgatttgcctacagtggtggttactacgacttatcctggggctagcgctgaaatcatagagagtaaggtaaccgataagattgaagaagcggtgatggggattgatgggatcaaaaaggttacttccacgagttctaaaaatgtgagcattgttgtcattgaatttgagttagaaaaacctaatgaagaagccttaaacgatgtggtgaataaaatttcttcggtgcgttttgatgactctaacattaaaaaaccctctatcaataaatttgataccgacagccaagccattatttcattgtttgtgagcagttcaagcgtgccggctacaacccttaatgactatgctaaaaacaccattaaacccatgctccaaaaaatcaatggggtggggggcgtgcagctcaacggctttagggagcgccagattaggatttatgcggatcccactttgatgaataaatacaacctgacttatgcggatcttttcagcacgcttaaagcggagaatgtggaaattgatggggggcgcattgtcaatagccaaagggaattgtctattttgattaatgcgaatagttatagcgttgcggatgtagaaaagatccaagtgggtaatcatgtgcgtcttggcgatattgcaaaaattgaaatcggtttggaagaagacaacacttttgcgagctttaaagacaaacccggtgtgattttagaaatccaaaagattgccggagcgaatgaaattgaaatcgtggatagggtgtatgaagcgttaaaacacattcaagccattagccctagctatgaaatcagaccctttttagacaccacgagctatatccgcacctctattgaagacgtgaaatttgacttgattttaggggcgattttagcggttttagtggtgtttgcgttcttgcgtagtggtacgatcaccctcgtttcagcgatctctatccctatttctatcatggggacttttgcccttattcaatggatgggcttttcattgaacatgctcaccatggtggctttaacgctagcgatagggattatcattgatgatgcgatcgtggtgattgaaaacatccataaaaagctagaaatgggcatgagtaaacgcaaagcgagttatgagggggtgaaggagattggctttgctctagtggcgatttcggcgatgctgctctctgtgtttgtgcctatagggaacatgaaaggcattatcgggcgctttttccaaagctttgggatcacggtggctttagcgatcgctctatcgtatgtggtggtcgttacgattatccctatggtaagctcagtggtggtcaatcccaggcattctcgtttttacatgtggagtgagcctttttttaaggctttagagtctcgttataccaaattgctccaatgggttttaaaccacaagctcattatctttatagcggtggttttggtgtttgtgggttcgctttttgtggcttctaaattgggtatggagttcatgctgaaagaagatagggggaggtttttagtgtggcttaaggctaaaccgggcgtgagcatagattacatgacgcaaaagagtaagatctttcaaaaagcgattgaaaaacatgatgaagtggaatttaccactctgcaagtgggttatggcaccacacaaaacccttttaaggctaagatttttgtgcaactcaagcctttaaaagagcgcaaaaaagagcatgaattggggcaatttgagttgatgagcgctttaaaaaaggaattaaaaagcatgcctgaagctaaagatttggacagcattaatctttctgaagtcgctcttatagggggcggtggggatagttcgccctttcaaaccttcgtattctcccattctcaagaagcggtggataaaagcgtggagaatttgagaaaattcttattagaaagccctgaattaaagggcaaggttgaaagctatcatacaagcacgagcgaatcgcaaccgcaattgcaactgaaaatcttaaggcaaaacgccaacaaatacggcgtgagcgctcaaaccattggctcagtggtgagctctgctttctctgggacttctcaagcgagcgtgttcaaagaagatggtaaagaatacgacatgatcattagagtgcctgatgacaagcgcgtttctgtagaagacatcaaacgcttgcaagtgcgtaacaaatacgataaattgatgtttttagacgctttagtggaaatcacagaaactaaaagcccgtctagtatttctcgctataaccgccaacgcagcgttacggtgcttgctgagcctaataggaatgcgggcgtttctttgggcgagattttaacgcaagtgagtaaaaacactaaagaatggctggttgaaggggcgaattacagattcaccggagaagcggataacgccaaagagagcaatggggagtttttagtcgctttagcgacagcgtttgtgttgatctatatgattttagcggcgttgtatgagtccattttagagccttttatcatcatggttaccatgcctttaagcttttcaggggcgttttttgctctaggtttggtccatcagcctttgagcatgttctctatgataggcttgattttgctcattggtatggtgggtaaaaacgccacgcttttaattgatgtggcgaatgaagagcgtaaaaaaggtttgaatatccaagaagccattttatttgccggcaaaacccgtctaagaccgattttaatgacgaccattgcgatggtttgtggcatgctgcctttagcgttggcgagtggggatggaacggcgatgaaatcccctatagggattgcgatgagtgggggcttgatgatttctatggtgttaagcctactgattgtgccggtgttttatcgtttgctcgctcccatagacgacaaaatcaagcggttttatcaaaaccaaaaagctttagaatga

SEQ ID NO: 7420 - DNA, 1971 bp, Helicobacter pylori
  CDS (1)...(1971)
atgataaaaagccaaaaagaatatttagaaagaattgaatatttaaacaccctatcgcaccattattacaaccttgatgaacccatcgtaagcgatgcggtctatgatgaactttaccaagaattaaaagcttatgaagaagaaaaccctaatcgcattcaggctaactcccctacccaaaaagtgggggctactgccaccaatgagttcagtaaaaacccccatttaatgcggatgtggagcttagatgatgtgttcaatcaaaacgaattgcgagcgtggttgcaacgcattttaaaagtttatcctaacgcttcattcgtgtgttcgcccaaacttgatggggtttcgctcaatcttttgtatcaacatggcaagctaataagcgcgaccactaggggtaatggcttagaaggagagcttgttactaacaacgctaaacacatcgctaatatcccccattctatcgcttataatggagaaatagaaatcaggggcgaagtgatcatttctaaagaggattttgacgccttgaataaagagcgcctaaacgctaacgaacccctattcgctaaccccagaaatgctgcatcagggagtttaagacagcttgatagcaatatcactaaaaagcgcaaattgcaattcatcccttggggcgtgggcaagcattctttacatttcctaagatttaaggagtgtttggattttattgtctcgttaggttttagcgctattcaatatttaagcctgaacaaaaaccaccaagaaatagaagaaaattaccacaccctgattagagaaagggagggcttttttgcccttttagacggcatggtgatcgttgtggatgaattggatattcaaaaggagctaggctacacgcaaaaatcccctaaattcgcttgcgcttataaattcccggctctagaaaaacacaccaaaattgtaggagtcattaaccaagtggggcgcagtggggcgatcaccccggtcgctctcttagagcctgtggaaattgctggagctatggttaatagagcgaccttacacaattattctgaaattgaaaaaaagaatatcatgctcaatgatagggtggtcgtcattagaagcggcgatgtgatccctaaaatcatcaaacctttagaatcttatagagacggctcgcaacaaaaaatcatgcgccccaaagtttgccccatatgctcgcatgaacttttatgcgaagagatttttacctattgtcaaaaccttaattgcccggcaaggttgaaagaaagcttgattcatttcgcttctaaggacgctttaaacattcaaggcttgggcgataaagtcatagagcaactttttgaagaaaaactcattttcaacgccttggatctgtatgctttaaaattagaagacttaatgcggctagacaaattcaaaatcaaaaaagctcaaaatctattagacgctattcaaaagagcaaaaaccctcctttatggcgtttgatcaacgctttagggattgagcatattggtaaaggagcgagtaaaacgctagccaaatacggcttaaatgtgttagaaaaaagcgaagccgagtttttggaaatggaaggctttggggtggaaatggcgcattctttagtcaatttttatgcgagcaatcaggaatttatccgatcgttatttgagttgttaaaccctaaaagtagcgatacggctgaagaaaagcaaaaaagctcttctgttttcagtgataaaacgattgttctaaccggcacgctttctaaaccacggcaagaatatgctcaaatgttagaaaatttaggggcaaaaattgcttcaagcgtgagcgctaaaaccgattttttaatcgctggagaaaacgccggctcaaaactcgctctggcacaaaaacatggcgtgagcgttttgaatgaagaagaattgttaaaacgccttaaggaattggattaa

SEQ ID NO: 7421 - DNA, 1740 bp, Helicobacter pylori
  CDS (1)...(1740)
atgcgaagtcatttctgcacagaaattagtgaaaaagatgtgggtaaaaccatcaaagtggccgggtggtgtaacacttatagagaccatggaggcgtggtttttattgatttaagggataagagcggtttagtgcaactcgtctgtgatcctagctctaaggcttatgaaaaggctttagaggttaggagcgaatttgtgttagtggctaaaggaaaagcgcgtttaaggggtgctgggttagaaaaccctaaactaaaaacgggtaaaattgaaatcgttttagaagaattagtcattgaaaataaaagcgctaccccaccgattgaaattggcaataaaagcgtgaatgaagatttgcgcttgaaataccgctatttggatttacgctctttgaacgcttatgaaatctttaaattgcgcagcgaagtggctttaatcactcgtaacgctctggcccaaaagggttttttagagattgaaacccccattttgtctaaaaccacgcctgagggggctagggattatttagtgccaagcagggtgcatgagggcgaatttttcgcgcttccccaaagcccgcaattattcaaacagcttttaatggtggggggaatggataggtattttcaaatcgctcgttgctttagagatgaagatttgagggcggacaggcagccagaattcacgcaaattgatgcggaaatgagtttttgcgatgaagatgatgtgatgggcgtggtggaagatttgttgcaagagatttttaaagcgattgggcatactatttctaaaccttttaaacgcatgccttataaggaagcgatggaaaattacgggagcgataagccggatttacgctttgaattgcccttaatagaagtgggggattgctttatggacagctcaaattctattttttctaatatcgcgcaagatcctaaagataaacgcattaaagctttgaacgttaagggggctgatgcggtttttagccgcagcgttttaaaagaattagaagaatttgtacgccaatttggggctaaaggcttagcgtatttgcagattaaagaagatgggattaaagggcctttagttaaatttttaagcgaaaaggggcttaagaatattttagaaaggactgatgcgcaagttggggatattgtcttttttggagcgggggataaaaaaatcgtgttagattacatggggcgcttgcgcttaaaagtggctgaaacgcttgatttgattgataaagacgctttgaattttttatgggtagtccatttccccatgtttgaaaaaaccgaaaacggctatcatgccgcgcaccacccctttacgatgcctaaaaatatagaatgcgaagacatagaagaaattgaagcgcatgcgtatgatgtggtgcttaatggcgtggagcttggtggggggagcataaggattcataaagaagaaatgcaaaaaaaagtctttgaaaaaatcaatatcaacgaagaagaagcgcaaaagaaatttggctttttactagaagcgctaaagtttggcgctcctcctcatggaggctttgcgataggctttgatcgcttgatcatgctaatgactaaatccaatagcattagagacgtgatcgctttccctaaaacgcaaaaagcttcatgcttattgactgatgcgcctagccccattaatgaagagcaattaagagaattgcacattcgcttgagaaaaccaatttaa

SEQ ID NO: 7422 - DNA, 2289 bp, Helicobacter pylori
  CDS (1)...(2289)
ttgtcagacgcttcaaaaagatcccttaatccaaccttaatgatgaataataataataccctacccaaacccctagaagaaagcctagatttaaaagagtttatcgctctttttaaaacctttttcgcaaaagaaagaggttctattgctttagaaaacgatctcaaacaggctttcacttatttaaatgaagtggatgcgatcggtttgcctgcccccaaaagcgtgaaagaaagcgatcttattgttgtcaaactcaccaaattagggacgctccatttagatgaaatctatgagattgtcaaacgattgcgctacattgtcgttttacaaaacgcctttaaacctttcacgcatttaaaatttcatgaacgccttaacgccattattttaccccctttttttaatgatttgatccttttattggatgatgaagggcaaatcaaacaaggggcgaacgctaccctagacgctttgaatgaaagcttgaaccgccttaaaaaagagagcactaaaatcattcaccattacgcccactctaaagagcttgccccttatttagtggatacgcaaagccaccttaagcatggttatgaatgccttttattaaaaagcgggttttctagcgcgatcaaaggcgttgtgctagaaaggagtgctaatggttatttctatcttttgcctgaaagcgcgcaaaaaatcgcccaaaaaatcgcgcaaattggtaatgaaatagattgctgtatcgttgaaatgtgccaaactctaagccgtagcttgcaaaaacaccttttatttttaaaattcctttttaaagaatttgattttttagacagcttgcaagcacggcttaatttcgctaaagcctacaatttagaatttgtcatgccaagctttacgcaaaaaaaaatgattttagaaaacttttcgcaccccattttaaaagagccaaagcccttaaatttgaagtttgaaaaatccatgctcgctgttaccggcgtgaatgcgggcgggaaaaccatgctcttaaaatcgcttttaagcgcagcttttttgagcaagcatctcattcctatgaaaatcaacgcccatcattctactatcccctattttagagaaatccacgccattattaatgacccccaaaacagcgcgaacaatatctctacttttgcaggcagaatgaagcaatttagcgctcttttatccaaagaaaacatgctcttaggcgttgatgaaattgagctagggactgacgctgatgaagcgagcagtttgtataaaaccctgttagaaaaattgcttaagcaaaacaaccaaatcgttatcaccacgcaccacaaacgcctgagcgtgttaatggcagaaaacaaggaagtggaattactggccgctctttatgacgaggaaaaagaacggcccacttacacttttttaaaaggggttattggcaaaagctatgcgtttgaaaccgctttgcgctatggcgtgccgccttttttgattgaaaaagcgaaagccttctatggcgaagataaggaaaaattgaacgttttgattgaaaattccagcacgctagaaagggaattgaaacaaaaaaatgaacatttagagaatgctttaaaagagcaagaagatttaaaaaacgcatggcttttagaaatggaaaaacaaaaagaaatctttcaccataaaaaattggaattggaaaaatcctaccaacaagccttaaacatcttaaaaagcgaagtcgcttcaaaagataccagctccatgcataaagaaatccataaagcgagcgagattttaaacaagcataaaacagaccaagagatcccacaaatcataacaagctttcaaattaacgaaaaagcgcgttataaaaatgaaagcgtgctggttatacaaattttagacaagggctattacctggtagaaaccgagcttggcatgcgcttgaaagcgcatgggagttggttgaaacaaatccaaaaaccccctaaaaacaaattcaaaccccctaaaaccatcgttcctaaacctaaagaagcgagcttacgccttgatttaagggggcaacgcagcgaagaagccctggatttactagacgcttttttaaatgatgcgcttttagggggctttgaagaagtgcttatttgccatggcaaagggagcgggattttagaaaagtttgtgaaagaatttttaaaaaaccaccctaaagtggtgagctttagcgacgctcccattaatttaggtggcagtggggttaagatcgttaaattgtag

SEQ ID NO: 7423 - DNA, 1425 bp, Helicobacter pylori
  CDS (1)...(1425)
atgccatttgaagctgtaatcgggctagaagtccatgtccaactcaacactaaaaccaaaatcttttgctcttgctccacaagttttggagaaacccctaattctaacacctgccctgtgtgtttgggattaccgggagctttgccggtgttgaataaagaagtggttaaaaaagccatccaattaggcacagccattgaagcccatatcaaccagtattccatttttgcgaggaaaaattatttttaccctgatttgcctaaggcttatcaaatttcgcagtttgaagtccccattgtgagcgatgggaaattagagattgacaccaaagagggcgcaaaaatcgtgcgtattgaaagagcccacatggaagaagacgccggtaaaaatatccatgagggcagctattctttggtggatttgaatcgcgcttgcacccctttattagaaattgtcagcaagccggacatgaaaaatagtgaagaagccatagcgtatttgaaaaagctccatgctatcgtgcgttttatagggatttctgatgcaaacatgcaagaggggaatttcaggtgcgatgcgaacgtgtccattaggcccaaaggcgatgaaaagctttacacgagggtagaaatcaaaaacttgaatagctttagattcatcgctaaagcgattgaatacgagatagagcgccaaagcgtggcgtgggagaacgggcgttataatgaagaggtggttcaagaaacgcgcctttttgacaccgccaaagggatcaccctttctatgcgcaataaagaagagtcagcggattaccgctactttaaagatccggatttgtatcctgtttttattgatgagaaacttttaaaagaagctcaaaagatcaatgaattgccgggtgcgaaaaaaatccgctacatgaaagattttaaccttaaagaagacgatgcgaatttattggtgagcgatcctttattggcggagtattttgaaagcatgcttaatcttggggttaaggctaaaacgagcgtaacatggctttgtgtggaattattagggcgcttgaaggctgaagttactttagagaattgcgggattagcgctcatgcgctaggcgctttagccaaacgcattgatgagggcaagatttcgggtaagagtgctaaagatgtgttagataggcttttagaagaacaagggggcgatgtggatacccttattgaacaaatgggcttgtctcaagtcaatgacacggaagcgattgttaaagtcatagaagaagtgttaaaaaacaacgccgacaaggtgcttgaatataaaagcggtaaggacaagctttttgggttttttgtagggcaagcgatgaaaaatttaaaaggggctaatcctagcgtggtgaatgctattttgaaagagaaattggattga

SEQ ID NO: 7424 - DNA, 1098 bp, Helicobacter pylori
  CDS (1)...(1098)
atgaacactttggggcgttttttaaggctaacgacctttggggaatcgcatggggatatgatagggggggtattagacggcatgcctagcgggattaagatagactatgacttattagaaaatgaaatgaagcgccgtcaaggggggaggaacattttcaccacgccacgaaaagaagacgataaagtggaaataacaagtggggtttttgaaggttttagcgcagggacgcccatagggtttttaatccacaaccaaagggctaggagcaaggattacgataacattaaaaaccttttcaggcctagccatgcggatttcacttattttcataaatacggcatcagggattttagaggtggggggaggagttcggccagagagagcgctataagagtggctgctggggcgtttgctaaaatgcttttaagagaaattggcgttgtttgtgaaagcgggattattaaaattgggggcattgaagccaaaaattacgattttaatcacgctttaaaaagcgagatttttgccctagacaaagaacaagaagaagcgcaaaaaacagccattcaaaacgctatcaaaaaccacgacagcattgggggcgtggctttgattagagctaggggtgcgaaaacaaatcaaaagctccccattggcttaggtcaagggctatacgctaaattggacgctaaaatcgctgaagcgatgatggggcttaacggggtgaaagcggttgaaataggcaagggggtagaaagctctttactaaaaggctcagaatataacgatttaatgagtcaaaaagggtttttgagcaatcatagcgggggggttttagggggcatgagcaatggggaagaaatcattgttaaggtgcattttaaacccacgccaagcattttccaaccccaacgaaccatagacattaagggtaatgaatgcgaatgcttgttgaaaggcaggcatgatccttgcattgcgattagagggagcgtggtgtgcgaaagtttgctttcgttggtgttagccgatatggtattactcaatttgacttcaaaaatagagtatttaaaaacgatttataatgagaattaa

SEQ ID NO: 7425 - DNA, 3504 bp, Helicobacter pylori
  CDS (1)...(3504)
ttggataaaaagcttattaataacgaatttgtgtgtaagatcgttggcacgcataaagggttagccaagcaggatgtgatcgccttagacgatgaaaaccaagaagacaacgacttgaaaaacaaagccgacacctttgtttctcaaagagccataagcttttgtaaaagcatacaaacgagtaaaaatatcaaagactcctttgaaacgatcatggaatgctatgatgaagagctgaagaaaaagagttttaaaaacctaaaaatcagcatcgatcatgttgatggcaccatgaattgtaaggagaggcttgacaaattagaaaacttgaatacatttgaacctaacatttgtaaggttttgagtaacgctaggtgtttgagcgagggggtggatgtcccagcgcttgatagcgtgatcttttttgatggcagaagcgcgatggtggatattatccaagcggtgggtagggtgatgcgaaaagccaaaaacaagaaaagaggctatatcattttgcctatcgctttaagagagagcgagattaaaaacttagatgaagccgtcaaaaacaccaatttccaaaacatttggaaagtgctaaaagctttaagaagccatgattcaagcctcgttgatgaagccattttcaaagaaaaaatcaaaatctttggaagcgatgacgcaagcaatccagacgatgaggaagagttacaaaaagataaaactgagcaatcctcaaacgatcccaaagaagcccaaaaaaccctttttgacgctatcttgctgcaagatctagcgaacgccgtgtataacgtcatgcccactaaattaggggacaggaattattgggaaaatttcgctaaaaaaacgggcaacatcgcaaggaccttgaatgagcgcctgaaagaactttttggcaaaaaccctgaaatttttgacaactttttaacttcgttaagaggcaatatccatcaaagcattaaagaagaggaagccttggatatgatcatttctcacatcatcactaagcccatttttgatgcgatttttggggacaatataaaaaaccctatcgcaaaagccttggataaaatggttttaaaactctccgatttgggattagaaggggaaactaaagatcttaaaaacctctatgaaagcgtgaaaaccgaagcggcgcgcgccaaaagccaaaaaagccaacaagaactcattaaaaacctctacaacactttctttaaagaagcctttagaaagcaaagcgaaaaactagggatcgtttatacgcctatagaggtggtggatttcattttaagggccactaacggcattttgaaaaagcatttcaacacggattttaacgatcaaagcatcacgatttttgacccattcatgggcaccgggagttttatcgcccggttgctttctaaagaaaacgattttattagcgatgaagccttaaaagagaaatttcaaaaaggtttgttcgcttttgacatcgtgcttttatcttattatatcgctttaatcaatatcacccaagccgcgcaaaatagggacagctcgttaaaaaatttcaaaaacatcgcgctcacggacagcttggattacttggaagagaaaaacgataagggggtaatccctggctttgaatatttatttgaagatttgaaagaaaacaaagaaatcaaaaccactatggaaaagcaaaacattagagtcatcatcggcaacccgccttattcaagcggcgctaaaagcgaaaacgataacaaccaaaacctctcacaccctaagcttgaaaaacgggtttatgaaacttacggcaaaaattccaccgctcaaaacaagaactccacacgagacacgctcatccacagcattcgcatggcgagcgatcttttaaaagataagggggtgctaggctttgtggtgaacgggagcttcattgactctaaaagcgcggacgggtttagaaaatgcgtggcacaagatttttcgcacctttatgcgctgaatttgagaggcaatgcgaggacttcaggagaggagcgaaaaaaacaaggagatggaatatttgatagcggatccagggtgacggtagcgatcatcttttttgtcaaagataaggacgcgcccaatcatacgattttttactatgaagtggaggattatttgaaaagagaagccaaactcaacttgctcgctaattttgaaaatctggattcggtgccttttaaggaaatcaccccgaatgacaaaggcgattggatcaaccaaaggaatgacgattttgaaaagctcatccctttgaaaagagacaaaaaatcaaaaatattcaatgctatttttgatctcaattctaatggggtgaaaacaagtcgtgatccttgggtgtataacttttcgcaaaaaactttaatgcaatcggtgcaaaactgcattgacacttataacgctgatttgaagcgcttcaatgagcgtttcagggaagccttcaaacaacgcacagctaaagataaaggtatcaaaaagtcagccgatcgctacaagcacctaaacgatagagaaatcaccactgataaaacgaaaatcgcttggactgatggtttgaaaaacaaactcattaaaaatgaaaatctgccagaaagcggcatggagcgcgtaaggttagccttgtatcgcccttttaacaaacaatggctttattgggataaaaatttaataaacagacaatctcaattgcccaaaattttcccggataaaagcgcgcgcaatgtggtgatcaatactggtgtgggtaatggtaaggattttagcgctcttgtaagcgattttatttctgattttagtttgatctcacccaatcaggcttaccccttatattattatgatgatctggggaaccgctataacgctatcagcggctatgcgctcaacctcttcaggaggcattataaagataatgctattactgaagaagagattttttactatatttatgcgattttccaccataaaggctatttggaaaaatacaaaaactctctcgccaaagaagcgccgcgaatcgctttgagcgaagactttaaagaactctctatgcttggcaaagaattggccgaattgcacctgaactatgagagtggggaaatgcacacaagcgttaaacataacctactagagagtgccgaaatggagggctattatgatgtgatccaaatgaaaaaggataaaaaaggggatcgcatcaaatacaaccaccatatcactatcactcaaatccctaaaaaagcctttgactatgtggtgaatggcaaaagcgcgattgactgggtgatcgaacgctatcaaatcactaaagataaagacagcttgattgaaaacaacccgaatcattacgccggcggcaaatatatttttgaactcctttgtagggtcatcaccctttcggtaaaaagcgtggatttgattgaaaagatcagcgagaagaggtttgagtga

SEQ ID NO: 7426 - DNA, 1071 bp, Helicobacter pylori
  CDS (1)...(1071)
atgaaacaccccctagaagaattaaaagaccctgtagaaaatcttttgctatggattgggcgctttttgcgttataaatgcacgagcctgtctaattcccaagtgaaagaccaaaacaaggtttttgaatgcttgaacgaattcaatcatgcgtccatcaattcaaaccaattagaaaaagtttgcaaaaaagcccgtaatgccggattactaggtatcaacacctacgcactgcccctactcaaattttacgaatacgctcaaaaactttctttaaaatcgctcaaaaatatagatgaagtcatgttggctgaatttttgagtatttataccgggggtttgagtttagccactaagaaaaattacagaatcgccctgttagggctttttagctatatagacaagcaaaatcaagataaaaatgaaaaatcttatatttataatatcacgcttaaaaacatcagcggagtgaatcaaagcgcaggcaacaagctccctactcatttaaacaatgaagaattagaaaaatttttagagagcattgataaaatagagatgtccgctaaagtgcgcgcacgaaaccgcttgctcattaaaatcatcgtttttacaggcatgcgttctaatgaagccttgcagcttaaaataaaggatttcactttagaaaatggctgttatacgattttgattaaaggcaagggcgataaatacagagcggtgatgctcaaagctttccacattgagagccttttgaaagaatggctcacagaaagggaattgtatcctgttaaaaacgatttattgttttgcaaccaaaaaggcagtgctttaacgcaagcttatttgtataagcaagtggagcgcatcatcaattttgccggactcaggcgagagaaaaatggggcgcacatgttaaggcattcttttgcgaccttgctttatcaaaaacgccatgatttgattttagttcaagaagctctagggcatgcgagcttgaacacgagcaggatttacacgcattttgacaaagatcgtttaaaagaagcggcgagcatttgggaagaaaattaa

SEQ ID NO: 7427 - DNA, 2367 bp, Helicobacter pylori
  CDS (1)...(2367)
ttgattacggtggttaaacgaaacgggcgcattgagcctttggacattaccaaaatccaaaaatacactaaggacgctacggataatttagagggcgtgagccaaagtgagctggaagtggatgcaaggttgcaatttagggacaagatcactactgaagaaatccaacaaactttgattaaaaccgctgtggataagatagatattgacacgcctaattggagctttgtcgcctcaaggctttttttgtatgatttataccataaagtgagtggttttacagggtataggcatttgaaagagtattttgaaaacgctgaagaaaagggccgcatccttaagggctttaaggaaaaatttgatttagagtttttaaatagccagatcaagcctgaaagggatttccaattcaattatttagggattaaaaccttgtatgatcgctatttgttaaaagacgctaacaatcaccctattgaactgccccagcacatgtttatgagcattgcgatgtttttagcgcaaaacgaacaagaacttaacaaaatcgctttagaattttatgaagtgttaagcaagtttgaagcgatgtgcgcgacccccactctagcgaacgcgcgcaccaccaagcaccaattaagctcatgctatattggcagcacgccggataatattgaggggatttttgacagctataaggaaatggcgctattgtccaaatacggcggagggattggctgggatttttctttggtacgctctatcgggagctatattgatgggcataaaaatgcgagtgcaggcacgatcccgtttttaaaaatcgctaatgatgtggcgattgcggttgatcaattaggcacacgaaagggcgcgattgcggtgtatttggaaatttggcacattgatgtgatggagttcattgatttaaggaaaaatagcggcgatgaaaggcgaagagcgcatgatttgttcccggctctttgggtgtgcgatctgtttatgaagagggttttagaagacgcgatgtggactttgtttgacccttatgagtgtaaggatttgactgagctttatgggcaggattttgaaaaacgctatttagagtatgaaaaagatcccaaaatcattaaagaatacattaacgctaaagatttatggaaaaaaatcttaatgaattattttgaagccggtttgcctttcttagcctttaaagacaacgccaatcggtgcaatccaaacgcccatgcaggaatcattcgatccagcaatctatgcacggagatttttcaaaataccgcgcccaaccactattacatgcaaatagaatacaccgacggcgcgatagagttttttgaagaaaaagagttggtaacgacagatagtaatatcactaaatgcgctaacaagctcactagcaccgatattcttaaaggcaaaaaaatctatatcgctactaaagtcgctaaagatgggcaaacggcggtgtgcaatctagcgagcatcaatttaagcaagatcaacaccgaagaagacattaaaagggtcgtgccgatcatggtcaggcttttagacaatgtgattgatttgaatttctaccctaaccgcaaagtcaaagccactaatttgcaaaatagagccatagggttaggggttatgggtgaagcgcaaatgctcgcagaacaccaaatcgcttgggggtctaaagagcatttagaaaaaattgacgctttaatggagcaaatcagctaccatgcgattgacacgagtgcgaatttagcaaaagaaaaaggggtttataaggattttgaaaattcagaatggagtaaggggattttccccattgataaagccaataatgaagccttaaagctcacggaaaaagggctttttaaccacgcttgcgattggcaaggtttgagggaaaaagtcaaggctaatggcatgcgtaatggctatttaatggcgatcgctcctacaagctccatttctattttagtaggcacaacccaaacgattgaacccatttataagaaaaaatggtttgaagaaaatttgagcgggctaattcctgtggtagtgcctaatttgaatgtagaaacctggaatttttacacatcagcctatgatattgacgctaaagatttgattaaggcggcagcggtgcgccaaaaatggatcgatcaaggccaaagcatcaatgtgtttttacgcatagaaaacgctagcggtaaaaccttgcatgaaatttacacgctcgcttggaaattaggactcaaatccacttattatttgcgtagcgaaagccctagcatagatgaaaaaagcgtgttggatcgatcggtggagtgttttaattgccaataa

SEQ ID NO: 7428 - DNA, 1176 bp, Helicobacter pylori
  CDS (1)...(1176)
atgaatgaagtggttgtagtggcggcaaagcgtagcgctgtagggagttttttaggctctctaaagaatgtgggcgctaggcaaatgggcgttagcgtgcttaaagacgctttgaatgcgagctctcttaagcctagcgatgtggattctgttattttaggcaatgttttaggcgctggtttgggtcaaaatatcgccagacagatccaactggacgccggtatccctaatgacagaaacgcttttagcgtcaatatggtttgcggatcgtctatgaaagctatccaattagcgcatgatagcattgtacttgggtgcgatgaagtggtggtgtgcggtggcgtggagaacatgagcgcagcaccctatctgtcgtttgacatgcgagaggggaaaagaatggggaatgcgaacatgatagactccatgatacatgacggattgtgggatgcgttcaatgattaccacatggggatcaccgctgataatgtcgctcaagcgtaccacataagccgagaagatcaagacgcattcgcgctccaatcgcaactcaaagcgagagccgccatcaatgcagggaaattccaagaagaaatcacgcctattgaaatagcgaataaaaaaggcgtggtggtttttaaagaagacgaataccctagagacacgacgctagaatcccttgcaaagctcaaacccgcctttaaaaaagacggatcggtaacggcaggaaattcatcagggatcaatgatggtgcgagtattatcattttatgcagcgctaaaaaagcgcaaaaactggggttaaaaacaatggccactatcaaggggtttggtttgggtggttgcagtccggatattatgggcatatgcccaagcatcgctattaaaaacaatcttaaaaatatcaaaatgaatctcaacgacatcaatctttttgaactcaatgaagcctttgccgcgcagagtattgccgtgctaaaagagcttgaattaaaccccaatatcgtaaatgtgaatggaggcgcgatagcgattggccaccctattggcgcgagcggcgctaggatattagtcactttattgcatgaaatgaaaaggagtgggcatggcgtgggttgcgcgtcattgtgcgtgggtggcggtcaagggctatcagtggtagtggaacaaaaataa

SEQ ID NO: 7429 - DNA, 927 bp, Helicobacter pylori
  CDS (1)...(927)
ttgcaagaaatagaaaatctgcaccaaagcgttttgttgcaagaagtcttgcaggcgttcacgcctttagaagaagggattttgattgattgcactttagggttaggggggcattctaaagcgattctatcccaaaaaccgcacctgaaactcattggcattgataaagataagttcgctcaagaaatcgctaaagaacgattgaaagaatttgaagggcgttacaacctcttaagcggaggttttgccaaacgctttaaagaagccctagaaattcatggcgagcgaatcaagggggttttagtggatttaggggtgagttccttacagcttgatgatgacaatagagggtttaatttccgctcgcatgctttggatatgcgcatggatttggaaagcgaattgaacgctcaaaaagtcatcaactcttatcctgtagtggcgttagaaaaaatctttagagactatggcgaaatcaaagaatacaaaaaaatcgcccacaaaattgcagaaagacgcgctaaaaaaccctttaaagacgctaaggatttgagcgagtttttaagctccctttctaaaaataaaaaaatccacccagcgacattagtgtttcaagccgttcgcatagaagtcaatagcgaattagaagaattaaaagaatttttacaatgcgctagaaaccttaaggaggcgattttgtgcgtgatttcttttcattctttagaagacgcgttagtgaaaaacgcctttaaagattacgccaaaaattgcatttgcgatccttcaagcttcaaatgcgcttgctctaacaatcacgctttaggcgcaattttaaccaaaaagcccatcactccaagcccagaagaaattaaaaacaacaggcgttcacgaagcgctaaaatgagggtgttccaattcaagccatga

SEQ ID NO: 7430 - DNA, 723 bp, Helicobacter pylori
  CDS (1)...(723)
atggatattttaaaagcagagcatttaaacaaacagattaaaaaaaccaaaatcgtttcagatgtttctttagaagtgaaaagcggcgaagtggtggggcttttagggcctaatggggcgggtaaaaccaccaccttttacatgatatgcgggcttttagagcctagtggggggagcgtttatttaaacgatgtggatttagctaaataccccttacacaagcgttctaacttgggcataggctacttgccccaagaatccagtatttttaaagaattgagcgtggaagagaatttggccctagcaggggagagcacttttaaaaactctaaagagagcgaagaaaaaatggaaagcttgcttgatgcttttaatatccaagccataagagagcgcaagggcatgagcttgagtgggggagaaagaaggcgcgtagaaatcgctagggctttaatgaaaaaccctaaattcgtgctgttagatgagccttttgcgggcgtggatccgattgcggtgattgacattcaaagaatcattgaaagcttgattggattaaacattggcgtgttgattactgatcacaatgtgcgagagaccttgagcgtgtgccatagggcgtatgtgatcaaaagcggcacgcttttagcgagcgggaacgctaatgaaatttatgaaaacgctttggtgcgtaagtattatttaggggaaaattttaaggtatag

SEQ ID NO: 7431 - DNA, 987 bp, Helicobacter pylori
  CDS (1)...(987)
atggactttaagaataaaaaatggctttttttagcccctctagcaggctatacggatttgcctttcaggagcgtggtgaaaaaatttggcgtggacgttaccacaagcgaaatggtgagctcgcattcgttggtgtatgcgtttgataaaacttctaaaatgttggaaaaatcccctttagaagatcatttcatggcgcaaatttcaggctctaaagaaagcgtagtcaaagaagcggtggagaaaatcaacgctttagatcatgtgagcgggattgattttaattgcggttgtcctgcccctaaagtggctaatcatggtaacgggagcgggctattgaaggacttaaaccacttggtggagattttaaaagtgattagagaaaacaccaataaaaaaatcacaagcgtgaaagtgcgtttaggttttgaaaagaaaatccctaaagaaatcgctcatgccttaaatgacgcgccggtggattatgtggtggtacatgggaggacacgaagcgataggtatcaaaaagacaaaatagattatgaaagcatcgctttaatgaaaaagattttaaaaaagcctgtgatagccaatggcgaaattgacagcgtgaaaaaagcttttgaagttttacaaatcactcaagcggatgggctaatgatagggcgagcgaccttaagagccccatggatattttggcaaatcagaaacaacaccaccgaattacccgcagtcgtgaaaaaagacctggttttagaacattttgataaaatggtggagttttatggggataggggggtgatcatgttcaggaaaaacttgcatgcttacgctaagggtgaaatgcaagcgagcgcgtttcgcaactgcgtcaatacccttacagaaataaagagcatgcgagagagcatagaggaattttttaatcaagagatgttacaaagtgaagtgccattatgggtagaattgaatcaaaaaagcgtttga

SEQ ID NO: 7432 - DNA, 1110 bp, Helicobacter pylori
  CDS (1)...(1110)
atgttgcttttcactccaggccctgtagccattaatgaagagatgcgctcaagcttttctcagccaatgccccaccaccgcaccaaagattttgaaaagattttccaaagcgtgcgagaaaatttgaaaaaaatgaccggtttagaagaagttttgcttttaagcagcagtgggacaggggctatggaagcgagtgtgatttccttgtgtcaaaaagagttgctttttgttaatgcgggtaagtttggcgaaaggtttggcaagatcgctaaagcccattccatcaaagcccatgaattagtctatgaatgggacacaccggctcaagtggatggaatattaaacgcgcttaaagccaaccccaacattgatgcgttttgcattcaagcatgcgagtctagtggagggttacgacaccctgtagaaaaaatcgctcaagcgatcaaagaaactaacccaaatgtttttgtgattgtagatgcgatcaccgctttaggggttgagcctttagaaataacgcatgttgatgcgctcattggagggagtcaaaaagcgttcatgctaccccctgcgatgagcttaatcgcattgagccaaaaggcgattgatcgcatagaagaacgcaatgtggggttttatttcaatttgaagagcgaattgaaaaaccaaaagaacaacaccacaagctacaccgctcctattttacacactttagggttgcaacgctattttgaattggtgcagaatttagggggctttgaagcgctctatcaagagactaaaagagtcgctctagccagtcaaaaagccgttttagcactgggtttaaagattttccctaaaagcccgagcttgagcatgacaacgattgttagcgagcatgccaaagaattaaaaaaccttttgaaagaaaaataccaggtgcaatttgcgggcggtcaagagccttataaagacacgctcattcgcatcaaccacatggggatcattcctgtttacaaaagcgcttacgccttaaacgccctagaattagccttaaacgatttggatttaagggaatttgacggcatggcgaatacaacctttttgaagcaatattatgaaatttaa

SEQ ID NO: 7433 - DNA, 1044 bp, Helicobacter pylori
  CDS (1)...(1044)
gtggagttttgcgttttatttggtggggcgagttttgagcatgaaatcagtattgtgagtgcgatcgcgcttaaaggagtgttaaaggataggattaaatattttatttttttagatgaaaaccactatttttatttgattgaagaatccaacatgcattcaaaatacttcgctcaaatcaaagaaaaaaaattaccccctctaatcctcacacacaatggcttgcttaaaaactcgtttttaggggctaagataatagaattgcctttggtgatcaatcttgtgcatgggggcgatggcgaagacgggaaattagcgagcttgttagaattttatcgtatcgctttcataggccctagggttgaagcgagcgtgctgagttataacaaatatttaaccaaactttacgctaaagatttaggggtaaaggctttagattatgttcttttgaatgaaaaaaaccgcgctaacgccttggatttgattgggtttaatttccctttcattgtcaaacccagtaacgccgggagctctttaggggtgaatgttgtgaaagaagaaaaagaattgatttacgctttggatagcgcgtttgaatattctaaagaagtcttaatagagcctttcattcagggcgtgaaagaatacaatctagccggctgtaagatcaaaaagggtttttgtttttcctatgttgaagagcctaacaaacaggaatttttagatttcaaacaaaaatatttggatttttcacgcaccaaagcccctaaagcgaatctttctaacgccctagaagaacaattaaaagaaaattttaaaaaactctataacgatttgtttgatggcgcgatcatccgttgcgatttttttgtcatagaaaatgaagtgtatcttaatgagatcaaccccattcctggcagtttggcgaattatttgtttgatgattttaaaacaacgctagaaaatttagcgcaatcgttacccaaaacccctaaaatccaagttaaaaactcttatttgttgcaaatccaaaagaataaatga

SEQ ID NO: 7434 - DNA, 957 bp, Helicobacter pylori
  CDS (1)...(957)
atgaaggcacgtggttttaagacaaagatgcgtggttttaagattttttcagggagcgctcaccctgcatttggcaaagaagtgtcaaagcatttaggctttcccttatccaaagcggtgataggcaaattcagcgatggcgaaatcaatatccaaatcagcgaatcggtgcgcggtaaagatatttttatcatccagcctacttgcgtgcctgtcaatgacaatttaatggaattgttagtcatggtggatgctttaaggcgcagttcggccaattctatcacagcggtgttgccgtattttggctatgccagacaggacagaaaagcggctccacgagtgcctatcacggctaaaatggtcgctaatttgatgcaagaagtggggattgaaaggatcatcacgatggatttgcatgccgggcaaatccaaggcttttttgatgtgccggtggataatttatacggatctatcgtttttagagactatatccgctctaaagcgctcaaaaaccctataatcgccagccctgatgtgggtggggttacaagagccaggtatttcgccaatcaaatggggttagatttgatcatcgtggataagcgccgtgaaaaagctaatgaaagcgaagtgatgaatattatcggctcagccaaggagcgcgatgtgattttagtggatgacatgattgataccgcaggcacgatctgtaaagccgctttggctttaaaagaacaaggggcaacttctgtcatggcgttaggcacgcatgcggttttgagcgggaatgcgatcaagcgcattaaagaaagcgcgttagatgaagtggtggtaactaactctatccctttagttcaaaaatgcgataaaatcacgaccttaagcgtagcgtccttatttgcggaagtgatcagaaggatttatcataacgaaagcgtccaatcgcttttcacttaa

SEQ ID NO: 7435 - DNA, 1590 bp, Helicobacter pylori
  CDS (1)...(1590)
atgagcagcgggttaatttacatttcattagaagtcttggtagcgtgtttgatcaccgctctaatcatgtattatgtgatgaaaaagatctattacgctagagggcaagccattttaaaaggcgcttcagccaaagctaaattaatggaatttcaagcgaaatctttcgtggaagctgaagaaatgcgcatgaaaagccaagaatgcaagttgcaacagcaatatgaaaataagaatttgcaactccaaacccattttgataaaaaagaagcgcatttgaagcatttagaagcgcagcacaaagaatttgtaagagatgaaaaacgctatttggaaaaggaaaaaaaagagcttgaaaaagaacgccaaattttagaacaagagagggaaaattttaaaaaacagcgcgccatttgtaaagaagctcaagccaaagcgctagatgcgatgctcaattacatggcttataccaaagatgaaattaaaagcatgatcttagagcaactagaagaggaactagaagcgcaaaaaagcgccttgatcaggcgttatgaaaaagaagccaaagaagagggtaagaaaaaatcgtatgccattttagcggaagcgacagcccgttttgcgggcgattatgcgacagagaatttaacaagccgtatcgctttgccttgctcagattatgtgggtcgtgtgataggcaaagacgggaaaaacattgaagcgtttaaaaagattagtggggtggatatagaatttagcgaagacagtagcgaattgtgcttgtccagtttcaatatttatcggcgtgaagtggcgagcgagacgattaaaattttaatagaagacggccgtatccagcctaacaggattgaagaggtttatcatagagtcgcgcgcaacatggaaaaagaattgctttctgaaggagagagcgtggtgctagaattagagcttggaactatggaagatgagcttaaaattttaataggcaaaatgcgttatcgctttagttttgggcaaaacgctttacagcattctaaagaagtcgctcttttagccggcttgattgcagaacagcttgggggggataaaaaactcgccagaagagccggtattttgcatgatattggtaaagcgctcactcaagagcttgggagagaccatgtgaatttaggggttgaggtgtgcaagcgccataaagaagacccggttgtgatcaatgcgatttatgcccaccatgggcatgaagaaatcatgagcgtggagtgcgcgagcgtgtgcgcggctgatgcgctttctgcagggcgtccgggcgctaggagaaagagcgatgaagaatacgctaaacgcatgcaagctttagaagagatcgcgttagaatttgatggggtggaaaaggcgtatgcgatggagagcgggcgagaactaagagtgattgtcaaatccaaccaagtcagggacaatcaagtgcctattattgctagaaagatcgctaaaaggatagaagagagcactcagtatgtgggcgaagtgggcgtgcaagtggtgcgagaaaatcgtttcaaaacgaccgctacgctcaagcaatga

SEQ ID NO: 7436 - DNA, 1410 bp, Helicobacter pylori
  CDS (1)...(1410)
gtgcttgtgaggttaggggttgttgcttgtcttttttggcttcattacgcttacgctacaacccttaaaattaccaacattgtgccttttggctctagcagtgttaaaatggtgttcaatcaagaggttaaaaaattcaaagaagtttcgctcaaaaattttaagagttatttggaattagaagcggttctaaccattcctaaaaagcattaccaattctccaagcaatctttcatcacgatcgcgcaattcagccctaaattagtgcgagtggttatcggctatgctcctaaaatgacttatgaagtcaagattcttaaagacaagctctatgtttctattatggagaaaaagcccttaataaggcatcaaatgacacccaaaccacccaaacaccatgcactcaaacaccagacgccaaaacccacccctaaacccattaaaaaagaggctaaaaaggctaaagagaaaacaactaagcatgcgcattcaaagcatgcgcactctccattgaacgaaaggagcgctaaaaaagaaatccctaaaaaagaaatccctaaaaaagaaatccctaaaaaagaaatccctaaaaaagaaatccctaaaaaagaaatccctaaaaaagaaatccctaaaaaagaaatccctaaaaaagaagcagaaaatgagagtaagaaccaaatctttatagcagaaaaaaatgatacttggatcaaaaccaagcgcaaaaaacacaaaaagatcgttttggacgctgggcatggggggaaagattgcggggcgatgagcgcgaatttggtgtgtgaaaaggacattgttttagaagtggtgaagtttttgcataaagagcttaaaaaaagaggctatagcgttttattgacaagggataaggacatttacattgatttagtggcccgaacggaattagccaataaaaaaggggcggatttattcatctcagtgcatgccaattccatccctaaacgctccacctctaacgcccatggcatagagacttattttttatccaccgcaaggagtgaaagggctaggaaagtggctgagcaagaaaataaagacgatgtgaatttaatggattatttttctaaaagtttgtttttaaattcattgaacacgcagcgattgatcgtctctaacaaattagcgattgacgtgcaatacggcatgctccaaagtgtccgcaaaaattaccctgatgtggtggatgggggtgttagggaggggcctttttgggtgttagccggggctttaatgccttcaattttaatagaaattggttataattcccatgcgatagaatctaaacgcatccaaagcaaaccgtatcaaaaaatcttggctaagggcattgctgatggcattgatagtttcttcagcaagaatgattag

SEQ ID NO: 7437 - DNA, 1209 bp, Helicobacter pylori
  CDS (1)...(1209)
atggaacaaaaaatcagtgtggccttaaaagagatcaaaagaggcgctaatgaaatcattggattagaatacattgaaaagctggtgaggaaatattatgaaaccaatgaacgctttatcgttaaggccggttttgatcctaccgctcccgatttgcatttagggcatacggtattgatccaaaaattagctttattgcagcagtatggggctagagttaagtttttgattggggattttaccgctatgataggcgatcctacgggtaaaaatgaaacgaggaagcccctaaaccgggagcaagtcttagaaaacgctaaaacttataaagagcaaatctataagattttagatcaaaaacacaccgaagtgtgctttaattccgcttggttggatgctttaggcgcaaagggcatgatagaattgtgcgcgaagttttcagtcgctagaatgctagaaagggacgattttgctaaacgctacaaagaaaaccgccccattagcatcgtggaatttttataccctttgctgcaaggctatgattcagtggcgatgggtgcggatattgagcttgggggcaatgatcaaaagtttaatttgctggtggggcgctttttgcaacgagcttatggtttgaataaagagcaatctatcatcaccatgcctttattagaagggcttgatggggtgcaaaaaatgagtaaaagcttggggaattatgtggggatcactgaagagcctaacgcgatgtttgggaagatcatgagcgtgagcgatgatctcatgtggcgctattacacccttttgagcgctaagactttagaagaaattgaagacttaaaacatggtattttacaccaaaccctgcaccctaaagccgttaaagaggatctcgctagtgaaatcgtggctcgttattacgacaatgatcaagcattcaaggctaaagagcaattttctaaagtgtttagcgcaaaccttttgcctgaaattttattagagagcgattttgatgagggggttggggttttagatgttttaaaacagattggcttttgcccatccacttcacaagccaggcgcgatattcaaggaggaggggtaaagattaatcaagaagtggtaaaagatgagagttatcgttttgttaaaggaaattatgttatacagcttggtaagaaaagatttatgaaattaaatattaactaa

SEQ ID NO: 7438 - DNA, 2559 bp, Helicobacter pylori
  CDS (1)...(2559)
atgaaagattttttagaagattacaaaaaaagcgttttagaaagaaaaagtgagggtatcccgccactccctttaaacgctaaacaagtggaagctgtcgttgagattttgatgaaagatcccacaaacgccgctttcgctaaagaattactcattcacagagtaagccctggggttgatgagggggcgaaagtcaaagcggaatttttagcccaattgtctcaaaaaaaactagaatgtccgcacattagcgctttagaagcgaccactcttttaggcacgatgcttggggggtataatgtagagcctttgattgtgggcttagaaagtcaagacaaaaacatcgctaaagagagcgcgaaagctttaaaaaccacccttttagtctatggatcgtttgataaaatcgccgcaatgagtaaaactaacgctttggctaaagaagtgctagagtcttgggcgaacgccgaatggtttttgaataaagagcctttgaatgaatgcattgaagcgtgcgtgtttaagattgatggcgaaaccaataccgatgatttaagcccagcgagcgacgctttcacacggagcgatattcctttacacgccaaagccatgctaaaaaaccggattgaaaattacgaacaacgcattgaagccattaaaactaaaggcgttcctgtagcgtatgtgggcgatgtggttggcacaggaagctctagaaaaagcgcgactaactctatcatgtggcattttggtaaggacattccttttgtgcctaataaaaggagtggaggcattgtgattgggggggtgatcgctccgattttctttgcgacttgtgaagatagcggggcgttacccattgtggctgatgttaaggatttgaaagagggcgatatcattaaaatctacccttataaaggcgaaatcacgctgaacgataaggtggttagcacctttaagctagagcctgaaactttattagatgaagtcagggcttctgggcgtatccccttaatcattggtaggggtttgaccaataaagcgcgtaaatttttagggctaggcgaatcggaagcgttcaaaaaaccatccgctcctaaaagcgacgctaaaggctacactttagcccaaaaaattgtaggccatgcttgtggggtaaaagggatcttacctggtgcttattgtgagccaaaggttaccaccgtgggcagtcaagacaccacaggggcgatgaccagagatgaggttaaagaattagcgagtttgaaatttgatgcgccttttgtgttgcagagtttttgccataccgctgcttacccaaaacctagtgatgtgagtttgcatgcaaccttgcctggctttatcactcaaagagggggcgtggcgttgcatccgggcgatggcgtgatccatacatggcttaatcgcatgggattgcctgacactttaggcacagggggggatagccacacccgtttccctttaggcatcagtttcccggcagggagcgggctagtcgcttttgcagcggttacaggcacgatgcccttgaacatgccagaatcggtgttagtgcgttttaaaggggaaatgaatcctgggatcaccttaagggatttagtgaatgcgatcccttattatgcgattaaaaaagggttactcacggtggagaaaaagggcaaaatcaatgtctttaacgggcgtattttagagattgaaggcttgcctgatattaaaatggagcaggcttttgaattaagcgatgcgagcgcagaaaggagcgcagccgcttgcgtggtgcgtttgaataaagagccgatgattgaatacttgaaatccaatatcaagctcattgatgagatgattgcaagcggttatgaagacaaagagactttgaaaaaacgcagagatgcgatgcaagcttgggtggataagccggtattgttagagccagatagtaacgcccaatacgccgctgtcattgaaattgatgtggcagaaatcacggagcctattttggcatgccctaatgaccctgatgacgtcgctactttgagcgaagttttagcggatacgaccggcaaaagaccccacgctattgatgaagtgtttattggctcttgcatgacgaatattgggcatttcagagcctttggtgaaatcgttaaaaacgcccctcccagtcaagcacgcctttgggtagtgccacccagtaaaatggacgaacaagagcttattaatgagggctattatgcgatttttggggctgccggggcaaggactgaagtaccaggctgtagcttgtgcatgggcaatcaagcgagggttagggataatgcggtcgttttttctacttccacacggaattttgataatcgtatgggtagaggggctaaagtgtatttgggcagtgcggagcttggggcggcgtgcgctttactagggaggatccccactaaagaagaatacatgaatttagtgagtgaaaagctagagagccaaaaagacaagatctatcgctacatgaactttaacttaatggagaatttcaggctctag

SEQ ID NO: 7439 - DNA, 2598 bp, Helicobacter pylori
  CDS (1)...(2598)
atgataaaagcaatcattggaaaaatcatcggcactagaaacgatcgctggatcaaacaatacaaaaaaaaagtcctagccatcaacgccttagagcctacttatgaaaaaatgagcgatgttgagctgcaaaacgcttttgaagaattaaaaaaacgagtgcgatccgtagaaaaagatttgcaagaaaaaacccttttagaagttttaccagaaagctttgctatcactagagaagcgagcaaaaggatcttaaagatgcgccattttgatgtgcaactcattgggggcatggtcttaaacgatggcaagatcgctgaaatgaaaaccggagagggtaagactttggtcgctactttagcggtggctttgaacgctatgaaaggcgagagcgtgtatgtggtaaccgttaatgattacttagcccatagggattctaaagaaatggagccgttgtatcaattcttaggttatagcgtaggcacgatcactgcgagcgtgcgagatgatgatgagcgcttagaaatttattctaaagacattgtttatggcactaataatgaatttggctttgattatctaagggataacatgaaatattctttagagcataaagtgcaaaaatcccatgcgttcgccattgttgatgaagtggattccattttaattgatgaagcgagaactcctttaatcatttcagggcctgtggataggcgcatggaaaattacaacaaggctgatgaagtcgctaaaagcatgcaagtggaagtggatttcaccatagacgaaaaaaaccgcgcgattttaatcactgaagaggggattaaaaaagccgaaaatctctttggcgtggataatttatacaaaattgaaaacgccgccctatcgcaccatttagaccaagccttgaaagcgaattacctcttttttattgataaagattatattgtagccaataatgaagtggtgattgtagatgaatttaccggccgtttgtctgaggggaggcgctttagtgagggcttacaccaggctttagaggctaaagagggcgtgagcattaaagaagagagccaaaccttagccgatattactttccaaaattatttcaggatgttttctaaactttcaggcatgacaggcacggctcaaaccgaagccacagaatttttagaaatctacaatttagaagtggtgtccatccctactaatctagcgatcaagcgaaaagatttgaacgatctgatctataagagtgaaaaagaaaaatttgacgctgtgatccttaaaattaaagaattacacgataagggtcagcccgttttagtcggcacggctagcattgaaaagagtgaaaccttgcacgctttactcaaaaaagagcgcatccctcacaccgttttaaacgccaagcaacacactaaagaagctgaaatcatcaaagacgccgggcttaaaggggcggttacgattgcgaccaacatggcaggcaggggcgttgatattaagctcactgatgaagttaaagaacttggggggctgtatatcattggcactgaaaggcatgagagccgtaggattgacaatcaattaagggggcgaagcgggcgtcaaggcgatccgggagtgagtcagttttatttgagtttagaagacaatctgttacgcatttttgggagcgataggattaagggggtgatggaaaaattagggcttaaagacggcgaacacattgaatccaagctcgttacaagagcggtggaaaacgcgcaaaaaaaagtggagaacttgcattttgaaagccgtaagcatttgttagaatacgatgatgtggctaatgagcaacgaaaaagcgtgtataaatttagagatgaattattagacatcaattacgatattagcgctaaaatcgctgaaaacagagaatacgcgctcaatcaaatcttttctaaactcaaagcctttgaccatcaaaacctgtctgaagaggaacttttagggcttaaaaacattttaaaagaagattttaacgctagcgttgaattagaagatttagaaaaagcctcccctattgaaaaatttgtggctgaaaaactcaaaagcgattatgaaaacaaaatgaaagctttggatagcgaacaaagaagccggatcgaacgcatcgtgtatttgcagattttagacaacgcatggcgagagcacctttatacgatggataatctcaaaaccggtatcaatttgagaggctataaccaaaaagacccccttgtagaatacaaaaaagagagttacaaccttttcttagaactcattggagacattaaaatagaagcgatccaaaccttttctaagatccagtttgaaaacgagcaagattctagcgatgccgagcgttatttggataactttagcgaagaaagagagcatgagagcgtaacttaccgccatgaagaagccttagatgaagatttgaatgtggccgtgaaagctttttctaaaacccctaaaagaaacgagccttgcccttgtgggagtggcaaaaaatataaagattgttgcgctaaaagcgggcctaaaaagggcttatttgccaaatag

SEQ ID NO: 7440 - DNA, 2061 bp, Helicobacter pylori
  CDS (1)...(2061)
atgcaagaataccacattcacaatttggattgccctgattgcgcggctaaattagaaagggatttaaacaaactagactatgtgaaaaaggctcaaatcaatttcagcaccagtaagctgtttttggatacgagcgattttgaaaaggttaaggctttcatcaagcaaaatgaaccgcatttgagcctgtcttttaaagaagccgcagaaaagcccttgagttttaccccactcatcgctacgatcgctgtctttttaggcgcgattttaatcttacaccttgaacctagccctttcattgaaaaagcggtgtttgtggtgctagccttagtgtatctcataagcggtaaagatgtgattttaggggcgtttcgtgggcttagaaaagggcaattttttgatgaaaacgctttgatgctcattgcgactatcgcggctttttgcgtgggggcttatgaagagagcgtctctatcatggtgttttattcagcgggcgaatttttgcaaatactcgctatcgctcgctctaaaaaatcccttaaggctttggtggatgtcgcccctaatttggcttatttgaaaaagggcgatacattagtgagcgtcgcgcctgaagatttaagaattaatgatattgtggtggtgaaagtcggcgaaaaagtgcctgtggatggcgtggtgatcaagggcgaaagtttgctagatgaaagggcgttgagtggggagtccatgcctgttaatgtcagcgaacgctctaaagttttaggggggagcttgaatttaaaagccgtccttgaaatccaagtagagaaactttataaagattcttctatcgctaaagtggtggatttagtccaacaagccacgaatgaaaagagcgaaacggagaaatttatcactaaattttcacgctactacaccccaagcgttttattcatcgccttaatgatcgctgtattaccgcccttgttttctatggggagctttgatgagtggatttatagggggcttgtggctttaatggtgagctgtccttgcgcgttagtgatttctgtgcctttagggtattttggaggcgtgggagcggcgagccgaaaggggattttaatgaaaggagtgcatgttttagaggtgcttacccaaactaaaagcatcgcctttgataaaaccggcactttgactaaaggcgtttttaaagtggtggatattgtgccgcaaaacgggcattctaaagaagaagttttgcattacgcttcttgctcgcagcttttatccacgcacccgatcgctttatccattcaaaaagcatgcgaagaaatgttaaaggacgataagcaccagcatgacattaaaaattacgaagaattgagcgggatgggggttaaagcgcaatgccatacggatctaatcatcgcagggaatgaaaaaatgctcgatcaattccatatcgcgcacagcccttccccagaaaacggcacgatcgtgcatgtggcttttaaccaaacttatatcggctatatcgtgattagcgatgagattaaagatgatgccatagagtgcttaagggatttaaaagcgcaagggatagaaaatttttgcattttgagcggggacagaaaaagcgcgactgaaagcatcgctcgaactctaggctgtgaatatcatgcgagtttgttgcctgaagaaaaaacgagcgtgtttaaaacctttaaagaacgctataaagccccggcgatttttgtaggcgatggcatcaatgacgctccgactctagcgagcgctgatgtggggattggcatggggaaaggatcagaattgagcaagcaaagcgcggacattgtgatcactaatgactccttaagctctttagtcaaagttttagcgatcgctaaaaaaactaaaagcattatttggcaaaatatcttgttcgctttggggattaaggcggtttttatcgtgctagggcttatgggggtagcgagcttgtgggaagcggtctttggcgatgtgggggttacgcttttagccttagccaattccatgcgcacgatgagggcttaa

SEQ ID NO: 7441 - DNA, 531 bp, Helicobacter pylori
  CDS (1)...(531)
gtgcaaacgattcatataggcgttttgagcgcgagcgatagggcgtcaaaaggggtttatgaagatttaagcggcaaagcgatacaagaagtgttgagcgaatatctgctcaatcctttagaatttcattatgaaattgtcgctgatgaaagggatttgattgaaaaatcgctcattaaaatgtgcgatgaataccaatgcgatctagtcgttactacaggaggcacaggccctgctttaagagacataaccccagaagccacaaaaaaagtgtgccaaaaaatgcttcctgggtttggagagcttatgcgaatgactagcttaaaatacgtgcctacagcgattctatcgcgccagagcgctggcattaggaataagagtttgatcatcaatcttcctggtaagccaaaaagtattagagaatgtttagaggcggtttttccggcaattccttattgcgtggatttgattttagggaattacatgcaagtgaatgaaaaaaacattcaagcgtttcgccccaaacaatag

SEQ ID NO: 7442 - DNA, 1002 bp, Helicobacter pylori
  CDS (1)...(1002)
atgccaaatcatcaaaacatgttagataaccaaacgattttaatcaccggaggcactgggagttttggcaaacgctttgttcgtaaggtcttagacaccaccaacgctaaaaaaatcattgtttatagccgagatgaattgaaacaaagcgaaatggccatggaatttaatgatcctaggatgcgtttttttattggcgatgtcagggatttagaacgcttgaattacgctttagagggcgtggatatttgtatccatgcggccgcgctcaagcatgtgcctatcgctgaatacaaccccctagaatgcattaaaactaacatcatgggagcgagcaatgtgattaacgcatgcttaaaaaatgaaatcagccaggttattgccctaagcaccgataaagccgctaaccccattaacctctacggcgcaaccaaattgtgcagcgacaagctctttgtgagcgcgaacaactttaaaggcccttctcaaacgcaatttggcgtggtgcgttatggtaatgtggtggggagtcgtgggagcgtggtgccgttttttaaaaaattagtccaaaacaaagcgagtgaaatccccattaccgatattcgcatgacacgattttggatcaccttagatgagggggtttcttttgtgcttaaaagcttgaaaagaatgcatgggggggaaatttttgtgcctaaaatccccagcatgaaaatgattgatctcgccaaagccctagcccccaatatccctactaaaatcatagggattcgcccgggcgaaaaactccatgaagtgatgatccctaaagatgaaagccatttagccctagaatttgaagacttttttattattcagcccactataagcttccaaacgcctaaagattacacgctcaccaaactccatgaaaaaggccaaaaagtcgcccctgattttgaatacagcagccatactaataaccaatggctagagcctgatgatttgttaaaattattatga

SEQ ID NO: 7443 - DNA, 654 bp, Helicobacter pylori
  CDS (1)...(654)
atgtttgatgcgaattgtttgaaactcatgtttgtggctggttcgcaagatttctaccatataaaaggcgataggacaaacgcgcttttagacactttagaattagctttacaatctaaaatcacagcgtttcaattccgccaaaaaggcgatttagccttacaagatcctgttgaaatcaaacgattagccctagagtgtcaaaaattatgcaaaaaatacggcacgccttttattattaatgatgaggtgcgactcgcgctagaattaaaggctgatggcgtgcatgtggggcaagaagacatggctatagaagaggtagtaactttatgccaaaagcgcctttttatcggtttgagcgtcaatactttagagcaagccctaaaagcgcgccatttagatcatatagcctatttaggggtaggccctattttccccacaccctctaaaaaagacgctaaagaagttgtaggcgtcaatcttttaaaaaaaatacacgatagcggggtagaaaaacccctgatagcgattgggggcatcacgacagataacgcttcaaaattgcaaaaattcagtggtatcgcagtcattagcgcgatcacgcaagccaaagataaagccttagcggttgaaaaacttttaaaaaatgcatga

SEQ ID NO: 7444 - DNA, 780 bp, Helicobacter pylori
  CDS (1)...(780)
atgttgaaagaattacgccaaaaacgccccttagtgcataatatcaccaattatgtggtggcgcaatttgtggctaatggtttgttagccttaggggtatcgcctttaatgagcgatgcgattgctgaaatgcccgatttagcaaaaatttctgacgcgctcgctattaatattggcaccctcaatgaacgcaccattttatgcgctaaagaggctatcaaacgttacaaggctttgaataaacccatcgtgttagatcctgtggggtgttcagcgagcgctttgcgctatgacacaagcttagagcttttagaaagcaaaggaatcagcacgcttaggggcaatgctgccgaattaggctctttagtgggtatttcttgcgaaagtaaggggttagattccaagcattccgctacgcctatagaaattgtcaaacgagcggctcaaaagtattctgtgatagcggtgatgacgggtaaaacagattacgtgagcgatgggaaaaaagttttgagtattactggggggagcgagtatttggctgcaattacaggggctgggtgtttacatgccgcagcgtgcgcgagctttttgagtttgaaaaaagaccccttagattctatggtgcaactttgcgctttctataaacaagccgctttcagtgcgcaaaaaaaagcgttagaaaataacggctctaatggttcgttcttgttttattttttagacgctctaagcttgcccatagagttagaaaatagccttattaaggaagagttgtga

SEQ ID NO: 7445 - DNA, 687 bp, Helicobacter pylori
  CDS (1)...(687)
atggtatttgacagaacaacaagcgtaagagaaaaaaaagcggctaaggcgcttgggattgtggggatcgtcttttttattttgtttggcatcgtgataagcggggtggcttctcaaaaagagtgggtgcaacaattggatttattttttatagacttgatccgcaaccctgcccccattcaagggagcacgtggctttctttcgtgttttttagcacttggtttgcgcaaagcaagctcaccactcctatagccttactcattggcttgtggtttgggtttcaaaaacgcatcgctttgggggtgtggtttttctttagcatcttattaggtgaattcaccttaaaatcccttaagcttttagtggcgcgcccacggcctgtaaccaatggcgaattggtttttgcgcatggctttagtttccctagcgggcatgctttagcttcagcgcttttttacggctctttggcgttgttgttatgctattctaacgcaaacaatcgcattaaaactattggtgctattattttacttttttggatttttttaatggcgtatgatagggtttatttaggggtgcattaccctagcgatgttttaggagggtttttattagggattgcttggtcgtgctgctctttagcgctttatttggggtttttgaaacgcccttataaagccgcttaa

SEQ ID NO: 7446 - DNA, 978 bp, Helicobacter pylori
  CDS (1)...(978)
atgaaagtgtttgattacgaagatgtccaactcattcctaataaatgcatcgtgaatagccgttcagagtgcgatacgaccgttattctaggcaaacatgcgtttaaaatgcccatagtcccagccaacatgcaaacaatcatcaacgaatcgatcgcagaatttttggcagaaaatggctatttctatatcatgcaccgctttaatggatcggcaagaatcccgtttgtcaaaaaaatgaaagaacgccaattaattagctcgatcagcgttggggtgaaaaaggaagaatgtctttttgtagaagagttggccaaacaaggattaacgccagactatatcacgattgatattgcgcatggccattcaaattctgtcattgaaatgatccaacgcatcaaaacgcgtttgcccgaaacttttgtgattgccgggaatgtgggcacgccagaagcggtccgtgaattagagaacgccggtgctgacgctacgaaagttggcatcgggcctgggaaggtgtgtatcactaaaatcaaaacaggctttggcacgggtggctggcaactagcggctcttaggtggtgcgctaaagcggcaagaaaacccattattgcagatggcggcattcgcacgcatggggatattgcaaaatcaatacgctttggcgcgacaatggtgatgattggctcgctttttgcagggcatgaagaatcatctggagaaacaaaaatagaaaatggtatcgcatataaagaatatttcggttcggcatcagagtttcaaaaaggtgaaaagaaaaatatagaaggtaagaaaatttggatccagcataaaggctcgttaaaaaacacgctgattgaaatgcatcaagatttgcaatcttcaatctcctatgcaggcgggagagaccttgaagcgatccgaaaagtggattatgtgattgtgaaaaattcaattttcaatggggacacaatctaa

SEQ ID NO: 7447 - DNA, 768 bp, Helicobacter pylori
  CDS (1)...(768)
atggtcttagaagttaaaaacctgtcctttaaatattctcaaaaactcattttagacaaattgagttttagcgtgccaaaaaacagcatcacaagcattttagcgcctaatggctcgggtaaaaccacgcttttaaaatgccttttagggcttttgaagcctttagaagaaaccgaaatcaaggcgtgtaacaaagatattttacccttaaagccttatgaaaaagccaaattgatcgcttatatcccccaagtggaatattatgcgtttaatttcagcgtgttggattttgtcttaatggggaaagcgacgcatttgaatctgttcgctatgcctaaagctaagcacattaaagaagccacgagcgttttagagcgcttggatttagagtccttaaaagatcaaggcattaacgatttgtccggcggtcaaaggcagatggtacttttagccagaagcttgttgcaaagaacgcccttattgttactggatgagcctacgagtgcgttagatttaaaaaaccaagcccttttttttgatgcgattaaagatgagatgaaaaaacgagaattgagcgttttagtcaatatccatgatcccaatttggttgccaggcactccacgcatgtggtcatgctcaaagataaaaaactttttttgcaagcttccacgccaatcgctatgacttcacacaatttaagcgcgctttatgacacgcccctagaagcgatctggcatgatgataagcttgtggtgtatgcgttgtag

SEQ ID NO: 7448 - DNA, 981 bp, Helicobacter pylori
  CDS (1)...(981)
atgcttaaaacctatcatattgccttagcttgcgtgattttagcggtggtggtgttgttgtttgggggggagtccttgagtttggaagaatggcaagaagtgtgcctgaatgtgaaaaaccactttttgcacaatgaagagctgagctctttaagtgttattattttagaaatacgattaccacgagtgattttagcgctcttggtgggggcgagtttgtccgggagtggggtggtgatgcaaacgattttaagaaaccccttagtcgatccttttttactagggatttctagcggagcgatgctaggcgtggcgatggcgatagcggtagtggagtctaacattgcgattttagcgttctttggggcgattttgcccagccttgctgttttagcgatgaatagggttttaggcaattccgtcctttcattggtgctttcaggggtggtgttgagcgcgtttttaagcgcgttagccggagcgatcaaattctttgtgatccctcaaaaagcgcaagcgattgtcgtgtggcttttagggagcttgtctttgagcagttataaggattgcctgatcgctttcatagggctatctttgggctttatccctctctttttgttaaggtggcgcatcaatttattgagcttgagcgatgcgcaaagtttgagtttagggattaacccggtgctgttgcgatcgctttgtttggtgtgcgtgagcgttgcgagcgctttagcggtgagcgtgtccggcacgattggctggattgggttagtgatcccgcatgtggctaggttgttttttggggcgaatttacaaaaactgcttttaagctctttattaatgggggcgtttttcttgcttttggcggatgtggtggctaaaaccattaccccctatgatttaccggtaggcattgcgacaagcgttttaggagcgccttttttcctgtggcttttattcaggactaggggggtgtga

SEQ ID NO: 7449 - DNA, 1560 bp, Helicobacter pylori
  CDS (1)...(1560)
atgcaaagtttatggatttatccagaggatactgaagttttaggggctgcttgtaagagccttttaaaagcgttgaagcctcgttatcaaaaaatcgccctgttttcgcccattagtggggggtgtgagggctttggggagtgtgagagcctaagctctttagaggttcatagtgccatagacaaacaaaaggctttagagcttgtgagcaccgctcaagaagagttactatttgaaacgattctcaaacgctatgatgaattacaatccacgcatgattttgtcattaatttagggtatgcgccgaagtttttcttaaacgctcttttagatttaaacaccattttagccaagcatttaaacgctcctgtggtggctgttgcgcaaacgagtttggatcacttgaaagccatgcactctcatatcctcaaaaaagaagcccctttcgctatagggttatttgtgggcgaaacgcttgaaaaaccacattttttaagcgcgtctctttgcaagcaacaatgcgaattagaagcgagcgcgattgaaaatttgttgcaaacaaaaagcgagattattacccctttagcctttcaaaggagcttggaaaaaaaggctaaaaagcagattaaaaaagtcgttttacctgagagcgaagatgaaaggattttaaaagccgcacatcgtttgaatttaatgggcgcggtgggattgattttattgggcgataaagaagccattaactcccaagcgaaaaatttgaacttgaatttggaaaatgtagaaatcattaatcccaacacctcgcattatagagaagaattcgctaaaagcttgtatgaattgcgaaaatcaaagggcttgagtgagcaagaagctgagcgattagcgttggataaaacttattttgcgaccatgctcgtgcatttaggctatgcgcatgccatggtttctggggtcaatcacaccacggctgagaccattagacccgctttacaaatcattaaaactaagcccggcgtgagcctggtttcaagcgtgtttttaatgtgtttggacactcaagtgttcgtttttggggattgcgccattattcctaaccctagccctaaagaattagccgagatcgctaccacttccgcgcaaaccgccaagcaattcaatatcgcgcctaaagtggccctgctttcttatgcgacaggaaattccgctcaaggcgaaatgatagacaaaatcaacgaagccctaacaatcgtgcaaaaattagatccgcaattagaaattgatggccctttacaatttgacgcttccatagataaaggcgtagcgaagaaaaaaatgcctaacagccaagtggccgggcaagctagcgtttttatcttcccggatttaaacgccgggaacatcgcttataaagcggtgcaacggagcgctaaagccgtggcgatagggcctatcttacaaggcttgaacaagcccattaacgatttgagtaggggcgctttagtggaagatattgttaacaccgttttgattagcgccattcaagcgcaagattattga

SEQ ID NO: 7450 - DNA, 912 bp, Helicobacter pylori
  CDS (1)...(912)
atgagtaaccctaatttatccttttattgtaatgagtgcgagcgttttgaaagctttttaaaaaaccattatttacaccttgaaggcttccacccttatttggaaaaagccttttttgaaatggtgcttaatgggggcaaaaggttccgccccaagctttttttagccgtgctttgctctttagtgggtaaaaaagattattctaaccaacaaacagaatattttaaaatcgctttaagcattgaatgcttgcacacttattcgctcatccatgacgatttgccttgcatggataacgctattttaagaagaaaccaccccactttacacgccaaatacgatgaaaccacagccgttttaatcggcgatgcgctcaacacctattcttttgaattgctctcaaattctttactagaaagccgtatcattgtggaattagtcaaaatcttaagcgctaatggggggattaaaggcatgattttagggcaggctttggattgctattttgaaaacacccccttaaatttagagcagctcactttcttacacgagcataaaaccgctaaattgattagcgcaagcctgattatggggcttgttgcgagcggcattaacgatgaagagcttttaaaatggcttcaggcttttgggttaaaaatgggtctttgttttcaagtgctagatgatattatagacgttacacaagatgaaaaagaaagcggtaaaaccacgcatttagacagcgctaaaaacagctttgtgaatttattggggctaaaaaaggcaagcggttacgcccaaactttaaaaacagagattttaaacgatttgaatgcattagaacctacttatctttcattgcaagaaaatttaaacgcattattgaacactctatttaaaggcaagacatga

SEQ ID NO: 7451 - DNA, 1134 bp, Helicobacter pylori
  CDS (1)...(1134)
atgttaaaaagggcgagttttgtagaagtgaatacccattctttaaggcataattttaatgcagtcaaaaatattgtccctaaagacgcttgtgtcatggcggttgtcaaggcaaacgcttatggggcaggggcgattaaagcgagcgaaatttttttacaagaaggggctaattatttaggggtagcgaccttagatgaagccttagaattgcgctctcatttttctcaaacccccattttgatcttaggttatagccctaatactaacgcttccatgctgattgataacgatttgagcgctatggtttttagccttgaacaagcggaagttttttctcaaatggctttaaagtctcaaaaacgcttaaaagtgcatctcaaaattgataccggcatgcaccgcttgggtttagagcctacttttaaaagcatagaaaccattaaaaaaatccgcgctttaaaaggcttggaagtggaagggatattcacgcatttaagcaacgctgattctaacattaaaacccatgctaaaaaccagatgaaagtctttaacgcttttttagagcagcttttggatcaaaaaatagaatttcaataccgccatgcctataattctgccggcatcctttctttgtgtaacgggaatgaaaatcgtttgttaaacctttatcgcccaggcatcatgctctatggtttttacccttctaatgaaatgaaagagtcgtctcaaacgatattaaaaaatgttatcagtttaaaagcgcgaatcgttcaaatcaaacgagtcaaaaaaggcgaatttattggctacggcgagcatttttacaccaatgaagagactttagtgggcgttttagctctagggtatgcggatgggttggtgcgcgctttgggcaatcgcattcaagtagcgatcaataaccaattagccccccttattggcaaggtgtgcatggatcaatgctttgtcaaactcaatgatattgaagccaaagagggcgatgaggtcattttgtttggggataaaagcactaaagctaatgacgcaagcgaaatcgccacgcttttaaacaccattccttatgaaaccatcagcactttgtccaaacgcttggagcgcgtttatgtgtga

SEQ ID NO: 7452 - DNA, 804 bp, Helicobacter pylori
  CDS (1)...(804)
atgaacacccacctcaaacaattgattgaaatttcgcatttggataaagaaattgactctttagagccgttgatcagagaaaaacggaaagacttggataaagccttgaatgataaagaagctaaaaataaagcgattttgaatttggaagaagaaaaattagccctaaaattacaggtttctaaaaacgagcaaaccctacaagacacgaacgctaaaatcgccagtatccaaaagaaaatgagcgagatcaaatccgaaagggagttgcgctctttaaacattgaagaagatattgctaaagagcgatccaatcaagccaacagagaaattgaaaacctgcaaaatgaaatcaagcacaaaagcgaaaaacaagaagttttgaaaaaggaaatgctagagcttgaaaaattagcgttggaattggaaaatttagtggaaaacgaagtcaaaaacatcaaagaaacccaacagatcatctttaaaaagaaagaagaactcgtggaaaaaaccgagcctaaaatctatagcttttatgaaaggattaggaggtgggcgaaaaacacgagcatcgtaacgatcaaaaaacaggcttgtgggggttgttttattcggttgaacgataagatttatgccgaagtgctaacgagtggggacatgatcacttgtccgtattgcgggcgtattttatacgctgagagtacgcatgaaagtaacgctcaacctccaaaagaaagccaaccaaaagaaagccaagaagaaagccaagaagaaagccaagaagaaagccaagaatccgtttga

SEQ ID NO: 7453 - DNA, 897 bp, Helicobacter pylori
  CDS (1)...(897)
atgcaagatttttcaagtttattattaaaattacaagagtattggaaagatcaaggctgtttggtgatccagccttatgatattcctgcaggagctgggacattccaccccgccacgcttttaaggagcttggataaaaagccgtggaatgtggcgtatgtcgcgccctctagaaggcccactgatgggcgctatggggaaaaccctaaccgcttggggagttattaccaattccaagtcgttatcaagccaagcccttctaatatccaagaactctatttaaaaagcttggaagtgttagggataaaccttaatgagcatgacatacgatttgtagaagacaattgggagagtccgactttaggggcatgggggcttggctgggaagtgtggcttgatggcatggaggttacgcaattcacttatttccagcaagtggggggcattccttgtagccctatccctgtggaaatcacttacggcttagaaagattaacgatgtatgtccaaaaagtggaaaatatcctagagattgaatgggcgaaaaaggataatgaaagcgttcgttacgcgcaagtgcatttagagagcgaatacgaattcagcaagtatcattttgaagtggcgagcgtggaaaggctgttagaaatgtttaaaaacgcccaagccgaagccttgcattgcttggaaaacaagctccccttaccggcttatgatttggtgatgctatgctcgcattttttcaatattttagacgccagaaaggcgatttcggtggctgaaaggcaaaactatattttacaaatcagggatttagccaaagggtgcgccgttctttataaagagcaagaagaagaaagagaagagcgcctaaaaaacgctctaacaaaggcttaa

SEQ ID NO: 7454 - DNA, 939 bp, Helicobacter pylori
  CDS (1)...(939)
atggaaattgcagtatttggtggcggggcgtgggggagggctttagcctttgcttttggagaaaagaatgaagtgaaaatcatttcaaggcgcgatctaaacgagccgctaaaaaagctcaatgacgccttgatttctaaaggttctgcccccatagagcaagtggatttagaaagaggcttaaaagcggcactctatgtcatcgctattagcgtgcagcacttaagggaatggtttcaaaacgcttctttacccaaaaacgctaaggttttaatcgcttctaaagggatagaggtgttaaataaggcgtttgtgagcgagatcgcaaaggattttatcgatcctaacgctttgtgttttttagccggcccgagttttgcggctgaaatcattcaaggcctgccttgcgcgttagtcatccattccaataatcaggctttagcgctagaatttgccaataaaaccccctcttttatcagagcctacgcccaacaagacatcatagggggtgaaatcgccggggcgtataaaaacgtgatagccattgcggggggggtttgtgatggcttgaaattaggcaatagcgctaaagcgagtttgttgtctaggggtttagtggaaatgcaacgctttggggcgttctttgggggcaagacagagacttttttagggctttctggggctggggatttgtttttaaccgctaattctattttatccaggaattatcgtgtgggcttgggtctagcccaaaacaagcctttagaggtggttttagaagaattgggcgaagtggctgagggggtgaaaacgaccaacgctattgtggaaatcgctagaaaatacggcatttatacgcccattgcgagcgaattagccttgcttttaaagggtaagagtgtgctagagagcatgaacgatttgatcagacgcgcttaa

SEQ ID NO: 7455 - DNA, 282 bp, Helicobacter pylori
  CDS (1)...(282)
atgcaaattgatgacgcattattgcaacgcttagaaaaattgagcatgctagagattaaagacgagcataaagagagcgttaaaggccatttggcggaggttttaggctttgtagaaaacatcttcgctttagaaactaataatctaaaaacagatacgcatcttagcacccctttaagagaagacgaacccaaaagccaaccccacatcgccaaagagattttaagccaaaacaaacacagccaggatcattacttcgttgtgcctaaaatcattgaatag

SEQ ID NO: 7456 - DNA, 1158 bp, Helicobacter pylori
  CDS (1)...(1158)
atggttcatcaatcagagatggaaaattataatatcggtcaagcgagcattgaagaagtaagcgatccagcttataaaggggctaagattgtcgttgttggtgttggaggtggggggtctaacatgattaaacacctggttgaatacggcgtacatcaagatgtgacccccattgcaacaaacactgatggccaacacctcaaaaacaatcccgccccagttaaaatccttttaggcaaagaatctaccggaggtttaggcgctggaggggttcctgatattggtaaaaaagccgctgaagaaagcgctgatgaaattagagaagcgattaaagacgcgaaattagtcattgtctctacaggacttggaggggggactgggactggagccacccctactatcgttaaaatcgcaaaagaagtgggagcgctcacgatcgctatcgttactaagcctttcaaatatgaggggaatcaaaaaaggaagagggctgaagagggattgaaagaattggaacaatctagcgattctattttggttatccctaacgataaaatccttctcaccatgaaaaaaaacgctagcaccacggaatgctatagggaagttgatgatgtcttggttagggctgtgagcggcatttctacgattatcaccaaacccggtaatatcaatgttgattttgccgatttaaagagcgctcttggttttaaaggctttgcgctaatgggtattggtgaagccactggcgaagattccgctaaattagcggtgcaaaacgcgatccaatcgcctcttcttgatgacgcttctattgaaggagctaagagcattatcgtcttttttgagcaccaccctgactatcccatgatggcttattctcaagcttgcgatttcattcaagatcaagcccaccaagatgttgatgttaagtttggacagcacacgagcgagaatatccccattgatcatgtgcgcgttactatcattgcgaccggttctgaaagaaacagcaacggagcgggtttggaatctatcgctacgccttctcaacctgtggtgaaaccaacaagaaaagtgggcaatggcgagtatttaagaatccctactgaagaagagctgtccatacccacaaccataagaatccaacaagattga

SEQ ID NO: 7457 - DNA, 1971 bp, Helicobacter pylori
  CDS (1)...(1971)
atgcaaaaatcactgatcacaacccccatttattatgtgaatgacatccctcatattggccatgcttatacgactttgattgcggacactttaaagaagtattacacgcttcaaggcgaagaagtcttttttttaaccggcaccgacgagcatgggcaaaagatcgaacaaagtgcgagactgaggaatcaaagccccaaagcttacgccgatagcattagcgcgatttttaaaaaccagtgggattttttcaatttagattatgatggttttatccgcaccacagacagcgagcatcaaaaatgcgtgcaaaacgcctttgaaatcatgtttgaaaaaggggatatttataaaggcacttatagcgggtattattgcgtgagctgtgagagttattgcgcggtctctaaagtggataatacagatagtaaagtcctatgccctgattgcttgagagagaccacgcttttagaagaagagagttattttttcaaattgagtgcgtatgaaaagcctttattggagttttacgctaaaaaccctgaagcgattttgcccatttatcgtaaaaacgaggtaacttcttttattgagcagggtttattggatctgtctatcacgcgcacgagctttgaatggggtattcctttgcctaaaaagatgaacgatcctaagcatgtggtgtatgtttggctggacgctttattgaattatgcgagcgcgttagggtatttgaacggtttagacaataaaatggcgcattttgaacgcgctaggcatattgtgggtaaggatattttacgcttccatgccatttattggccagcctttttgatgagtttgaatttgcccttattcaaacagctctgtgtgcatgggtggtggacgatagagggcgtgaaaatgagtaagagcttgggtaatgttttagacgctcaaaagctcgccatggagtatgggattgaagaattacgctattttttattgcgtgaggtgccttttgggcaagatggggatttttctaaaaaagcgttagtagaacggattaatgcgaatttgaataacgatttggggaatttgttgaatcgtttgctaggcatggctaaaaagtatttcaattattctctaaaaagcaccaaaatcactgcgtattatcctaaagagctagaaaaagcacatcaaattttagataacgctaattcttttgtgcctaaaatgcaattgcataaggctttagaggaattgtttaatatttatgattttttgaataaactcatcgctaaagaagagccgtgggtcttgcacaaaaacaacgaatcagaaaaattagaagccttattgagtttgatcgcaaacacgctactacaatcaagcttcttgctctatgcgttcatgccaaagagcgctatgaaattagcgagcgcttttcgtgtagaaatcacgcccaataattacgaacgcttttttaaggctaaaaaattacaagatatggttttacaagacaccgagcctttattttccaaaattgagaaaattgaaaagattgaaaagattgaaaagattgaaaagattgaaaaaggggaggaagccctagcagaaaaagcagaaaaaaaagaaaaagaaaaagccccaccaacacaagaaaattatattagtattgaggatttcaagaaagtagagattaaagtggggcttatcaaagaagctcaaaggattgaaaaatccaataaattactgcgcttaaaagtggatttaggcgaaaatcgtttgaggcagatcatctcagggatcgctttggattatgagcctgaaagcttggtgggtcaaatggtgtgcgtggtggctaatttaaaacccgcaaagcttatgggtgaaatgagtgagggcatgattttagcggtgcgagataatgataatctggctttaatcagccctaccagagaaaaaattgcaggaagtttgatcagctaa

SEQ ID NO: 7458 - DNA, 1527 bp, Helicobacter pylori
  CDS (1)...(1527)
atgattttagtattagattttgggagccaatacacgcagctgatcgctagaagattgagagagagtgggatttatgcagagatagtccctttttttgaaagcgtagaaaacattcaaaaaaaagcccctaaaggtttgattttgagtggggggccagcgagcgtgtatgctaaagacgcttacaagcccagtgaaaaaatctttgatttgaatttaccaattttagggatttgctacggcatgcagtatctggtggatttttttgggggggtagtggcctatgcgaatgagcaagaatttggtaaggctattttagaaatcgttcaaaattctgtgatttttgaaggcgtgaagattaaaagccttgtgtggatgagccacatggataaagtcatagaattgccaaaaggctttactacccttgcaaaaagccctaattcgccctattgcgcgattgaaagcgataagatttttggcttgcaattccacccagaagtcattcaaagcgaagaagggggtaagattttagaaaattttgcccttttagtttgcggctgtgaaaaaacttgggggatgcagcatttcgctcaaagagaaatagtgcggttgaaagaaaaaatcgctaacgctaaggtgttgtgcgcggtgagtgggggcgtggattctacggtggtcgctacgctattgcacagagccattaaggataatttgatcgctgtttttgtggatcatggcttgttgcgtaaaaatgaaaaagaaaaagtccaagcgatgtttaaagacttgcaaatccctttgaacacgatagacgctaaagaagtctttttgtctaaattaaagggcgtgagcgagcctgaattgaagcgaaaaatcatcggcgagacctttattgaagtgtttgaaaaagaagccaaaaaacaccatttaaaaggcaagattgaatttttagcccaaggcactttataccctgatgtgattgaatccgtgagcgttaaagggccttcaaaagtgatcaaaacgcaccataatgtgggcggactgcctgaatggatggactttaaactcatagagcctttaagggaattgtttaaagatgaggtgcgtttgttgggtaaagaattgggcgttagtcaggattttttaatgcgccacccctttccagggcctgggcttgcaataaggattttaggcgagattaacgaaaataagatcaaacgcttgcaagaagcggatgctatttttatagaggagcttaaaaaagccaatttgtatgacaaggtttggcaagctttttgcgtgctgttgaatgtcaattctgtgggggttatgggggataatcgcacttatgaaaacgctatttgtttaagagcggtaaatgcgagcgatggcatgacagcgagcttttcatttttagagcattcttttttagaaaaggtttctaaccgcatcactaatgaagtgaatggtattaatagggtggtgtatgatattacctctaaaccaccaggaacgattgaatgggaatga

SEQ ID NO: 7459 - DNA, 2295 bp, Helicobacter pylori
  CDS (1)...(2295)
atgaaactgagcgtcaatgatttgaatgtttttgtcaatacgcctaaagatatagccaaactctgtgaagatttgagccgcttaggcttagaagtggagagctgtatcccttgtatcgctcctaaaaatgtggttgtgggtaaggttttagaaaaagccccccataaaaacgccgaaaaactcagcgtgtgtcaagtggatgtgggtaaagaagtgttaccagtcgtgtgcggggctaaaaatgtcgcgccaaaccaatttgcgccagtcgctctcaaaggagcgatcataggctcaaccacaatcgctaaaacggagcttagaggagttgaaagccatggcatgatttgctctagcattgaattaggcttccctaaaatcaatgatggcatcttggaattagatgaaagcgttggggagttggttttagggaaggaattacatgaatacgcccctttcaacacgcatgttttggaaatttcattgacccctaatcgtggggattgcttgagcgttttaggtattgctagagaaattagcgccttttatcacacgcccctaaaacccattaaagctttaaattttacgccaacaagcgatttgatcacgcttagtgcagatgaaaatattgagtcgcatctggcttattatttgatttgcaaccattctttaaaaacccctttaaatatcaagctttcgctcgctcacaataatgccttaagtgagaacgacctgaacaatttcatagaattcagtgcgcattttagtggggtaatattgaacgcttatagcctgaataaaacccctattgatttgatcatcaaaaacgatgaaaacaaccttgaaagcgtttatattaaccatcaaaaacgctccactatcgttataaagcatcaagatcaaaaagatttgagcgagtgtttgcttttagaggcaagttatactgatcctgtaagcctgtctttaaaattacacgctctaaaagataaaacgcttcaaaaagacaacgcccttgtttataggagcactagggggagcaaccctaatctatcagacggcttgaattttttaagcgctcatttgaaagcggcaattttagaaagcaaacaaactgagcattctttaaaggattgtgcccttacattccaacttgaagacattaccgaaattttggggcttgttatagaagcagaaaaaattcaaaacattttaaaaaatttaggctttaaagttagcacaaaagagccaaactcaaaaccccaaattttagaggttatcgttcccaatttcaggcatgacattaaaacgatccaagatattgccgaagaaatcttgcgctttgtagggattgataatctagtctcaaagcctcttcactgtgtcagcagtaaaaattcaaacccccattatgacacgcaccgcttttttgaaaaccttaaacacaaggctctcgcttgcggttttaaagaagtcattcattacgtgttttattctaaagaaaagcagcaaaaactgggctttgaagttttagaagatcccctagaattgcaaaaccctatcacaacggaattaaacaccctaagaacgagccttgtttgcgggcttttagacgccagcttaaggaataaaaatttagggtttaaaagcatcgccctttatgaaaaagggagcgtgtataactctaaaagagaagagattcaaaaactaggctttttagtaagcggcttacaaaaaaaagaaagctaccctcacgctaagggcaaggcttgggatttttattctttcgctgaatgcgtttcaagaattataggggattttagcttggaaaaactaaccactcaaacccccattaaccacccctaccagagcgctaaaatcattcaaaacaatgaaatcataggtgtgatcgctaaaatccaccccaaagtgatccaagaattagatttgtttgaaagctattacgctgagatagacgcttctaaactcaaacgccctgccatgctgttaaaaccctttagcatttaccctagcagtgtgagggatttgactctcatcattgatgaaaataccgcttttagcaagattaaaaaagccctaaaagacgctcaaatccctaatttaagcgaaattctaccccttgatatttttaaagaaagcggtaacaccatagccttaagcgtgcgttgcgtgatccattctttagaaaaaaccttaaatgatgaagaggtcaattcagccgtgcaaaaagcgcttgaaattttagaaaaagaatttaacgcccgccttaagggataa

SEQ ID NO: 7460 - DNA, 1575 bp, Helicobacter pylori
  CDS (1)...(1575)
atgtatcaagtagccatttgcgaccccatccatgctaaaggcattcaaattttagaagcccaaaaagacattgtcttgcatgattattccaaatgccctaaaaaggagcttttagaaaaactcatccccatggatgcgctcatcactcgcagcatgacccctatcacaagcgattttttaaagcccttaacccacttaaaatccattgtgagagcgggcgtgggagtggataatattgatttagaaagctgctctcaaaaaggcattgtcgtgatgaatatccctaccgctaacacgattgccgctgtggaattaacgatggcgcatttgatcaatgcggtgcgctcattcccttgcgcgaacgatcaaatcaaacaccaaaggttatggaaaagagaagactggtatggcacggaattgaaaaataaaaagctaggcatcattggttttgggaatattggctctagggtgggcattagggcaaaagcttttgaaatggaagttttagcctatgatccctatatcccttcttcaaaagccactgatttaggggtcatttacacgaaaaattttgaagacattttgcaatgcgacatgatcactatccacacccccaaaaataaagaaacgattaacatgataggcgctaaagagattgaacgcatgaaaaaaggggttattttaattaattgtgctagaggggggctttataatgaagacgccctttatgaagccttagaaaccaaaaaagtgcgttggcttggcattgatgtcttttctaaagagcctggcatccataacaagcttttagacttgcctaatgtgtatgcgaccccccatattggcgcgaacactttagaatcccaagaagaaatttccaaacaagccgctcaaggggttatggaatctttaaggggttcaagccacccgcatgctctaaatttacccatgcaagcttttgatgcaagcgctaaagcctacttgaatttagcgcaaaaactgggttatttttccagtcaaatccataagggcgtgtgccaaaaaattgaactcagtctttgcggggagatcaaccaattcaaagacgcccttgtcgcttttacgctagtaggggtgttaaaacccgttgtaggggataaaatcaattacattaacgccccctttgtggccaaagaaagaggcattgagattaaggttagccttaaagaaagcgcctcaccttataaaaacatgctctctttaactttaaatgcggctaatggcgcaatcagcgtgagcggcacggtgtttgaagaagatattttaaaactcactgagatcgatgggtttcatattgatatagagccaaagggtaaaatgcttttattcaggaatacggatattccaggcgttattgggagcgtggggaatgcgttcgctaggcatggcattaatatcgctgattttcgtttggggcgcaacacgcaaaaagaagccctagcgctcatcattgtagatgaagaagtttctttggaagttttagaagagcttaaaaacattcctgcatgcttaagcgttcattatgtggttatttaa

SEQ ID NO: 7461 - DNA, 1368 bp, Helicobacter pylori
  CDS (1)...(1368)
atgaataaagaaaataaaaaggtggaaaaaaaagaactttcgcgcattttgatcgctaataggggcgagatcgctttaagagcgatccaaaccattcaagaaatgggtaaagaatccatagccatttattctatcgctgacaaggacgcccactatctcaatacggctaacgcaaaagtgtgtatagggggggcaaaatccagcgagagttacttgaatatccctgcgatcatcagcgcggcggaattgtttgaagccgatgcgattttccctgggtatgggtttttgagtgaaaatcaaaactttgtagagatttgctcgcaccattctttagagtttattggcccaagcgcaaaagtcatggctttaatgagcgataaagctaaagccaaaatcgtgatgaaagaagccggcatgcctgtgattgagggcagtgatgggttgcttaaaagctatcaagaagctgaagaaatcgctgataaaatcggttatcctgtcatcattaaagcggccgctggtgggggcggaaggggaatgcgcgtcgtaggagataaatccaagcttaaaaacctctatctagccgcagaaacggaagctttgagcgcgtttggcgatgggagcgtgtatttagaaaaatttatcaacaagcccaagcacattgaagtccaaattctagccgacaagcatggcaatgtcattcatgtaggcgaaagggattgttcggtgcaaagacgccagcaaaagctcattgaagaaaccccggcggtggttttagaagaaagcgtgcgtaagcgtttgctagaaacagcgatcaaggccgctaaatacatcggctatgtgggggcggggacttttgaatttttgcttgattctaacatgaaagatttttatttcatggagatgaacactcgtttgcaagtggaacacaccattagcgaaatggtgagcgggttaaacctcattgagtggatgattaaaatcgctcaaggcgaagaattgcccaagcaagaaagcttttctctcaaagggcatgcgatagaatgccgaatcacagcagaagatcctaaaaaattctacccaagcccgggcaaaatcaccgaatggatcgcccctggtggggtgaatgtgcgccttgattcgcatgcgcatgccaattatgtcgtgcctacgaactatgattccatgataggcaagctcattgtgtggggtgaaaacagagaaagagcgatcgctaagatgaaaagggctttaaaggaatttaaagtagaaggcattaaaacgaccattccttttcatattgaaatgcttgaaaatgcggatttcaggcaagcaaaaatccacacgaagtatttagaagaaaatttttaa

SEQ ID NO: 7462 - DNA, 795 bp, Helicobacter pylori
  CDS (1)...(795)
atgatgaatgaaatcattgcagtggccaatcaaaaagggggtgtgggcaaaacgacaacagcggtcaatttagcggcttctttagcagcgcatgaaaaaaaaatcttgttgattgattttgacccgcaagccaacgccacttcaagcttgggttttaggcgcgataaaattgattatgatatttatcatgtgctgattggccgtaagcaaatttctcaagtgatcttaaaaacccaaatgccttttttggatctagtgccttctaatttgggtttagctgggtttgaaaaaaccttttatgacagccaagatgagaataaacgaggcgagctcatgctcaaaaacgctttagggagcgtggtaaagctttatgattatattattattgactccccgccggctcttgggcctctcacgatcaattcgctttcagcagcccattcggtgatcattcctatccaatgcgaatttttcgcccttgaaggtactaaattattgcttaacaccattagaatgttgcaaaaaagcacgaaccctaagctcaaaatcagaggttttttacccacaatgcatgtccctcaactcaatttgacaaaaggggttttagcggaattgtttaagtattttgactcagaattttttagagattcagctacaggtgagtatattatgatccctaaaagcgtgaaattagcggaatcgcctagctttggtaagcccattttgctctatgatattaaatctaatggcagtatcgcttatcaaaaattagctcaaagcattcttcaggggtag

SEQ ID NO: 7463 - DNA, 357 bp, Helicobacter pylori
  CDS (1)...(357)
atgaaaaaccgctacattcagcagtttgaagacgctcagttaaaagacaagagcatgccaacatttaaagccggcgatactttgagattgggtattaccattaaagaaggcgaaaaaacacgaacccaatattttgaaggcgtgtgcattgcgattagaggcaatggcgtggataaaactttttgcgtgcgtaaaataggggctaacaatatcggcgtggagaaaattttccctttttatagcgaaagtttggcgagcgttgaggtgttgcgcgtgggtagggtgcgccgcgcgaagctctactatttgcgcgataggagaggtaaggcagcaaggattaaagaagtccgccattaa

SEQ ID NO: 7464 - DNA, 690 bp, Helicobacter pylori
  CDS (1)...(690)
gtgaaattcagcgttttaacccttttcccgcaactcatcttgccttattttgaagattctattttaaaaagagcgttagaaaaaaacctttttgaattggaagtgttaaaccttagagattttagcgctaacaaatatcaaaaagcggatcacacgctcattggtgggggtgcggggcaaattttagaccctgagatgatagaaaacgcactccactctgttaaaaaccctaaacacacgatttttttaagcgcggtgggcaagcctttcaagcaaatagacgcgatgcgtttggctcaaaaaaagcatgtcgttttggtgtgcgggcgttatgagggctttgatgaacgctctattgaattgggtgctgatgaggttttttgtataggcgattttattttaacagggggcgagcttggggcgttgtgcttgatagatagtatcgctcgccacattcaaggggttttgggtaacgcccaatctttagaaaatgagagttttgaaaataattatttggagacccctaatttcgctaacgctgtttttaaatccaaagaaatcaataaaatccctgcacctttagaatattctaaaggaaatcatgctaaaatcaagcaactaaagcttgatttgtcaaaattaaggacaaaattttaccgccttgatttattcaaacagcacaaatcatga

SEQ ID NO: 7465 - DNA, 1347 bp, Helicobacter pylori
  CDS (1)...(1347)
atgtttcaagcgttaagcgatgggtttaaaaacgcgctcaataaaatccgctttcaagatgatgaaaaagcgctagacagagcgttagacgaattgaaaaaaacgcttttaaaaaatgatgtgcatcataaagtcgctagagaattgctcaaaaaagtggaaagccaaactaaagcgggtggcattggtaagcagcaatttttagacgctttagaaaagagtttgttagaaattttaagcgctaaagggagcagtggtttcactttcgctcaaacgccccccaccgtggttttaatggcaggtttgcaagggagcgggaagacaaccaccaccgctaaactcgcccactatctcaaaaccaaaaataaaaaagtgcttttatgcgcatgcgatttgcaacgcttagcagcggtggagcaattaaaggttttgggcgaacaggtgggcgtggaagtttttcatgaagaaaataaaagcgtgaaagaaatcgccaacaacgctttaaaaagggctaaagaagcgcaatttgacgtgttgatcgtggatagcgcggggcgtttagcgattgataaagagcttatgcaagaattaaaggaagttaaagaagtcttaaatccccatgaagtgctgtatgtcgcagacgcgttgagcgggcaagatggggtcaaaagtgcgaacacctttaatgaagaaataggcgtgagcggggtggtgttaagcaaatttgatagcgattctaaagggggtatcgccttaggcatcacttatcaattgggcttacccttgcgttttattgggagtggggaaaaaatccctgatttagacgtgtttatgcctgaaaggattgtggggcgtttgatgggggctggagatattatctcgctcgctgaaaaaaccgccagcgttttaaaccctaatgaagccaaagatttaagcaaaaagctcaaaaaagggcaattcactttcaacgattttttaaaccaaattgaaaaagtgaaaaaattaggctctatgagttctctgatctctatgattccaggtttagggaatatggcaagcgcgctaaaagacacggatttagaaagttctttagaagtgaaaaaaatcaaggccatggttaattccatgacgaaaaaagagcgagaaaaccccgagattttaaacggcagccgaagaaaaaggatcgctttagggagcggcttagaagtgtctgaaatcaatcgcatcatcaaacgctttgatcaggcgagcaaaatggcgaaacgactcacgaataaaaagggtattagcgatttgatgaatctaatgagtcaggctaaaaatcaaacgccccctaaaatgcgctga

SEQ ID NO: 7466 - DNA, 2619 bp, Helicobacter pylori
  CDS (1)...(2619)
atgaaacaagaacccaccacctaccaaccagaagagatagaaaaaaagatttatgaaatttgctctcatagggggtattttgaaatcaatggcaatgaaaaaatccaagaaaaaggcaaacgattttgcttgatgatgccccctcctaatgtgaccggcatcttacacatagggcatgctttaactttaagcttgcaagatattttagtgcgctataaacgcatggacgggtataagaccttgtatcagcccgggctggatcacgccggcattgcgacgcaaaatgtcgtagaaaagcagcttttaagtcaaggggttaaaaaagaagatttagggcgtgaaaaatttatccaaaaagtgtgggagtggaaagaaaagagcgggggagcgattttagagcaaatgaagcgtttaggcgtcagcacagctttttctaggactcgtttcacgatggataagggtttgcaaagagcggttaaattggcgtttttgaaatggtatgaaaaaggcctcatcgttcaagataactacatggtgaattggtgcactaaagatggggcgttgagcgatattgaagtggagtatgaagagcgtaagggggcgttgtattatattagatattatttagaaaatcaaaaagattatttagtggtggctaccacacgccctgaaactttgtttggcgatagcgcgattatggtcaatcctaatgatgagaggtacaagcatttagtggggcaacaagtaatcttgcctttaatcaatcgcacaatccctattatcgctgatgcgcatgtggaaatgggatttggcacagggtgtgtgaaggttacccctgggcatgattttaacgattatgaagtgggcaaacgccaccatttagaaacgattaaaatctttgatgaaaaagggattttgaacgcgcattgcggggagtttgagaatctggagcgattagaggctagagacaaggtcgtagcagcattaaaagaaaacgccttattagaaaagatagaagagcatgtgcatcaagtggggcattgctatcgttgtcataatgtggtagagccttatgtgtctaaacaatggtttgtcaagcctgaaatcgctcaaagttctattgaaaaaatccaacaaggtttggcgcgattttacccctctaattggatcaataattataacgcttggatgagggaattacgcccttggtgtatcagcaggcaattgttttgggggcatcaaataccggtattcacttgcgagaataaccaccagtttgtgagcctagacacccctttaagttgccctacttgcaagagtgaaaaactagagcaagataaagatgtgctagacacatggtttagttcagggctatgggcgttttccactctagggtgggggcaagaaaaaagcgatttgtttaatgaaagcgatttgaaagatttctaccctaacacaacgctcattaccgggtttgacatcctctttttttgggtggccagaatgctcttttgcagcgagtcgcttttaggcgaattgccttttaaagacatttacttgcacgccttggttagggacgaaaagggcgaaaaaatgagcaaatctaaaggtaatgtgatcgatcctttagagatgatagaaaaatacggcgcggatagcctgcgcttcactttagccaatttgtgcgctacgggtagggacattaagctttctactacgcatttagaaaataacaagaatttcgccaacaagctttttaatgcggcgagttacttgaaactcaaacaagaatctttcaaagataaagagcgtttgaatgaataccaaacggctttggggcgttatgcgaaatcgcgcttgaatcttgtcactaaagaggttcgtaacgctttagacaattatcgttttaatgacgccacgactttgttataccgctttttgtggggggaattttgcgattggttcattgaattttctaaagtggaaaatgaagcgatagacgagttagggagcgtgttaaaagaggctttaaaactcttgcaccctttcatgccctttatcagcgagtctttataccacaagctcagtaacacggaactagaaaacgctcattctatcatggtcatgccttaccctaaagaaatcgcgcaagatgaaaaactagagcatgaatttgaagtgattaaggattgcatcgtgtctttaaggcgtttgaaaatcatgctagaaaccccaccgattgttttaaaagaagcgagcgtgggattgagggagaaaatagaaaacacagagcgtttgcaaaattacgcccaaaaattagcgaaattagaaaaagtcagcgtgataacttataagcctttaaaaagcgtgagcgatgtgggtgaattttgccaaacttatgcggatttagaaaatcttgatttaagcccgctcattgctcgtttaaaaaagcaactagaaaaactggaaaaagaaaaactaaaactcaatttgcacaatgaaaattttgtcaaaaacgcgcctaaaagcgtgctagaaaaagccagagagagtttaaaaacgcttttagaaaaagagggtaagatccaacaagaattggatttgttagaacaaccatga

SEQ ID NO: 7467 - DNA, 1062 bp, Helicobacter pylori
  CDS (1)...(1062)
atgaaattcgctcttacagggggaggcacaggggggcatctctctatcgctaaagccttagccatagaattagaaaagcaaggcatagaggctatttatttaggctccacttatgggcaagataaagaatggtttgaaaatagccccttatttagcgaacgctattttttcaacacgcaaggcgtggtcaataaaagcttttttaaaaaaataagatctttattcttgcaagctaaagccgcatttaaggctaaagaaatcttaaaaaaacaccagatcacgcacaccattagcgtgggagggtttagcgcagggccggcgagttttgcaagcttgcttaataaaatacccctttatatccatgagcaaaatgcgattaaaggctctcttaaccgctacctttcccccaaagctaaagcggtgttttcaagctacgcgtttaaagataaaggaaatcatgttttaacctcctatcccgtgcaaaacgctttttttgatcacgctaggactcgcacggaaatcaagcatattttatttttaggcggttcgcaaggggcaaaagcgatcaacgaatttgccctattaaacgctcctaaactcaccaaacaagggattaagatcacgcacatttgcggccccaattcttatgaacaagtgcgttttttttaccaggaattggggctgttggacaagatagaattgttcgctttccacaacaacatcacagaagtcatgcacagagcggatttgtgtgtgagccgagcgggtgctagcagcgtgtgggaattgtgcgccaatggcttacccacgatttttatcccctacccttttgcgagcaataaccaccagtattacaatgtcttagaatttgaaaaagaaaacctatgctatgttgtgcctcaaaacgaattgttacccaaaaagctctttgaagtcattagaaagctcaaccaaaaagacgatcaaggcaataaaaacctaaccactatcagcgctaaattgcaacaaaaaatcgctaaagacggcgcaaaaaccatcattgaaacgattttaagcgcctaa

SEQ ID NO: 7468 - DNA, 654 bp, Helicobacter pylori
  CDS (1)...(654)
atggcattagattgggattttatgttgcactccatccctgcgttttttaaggggttaaaactcacgctttatatttccttttttgggattttgctctctcttttggtggggtttttgtgcgcgatcgttttgtattttaaaacgcgttttctctctcctgttgtctatatctatggcgaaatcgccaggaacacgcccctactcatccagcttttctttttgtattacgggttgaatgaaatcggtttgagcgctttagagtgtgcgattttagcgttagggtttttgggtggggggtatatgagtcaaagttttttgcttgggtttaagagcttggcttccattcaaagagaaagcgctttgagtttagggtttagccctttgaaaatgatgtattatattattctgcctcaaagcttaagcgtttccatgccttccataggggcgaatgtgatttttttactcaaagaaacttcggtggtgggcgcgatagccctaaccgatattatgtttgtggcgaaagatttgattggcatttattacaaaacgactgaaagcctgttgatgttaagcctcacttatttgatcgctttgctccctttgagcgctttgtttgtgatcttagagcgttcttttaaaaagaaagtggcttaa

SEQ ID NO: 7469 - DNA, 1176 bp, Helicobacter pylori
  CDS (1)...(1176)
atgatgataaccaaacaatcgtatcaaagattcgctttaatgcgggtttttgtgttttcgctttcggcgtttatttttaacaccacggagtttgtccctgttgcacttctgtcagacattgcgaaaagctttgaaatggagagcgcaacagtggggcttatgatcactgcttatgcatgggtggtgtctcttggctcattgcccttgatgctgcttagcgctaaaattgaaaggaaacgcttattgctttttcttttcgctctttttattttcagccatatcctttcagcgttagcgtggaatttttgggtgcttctcctttctcgtatgggtatcgcttttgcccactctattttttggtccatcacggcttctttagtcattcgtgtcgcgccaagaaacaaaaaacaacaggccttagggctgttagcgttagggagttcgttagcgatgattttagggttgccgcttgggaggatcattgggcaaattttggattggcgatccacttttggcgtgattgggggcgttgcgactcttataatgctgcttatgtggaaattgctcccgcatctaccgagtagaaacgccggcacgctcgcaagtgtccctatattaatgaaacgcccgcttttagtggggatttatttgcttgtgatcatggttatttctgggcatttcaccacttatagctatattgagccttttatcattcaaatcagccaattttctcctgacattacaacgctaatgttgtttgtgtttgggttagcaggcgtggtggggagttttttgttcggccgtttgtatgcgaaaaattcaagaaaatttatcgcttttgcaatggttttagtcatttgcccgcaactcttgctttttgtgtttaaaaacttagagtgggtgatctttttgcagattttcttgtgggggattgggattacttcactcaccattgcgttacaaatgagggtgttgcaactcgcgcccgatgccacggatgttgcgagcgcgattttttcggggagctataatgtggggattggatcaggagcgctgtttggcagtattgtgatccaccaattagggctagaatatattggctttgtgggtggggctttgggtttgttggcgctattttggcttagattcattacgataaaatttaaaaaaacttaa

SEQ ID NO: 7470 - DNA, 1041 bp, Helicobacter pylori
  CDS (1)...(1041)
atgaagacttataatgtcgctattgttggggctagtggggcggtagggcaagagctgattaaaggtttagaaaattcttttttcccaattaaaaaatttgtcccgctcgctagtgctaggagcgccggtaaaaagattagagctttcaataaagactatgaaattttagaaaccacgcatgaggtttttgaaaaagaagaaatagacattgccttttttagcgctggggggagcgtgagcgaagaatttgctataagcgcttcaaaaacggccctagtgattgataacacgagcttttttagattgaataaagatgtgcctttagtcgtgcctgaaatcaacgctcaagaaatttttaacgctcccttgaatatcatcgctaaccctaattgctccaccattcaaatgacgcaaattttaaaccctttacaccttcattttaagataaaaagcgttattgttagcacctatcaagccgtgagtggggcagggaacaagggcatagagagtttaaaaaatgaattaaaaaccgctttagaacatttggaaaaagaccccgctattgatttaaaccaagtcttgcaagctggggctttcgcttatccgatcgctttcaatgcgatcgctcatattgatacttttaaggagaatggctacacgaaggaagagctgaaaatggtgcatgaaacccataaaatcatgggcgtggatttccctatcagcgcgacttgcgtgcgcgtgccggtattaaggagtcatagcgagagtttgagtatcgcttttgaaaaagaattcgatcttaaagaagtctatgaagttttaaaaaacgcccctagcgtggttgtttgcgatgatcctagccataatctctaccccacgcccttaaaagcgagccacacggatagcgtctttatagggcgcttgaggaaggatttgtttgataagaaaaccttgcacggcttttgcgtggcggatcaattaagagtgggggcagccaccaacgcgctcaaaatcgctctgcattacattaagaacgcttga

SEQ ID NO: 7471 - DNA, 2079 bp, Helicobacter pylori
  CDS (1)...(2079)
atggctagaaaaaccccattaaacaggatcagaaatatcggtatcgccgctcacattgatgctgggaaaaccaccacttctgaaaggattttattctatacaggcgtgagccataagattggcgaagtgcatgacggtgcggcgacaatggattggatggagcaagaaaaagaaagagggatcacgatcacttctgcggcaacgacttgcttttggaaggatcaccaaatcaatttgattgacactccagggcatgtggatttcactattgaagtggaacgatccatgcgtgtgctagatggcgcggtttcggtgttttgctcggttgggggcgtgcagcctcaaagcgagaccgtgtggcgtcaagcgaataaatacggcgtgcctaggattgtttttgtcaataaaatggataggattggggcgaatttctataatgtagaaaaccagatcaagcaacgcttgaaagctaatcctgtgcctattaatatccctattggggctgaagacactttcattggcgtgattgatttagtccaaatgaaagcgattgtttggaataatgaaaccatgggagccaaatacgatgtggaagaaatccctagcgatttgttagaaaaggctaaacaataccgagaaaagcttgtagaagccgtagccgagcaagatgaagccttgatggaaaagtatttaggcggtgaagaattggatattgaagaaatcaaaaaaggcattaaaacgggttgtttgaacatgagctttgtccccatgctttgtggttcttcttttaaaaataagggcgtgcagactttattggatgctgtcattgattacttgccagcgcccacagaggttgtggatattaaggggattgatccaaaaactgaagaagaggtttttgtgaaatccagcgatgatggcgagtttgccggtttggcgtttaaaatcatgacggatccttttgtggggcaattgacttttgtgcgcgtgtatcgtggcaagctagagtccggtagctatgtgtataattccaccaaagacaagaaagagcgcgtgggaagactccttaaaatgcactccaataagagggaagacattaaagaagtttatgcgggcgagatttgcgcgttcgtgggcttgaaagacacgctgactggggacacgctttgcgatgaaaagaatgcggtggttttagagagaatggaatttcctgagccggtcattcacatcgctgtggagcctaaaacgaaagcagaccaggaaaaaatgggcgtagcgttaggcaagcttgctgaagaagatccaagctttagggtgatgactcaagaagaaaccggtcaaacccttattggtggtatgggtgaattgcacctagaaatcatcgtggatagattgaagagagaatttaaggtggaagctgaaatcggtcagccgcaagtcgcctttagagagactatccgctcaagcgtgagcaaagagcataaatacgctaagcaaagtggtggccgtgggcaatacgggcatgtgtttatcaagcttgagcctaaagagcctggcagtgggtatgaatttgtgaatgaaatttctgggggcgtgatccctaaagaatatatccctgcggtggataagggtatccaagaagcgatgcaaaatggcgttttggcaggctatccggtggtggattttaaagttaccctttatgatgggagctaccatgatgtggattcttcagaaatggcgtttaaaatcgctggctctatggcgtttaaagaagcgagtcgtgcggctaacccggttttactagagcctatgatgaaagtggaagtggaagtccctgaagaatacatgggcgatgtgattggcgatttaaacagaagaagagggcaaatcaattctatggacgatagattaggtttgaaaatcgtgaatgctttcgtgccgttagtggaaatgtttggttattctacggatttgcgatcagccactcaagggcgtgggacttactctatggagtttgaccactatggcgaagtgcctagcaatatcgctaaggaaatcgtggaaaaacgcaaaggctga

SEQ ID NO: 7472 - DNA, 468 bp, Helicobacter pylori
  CDS (1)...(468)
atgagaagaagaaaagcacccgttagggaggttttgggcgatcctgtttatgggaacaaagtggttactaagtttatcaataagatgatgttcgacggcaagaaaagcgtagcggaaaaaatcatctataaagcttttaataagattgaagaaaaaagcggtgaaaaagggattgaagtgtttgaaaaagccctagaaagagtgcgtcctttagtggaagtgcgtagcagaagagtgggtggggctacctatcaagtgccggtagaagtgagagcgagccgccagcagtcgctatctattcgttggattttagaagccactagaaaacgcaatgaaagaatgatggtggatagattggctaacgaacttatggatgcggctagcgataaaggtgcggcttttaagaaaaaagaagatgtgcataaaatggcagaagcgaataaagcgttcgcgcactatcgctggtaa

SEQ ID NO: 7473 - DNA, 408 bp, Helicobacter pylori
  CDS (1)...(408)
gtgcctactatcaatcagttgattagaaaagaaaggaaaaaggtggttaaaaaaacgaaatcacctgcattagtggaatgccctcaaagaagaggggtttgtactagggtttatacgactacccctaaaaagcctaactcggctttaagaaaggtcgctaaggtccgtttgaccagtaaatttgaagtgatcagttacatccctggtgaagggcataacttacaagagcactccattgtgttagtgcgtgggggtagggttaaggatttacccggtgtgaaataccacatcgttcgtggtgctttagacactgcaggggtcaataaaagaacggtttcacgctctaaatacgggactaaaaaagctaaagcaaccgacaagaaagcaacagacaacaagaaaaaataa

SEQ ID NO: 7474 - DNA, 8673 bp, Helicobacter pylori
  CDS (1)...(8673)
atgtcaaaaaaaattcccctaaaaaaccgcttgagagctgattttacaaaaaccccaacagatttagaagttcctaatttattattattgcaacgagacagctacgattctttcttgtattccaaagatggtaaagagagtgggattgaaaaggtttttaaatccattttccctatccaagatgagcataaccgcatcactttggaatacgcgggttgcgaatttggcaagtctaaatacactgttagagaagcgatggagaggggcattacctactctatccccctcaaaattaaagtgcgtttgatcttatgggaaaaagacaccaagagtggcgaaaagaacggcattaaggatattaaagagcaaagcattttcattcgtgagatccctttgatgacagaacgcacttcgtttatcattaatggggtggagcgcgtggtggtcaatcagctctacagaagccccggtgtgatttttaaagaagaagaatctagcacttcttcaaacaaactcatttacacaggacaaatcattcctgataggggttcgtggctgtattttgaatacgattctaaagatgttttgtacgctcgtatcaacaaacgccgtaaagtgcctgttaccattttattcagggcgatggattatcaaaaacaagacattatcaaaatgttctacccgcttgtgaaagtgcgttatgaaaacgataaatatttgatcccgtttgcttcattagacgccaatcaaagaatggaatttgacttgaaagacccgcaaggcaagattatccttttggcgggtaaaaagctcacttcaaggaaaattaaagaacttaaagaaaaccatttagaatgggtggaataccctatggatattttactcaatcgtcatttagctgagcctgttatggtagggaaagaagttttattggacatgctcacacagttggataaaaacagactagaaaaaatccacgatctaggcgtgcaagaatttgtgatcatcaacgatttagcgttagggcatgacgcttccattatccattctttctcagccgatcatgagtctttgaaattgctcaagcaaactgaaaagattgatgatgaaaacgctctagcggcgattcgtatccataaggttatgaaaccaggtgatcctgttacgactgaagtggctaagcaatttgttaagaaacttttctttgaccctgaacgctatgatttgaccatggtgggccgtatgaaaatgaatcacaagttaggcttgcatgtgcctgattacatcacgactttaacgcatgaagatattatcaccaccgttaaatacctcatgaagatcaaaaacaatcagggcaagattgatgatagggatcacttaggcaatcgcaggatcagagccgttggggaactattggccaatgaattgcattcaggcttagtgaaaatgcaaaagaccattaaagacaaactcaccaccatgagcggggcttttgattcgctcatgccccatgatttagtcaattctaaaatgatcaccagcaccatcatggaatttttcatgggcggtcagctctcgcaattcatggatcaaaccaaccctttgagtgaagttacgcacaaacgacgcctttcagcgctcggtgaaggggggttagtcaaagacagggtagggtttgaagccagggatgtgcaccccacgtattatggccaatttggtcccattgaaaccccagaaggtcaaaatatcggtttgatcaacaccctttccactttcacaagagtgaatgatttaggctttattgaagccccttataaaaaggttgtggatggcaaggtggcgggcgagacgatttatttgaccgctattcaagaagacagccacatcatcgctcccgcaagcacccccattgatgaagaagggaatattttaggcgatttgattgaaacgcgagtggaaggcgagatcgttttaaacgaaaagagtaaagttaccttaatggatctaagctctagcatgctagtaggggtagccgcatcgctcattcctttcttagagcatgatgacgctaaccgcgctctaatggggactaacatgcagcgccaagccgtgcctttattaagaagcgacgcccccattgtaggcacagggattgaaaaaattatcgctagggattcttggggagcgatcaaggccaatcgcgcaggcgttgtagaaaaaattgattctaaaaacatttacattttaggcgaaggcaaagaagaagcctatattgacgcgtattctttgcaaaaaaacttgcgcaccaaccaaaacaccagtttcaatcaagtccctatcgttaaagtgggcgataaagtggaagccgggcaaatcatcgctgatggccctagcatggataggggcgagttagcgttagggaaaaatgtacgcgtggcgttcatgccttggaatggctataactttgaagacgcgatcgtggtgagtgagcgcatcactaaagacgatgttttcacttccacgcacatttatgaaaaagaagtggatgccagagagcttaagcatggcgtggaagaatttaccgctgatattcctgatgtgaaagaagaagcgctcgctcatcttgatgaaagcgggatcgttaaagtcggcacttacgtgagcgctggcatgattttagtgggcaagacttctcctaaaggcgagattaaaagcacgcctgaagaacggctcttaagggctatttttggggataaagccgggcatgtggtcaataagagtttgtattgcccccccagtttggaaggcacggtgattgacgtgaaggtcttcactaaaaaaggctatgagaaagacgcgcgggttttgagcgcgtatgaagaagaaaaagccaagcttgatatggagcattttgaccgcttgaccatgctcaatagagaagaattgttgcgcgttagctcgctcctttctcaagcgattttagaagagcctttcagccataatggcaaggattataaagaaggcgatcagatccctaaagaagaaatcgcttcaatcaaccgcttcactttggctagcttagtcaaaaagtattctaaagaagtgcaaaaccactatgaaatcactaaaaacaatttcttagagcaaaagaaagttttgggtgaagagcatgaagaaaagctctctattttagaaaaagatgatattttgcctaatggcgtgatcaaaaaagtcaagctctatatcgctacaaaacgaaagcttaaagtgggcgataaaatggcaggaaggcatgggaataaagggattgtgtctaatatcgtgccggttgcggatatgccttataccgctgatggcgagcctgtggatattgtcttaaaccctttaggcgtgccaagccgcatgaacatcgggcagattttagaaatgcatttaggcttagtggggaaagagtttgggaaacaaatcgctagcatgctagaggataaaaccaaagattttgccaaagaattacgcgctaaaatgctagaaatcgctaacgccattaatgaaaaagaccccttgacaatccatgttcttgagaattgctctgatgaagagcttttggaatacgctaaagattggagtaagggcgttaagatggctatccctgtgtttgaaggcatctcgcaagaaaaattttataagctgtttgagttagccaagatcgctatggatggcaaaatggatctgtatgatgggcgcaccggcgaaaaaatgagggaacgcgtgaatgtgggctatatgtatatgatcaaactccaccatttagtggatgaaaaagtccatgccagaagcacaggcccttatagtttagtaacgcaccaacccgttgggggtaaagcgctctttgggggtcaaaggtttggggaaatggaagtgtgggcgctagaagcttatggcgcagcgcacactctaaaagaaatgcttaccattaaatccgatgatattagaggcagagagaacgcttatagggctatcgctaaaggtgagcaagtgggcgagagcgaaatccctgagactttctatgtcttgactaaagaattgcagtcgctcgctttggatattaatatttttggggacgatgtggatgaagatggagcgcctagacccattatgatcaaagaagatgacaggcctaaagactttagctctttccagctcactctagctagccctgaaaagatccattcttggagctatggggaagttaaaaagccagaaacgatcaattatcgcaccctaaaacctgaacgagacggcttgttttgcatgaaaatctttggccctactaaagattatgaatgcttgtgtggtaaatacaaaaagcctcgcttcaaagacattggcacatgcgaaaaatgcggcgtggcgatcacgcattctaaagtcaggcgttttagaatggggcatattgaattggccactcctgtagcgcatatttggtatgtcaattccttacctagccgtatcggcacgcttttaggcgttaagatgaaagacttagagcgcgtgttgtattatgaagcttatatcgttaaagagccaggcgaagccgcttatgacaatgaaggcactaagcttgtgatgaaatacgatattttgaatgaagagcagtatcaaaatatctcacgaagatacgaagataggggctttgtggcacaaatgggcggcgaagcgatcaaggatttgttagaagaaattgatttgatcaccttattgcagagtttgaaagaagaagtgaaagacactaactctgatgcgaaaaagaaaaaactcattaagcgtttgaaagtggtagaaagctttttaaattccggtaacaggcctgaatggatgatgctcacggttttaccggtattgccaccagatttaaggcctttagtcgcgctagatggcgggaagtttgcggtcagcgatgtgaatgaattgtatcgtcgtgtcatcaatcgtaaccaacgcttgaaacgcctaatggagcttggagcgccagaaatcattgtgcgcaatgaaaaaaggatgttgcaagaagccgtggatgtgctttttgataacggccgtagcaccaatgcggttaaaggggctaacaaacggcctttaaaatcgctcagcgagatcattaaaggcaagcaagggcgtttcaggcaaaaccttttaggtaagcgcgtggatttttcaggcagaagcgtgattgtggtggggcctaaccttaaaatggatgaatgcggattgcctaaaaacatggcgttagaactcttcaaaccgcatctgttatccaagcttgaagagagaggctatgccaccacgctcaaacaggctaaacgcatgattgagcaaaagagcaatgaagtgtgggagtgcttgcaagaaatcacagaggggtatccggtgctactcaaccgcgcccctaccttgcacaagcaatccattcaagcgttccatccaaagctcattgacggcaaagcgatccagttgcacccgttagtgtgctcagcgtttaacgctgattttgacggggatcaaatggcggtgcatgtgcctttaagccaggaagcgatcgctgaatgcaaggtgctcatgctaagctctatgaatatccttttacccgctagcggtaaagccgtagccattcctagccaggatatggttttagggctttattatctttctttagaaaagagtggggtcaagggcgagcataagcttttctctagcgtgaatgaaatcatcaccgctattgacacgaaagaattagacatccacgcaaagattagggttttggatcaagggaatattatcgctacgagcgcggggcgcatgatcatcaagtccattttgcctgattttatccctacggatttgtggaacagacccatgaagaaaaaagatattggcgtgcttgtggattatgtgcataaagtgggcggtatcggcattaccgcaacctttttggatcatttgaaaacgcttggctttaggtatgcgactaaggctggtatttctatctctatggaagatattatcacgccaaaagacaagcaaaaaatggtggaaaaagccaaagtagaagttaaaaaaatccaacaacaatacgatcaagggttgctcactgaccaagagcgttacaataaaatcattgacacttggactgaagtcaatgacagaatgagtaaggaaatgatgagcgctatcgcaaaagataaagagggctttaactctatttatatgatggcggatagtggcgcaagggggagcgcggcgcaaatccgtcagctttcagcgatgagggggcttatgacaaagccggatggcagtatcattgaaacgcccattatttctaactttaaagaggggttgaatgtcttagaatactttaactccacgcatggcgctagaaagggcttagcggatacagcgctaaaaacagccaatgcagggtatttgacaagaaaactcattgacgtttcgcaaaatgtcaaggtggtgtctgatgattgcggcacgcatgaagggattgaaatcacggatattgcggtggggagtgagctgattgaacctttagaagagcgtattttcgggcgcgttttattagaagatgtgatcgatcccattaccaatgaaatcttgctctatgcggacactttgattgacgaagagggtgctaaaaaggtggttgaagctgggattaaatccattacgatccgcaccccagtaacttgtaaagcgccaaagggcgtgtgcgcgaaatgctatggcttgaatttaggcgaaggcaagatgagctatccgggtgaagcggtgggcgtggtagccgcgcaatctatcggggagcctggaacgcagctcactttaaggactttccatgtgggcgggacagcgagcaggagtcaggatgagcgcgaaatcgtggcgagcaaagaaggttttgtgcgtttctacaaccttaggacttacacgaataaagagggtaaaaacattatcgccaaccgccgtaacgcttctattttagtggtagagcctaagattaaagcgccttttgatggggaattacgcattgaaacggtctatgaagaagtcgttgtgagcgtgaaaaatggcgatcaagaagctaaattcgttttaagaagaagcgatattgtcaagccaagcgaattagccggcgttggcggtaagattgaggggaaagtgtatttgccttatgctagcgggcataaggtgcataaggggggaagtatcgctgatattatccaagagggctggaatgtgcctaatcgcatcccttatgcgagcgaattgctggttaaagataatgaccctatcgcgcaagatgtgtatgccaaagaaaaaggtgtgatcaaatactatgttttagaggccaatcatttagagcgcacccatggagtcaaaaagggcgatattgtgagtgaaaaaggcttgtttgcagtggtagctgatgataatggtagggaagccgctcgccattatatcgctaggggttctgagatcttgattgatgataatagtgaagtgagcgctaatagtgtaatttctaaacccacgactaacactttcaaaacgattgccacatgggatccttacaacacccctatcattgcggactttaaaggtaaggtgaattttgtggatgttatcgcaggggttacggtcgctgaaaaagaagacgaaaataccggtatcaccagtttagtggtgaatgattacatcccaagcggatacaaaccaagcttgtttttagagggggctaatggcgaagagatgcgttatttcctagagccaaaaacttctatcgccattagcgatggctctagcgtggagcaggctgaagtgttagcgaaaatccctaaagcgaccgttaaatctagggatattaccgggggtctcccaagggtttctgaactctttgaagcgagaaaacccaagcctaaagatgtggcgatcctttctgaagtggatgggatagtgagttttggcaaacccattcgcaataaagaacacatcatcgtaacttccaaagatggtcgtctcacagattattttgtggataagggcaagcaaattctagtgcatgccgatgaatttgtgcatgcgggagaagcgatgacggacggagtggtttcaagccatgatattttaaggatcagcggcgaaaaagagctttataaatacattgtgagcgaagtccagcaagtgtatcgcaggcagggggtaagcattgccgacaagcacattgaaatcattgtgtctcaaatgttaaggcaagtgcgcattttagacagcggggatagcaagtttattgaaggggatttggtcagtaaaaaactcttcaaagaagaaaacactcgtgtgatcgctttaaaaggcgagccagcgattgctgaaccggtgcttttagggatcactagagcggctattgggagcgatagcatcatttcagcggcctctttccaagaaacgactaaagttttaacagaagccagtattgcgatgaaaaaagactttttagaagatttgaaagagaatgtggtgttggggaggatgatccctgtgggaactggcatgtataagaataaaaaaatcgtgttaagagcgcttgaggataactctaaattttga

SEQ ID NO: 7475 - DNA, 378 bp, Helicobacter pylori
  CDS (1)...(378)
atggcaatttcaaaagaagaagtgttagagtatattggttcattgagcgttttggagctttctgaattggttaaaatgtttgaggaaaaatttggcgtgagtgcgactccaacggtcgtagcgggtgcggctgtagctggcggtgcagcggctgagagcgaagaaaaaaccgaatttaatgtgattttggccgatagcggcgctgaaaaaatcaaggtgattaaagtggttcgtgaaatcaccgggcttggcttgaaagaagctaaagacgctaccgaaaaaacccctcatgtgcttaaagagggcgtgaataaagaagaagctgaaaccatcaagaagaaacttgaagaagtaggtgctaaggttgaagtcaagtaa

SEQ ID NO: 7476 - DNA, 495 bp, Helicobacter pylori
  CDS (1)...(495)
atgcaaaaacaacatcaaaggcagcataaagtagagctagtcgctaacttaaaatcgcaatttgatagtgccaaagcccttttaatttgcgattataagggtcttagcgtgaaaaagttggaagctttaaggaataaggctcgcattcaaggcattaaagtgcaagtgattaaaaacacgcttgctcatattgccatgaaagaagtgggttgtgctgatttggatttgaaagaaaccaatgtgtttttgtggggcgatgatcaaatcgctctctctaaactcgtgtttgatttccaaaaagagcataaagatcactttgtgttgaaagcgggcttgtttgataaagaaagcgttagcgtagctcatgtggaagcggtttcaaaactcccgagcaaagaagagcttatgggaatgttgctttctgtttggacggctccagcacgctattttgtgaccggtttagacaatttgcgtaaagcgaaagaagaaaactaa

SEQ ID NO: 7477 - DNA, 426 bp, Helicobacter pylori
  CDS (1)...(426)
atggctaaaaaagtagtcggagaaatcaaacttcaaatccctgccggtaaggcaaacccttcacctcctgtagggccggcattgggtcaaagaggggttaatatcatggaattttgtaaggcttttaacgaaagaactaaagacatggggagttttaatatcccggtcattatcacggtttatcaagataagagtttcacttttatcaccaaaaagcccccagtaacggatttaatcaaaaaagcttctggggttgaaaaaggctctgacaacccgcttaaaaacaagatcgcaaagctcacccacaagcaagtagaagaaatcgcgcaattgaaaatggaagatttaaacacaagcaccatggaagcggctaaaaaaatcgttatgggtagcgctaggagcatgggcgtagaagttgtggattga

SEQ ID NO: 7478 - DNA, 516 bp, Helicobacter pylori
  CDS (1)...(516)
atgttggatttgtcttatagcctggagcgtgtcttgcaagaagacccggcagctaggaataagtgggaggttctcttgctttatccgggcattcatgcactgctttgttaccgcctagcgcatgcgttgcacaagcggaggttttacttcatcgctcgcgcgctttctcagttggcgcgttttatcactgggatagaaatccacccgggcgctaagattgggagagggctttttattgatcatggcatgggtgtggtgattggcgagaccacagagattggagatgatgttaccatttatcatggcgtaactctggggggtacgggcaagtttaagggcaaacgccaccctactttaggcaaccgagtggtagttggggcaggggctaaggtcttgggcgcgatttgcgtgggcgatgatgtgaggattggggctaatgcggtggtgctttcagatttacccacgggttctacggctgtaggtgctaaagccaaaaccatcacaaaggatcgttaa

SEQ ID NO: 7479 - DNA, 2067 bp, Helicobacter pylori
  CDS (1)...(2067)
atggattttatcaccatcaactctggtaacagaaccgaagagttcgctctcaaacaagtggccaaacaagccactagctctttaatgtatcgcttaggaaaaacccttattttagcgagcgtgtgcgtagaaagagagcctgtgagtgaagattttttgcctttagtggtgcagtttttagaaaaatcgtatgcagccggtaaaatcccgggcggttttgttaaaagagaaggcagggcgcaagattttgaaatcttaacctctaggctcatagacaggactttacgccctttattccctaaagattaccgctaccctacgcaaatcactttaatggttttaaaccatgatattgaaaacgatttgcaagtttctgctttaaacgccgcttcagccaccctctttttagcccatatcgctcctattaaaagcgtgagcgcttgcaggatcgctagggtggataacgaatttatcattaaccctagcgcaagccttttgaatcaatccagtttggatctgttcgtgtccggcaccaaagagagtttgaacatgatagaaatgcgctctttggggcaaaaattaaacgctttagaagagcctttaatgttagaagctttagaattggctcaaaaaagtttgaaagaaacctgcgcgctttatgaagaggctttcacgccctatcaaaacgagctcctttttaaagagggcgaagggatagtccttaatgaaaggctgttggatttattaaaaaatcagtattttgatgaaatcatcaaaggcattgaaagttctgctttgagcgagcgagaaaatgttttcaaagaagtggctaaaaaaatcagcgaagcccactcagaattcagtttagaagaaattgaattgtctttagaaaaagtgaaaaaaaccgagatcagacgcatgattattcaagataagatccgcccggataagcgcgcgttagaagaagtgcggcccatttcaatagagagcaacttgctccctatggcacacagctccattttattcactagggggcaaactcaaagcttagtggtaggggttttaggcatggataatgacgctcaaacccatgagaatttggagcataaagcccctatcaaagaacgcttcatgtttcattacaatttccctcctttttgcgtgggcgaagcgagctctattggcgcgacttcaaggcgcgaattagggcatgggaatttagctaaaagagctttagaaacgagcattaaaaataaagagcaggtgatacgattggtttctgagattttagagagcaatggttcaagctcaatggcgagcgtgtgcgcagggtctttagccctttatgcaagcggtgtggaaattcatgatttagtcgctggggtggctatgggcatggtgagcgaaaggcaagatcacgccattttaagcgatattagcggtttagaagacgccgaaggcgatatggattttaagattgctgggaatttagaaggcattacggctatgcaaatggataccaaaatgagcggtatccaattagaggttttataccaagccttacttcaagccaaaagagcacggaaacacattttaaaaatcatgcatgaagcgaaagaaaagatcgtgatcaatttttcccatttgccccagactgaaatttttaatgtcgcaccagataaaattatagaaattatcggtcaaggggggcgtgtgattaaagagatagtggaaaaatttgaggttaagattgatttgaacacaccgagcggtgaagtgaaaatcatggggaataaagagcgtgttttaaaaactaaagaatttattttaaactatttgcattctttagatcaagaattggagcaatacgctattgatgaggtgctagaagctcaagtgaagagaatcgtggattttggggcgtttttaagcttgcctaaggggggcgaaggcttgttaagaaagcaaaacatggacaagtgtcaagtgatcttaaaagaaggcgatagcatcaggtgtagggtgattagtttcaataagggtaaaatcgctttggatttggcttaa

SEQ ID NO: 7480 - DNA, 2544 bp, Helicobacter pylori
  CDS (1)...(2544)
atggacattcgcaacgaatttttacaattttttcaaaataaggggcatgagatctatcctagcatgcctttagtgcctaatgacgctaccttgcttttcactaatgccggcatggtgcaatttaaagatatttttactgggattgtgccacgccctagcattcctagagcggcaagttcgcaattgtgcatgcgtgcaggcggcaagcataacgatttagaaaatgtcggttataccgcaagacaccacacgctttttgaaatgctagggaatttctcttttggggattatttcaaagaagaagcgattttgtttgcgtgggaatttgtaaccaagaatttagggtttaagcctaaagatttgtatatcagcgtgcatgaaaaagacgatgaagccgttaaattatgggaaaagtttgtgcctgttgataggattaaaaaaatgggcgataaagataatttctggcaaatgggcgatagcggaccttgcgggccttgcagtgaaatttacattgatcaaggcgaaaaacactttaaggggagcgaggattattttgggggcgagggcgataggtttttagaaatttggaatctggtgttcatgcaatacgaacgctctaatgatggcgttttatcccccttgccaaagcctagcattgatacaggcatggggttagaaagggtgcaagcgctattagaacataagctcaataattttgattcttcactatttgcacccttaatggaagaaatcagcgagcttacaggtttggattatgcgagcgagttccagccaagttttagggtagtggccgatcacgcaagagcggtagcgttcttactcgctcaagaggtgcatttcaataaagaaggccgtggctatgttttgaggcgcattttaaggcgggccttaaggcatgggtatttaatgggcttgaaagaagcgtttttatacaaagtcgtgggcgtggtgtgcgagcaattttctaacgtgcatgcgtatttgaaagagtctaaagaaatggtgatgaaagaatgctttgaagaagaagagcgctttttagagactttggaatcgggcatggaattgtttaacttgtctttaacgcatttgaatgaaaataaaatctttgatggcaagatcgctttcaagctttatgacacttttggttttcctttagacttgacaaacgacatgctaagaagccatggggcgtgcgtggatatgcaaggctttgaaaattgcatgcaagagcaagtgaaacgctctaaagcttcatggaaaggcaaacaaaacaacgccgattttagcgctattttaaacgcttatgcacctaatgaatttgtagggtatgaaacgacagaatgtttggctaacgccttagggttttttgatagcgattttaaagaaataacagaggcaaatcctaaccaagaagtctgggtgttgttagaaaaaacccctttttatgcagaaggtgggggggctataggcgataggggcacgctttttaaagacaatgaagaagcggctttggtgttagatacaaaaaacttttttgggcttaatttttcactccttgaaatcaaaaaagcgctaaaaaaaggcgatcaagtgatcgcgcaagtgagcgatgagcgcttagaaatcgccaaacaccatagcgcgacgcatttattgcaaagcgctttaagagaagttttaggctcgcatgtgagtcaagcagggagtttagtggaatccaaacgattgcgctttgatttctcgcatgctaaagcgctcaatgatgaagagttagaaaaagtagaagatttggttaatgctcaaattttcaagcatttgacaagccaagtggagcatatgcctttaaatcaagccaaagataagggagcgttagcgttatttagcgagaaatacgctgaaaatgtgcgcgtggtgagctttaaagaagcgtccattgaattgtgtgggggcattcatgtggaaaataccgggctgattggggggtttaggattgtaaaagaaagcggggtgagtagtggggtcagacgcattgaagcggtgtgcgggaaagccttttaccaactgactaaagaagaaaataaagagcttaaaaacgctaagactttattgaaaaataacgatgtgatcgccggcatcaacaaacttaaagagagcgtgaaaaacagtcaaaaagcccccgtttctatggatttaccggttgaaaaaatccatggcgtgaatttggtggtgggcgtagtggagcaaggcgacattaaagaaatgattgaccggttgaaaagtaagcatgaaaaattgctcgctatagtgtttaaaaaagaaaatgagcgaatcactctcgcatgcggggtgaaaaacgtgcccataaaagcgaacgcatgggctaatgaagtggcgcaaattttagggggcaaagggggcgggagagatgattttgcgagcgctggaggtaaggatattgaaaatttgcaagccgcgctcaatttagcgaaaaataccgctctcaaagctttagagggataa

SEQ ID NO: 7481 - DNA, 258 bp, Helicobacter pylori
  CDS (1)...(258)
atggaaagaaaacgctattcaaaacgctattgcaaatacactgaagctaaaatcagctttattgactataaagatttagacatgctcaagcacacgctatcagagcgctataaaatcatgccaaggaggttgacaggcaatagcaaaaagtggcaagagagggtggaagtggcgatcaaaagagcccgccacatggctttaatcccctacattgtggataggaaaaaggtcgtggatagcccttttaaacagcactga

SEQ ID NO: 7482 - DNA, 546 bp, Helicobacter pylori
  CDS (1)...(546)
atgtttaataaggtgattatggtagggcgtttgactaggaatgtggagttgaaatatttgcctagcggttcggctgcggctacaataggtttagccacaagcaggcgttttaaaaagcaagacggcacgctaggcgaagaagtgtgctttatagatgcgcgtttgttcgggcgaacggctgaaatcgctaaccagtatttgagcaagggttcaagcgttttgatagaaggccgtttgacttatgagagctggatggatcaaacgggcaaaaaaaattcccgccacactatcacagcggactcgttgcaatttatggataaaaagtcagacaatccccaagcaaactccatgcaagatagcatgacgcatgagaattttaacaacgcttatcccactaattataacgcccctagccaggatcctttcagccaagcccaaagctatccacaaaacgcttacactaaagaaaattcacaagcacagccgtccaagtatcaaaacagcgtgcctgaaatcaatattgatgaagaagaaatccccttttaa

SEQ ID NO: 7483 - DNA, 801 bp, Helicobacter pylori
  CDS (1)...(801)
atgaaattaaaatcttttggggtttttgggaatcccattaaacattccaaatcgcccttaatccataacgcttgttttttaacttttcaaaaagaattagggtttttggggcattaccaccccatattactccctttagaaagccgtatcaaaaacgagtttttacatttgggattgagtggggctaatgtaaccctaccctttaaagaaagggcgtttcaaatttgcgacaaaatcaaaggtatcgcgcttgaatgcgcttcagtcaatacgcttgttttagaaaatgatgagcttgtgggttacaataccgacgctttagggttttacctctctttaaaacaccaaaactaccaaaacgaccaaaacgctttgattttaggcgctggggggagtgctaaagccctagcgtgcggattacaaaaacaaggcttaaaagtgagcgtgttaaaccgctctgctaggggattggattttttccaacgcttgggctgtgattgttttatggagcctcctaaaagcgcttttgatttgatcattaacgccacttcagcgagtttgcataacgaattgcctttaaataaagaggttttgaaagggtattttaaagagagcaagctcgcttatgatttggcgtatgggtttttaacgccctttttgtctctggctaaagagttaaaaatcccctttcaagacgggaaagacatgctcatctatcaagcctctttaagttttgaaaaattcagcgattctcaaattccttattcaaaagcgtttgaagtcatgcgaagtgttttttga

SEQ ID NO: 7484 - DNA, 1008 bp, Helicobacter pylori
  CDS (1)...(1008)
atgaaagatattttaaacgctctctatcatcaaaaagacttgaacgatgaagaagtcaaaaagttattcacgctcattattgatgaaaaagtaagtcccgcacaacttggggcggttttgtgcgctttaaaaatcaagggcgagagctttaaggagattagcgtcgctgcaaccacgcttttagagcatgcccctaagccttttaatagcggcttggatttaatagacaattgcggcacagggggcgatgggctaaaaacgattaatatcagcacgattgccgcactcattgccagctctatggggttatctatggcaaaacatggatcaaggagcgtgtccagtcatagcgggagcgcggatttgttggaaaatttgggcgtgaatattgaaatgaaccccatgcaattagaaaattgcttcaaacaatcgcattttgggtttttattcgcgcctttataccatcaaagttttaaaaaatccgcccctttaagaaaagagcttttcactaaaacgattttcaattgcttagggcctttaatcaaccccttaaggccaaaaatccagcttttaggcgtgtatgacaaatccttgtgtaagaccatggcgctagcgttgaaggctttaggcgttaaaagggcgatggtggttaatggaggggggacagatgaaatcgtgttgcatgacattacgcatgcgtgcgaattgaaaaataacgaaattttagagtatgatttgagcgctaaagattttgatttacccccctatgatttgaaagaattacagattgaaaacgccaaagaaagcgttcaagcgtgtttagatattttagaaaataaaggcaaagattcgcatacaatggtggttgcggcgaatgtggcgagtttgttgtatttgagccatagggctaaagatttaaaagagggcgtgagcatgactttagagcatttaaaaaccaaagcgccttatgcgcatttacaaaaaatcataaggctaagccatgcctag

SEQ ID NO: 7485 - DNA, 351 bp, Helicobacter pylori
  CDS (1)...(351)
atgagacacaaacacggataccgcaagcttgggagaactagctcgcacaggaaggcgttattaaagaatttagcgatcgctttgattgagcataacaaaattgaaacagggatttataaggctaaggaattgcgcagttatattgaaaaattgacgacagtggctcgtgtgggcgattttaacgcgcaccgccatgtttttgcgtatttgcaaaacaaagaagccacccacaagcttgtaaccgaaatcgcacccaaatacgcgcaaaggaatggcggatacaccaggatccaacgcaccacttttagaagaggggacgcttccactctggccaccattgaatttgtgtga

SEQ ID NO: 7486 - DNA, 1035 bp, Helicobacter pylori
  CDS (1)...(1035)
atgaaagttatcaaaacagcacctttgatcccatcagaaattaaggtgctagagaaagagggcaatcgggttaagatttctctggctccatttgagtttggttacgctgttacgctcgctcaccctattagaaggctcttgcttttaagctctgtggggtatgctcccgtaggtttaaagattgaaggtgtgcatcatgagtttgactctttaaggggggttactgaagatgtgtcgctttttatcatgaatttaaaaaatatccgctttatagccaaggcgttagtggggcaggatagctctttagaaaaccaatcggttgtggtggattattcttttaaagggcctatggagcttagggctagggatttgaattctgatcatatagaaatcgtcaatccggaaatgcccctagcgacaatcaacgaagacgctcaattgaatttttcgctcattatctataaaggaatggggtatgtcccaagcgaaaacacaagggaattgatgcctgagggctacatgccattagacggctctttcacgccgattaaaaatgtggtttatgagattgaaaacgttttagttgagggcgatcctaactatgaaaaaatcatttttgatattgaaacggacgggcagattgacccttataaagcgtttttatcagcggtgaaagtgatgagcaagcaactgggcgtttttggcgaaagacccattgctaacacggagtattcaggtgattacgctcaaagagatgacgctaaagacttgagtgctaagattgaaagcatgaatttgagcgctaggtgttttaattgcttggataaaatcggcatcaagtatgtgggcgaattggttttgatgagcgaagaagagcttaagggcgtgaaaaacatgggtaaaaaatcctatgatgaaatcgctgaaaaattgaatgatttgggctatccggtaggcacagaattaagccctgaacaaagagagagtttaaagaaaagattagaaaaattagaagataaaggaggtaacgactga

SEQ ID NO: 7487 - DNA, 219 bp, Helicobacter pylori
  CDS (1)...(219)
atggcaagagatgatgttatagaagtggatgggaaagtgattgaggcgttgcctaacgctacttttaaggtggagttagacaataagcatgtggtgttgtgccgtatttctggaaagatgcgcatgcactacattaggattgctttaggcgatagggtcaagctagagcttacgccctacagtttagacaagggtcggataacttttagatataaatga

SEQ ID NO: 7488 - DNA, 1263 bp, Helicobacter pylori
  CDS (1)...(1263)
atgaataaagccattgctagtaagatactcatcactttgggttttttatttctctacagagtcttagcttatatccccattcccggcgtagatttagcagcgatcaaggctttttttgacagcaattccaacaacgctttggggttgtttaacatgtttagcgggaatgcggtttctcgcttgagcatcatctctctgggtatcatgccctatatcacttcttcaattatcatggagcttttgagcgcgactttccctaacctggctaaaatgaaaaaagagcgagacggcatgcaaaaatacatgcaaatcgtgcgctatttgaccattttaatcaccctaatccaagcggtgagcgtttcagtggggttaaggagcattagtggaggagccaatggggcgatcatgattgatatgcaagtctttatgatcgtttcagcgttttctatgcttacagggacgatgttgctcatgtggataggggagcaaatcacgcaaagaggcgtagggaatgggatcagtctcattatttttgctgggattgtttcagggatcccatcagccatttcaggcacattcaatctagtcaatacgggcgtgatcaatatcttaatgctcattggtattgtattgattgttttagcgacgatttttgcgatcatctatgtggaattagccgagcgcaggatccctatttcttatgcgcgtaaagtggtgatgcaaaaccaaaacaagcgcatcatgaattacattcctattaagttgaatttaagcggggtgatcccccctattttcgcttcagctttgctcgtgttcccttctacgattttgcagcaagccacaagcaacaagaccttgcaagcgattgcggattttttaagcccacaagggtatgcgtataacattttgatgttcttactcatcatctttttcgcttatttttattcttctatcgtgttcaattctaaggatattgcggataatttgaggcgtaatggcgggtatattccagggcttaggcctggagaggggacttcatcgtttttgaatgctgtagcgagcaagctcactttgtggggttcgttgtacttggcgctcatttctaccgtgccttggattttggttaaggctatgggcgtgcctttttactttggaggtacggcggtgctgattgtggttcaagtcgctattgataccatgaaaaagattgaagcgcaaatttatatgagcaagtataaaactttaagcgcggtaggcttttaa

SEQ ID NO: 7489 - DNA, 462 bp, Helicobacter pylori
  CDS (1)...(462)
atgacagaaaggaaaggtatggaagagattaacagagaagagtttcaagaagtcgttgtgaatattggccgtgtaaccaaagtggttaagggcggtaggcggtttcgttttaacgctttagtggttgtgggcaataaaaatgggcttgtaggctttggtttaggcaaggctaaagaagtccctgatgcgattaaaaaagcggtagatgatgcgtttaaaaacctaatccatgtaacgattaaaggcacgactatcgctcatgacattgagcataaatacaacgcaagccgtattttactcaaaccggcaagtgagggaacgggggtgattgctgggggttcaacgcgccctatcgtggaattagcaggcattaaggatattctaaccaaatctttaggctctaataacccctataatgtggtgcgcgcgacttttgacgctctagctaaaatcaaggcgtag

SEQ ID NO: 7490 - DNA, 537 bp, Helicobacter pylori
  CDS (1)...(537)
atgtcaagaatcgggaaaagaatcattgaaattccaagctctgtgcaagcgagcgttgaagggagcaagcttctttttaaaaacaataaagaaaagcatgagttagaaactcacaaccgagtgaaaatcacgcttgaaaacaaccaattgagcttccagcctgtgggcgaagacgcgcagtttagggcttattgggggacttatggggctttagcgaataatattgtaataggattaagcgccggtttcagtaagactttagaagtcaatggcgtgggctataaggtggctttgggtcataaaactttggatttgagtttgggttttagccacccggtgaaataccccattccagcggggattgaaatggtggtggaaaaaaacacgatcactatcaaagggagcgataagcaacaagtagggcaagtcgccgctgaaatcaggagcttcagacccccagagccatacaaaggcaagggcgtgaaatacagcaatgaagtcattattagaaaagctggtaaaacggctaaaaaataa

SEQ ID NO: 7491 - DNA, 396 bp, Helicobacter pylori
  CDS (1)...(396)
atggtaaatgatataattgcagattcattaactcgtttgagaaacgcttctatgcgccgattagaattcacacagctttattacgcaaagatcgtggtttctattttagagatttttaaagaaaaaggtttcattaaagatttcaatgtcaaagataaagacaagaaacaatcggtttatgtgcagttggcttatgatgaaaaagggcattcaaaaatcagcgaagtgaagcgcctaagcaagcccggtcgtcgtgtgtataagcaaaaaaacgagttgaagcgctttaaaaatggctatggcgtgattgtggtaagtacttctaagggtgtgatcactaacgaagaagcttacagacaaaatgtcggtggcgaagtgctttgcagcatttggtaa

SEQ ID NO: 7492 - DNA, 546 bp, Helicobacter pylori
  CDS (1)...(546)
atgtttggtttgaaacaattttatcaaaatgaagtgagggcgaaactcgctcaagaattagacatcaaaaaccccatgcttttacccaagctagaaaaaatcgttatcagcgtgggcgctggggctcatgcaaaagacatgaaaatcatgcaaaatatcgcacaaacgatttctttggttgcagggcaaaaagccgtgatcactaaagcgaaaaaatccgttgcaggctttaagatcagagaaggcatggcggtaggggcgaaagttaccttaaggaataaacgcatgtataatttcttagaaaagctgattgtgatttcattgcccagagtgaaagactttagagggatctcacggaatggctttgatgggcgtgggaattacacctttgggatcaatgagcagttgattttcccggaagtggtttatgatgatattatggtcagtcatggcatgaacattactatggtaacttctacggacaacgataaagaagcgttcaagttgttagaattgcttggattgccttttgcaaaagtgagataa

SEQ ID NO: 7493 - DNA, 261 bp, Helicobacter pylori
  CDS (1)...(261)
atgaatacaaaagagccgcataaaaggctagtgcaaggcaaggttatcagcaagtttgctgaaaaaagcgctgtgattcttgtggaaagaaaagtggtgcatgaaaaataccgcaagattgttaaaaagtttaaaaaatacactatccatgatgaaaacaatcaggtgaaagtaggagattttgtgagcgcgattgagtgcagaccgctttctaaaaccaagtccttcacgcttaaagaaattttagtagtgggagtataa

SEQ ID NO: 7494 - DNA, 201 bp, Helicobacter pylori
  CDS (1)...(201)
atgaaatatactgaattgaaagataaaagtatcaaggagttagaagagttgttgcatgctaagaaagcggagctttttgagttgcgcgttaagttaaagaacatgcaattgagtaatcctaacgagattaagaaagccagaagaaatatcgctcgcattaacacggctattaacgcgtattattcttctagcgttgagtaa

SEQ ID NO: 7495 - DNA, 705 bp, Helicobacter pylori
  CDS (1)...(705)
atgggacaaaaagttaatccggtaggtttgagattaggtattaataggaattggacttccagatggttccctagcactcgcaccgctccaagcaatattgatgaggacaataagattaggaaattccttaaaaaagagctttattatgccggcgtgagcgagattgtgattgaaagagcggctaaaaaactgcgcgttacggtcgtagcggctcgcccagggcttatcattggtaaaaaaggcgtggatattgagaaggtcaaagaaggcttaaaaacgctcatcaaaaaagaagtctccattaatatcaaagaagtcaaacgcccccaagctgacgcccaattagccgcagaaaatgtagccacccaattagaaaaaagggtcgctttccgccgcgcgatgaaaaaggtcatgcaagcggcgttaaaatccggtgctaaagggattaaggtgcgcgtttctggccgtttagcaggggctgaaatcgctcgcaccgaatggtatatggaagggcgcgtgcctttacacactttaagggctaagattgattatggctttgctgaagcgatgacagtatatggtattattggcgtgaaagtgtggattttcaaaggggaagttttacaaaaaggtatccaatttgagaaaaaagaagaggctaaagaagaaagagagcctagaagaagcagaagagggaggcaataa

SEQ ID NO: 7496 - DNA, 369 bp, Helicobacter pylori
  CDS (1)...(369)
atgagcaaagcgttattaaaatttgtgcgtttatctcctactaaagccagattgattgcaagacagattcaaggcatgaacgctgaattagcgatcgctagtttggaatttacgcccaataaagcggctagagtgctttcaaaagtggtagcttctgcggtcgctaacggctcattggacgccaagagcgctttaattgtttcttgcagagtggatgctggccctgtgcttaggcgctccattccaagggctaaaggtagggccacagccattagaaagccaacatctcatgtatttgtagaagtagcagaagggaaagaaatgaaatcttctaaaagccataaaaaaaatcaagcagaaggtaagtag

SEQ ID NO: 7497 - DNA, 282 bp, Helicobacter pylori
  CDS (1)...(282)
atgtctaggtcaattaaaaagggtccttttatagacgaccacttgatgaaaaaaacgctcaaggcaaaagagggtaaggataaccgcccgattaaaacatggtctagaagaagcaccattttgcctgaaatgattggttttacctataatgtgcataatggcagggtttttgtccctgtgtatatcacagaaaaccatgtgggttataagttaggggaattcgctcctacaagaacttttaaagggcacaaaggcagtgtccaaaaaaagattggcaagtaa
